United States Patent Application Publication US 2015/0240253 A1 - sequence listing, part 20

SEQ ID NO: 91562 - DNA, 609 bp, Zea Mays
gtaggtcgtcgttacacaaaggcacggagcattgcttctgatgcaattcttaagcctttcttaccgatagaaacgtccgcgcgcgcaccgctggtccatgaggtcttttttccttatgtggccgcttcgctttcattctgttgtggtatcaagagatcagatggtggagaaccatactgtgaagtgcctctgcctcctaaacgtgtctggactctgaactgactacaactccttgtgacgacggacggaataattagtacttgaattgcacggcaataaacatgcttcgagcctgaattccggcagcaacacgggaggatctctttccctgcgtctcaatgccgcatcagtgcgtagcagatgagctcacactaaaatctgccgtcagatactaagatttgacccaatagtagtgcaagttgtaatgaaacgacaacaaatacgccagtgaaaggcaccgctgattcgttcgtagtagcgtgacaggtcaaatcagaatacgtcgattcctgtcgctgttctgtcattatacaggagtagtagctattatttatcgccttgctgatttcttccactggtttcatcaacaggaagtgatgtcagaaatga

SEQ ID NO: 91563 - DNA, 783 bp, Zea Mays
ggaagtcaaacattagattaactaccatccattcagaaaaggaacaaacaaatagataaaggtctatggaccacaatgttattacggtgtcgtctaggtgccgactaggagtctaggtgcccgaccggacttgtcgtgatgcgttgtcttgcttgaaaccaacacgacactcgtctataaagtatggtgtcgtgacgaggatgcctagacgtcgggccgtgcactttgtagggaggtgaatcgaacctatagataggtagtatttatgaactaaacgtcgtggacaaactgctgccgccagcaacttctccgtggacaagccattgccaacaacttctctgaggtcaaactgccattaatcctctgcctcccattccacatctgttgctctacttggcgtgcgccgcttagctccactctactcaaaacttgacagtcggcaggacacgagaaggactaaggatgatgagaggaagaggaccgattgatcgaggactgattgagtaaatggtagaactagttggtcacctaactgtcacctagacaggcgtccaaacgccctagaggtgactcagtaagtcacctcgccagggtgccgtgataaccatgatagaccatcaacaaaaatggctacaaccaagcaaaaagtatggctatctagaccacatacttcaccatagacaatgcactaataaattcactcgatttgagtagcaggtgcacatatttttttaagtcaaaactcctatagtaagctcttccagtagccaatttcggatgctc

SEQ ID NO: 91564 - DNA, 459 bp, Zea Mays
gctgcaatatggattaaaaattctataagtttatatgaaatgatgatatagatgcagacaataaaatttcaagaacaaactcaatttcattttttagatagtatatgagattgacaaatcatggacacaaagtgaagataatacaggtgttctcctctgtcggttgcatttggcattaaacttttacatgcgtgtatatcacattttctctacatgtatggattttttgcgagctttcaaacttataggtatgttttatgttttttaagattgcacctagaagggatttgcacttaatacaatcccttcgtatagatgtcaatatatgtaaagcaccatcaatcctacctccccggagaaacttacaagttattgtaccacaatctcataactcatgagacccatataaccatattgcgggaaacaaagatgctttgtatatactcaggcacaaggaag

SEQ ID NO: 91565 - DNA, 359 bp, Zea Mays
gcctgatatgaggaaaatacttgggcgtgatacttcctagacaaatactccgggtgggacctaggcccaactggatcctagcttcgacaacgcgtctgctgctgcgttgcggtctctttccacgtgatggaattccaacccttcaaacttgtcgtctaattttcggacggctgtacagtacttgcccatagaatcagtcgagcaatcccaatctttatttatctggcttatgaccactagtgaatctccgaataccattaacctcttagtgcccagtgatatggcgatgttcaacccatggataagtgcctcatattctgctgcattatttgatgctgggaataatagctgaagagcgt

SEQ ID NO: 91566 - DNA, 729 bp, Zea Mays
catccctggcacgtccctccctggtcgtcggtaggactccctctgctcacctggccgtcctcgatccagtgcgcccctcctccctattcggccatcctcaaaccctcgctgtgaacgcccgctccgtcgtggcggatttgagatccaactggggcacccgccattgatggcgctcggggaattgggagtgaaggaatcgcgcagcatcgcatgaactctggtctgtgtcatggtccatcactggagctttgccattacataggagggaccgtccgcaggataacctggtgaagagcagcgatcggggtcttctctggcgtcacgaaatcaccgtgcgccatggccggccgggttagctcctccaaatgctggtaaggcctcacccactccgctcgccttgatgtcatctaatcttagtattaagtgccatcgactgccgcggatcgcgtggccgtggatttcctcgttggaggtttagtctagccgcggatccgcctgcgcgtaatgtgtcgtcttcatgcttgctatcggtgcgccgttccccggattgggttcgctatgatcttagacctataccatcgctaccagtttagggattaggccttggggcacctgatggctttgctccggcgaacccgccaccgtagtgcaggggcggcgctgccgcgtttggtgagggagagaagtcgaatcgtgcgccgtccgatccgcttcgaatgggcgagatta

SEQ ID NO: 91567 - DNA, 523 bp, Zea Mays
atttaaataggctctggattgggcctcaaatactgtgaagcgcaggggctctagtgaaaaagagtccaagactcaggctatcactggactggaccgcgggttaattgcctaaaaacttaaggtctcttctgcaaaatgtgcaagccgaaggggtacggaaggatcgtggccgctagattagatttaaacagcccggattaaatcgcaactcatgtgaaccggtgtgcgatctcaaccactggatcccccatcaacggagtagattttaagtgactaaatccgctctaggtcacccgatcacggatcgacggctacgattcaactgaacgaaggggtatgatgtaatctaatcctagccgtccaagaaccgatcgacgacgtctggtccatcttctacccccagcgcgacagagcggtggcatggcatagaccgcggtggccatcaccggcgagcccgactaattcgcgcggacggatcccgacgaccatcccgaagacctctaaacacgacattggatcaaca

SEQ ID NO: 91568 - DNA, 411 bp, Zea Mays
ttaatggtcacttcgttgagccatcctttttttccacaaagagtatgtgggctcgccatggtgacgaactaggccggataaagcctttctctaatagttatgctattttcttctttagctcacctaaatctttaacatccatcctatatggccttttagaaataggtgtggtgccgagttttaggttgattgataattctatatctcaatcaggcgacatacctggcaaatcctatggaaaaacatatgggtattcataaaccattctgatggcctctagaaacttctcttctacttgattcatcacggcaactgcctccgctagcatactgacactaacctatattctttctccttgcggacttgtcaaggtaaccattctcttggcatagaagattactttgtcataac

SEQ ID NO: 91569 - DNA, 442 bp, Zea Mays
catttgaggccaaaggttgttgtggcttagggtcctagagttgaacatgttgcgagatgtagggtgaatggtatgaagatgtactaatcacttccttcgcctgagatggttgagtagctgcaacaacaagttcttctactgtgacctttgtcctctccacggaacacatattatggcttctttgtctatgttaaatctgcctctgaaactttgacctcctcttcctcctctcgaagctagtgggcgaaagttgttttaggaagattgttgttgggtgcctgattcctaaggttgtcttacctgaccctaagactgagcagtcttttcttcattcggagccgagttgtgtatgcttcgaatgtgctttgggtggaaccttcctccaaagcccctgatggtttctatatatctttgtgcttcttcccttctttggcaaaaatca

SEQ ID NO: 91570 - DNA, 869 bp, Zea Mays
gtgctagttttattttaatattgatacaggccaaaacttggttgcaaattgcaaaaaggctaatgccagacggtcgaatcatggtaaattgtggtggatcagacactgaagaatctctctcatcgccttgggttcaaaaccctacagttaaagcactttgttccgcatttcctggacaggtatggtaccattcatcagcaatacacgtatttggacttcaattactaaagacacttatttcaactgctagtttgctactagttggtgacaatttcgaagcagtgatttttgaagtatgaaagagtttgtgtttgttgtttcgtcctctttgtactgttagcatttttcctctgcactaaatacaatgcacctttattattgtgtgtgacatattactatattttaggattaattgtatacatgccactctacttttgcaaaattagatggttagttcattttttatgccatgtcgtggcatgaaaacgaactaaattttaggatagccatatcgttttttgtaaacttgcaaaaaaaaatgtcccactgaactttatgcggtagcctaacatgaactttgctaaactgtaaagatatagaagccacattctaaactcttgtagagtaagggaatttttagcctaggatgccagtttattgcgacctgttagatcagttaccttatgagaaattgggcagtatcgtgccaccatttggccctagactgttttgctaaatgaaacgttgttgaattgcaggtaagctggaagagactatcggagaaagagagtgtaaactatgttgccctgactggacctctcccagacctggacgggtggtcggcgtcggttcctagtgagctaagcacg

SEQ ID NO: 91571 - DNA, 432 bp, Zea Mays
cggggtagggttttggtttactcggcaatggatcgtcgcaggtgttgcgctgccgccgtccagtcggccagggaagaagaaagctctggtgccgtctgatctcctttagatggctcagattagatatcgaataccctttcgcccactttcgatctaaatcgtagatctacaaatgggcggatctgatcgtgacttgccacgtccttgatttgggctgggggatcacgatccaacggccgaaagcgcataccgattcataacccccgtcgatcgaatcgtgaccgtccactcatgatgtggcggccagggtttctagataccccttcggcccgacctttttactaaagagaccccgaatttatttacaattaacctgccgtccttagtagtgagagaataattgaagtttagtcctgttatttataagttagc

SEQ ID NO: 91572 - DNA, 533 bp, Zea Mays
ttcctgttctatacattttgcttgggccattgttgcgtctgctcaattatttgttacctactacaagggctgttatgagcatcgcccaaaagaaatgattgttgagcatctccaactgtaaattttaggtgttccgaggtaaaagcagatatctgaaaaccttatgacttgtctccctcatcttttattcaccggcagctactggggatctggttttcagagggtctcttcatgcttgccggccgaataggcaggtcaaaacgaaggttgaattggatgatggatgctctgaattttgaatacccatattacgatagacttaacaaaggggccgacggagcgaaaagaaaaagggttatcagcattctgagtaggcaaactgtctggtctgttaaggaagaccaagataatttgaagaagatgaaaacaatgtcggagctgaaggcaatgactcttaaaaaacggaagcttgctgaagaatcttggaagacgaagacacaagatgtgctgaaaccaattgcaaacccttcgtc

SEQ ID NO: 91573 - DNA, 648 bp, Zea Mays
tggtctatacttctctcaatctattagatctgatctcacccttgtgcttgcgacatctttgtagatgccccctgaccataactttttttgtctggtgggattcttccctcctccgtcattaaattgctaccttttgactatctttattcccttagttttgacatgctcataccattagattcttcaatactcttgttcaaatacttacacctgaatttctcctgcccacttaaacattttagtttatatgtccatgacctttctgtcttttaagaccctttcctctttggttgttaagtcgctatcttttggcaatttcttgtctcttggtattggtatgctcatgtccttgaaatctttcatactctcatcttttttatgcttacctttatatcccaaggcctgattaacacatttcagttaacttgcccttgaccaccctttgtttcttaatcatccaggaatggtcgttctattttgcacatccttggaaatcccgttgttgccttgtaacttccctcggtaatgaattttttatttgaactcttctgttggaacctcacttatcttatcttttattgttttctccacttcgtcagtcttgccttaactctatccttggttatgcttttcatgatcatcatcttt

SEQ ID NO: 91574 - DNA, 642 bp, Zea Mays
gaagaagctagttcgttttagtggagaggaaattactctgaagccagaaaaggatgaggtggttgtttttaaaagcttctttaaagcaggattgagatttcctttgcatgagatgattgcggatgtgttggagaagtttgggatttatcttcatcagctaactcctaacgccatcgttaggcttagtgttttcgtttgggctctccgaagtcagggagcggaaccgcttgccgaaggtttctgcagggcacatgagcttcattatcagacaaaagctagagaagatgggctgcacgagaatttcggctgctacaattttgcttatcgcaaagatgcgaagtctccagttattagctatcgtaccaaatggcccaccggctagaagaccgaatggttttatgttaaggttgacgagaagaaggagaagctagttcagagcccattggagttagtctttggagaaactaggccccagtgcaacatgttgccggaatcaccatgccaaattgccttgggtgaatgtcaagttgtttcagagcatattggcactagtgatttggtgcaagaattcttagctttcagggtattcctgactttgaaagaatggacatgccgaagctcaaaggggaaaagaaaaagaag

SEQ ID NO: 91575 - DNA, 360 bp, Zea Mays
tcgatgggaggaatgactacgacagacgaactcgaagctttccgcttgggcgccatctcaaccttgcggacgagcggaacggaagcagtattgcggaaaagcaaaaactagggcacggaatgcggagacatgcgacagtgcagtacatatggggttttccgaagccagatgtcgaatctaaaaagcgtccagtcatcacccggctgttatttctaaaacgctggcgtgccacgtcatcacccggcagttatttctaaagcgcgggcatgccacatcatcactcggccgttatttccaaagcggccgacgcggtccattttaacttagcggttatttctgaaaacgctgacgttaccaaac

SEQ ID NO: 91576 - DNA, 541 bp, Zea Mays
gaattccttctgcagacttgagccgacttgaaatgatcctcaggggcaaggtgtcaaatgttggtgctccagtggcatactcggtctggaacttgcctcctcccaaagccttcacccttttcgtgtcgaatccacccattactgatggcagtttgggccttagagtgcgaccctctgctgaagaagttagtgctttggttgcctcgcttggggagattcctgatgacgaacggcatgttcattttgaggtgcccctgaaccctagtgatgcagagataagcgctatgcttgatttgctagctgaggattcatccgatgctgatcctgctgggacgttggtagtggcgcccctcccagaggctgatacgactttggatgttcagaagcctgtcagtgctcgcccgaggcgcccttgccgaaccaatcagcctgatccttctgttgatgagcagaagaagaaaagaagacgcctccgacgagtatccagttttgatcaggacgctggtacctcagttcctgctattgaagaagtgcctgcgac

SEQ ID NO: 91577 - DNA, 297 bp, Zea Mays
catctctctgagtactctggagacaaaaggttacaagtatactgccagtgacggtgtcatgaaggtaacaaaaggctctcttgttgttattaaaggtgatttgaaagctgaaaacttatatgtgcttcgaggtagttttggctctgctaatgctgttgttgcttctgattctgagactactaaaatttggcatatgcgccttggccatatgagtgcacctagtttggcagaattgagcaagagaggccttcttgatggttgccatgctgatacccttgatttctgtgagcactgtgt

SEQ ID NO: 91578 - DNA, 280 bp, Zea Mays
aacgggaatgtcctcccagtcaccccagtcagtgattcggtccttctcgagccctttcatcttcgcaacgctcttgtcacccccatattatttagaatctcttatctgttcgtcggtttaccatcaataactttttcaatatttagtttgatccttttggcttgtctgtgaaggatctcacttctctgagccttctcgtccgttgtgatagctctaggcccctgtacaccttgcggttgcctgcgtccacttctccacactgcttctgcttcatcatcgc

SEQ ID NO: 91579 - DNA, 632 bp, Zea Mays
acacagacacgtttatgttgtgctagctggcagcttgtcttcactgaaacaatggacaattttccatacctgtcaatgtatcatcactctatagctccgtgtttgactcttcctctagctaataagccaggtaactgatcgatgttactgtagtggtcgtacgtgttcttcttacgcaaagaacgtgtatgaagtgaggcttgcattgggacgtacgactgggaacatagacatgggaaacgagctactagtgggcagtggagtcatccagcacacaacaaaccgtagtgtagctagctgctaggtgcgtgcattgcatacgtgcttcgtacgtcgctgcattgtcctcccgccttttgcgtgtcttggatctgttgcttcttcctgcacgtctcggaaaatggacgtgctccctgttgtggacagatggcgacccgcgaggcttctttctttaattttctactcgttctgaaaatagctttattaaattagttttcaggactactcgcatcggtcgacaattaatttgcccaaacagctagcaaaaagctgattatattcctagaagctctcgttccttccatcacaagtgtgattttggtgcacttgcccaactgcatgaggtctctgtg

SEQ ID NO: 91580 - DNA, 687 bp, Zea Mays
gaggttgtggaggtagaagttgggcaagagctaatgcaacaactacaaaagaagaccttgagatctttatggagaatgaagctgaaacaaagtcgactgagcaacataaaattcctggaaataaaaatcaggagtcctacactggggattttgtcaactgcgcctacacagatgaaggtaattatgtccatgctcttgtacccacacaaatcacacgattaaattggattttagactcgggagcatcaaagcatgtcacaggcacgtcaagtgagtttacatcatatatgagatatccccccacacgtaaagaaatgattcaaactgctgatggtactccacgacctatcaagggtgttggcacagtacaatgcacttcatctattaagttgtcatcagttttgtatgtgccaacttttcctgttaatttgatatcactaagtgctttggttgatcaattggactatcagattatacttgaccgagataattgtttaattcaggagaggagaacagggaaaagacttgggacagctaccaggcgtagtggattatggtatatgtaccatgaggagacaaatgatacaagatgcactatgttggcaacgaagttggaagagaaggaagttgtagtgatgcttttgcattgtagattcgggcatctctcttttgataagatatgcaaag

SEQ ID NO: 91581 - DNA, 543 bp, Zea Mays
ctgcccaaaccaaagtatgtccatggaccctggtgaacccgtgaacctttacccagcctcaatttggccatccccgtcgctgtttgatcagaacatgttcatcctcttgtccatccgctcggtcaccatgaactgattgatttagtgtcccttggtgaaattgatgaaggggaaatgatcggggtggatctaattgtgtccctgtcgcttgggagctccagccgtggcgtcatctggccggtataggctcgccggagtgcggcgaggactgttcctcgtcgtggactttgctctgcgaaagtatagaacgtggaggttctttttgtaaaccgtcagagactcacctcaatagtgaatggacctatttcggttaaccgttaagcagagggccttttcgcaaaacagccagcgcgcgcgggcgcgcttctgcttaggtctggaccgtgtgggccaaagtcagcccattactgttaatgcctttttccttttctttttacttcagaaccaaataacttgtagaaaattgtagaaaaatcctaaaat

SEQ ID NO: 91582 - DNA, 456 bp, Zea Mays
atgaccatgttgaaggacaagatggaatatgagtacaaaaactactgcaagcatgaccacacataaggaatacaaccaagtttaccaaattatccttcgtgatattaattaaaccacacaccacatacgcaaaataaatgcaagcacatgtcgcataactcacatctcaaccctaaacttcaccatataaatacagtgtgtctacttcagaatcatgaacgcaatcacaccgctgcatgcgatgaagcatattaacaatcactttatgcacaaccaacatatctatctaatttgttcaataagctagctagtaagagtagcgcaccaactaatcacgaccaaacttaacgtgaaatacgcgaaacgacgatgagctctggttcaaccattccaacgaacacttaacaagtgtcgtgctggttctgcattctgcttaacctacagcaccaccctcat

SEQ ID NO: 91583 - DNA, 345 bp, Zea Mays
gttcagacagaagttgttctgaaacttctctttccgtttctttatctccaatttccagggattcctttttggcgggctttgagggcccagcttcgggtttggcatgactctttgcagcttcggcttcagtttcctttgtttcaatttgcatttttgaagcttctgctgttttccctggagtagagcttgaagtctttatttcttccagtacatctagtacgtggaccatccttttcctcttaggggtaactgtaagatctttttgtgccttcggcactgtcacctctgccgaaggacttgtaatttctgatatctttgttctctcgacctccggctcacccaatt

SEQ ID NO: 91584 - DNA, 483 bp, Zea Mays
caacggcgttgtggagcgtgccaacggcaagattttcacggcgatcaagaaaatgctcctcgacgacaagaagggcaaatgggctgacctgctacctgaagcagtctgggcactgaacacgaccgagtgtcgggcgaccggattcactccctttcgccttctatacggatcggaggccatgacccccacaggaaatcaaacatgggtccccacggacaagcgctttagcagtacccgacgtcgacgagccaacttccaaagacctcattgacggagaccgtgtcttcgccctgcaggccctcgccaagtaccaagcccaaacgaaggcctggcgcgaccacgcagtcgtcccaagagaattcaacgaaggggacctcgtacttatccgcacaacccggacagagtcacggggtaagctggaaccaaagtgggaaggaccgtttatcgtcaagacgaagtcgtctcccagcgcgtacagattaa

SEQ ID NO: 91585 - DNA, 1876 bp, Zea Mays
cactttttgagggaatcaaatgaaaacttaacaatgcaactgaagaagagtcaagatgcaaatatagagcttgtttctattcttcaggaactggaagaaacaatagaggcacaaagaacaacaatctccaatttcactcaaatgagtaatatgattgatcaagatatacccacgaatgcattatcagctcaagaggatgcagagtgggaaagaaagatgtcattgaaagaagatgaaatcatagcattgagggagaaattggatcgtgtactcagcatagaaaatccaggtggtgttggttctgatgctatatatcttgaactggaaaaggagaatgattttttgaaggttaaaatgcaagatcttgagaatgattgttctgaattaacagaggaaaatttggagcttatacacaaattgaaagaagttagtggggtcgaagaacaagattcttgcctttctgatattgaggtaatgttaaatgcgacaggtctttctgggacttcaaaatctagagcaaaatacctagaaagaaaatgtgctgaccttgagcagaagatgttgaattttcaatcggagtctagagaactagaagagaagctcaaaaaaagccacgaggatctaaaaggacaaactcttgaattatctgagcttagagagaacctaagtagattccgtgctatggagctagagagaggggaaatcaatttttcaagaggctaccagttaagaagtgaagaactaggagatattgaaaccgaactgaaactgttgaagagtactgttcaactcaaagaaaaagagatcgaaggattacaacattctaaactagaaatggaaacctttatagatagtgtacttggaccaaagatacatgagcttgaaatctacaaagtggaactagagttgcatatatcaaggctagaagatgaaaaaatagaattattggagtccatttctggaatggaggttgagttgactaatttgacaagtgagtacgagtcatgtatagttcaaatggatgattctagaacaatgatcatagatctcaaggataaagtagaaaggaatcaaatggagttggaagctcaaaaggtggaattgaagaaaaaacaactagaatttcagaaaatatttttagaggcacaagatgattcagaggctctaagaagattgaatgctaaactgcaggctaaagttcataatcttactgaagaatacaattctcttcaagaattaacggatgatctaaagaaggaaaagttggaattacacagttttgctaaacaattagagcagaaattggagcactcgaaaagaaggaccacagatttttgtacaactgtggacttactagaggtaaaactttcttcgattcagaaagatatatctttaaaagagcaatcttttctcttggaactagacaatatatttcatgagcacaaggatcatgaagaaaagataaatcgtgcacatttccttttaaacaagattgataaagaaaaggctattgagatagagaatcttgagagggaggtcatcagccttactgcgcaactatcttcaacacatggggagcaagcaagttccatggtggatactattcgtgaggcctccatccttcgagcagacaaggcaaaacttcaggctaatcttcatgatgtaaatgaacagttgagacattatgaatctctactagaagatatacacaaggagtcaaaaaggaagattaaatcccttaccgattcactcaatgtatcgaaacaaaatgaagaaatgctgaagatagatgccgaggctgtcagaaggctgatggaagctgctaaatccaatgaagaaaatttaagaataacttcaaatgaactagaactgaaat

SEQ ID NO: 91586 - DNA, 1005 bp, Zea Mays
gcttgcaatacaaaatcagctacaaaaaagggattgacaacaaggtggctgatgcgttgtcaaggcgcccggggttggaacgagatgcacctcagctacaactgaatcagatagttgtttccacggtggttcctagttggctagtgcaagtggtgcaaggatacgaaaaggatccgaagactaaagaattgttgcaaatcttagctactggaagtgatcatggtgcctatagtcttattaatggggtaatttgatacaaaggtcgagtttggttaggagctaacacggagttacaacagactgttttatcagcgttacacgacagtgctgaagggggccattctggttttccagcgacataccgtaggcttaaggcgacctttgcttggcctggtatgaagaaacacactaaggaatttgtacaatcctgcaccacctgtcaacaggcaaaacctgatcgaggaaaatacccagggcttcttcttccccttccggtcccagcgcatgcatggcatactgtcactctggacttcattactggtttaccgagatccaaacactacaactgtattattgtggtggtcgataaattttcaaagtatgctcacttccttccattgggccatccttttactgctttatcggtggccaaattatatctgtcggaagtctatcgtttacatgggttgcctgttgctatggtgtcagacagggatccagtgtttactagcaaattgtggcaagaacttttcagactggctggtaccaagttgtgtttgagcagtgcatatcacccacaatcggacgggcaaactgagcgggtaaatcaatgcttggagacttatttacgttgctttgtccattcctgtccaagcaagtggctgtcatggttgccattagccgagttttggtataatactaactctcattcaactttgggtacttcaccattcgaagtgttgtatggccacaaaccagtgcattttggtctggatgcaagtggac

SEQ ID NO: 91587 - DNA, 383 bp, Zea Mays
ctaactccaatgatatacactaacctcgaatcaatgagaccaagactggagaagaagagatcgacaaggaaggataaacaccaactcaagtcttcaaagaccaagctggatcatcagatgaatcgagaccctctatgcatgatggagtcttcccttgccaaaatcttcctttcttgtacttatcttgatctttcttaccccaactttcttaccaacagctaaaacatgattataagctacccatgctttcctagtcacctaaaagcaattgaaaaactagatacaaaccaatccttttgtatccctttcttacaaatctcgaggatgagatttctgttaagggggtaggatttttaaaacccaaaattggtccaagaaaaaat

SEQ ID NO: 91588 - DNA, 478 bp, Zea Mays
gtcctacaaaaggttcgtgacaaccaattgtatgcaaagttctcgaagtgtgatttttggttgaaggaagttgctttcttaggacatattattactgatggtggaattaaagtggacccaggaaagataagtgagataataaattggaagcaaccgaaggatgcatccaagatcagaagttttcttggattggcaggatactatagaagatttattgaaggtttttccaagttagtgaaacctcttacctctctactggagaaaggtaaagagttcaagtgggatgaagcttgccagaattgttttgaagaactcaagaaaaggttaaccactacaccaatattggtaatgacagacattcataagggatttgatgtgtattgcgatgcatcacaccttggacttggatgtgtgctaatgcaagaaggaaaagtgatagcttatgcctcaaggcagttgagaaagcatgagaagaatt

SEQ ID NO: 91589 - DNA, 409 bp, Zea Mays
cctgttttgatcgttatgtctcacatggctctcatatgtgagatatgttattttgggtagtttatttttggacagtcttagagcgaccaatagtgtaatatatgatgagccatgagtttaactgcaattttagtgttataagtttgttgttctctattgcaccacagctgtgcataagatggagaataacgtggttatgctgacaaaatctcgttaggcctctgtaagcttgtcataaattcatgctccgtcggtcattctttggtagggttttggacttatactttaatgttgagtttgccagagatgtgagagatgttcacatcgagttagcgacaactggattcaagcctttcaatgagagcgccacatcatactcttgctggttcgtttttgctatcccatataa

SEQ ID NO: 91590 - DNA, 337 bp, Zea Mays
tagatgtatatttacagacttttccaaggttttcccccaaaactatctgttagcaacactaatatctcaattcaaccaccggcagcaaagtactagaatataagagaatccgggtacatgtgagaggaagggaaaagagaagtatagatttctagacagagaagatgaacactagaacacagggaaatgagaatagagatggatatgtgtttcttctcaatatttgatacccccatagcttgaatcggtctccttttatagctgaagatgtccatttgtcacctgtcacagatcccatgtggcaatatgctgacattccccaccgcttgaaatacaa

SEQ ID NO: 91591 - DNA, 466 bp, Zea Mays
gcttggtgttgacctctgcctccctgctgatgaatttgcttcccagccatttcttgaagaaaatgagtattatcaacagtggcattaatcagagcagaaatagcctcaaccagcatgggaggtacaggcggcgggattagagtttcctccccaccacaggaagttccagccccatcatgagcacgagttctggatggcatctgaataagaaaacatactggattattacatgtcacaattacacagcctctgttacattattccaaacttgttctaattatacatacttaacttatacaactcacttttccttatttagattacataaggaaacaacctacaactacactagtctagtcatccacgtccttggcttctcccgctccactgctagcttcaggagaacgatcatcctcgatgttcatggaaagagggctccaaagagattcaactccccataaggtcc

SEQ ID NO: 91592 - DNA, 599 bp, Zea Mays
aaaatattttcatgatatatccattgtgagggctaggggagagagtaccgttcctcttcctgaagcagacgaagtagtggtttttaagagttttatgaaggctgggcttcgttttcccttgcacaggatgctggttgaagtgttaaagacatttgagatataccttcatcagcttactcccaaagctttaattaaagtggggtttttatttgggccatgaggagccaagggctagagccagatgccaagtgtttctgtaacattcatgaattatcctactagacagaggtaattggaaaggagcagtatcataacaactttgggtgttgtagctttgtgcacctctctgatgcgaggtatcccgtgccaacgttctgaaagaaatggttgggctcttgtatgaaacagtggttttatgtcaagaattatttgagcaagagggaagatgtgaggggtttgatccagcgccccatacggtcacgcttcggcatcaggaggccgtcgattgcaagtgggaacaaagtacaagcatgtttgatggattttaacacactgtgtacttacatcggtaccatggatttggtccaggagcatattcc

SEQ ID NO: 91593 - DNA, 662 bp, Zea Mays
agcaaggatgaatagttttttaataaaaaactaattatatcggctaattgaaacaaaatataaaattgaactaatcaaaacaaaaacaaaaaatctaatctagatgcaaggtgggtagatctaggcttggtttaggtttaggatttggagaagggtgttaataaagaaaaggatgctttcattataataaggttgatatttgagaaatttagacagaggggttgagtgaaggtgcaatatttctcccatttttataagcatcatttcatatatacaatttttttgtaaagatcagcaagaaggcataaatagttgttccaaaaatcaattgtactgattgactaaaataaatatgaaattgaactaataagtctagcttcatgtaagtgatctcactctagctcaaatataaaattgaaggtaattggtctaacatcaattataccttacaaatattttatttgggtaacaataatgttgagcagatcaagtctagttagaacagttgccactactgcaggatggaccccaatttcagcgtatgccatatgcccttctcccggtttggctagcgaacacatgtgtgctcttctttctacctctcacttaacaagtgtaagaccatgaagagcactcaactatttgagttatgttccctccac

SEQ ID NO: 91594 - DNA, 532 bp, Zea Mays
gaaactttgtatttttgcgataagcaaaattgtagcagccgaagttttcatgcagcccatcttctctagcttttgtttgataatgaagctcatgtactcagtagaagccttcgacaaatggttctaccccctggcttcggagggccccaatgtagacactaagcctaacgatggcattaggagttagctgatgaagataaatcccaaacttcttcaaaacatcagcaatcatcccattcaaaggaaatcttaatcctgctttaaagaagcttttgaagactaccacctcatccttttccggcttcggataatttcctctccgccaaaacaaaccagctccttctttgcttcactgaaatagcctaactttgtcagcttagacatatcaccttcggtaatggtggatttcccaaactccaagtggctgggtttagatggcacggtgttgtaatcatcttcagattcaatttcctcagcatcaacctgctcagcttcaccggtaggtgcatcctctgatactaccagccctgac

SEQ ID NO: 91595 - DNA, 386 bp, Zea Mays
tcgtgccgtgccatgcttagatcaggccaaaattgtcatgcctcgtattggcccttttagcctaacctagaagttcacctataaagaggcccaacctgaagatgaagaaactggtggcaaagagaacaccgaagatgataaaagtgctcaaaggcctcagaagccaagctatttagatattgggagatcaaccatgaaggaaggtgttggtcacttgttcctgaatggaatcataatcaaggcaacacaaatgaatcgaccttatatccaccctttaattacttctcttcatagagattaattaaagggaggaggttagagaagaacaaataatgaacaaatggtacttgaaagaattaaagtttggcgatactctaatgacatca

SEQ ID NO: 91596 - DNA, 880 bp, Zea Mays
cccttcctatctgtccatgcatctgtcatgattgtacatcctgtttgctcccatgattccttgtggttcttgaaaccatccaataccttttgtttccttttctgcaagaatggtccactcatctcataaggactaggccctctcaaacctttaccaaattgcccaatggcctcaagcataagtgcaaagctaggaagggtgactgtgttgtgtgcaatactagcttcatagaaaaactgacatatgtactcacaagccttatcccttctctcttctcttttctgagttgacaatgttgtttgaaccttgttgctaaggttaattcctttatgcatcatttgaacaaattcttcaatagtagaaggtttataaaatctgtcaatagtgccaccacgtaccactgttctacagctaaggctactagaaccttttgttggcttttgcttcaccacaaggacttcattcccaagatcaatatccacttgctcacaactttcatcttctcagatgtctaagttaatttcatctctctctttccttttcttttgctttatggtccttttcttctgtattctttgtaagcaaagcaatcatatcttctttcacatcacttggaaccttcaaacactttgtaacattattccctttaataccagcaaggtgccacttaattcttgtaatcccagctttgcatagcttgtcacagtacttgcacttcagccaatgcttcttgtttgcatctgggcaaaaacaatgagcccaagctacatcatctgagttgataatagcttgtggtgctgctgcatttgatacagaggcagaggcgacacttgatggaataactacacaatttgaagacacataatgcataatattagga

SEQ ID NO: 91597 - DNA, 283 bp, Zea Mays
cacgggccaacatgtgtacggggtagcgctcattccatagggattgaacccatctgtggtcaacgcaacacatacattacgagccgcttcggctttctcacggtgaatgtcatcaaagtgtttccatgcttcaccatcggatgcgtgcaccatcttgtcaggattgtatcgttttccatttttgtgccatgtcatctgtttcgcggattcctctgtcatgtaaagacgctggatcctcgttatgaacagaaggtgccataggattgtcaaggggatgtcgagc

SEQ ID NO: 91598 - DNA, 416 bp, Zea Mays
atacaaggctcgacggagacgacatacatgccctgagggaacctctatcccaggaggtggatgcatatagacttcctcatgtagatcaccatgaagaaaaacattttttacatccatctgagagatagtccaagaagatgaggctgcaactgcaagtaaagctcggacagtagtcagatgggccacaggagcaaaagtctcatcatagtcaataccctgagtctgttgaaaacctctggccacaagacgagctttatatcgctcaatagacccatcatttggttttaactttgaagacccatttgcacgtgataggtacagcaccagcaggtaacggaacaacatcccatgtacttgtgcgatgaagggcttttaattcatcagtcatagcaagctgccactcaggtataccagaa

SEQ ID NO: 91599 - DNA, 589 bp, Zea Mays
tggatgcagtggatgcaaatgatcatggcttctgggacttccacaatactccttaatggtgtgccgggaaaaatttccactgtaagcaaggaattaggcaaggcgacccctctccttgcttctatttgtgatagcagttgacccgctttagtcaatattgaacaaagccaaggatcgggggctccttcgactcccaattcagcaacgatgtgggtaggatttcccgattgcccaatacaccaatgacactatactgattatggaagctttcccaaaataaccattcttcctcaaatcaaccttgtaatcatttatagaattgataggtcttaaggtcaactatcaaaagtcaatatttattccatcaatgtgcctgtctcaaaaatggagatcctctcaaagacatttaattgctctatcaattctttctacttcacatacctaggcttcctaatgagcatgacaaggcctaatatggcatcattcattccccttatccaaaggattgaacgccgactgacctcaacctcgatatacctatcacacgctaggcgtctgcaactagtcaattccatgttctcgtcgctac

SEQ ID NO: 91600 - DNA, 465 bp, Zea Mays
cccagcttacaccgttagagctgatttggtgatccgggatccccggagaattggaggggcatgaggggaaactggccacgccattccgtcatccaggttgcaatttgacgacccatgctggtccgcggtgaaaacagagatataatggtcgtcattagagcggaatccacggaattaaactatgacacagggggagatgatgggggcataattgtgatgctacggttctctccaccagtgattagcagcagctgattcgtcccagcttacaccgttagagctgatttggtgatccgggatctcgagaaaattggaggggattgagggggaaactagtcacgccattccgtcatccaggttgcaatttgacgacccatgctggttcgcggtgaaaacagagctataatggccgtcattagagcggaatccacggaattaaattatgacacggggggagatgatggg

SEQ ID NO: 91601 - DNA, 336 bp, Zea Mays
gacaagatgggttaatggtgcacccgtcagatggtgatgcatggaaggctcttgacaactttgatccagattttgccatcgatgcaagaaacgttcgtatcggcttggcaactgatggtttcacgtcgttcaatatgactgctgcgtcgtattcatgttggcctgtcattgccataccgtacaaccttcaacctgctctttgcatgaaatatgagtttatgttcctatgtcttgttatacctgggcctgagcatcctggcgtacgcctcaatgtgatgcttcaaccactgattgaagagttaaaaagctatggcaaggtgtggaagcctatgactg

SEQ ID NO: 91602 - DNA, 535 bp, Zea Mays
gttaggctgagatccaaggactcggacggcaagacataacgaaggcttactactagaagaattccagaaggataaacatagcaaagatcttagcagaccaggagatatgatctagatcccaacagatacggaaatgaccaaatggagaagaaaaaacacttatgaaggtagagttcgattccatgttagctcgagatagacttcttacgttcgctatcatgtaactgacccggatatactttttgtaaaccacttcctctccttagactataaaagggggctagaggtaccacatgatggtagaagggatcataagatcagaatacaaacactactagcaaataggacatagggtattatctcatctcgatcgagagcccgaacctgtataaattttcaagtctccttttcttttacctctacttttagttttaggttacatgacctaccccataaattcactatcaaatattcttcgatagttggcatagcagttagggaaagttgcattgatcacaaaagagttgatggcaac

SEQ ID NO: 91603 - DNA, 396 bp, Zea Mays
gttctaagactcagggtatacgtttcttaacatgtgatggactacgggtttatttctgtgaagttcagggactctttagcaaaagaactggacgaaggggtatcgttcaacgtgggccgcctgatcaagatctaacggttcggattacacccccgctaagtgaactagagctctggtggccgttggatccccaatccacgggcgcgtgcccaccagcccgacataaaatcccacgccctggtactttgatcgacggacaagatcaattccctgttgaacggatgcgccagactaatcccagtcgtctatttcatgatctatggacatattggcgtcttcaacctctcgacgccaaggcacagccgaccgcgccatacctgattctctctctccaac

SEQ ID NO: 91604 - DNA, 293 bp, Zea Mays
cggagacttcgatttttcgcacttgttgtgctaatccggctgcacccttaggcgacttttgcacggagacttcgatttttcgcacttgttgtgctagtccggctgcacccttaggcgacttttgctcggagacttcgattttttgcacttgttgtgctaatccggctgcacccttaggcgacttttgcgcggagtgtcgcacgtgagggtagctagcgctgggcctcacggtgactttgtattggtcgaatgtcgaagaccgtcggtgcggtctttttcgacgtagatttttg

SEQ ID NO: 91605 - DNA, 481 bp, Zea Mays
caagagatgcgccaagagaggcaagatatgcgagaagatgctgattattgcacaatgctctgactgagagaaggttctttatgcttctggtcgtctgactggtcttgctgctgattggtgggattcttatgttgctgcccatgatgctgttggcactattacttgggcggaattcaccacacagttcagaaactaccacattcctgctggactgatgaagattaaaaagaaggaatttctatcattgaagcaaggcaacatgtctttcagcgagtaccgtgacagattcattcagctatcaagatatgctcctgatgaggtggctgatgatgagagaaagcaagagcactgcacagaatgactcaatgggccactgcagtatgcattggttgctcataccttcccatcatttcagaggctacttgataaagctctagctattgaacacaagcgtgttcaactaggagacatgaagaggaag

SEQ ID NO: 91606 - DNA, 406 bp, Zea Mays
agctgggttcaccctcgtcaagctgcgttgttagctccaactagtcctgtattcgcagagaattacatctctagactctggttgaacgtcacaaagtgggacgaccgagcggcgtcaactcccagtggcgagtagagaagacgtgtaaagaaggtcacgaaatagtctccctaggtatgtggcagcttgcaggcccgttgttcacgtcatgaaagaaaacatcagtttaatcaaagaaaatcattcaagaaaatgtgtggctagctcaatgtaatcatttactagttgaaacggtagaacacatgccaaaccttgttcgaagaaaaaaaaacagagacataccggcaccgcatcggcccgtggtctggccgccgtcgcagaaacaggcgaatgtcatcccgccggc

SEQ ID NO: 91607 - DNA, 668 bp, Zea Mays
taaggtggatcgcctcaagaattcgatattcaatgtacttttgtaaccatcagggtgatagggctctaaattttacattacaaaattcaagaatcaaatcgaattaggatcagaccatatttttatctaattttaaactaaaattaattaagggcttaaataaattatgaagatcaatttggatcatgatccattaccacctgttgagcactagatttggtacctgggcatgactacacagttcgactatgtggctcggatggtacacgccccgaacgatccacatatatagtctggacggtctacgattagataaactcggttgagaatctttgtgcttgcatatccggctaaccacgtgggaatttgttgggacattcccctatatatacgaaggggtatgaccgattggcccacaacacaatcgatctaaatcaatctattcatcagtttctttacatttcttgccctaggagtaacattaattagtcttcctcatcctcaatcttcacctctcctcgactttacgttgtctagaccctaagatcttttctccctgatggggtccctcctagggggtgatatccaggtgctgaaagagaccccgaagccctctatgcacacgtggatggtctatcgcactatcgaggatggttcacgcgcccgca

SEQ ID NO: 91608 - DNA, 455 bp, Zea Mays
accacagagaaggacaataaaccatgaataccaattttcaaaatctaaaacttgcttagaaactgctaagaatcgtcaggactagaccgctagacctaggacgaaaggccttagggatagtgggagaaataggtggctaatttagtagtccctgtgggccaatacttagatttttaaaggatgccttaaagcaccttatattcagagaggagacgttactttcagcatgcatgcattataaaagctaaaaggaattaaaacttgagctaacccgcttccttttaaaaccatccagactcttttatttttttttcttccaccataatctttacctttgatacccttccgcagatgaattcacccacccccaccagcggaggagacactcgtttcagctctgacttcctttcgcacgattgctttccttccatcatgtgggaagtgcttaactctgc

SEQ ID NO: 91609 - DNA, 554 bp, Zea Mays
caacgtatgcagtagtgccactctatgcacggagcgtggtccatcggacctaccataccctttaattaattaattaattgattcaagggtacgtacgtacattcagatttttgttgctcactctctcgtgtcattgtcatatgcatgctggacatacgtgtatccgtgcgttgcgatgtaccccaacctaaaaatatatatagtttttttcgtgccctatctttttcgtccatattaaaaaaataatactgagtgtagacattcatacaaactacgttcacaggttaatcaatgaatatatgtttagtctaaaactaattatattttagtacggagggagcaacattatactacttcttatcttgtggcgccacatgatcaaaccatcttcactccatggccataaacttgctcaacaccatcttgtaaaccctagcttaattaaccatctcaatgaaagcatcagccaactagttgttgtcaccgaattaccaaaatcaaacttaggattttccataggcaaccaacccactagtgcgcgcataatgactagt

SEQ ID NO: 91610 - DNA, 682 bp, Zea Mays
gcaaatcttctgactcgggtacttcaggaggaagtactcagaggtttcgggctattcctaagcccgggctggggctggtttgtttccgttgtggtggtgtgcatcgccgtgcaaagtgccagtggagtggcaggtgttctatctgtagtcagtaccataaggatgtggtgtgtaggaggaatcctaatgggaagctcagatgggagctggtcacttcctcctcttctcagggcactatcaacatgatgtcaagtgctgagcagcagttttcagttccacttcctctgcagtagttttatgtgcctgggacttctcaattcgtgccgatgcagggttttcctcagtatctggctacgcctactccttcaccaactactcctatgccgtctcagtttggagctccgcgtctgcctcacccggcggttcagtggggttcttctgttaatttcactccaggagcttcctcttctgcgtgtatttccggggcttatgtgctacccgctgcggatgtcagagagaaaggagacgtggtgacaggtacaatttcagttgattcgtttgtggcccatgctctttttgactctggcgctagctattcgtttgtttcggaggattttgtgtcgcgggctggtctttcggtgcagaggttgggtcacctaattttggttagttctactaatgg

SEQ ID NO: 91611 - DNA, 560 bp, Zea Mays
gccttaagcaggaaagcccagtgcaattgtatgactatggatgcaggaatcaccaccctatgtgatgagttgtgcaagttgaaaatagaagtcgtttcctccggtgctttaagttatatttcagtggagcccacattacaagagcaaatagtcatggcatagattggtgacaagggtgttcaagttattaaggaaatgatcgggtagaaggcagaaaaatacaaatgcttccgtcaggacagcaaagggatcctatggtttggagactgattggttgttcccaaaaaccccgagctcagaaagaaaatattggatgaagctcacctttcaaaattctccatgcaccccggcagtaacaagatgtatcatgacctcagatccttgtactggtggaccagaatgaagagggagattgctaagtatgtatctgaatgcgacacttgccagagagtcaaggccagccatctaaaggtagcaggtaccttacagcctcttcccataccatcttggaaatgggaagatatttgcatgggttttatcgtgggattgcccaatacctc

SEQ ID NO: 91612 - DNA, 773 bp, Zea Mays
ggcggggtgctgggcgggaggtgaaggaccacacctcgacaactcaccaaagagattcgcgctccgccgcaagtccaccggtgactcatccacggtgagtcgattttcctcctgcgcggtatcttggggattagttaggacgtcgcgagagtgtggggtggaagcggaccggggatcagtgcgctgccggtggacggcggtgtcgcttactggctagtcagggccgggcagcgcgctagttgacgtctagagagagaaagagtgccgggaggtcgcgccgccgtagcgtgtgagcgtgaggttaaagaagtgcgggtgtccgtggattagggaatcgacggtcgcgattgggcatgagcgtaccatttcacggagtaatccaagccgctgatcccataacgaccgtattggattagatcctggcagatttgatgttgagcgtcggatcagttttgggcggcgaggattagttgggggatattacttcgcccggacgcgatctggagcattgatccaccatcggacggctgtgaaaaccctgatcgtggatctcaatatcaacggtcagtaatgtttaccgattcatttaatagttaatctaatctgagccctaggtcttagatccagcgacccacaatcagtcatacctcttcgccatgtacatttcttaaagagaccctcagttcttagggaattaacccgtagtcctggcgccagtcattctgggtctttggaagttttacaccagagacccctgcacttcccagaaatat

SEQ ID NO: 91613 - DNA, 958 bp, Zea Mays
attggtagtaatcatctatgggacatattcagttttactgccagaagccttggtagaagaaggaggcggcgttttcacatattctacaatagcttccaagacactagtcatcctccttgtccttggaattcctatggtagctggcagcttcgacagtaatgtcaccttcatcttcagctgctcttgtactttttctgctaccttttctggctctggctgtctggccaggtctgcaatagttccaataggctcaacaagaacagtctctatggccagggggttgtttgcaccctttcacttaacttcggcacatcggtcgtctcaatgcgcctaggtctacgtgtcaaaatgttgtttttctttgacctcgacacaccaatagatgccgaggtagcggctttccttttcctcttttgcttccaggcgggatagcagtagtctgggtaaacaaacccaataacatcaaacactctattcaacctatttttgccgcgagcgccgaaggctgttgtcatagcttcgtcttctgccttcgaatatgctccgagtatctcataacttgttgcttctatgccatcgaaccaatcatcatttggctcgtcaaactgattcctgaaccgaaaagtgtacttcagataaaccaggccaccctggctggaaccagcggcggtctccttcggcatttcccactcgctcgcaagaggccatactttgtaagaaatatgctcttgaactaagtctcttgtgccaatataggtgcacactgtgttgaaagcagcctggcacgcttgcacatcattcccaagtgcattgggtggccttctaatgccgaagcgagaccatatagggcgatgaataatccctctcacatcctccctctgactcaggtcattattcacataaaaccattcctacatccaagaacctggccaccttttccgaaacatgggcacagggt

SEQ ID NO: 91614 - DNA, 836 bp, Zea Mays
cccattcactcacgcccgaattggtcaaatggctgctacgatgagcttcatgggtatacagagctgctaaaacaacactcgagaggtgtagagccctaacagagtggtccggccacggagcgcggagaacttgtgcttcccagtgacagaaaaaggggaaaatggcaccgcgacaactctgggtggaattgggaggtgagattggggctacacggccgtaaggaactatagtttaaccgtgcacactcaatttgggaagaggtggcagaggcagtgtgaattttgggcttcaatcaactcactggtggagatgtgaatacctcgtcgtggttcatagcgctatttatagccacggcggtccggctaacgatcagcgaccacggaaggctttgcttacgcatggtaaccacgtatagaagaggtacagtaagggaggagcaaggcatgggtgacaccgcggcggaaagcactgagtgacggcgaccgccgatgaatatctccggccacgcacgactgagctcgcgggatgatgccacgtccaaagttaccctcccccggatcgacccccccactggatcactcgagctcatctgattcaacagtgccatagatcttttccatgtgttcttcagatatttcagtgcactggatcttcagagtttgtctgaaccgacccccttccatccactcaatctcttgattcttgttaaggacagagcaaacttcattaatagagtttgttcacctatcaaccatcttcaaacttactataggatatttgggtcaaaatcgagtgaatccaaagatatggcgcgtccaaattggctccattccac

SEQ ID NO: 91615 - DNA, 389 bp, Zea Mays
gattcggagagcccagatgtagacgctaagcctaacgatggtgttaggagttagctgatgaagataaatcccaaacttccccaaaacatccgcaatcatctcattcaaaggaaatcttaatcctgctttaaagaagcttttaaagactaccacctcatccttttctggcttcggagtaatttcctctccaccaaagcgaattagttcctttttggcctcactgaaatagcctaacttcatcaacttaggcatatcatcttttgtaacagtggacctcccaagctctaggtggctgggtttagatggcacgacactataatcatcttcagattcaccttcctcagcaccaacctgctcagcttcagcggcaggtgcaccttcgccagaaa

SEQ ID NO: 91616 - DNA, 283 bp, Zea Mays
gacggcaatggccggagctgcataggactccagcacggcggtgccatgtccgaacacccagtcacatgcccatgctgccggcacttcgattcgacaggatctacacatagcggggtttggggctagtccacggggcgtggccttaccggagattaggctctaagagttcctgctcacaacgcacaatgatctgatgatgaagtactctggtgaggtcctcgggttctttcgatggggggtctaaggagtggcgcgggacgattttatagcctagcgaagcgag

SEQ ID NO: 91617 - DNA, 599 bp, Zea Mays
cttcaagctattgtaggcaaggctatctgcaagctgatcctttgtcattgaagacaagccaagttcaagctttggatatcccatgttgtccatcatttcacggcaaacattgacctccttagtgtctggtagacagtagaggaagtcatcttcgttgtctcctccatataccaaagaaccctgggggtatttcaactctttaccataatgttgtgttttagcaagttgctctgctgatagctgttttcctgaagcatgtcgaacaatataattcaaatcaccctaggaaggtgcttcgggatcaggtgttgtgggcttttcaggaacactttctcccattagctttactggtgcaatttctgaaggtgccacttcagcatgaacagaagaagtgcttgcagtaaccacttctcttgcatcttcaattttcccgctagaatattcgacagaagcaggagttggcattttcacagattccaaaacaacatccaaaacactagccatcctcctcttcctcggagttgttgttgcaatagctgatagcttcggcaatgctatcgctagcacctttggctgctttgctgccttctccgactttg

SEQ ID NO: 91618 - DNA, 532 bp, Zea Mays
gagatctgcctctcgtcttcggtagcctgcctcaaagcaacgggcaaggccctctcacctagagaggaaggtctcagtccaccccgagcccaccatggagcaagcactcgcagttgaagaccgcctcctcgacaactgctagaatcacggtgttcacgaccgcctcggcggacggctacaccacaacaaccgacgacacgccacacatggctaccacccttagagggtggtcgctacgacagtggggaagatcgaagcccctctctcgagccaccaggtgcacaagtcttcagccgaaccattcatagggcatcgttcccggctcggttctgagccccgacttctatcaccaagtactcgggggataccaagccgaagctatggctcgctgactaccgactagcctgttagctcggagggatgagtgatgacaacctcatcattcgcagcttacccctcttcctgtccgactccacttgagcacggctagagcacctctcacccgcctagatccatgactgggaagacccga

SEQ ID NO: 91619 - DNA, 351 bp, Zea Mays
ggtatttttttttgaaaaaggacacgacaaaagctttgccatgacaaaaaattattagaaagagacacttacaaacaccggaaaggaaagacaatactaggggagaggggaggagcaaagaaaagaaaagaagcactagcaaaacagcccattagaaacccagcacgccacacaaacaaaacactaaaactaactagaagctctttgcgggttgaaatcttctttgacgaaattggccacttctcgctcgctcttctcaagaccatgaaagattcttcgatttctttctttccaaatctcccaccaaaagtaaatacagagaccatcgaattccttgcgagcagttttctc

SEQ ID NO: 91620 - DNA, 415 bp, Zea Mays
atacctaagaaagagttggtgacccggcccccaggaggtagcctcgactaggacctggacctgtacacagcttcggctaggaagtgttagtagcgcacccatataacccatcgtctggtatgagtcatcctttgattcatgcaacaggacctgcaggattgagtctgggaagccaagcctcatgtccggacctacaagatcacagttccaaatactagggaacccgttgcagagtggtagaggtgcaagcttagggtacgggaccaggctaagtggctacacagctccggaccaccccaggaaacaagcgcccattctctagaaccggacccgcacgttgccggaccccctgtatcaggataggggtccagtactgcaagcctatcttactcaattcagatgtcctcataccagc

SEQ ID NO: 91621 - DNA, 544 bp, Zea Mays
agcaaactgaacacccaaacttgcaaaaaatcagcacaacagcagtgcacggactaaccaattcatccgaactgaatacagttcccagttaaaaattaggttccgttcgactgtactgtttctgtttggctggtagaaaccacaaaaaaccctgccaaaggacccaaaccttggtgttcgaagacagaaaccgtttgaaatgtttgttccttttacttatcaagtacaggataaattacttcaaggaccagttagtcagacgattttccaagaaacgaaaaccctaccaaagaaacattttcatggagtttgtaacaaaaacccagaggatgacgtggagggagtcagagagacaaggactacatacatgcatgcctgatcaagcgcagaagaaaactatccccatccaagttcctcaactcttctctgtatctggaggtgtctgtcaagcgaccttcatccagaggagtgcttgctccagcaggatgggcccagaagcccagaacagcctggagataggagtaggacacaaatttcctacaat

SEQ ID NO: 91622 - DNA, 587 bp, Zea Mays
tatggacatttcgaccaatccaagggttagtatgcatgcatatacacattatgtatttgaggaatacacattttcatatcaaactacttagatcaaatgagaatgaaaaattcatcaaaaatatccaataaatagcctagagagcatatttagaagcgaaatgcaatactaaacatgtgtgttcaacctcaagccacatttgagagatctatcacattcatttcacttcttaatgtgcaaaatctcgtttcatccaatggctttgtaaatatatcggctaattgatcatccgtgccaattgaacatatagagatgtctccctttccaacatgatagctcaagaagtgatgccttatatcaatatgcttagttcttgagtgttggaccggatttgtagccaattttaccgcactctcattatcacacatgagaggcacattcttaaaaatgatcccataatccaatagagtttgtttcatccataataattgagcacaacaattaccgaccgatatatattccacctcaacggtagagagagcaacagaattttgctttttagaagaccatgaaacaagagatcttcc

SEQ ID NO: 91623 - DNA, 386 bp, Zea Mays
atgcaattggcttcatatatcctgattatcactacccgctgcgaaggcaagggaaaaagaggaaagctgttgcttcggccaccactgatgtgccgaagggcaaaaaggtgaaggttctagcccaccggtcgtggtatattgaaccggtcgtagtgcctgaacttggcgaaggggcctcttcaaatgtcgaagcgcgacaagctactcagattatgcagagcgttgaagagccgaatgtagcactgaaggtacctacaatcggagcagccgaagctaagactgataaggctaaagagccacaagcggaaaaaataaagaaaatgcctgaaattctgagcccaccagctgaggcaagtttgccgaaggtgcaaaaggctcctgccgca

SEQ ID NO: 91624 - DNA, 486 bp, Zea Mays
gcacggtgacctccccattagtagttgtatgcttcttggacgagagacgacggacgggcttgctagcttggattgctatgacgatcgatcgagaggaaggaagagaggagagggaggaagagaggcaacgaagaaggtggggttcgttgggtggatggcagctagggagtggggggttttatagaggtttatcagctagggtacggaggtgacgtgcatggcggcaaaagcatgcctgcacgggctgctgtgagcgaggaagctgcatggtgcataggtggtgccggcggccgtccaaaagcaaggtcctggactctctttctccgtgctgaccttaggagcttgcattagtccaacaagacgtcgtccgccttgcgatgtgacgatgccatctagctagctagctctctctctctctctacgactccacacacgtacataaaatacatgtgtactcatgcatgcacgcgctgctgcagcgtagcg

SEQ ID NO: 91625 - DNA, 913 bp, Zea Mays
gtcgtataggacctagagagagagatggagagtcgtatagaacgtatagagagggagagagggagagtcgtatagaacgtatagagagggagagagggagagtcgtatagaacgtagagagagatggagagtcgtatagaacgtatagagagggagagagggagagtcgtatagaacgtagggagagagggagagtcgtatagaacgtatagagagggagagaggagtcgtataggacgtagagagggagagatggagagtcgtatagaacgtataggaggagtcatataggatgtagagagagagagagagatggagagtcgtaggcagccgcttgatgtgcagcccacatgctgtgtgaagggaaggggtgccaactaggctcgcccgctactctctgtgtcctccttctcacccgttcgcatatctttacttagtcttttttccgcgtctcactaaaaaaccatatcagatatcatgtgctaattctaatcacaactgtcattcatgtctctcttgcgattatgaccacggtaacacggtaactatggcagaggaaatggcgttgtatgcatgcttctcatttgtgcgagtggcaactaagtaaacaaattgaggaaatgtcgttcggtgtacagtaatacattccctctctccctcttctctcttctctctctctctctccctccctccactctctttcctctctcttccctttccctctctcttccctctccctcctctctcttccctctccctcctctctcttccctctccctctctcctctctcgctccctccctccactctctttcctctctcttccctttccctctctcctctccactctcttccctctccctcctctctcttccctctccctctctcctctcctctccctctctctcactatc

SEQ ID NO: 91626 - DNA, 638 bp, Zea Mays
gcgtaaggctaataactgcatggttaagaaaataataatgacaccctgttacaatacagggttggagccaaaaaactactgcagataatggatccaaatacgccaatcagcactgccatgttgcaatcctatataatgtcgctgagaacggatctacctgatcatgatgcacgggggcctacaagggttttgatggtttagggttgaactgagctgtctaattcagctcatatgtatatttcagacggtcttccctctctaacacaggccagatttgatttcgttcattatcgatctctgcagtctgaacacagtttggcccttgccctacctctaagaataaccaatgcagataaagtgaactataatttgggaagtgagggaataaatgcacttccagaaaaaaaattccccaaatcagaagacgcatgggactttgaggtctgagcgaccaaagtgcctacgcgtcaaaatcagaactgctgaaccctccaaatcaaaagcaaaaccccagcgcagattgcagcggccatgcgaatctaccccaaaagccagacaattcccctcacagtccacgattccatgcacatgcgcgggcttcacaggaaacagaaccacgaatccgagttgcagacgac

SEQ ID NO: 91627 - DNA, 307 bp, Zea Mays
aaagaaaaggaaaactgccgcttcggccatctctgttgtgccgaagggcaaaaagatcaaggtcttaacacaccggccgacatacactgagacggcgacagtgccgaagcttggtgaagggacatcttccactgccaaagcagaacaacctgctcttgccatccctggggaagacctgactaaattgccgaaggttcctgtagccggtccagccgaaacgccaaaacacgatgccgaaaccaaagagaaggcggccaaagagccagagccagagctgccaaaaatcttgagcccatcaacagagcca

SEQ ID NO: 91628 - DNA, 508 bp, Zea Mays
aaggggatttcctcctcctcttcctcatcctcgtcaataatacgaacagcacacccattgggatcagctctggccggattgcacccattgggttcagcatcatcaaggtcacacccattggggtcagcatcaaccaggtcacacccattgggttcagcaacagtaaaaatctccaccggcacttcctcggcagcaggagcagaagggccggcatcctgattcaagcatgacactcaccgaagccgtctctttttctttttcttcccctcagcaggagaagttggatgactggtctggcaaggacgcttcgagcgagtgctatcagatctttgaatgtccaaggtctttccaggctctaggataggtgctacaactagtgtttcagcagggaccgaatcagaggaatcctcagccaacatgtccagcatagcacttatttctgcgtcgctcgggtttataggcatctcaaaatgaacctgcctctcgtcattggggatttcaccaagcg

SEQ ID NO: 91629 - DNA, 1330 bp, Zea Mays
ccttaccgtggcaaatcttctgacttgggtacttctggaagaagtactcagaggtttcgggctgttgctaagcccgggctggggctagtgtgtttccgctgtggtgatgcatatcgccgtgcagagtgcaagtggagtggcaggtgttctatctgcagtcaggaccacaaggatgtggtgtgtaggaggaatcctaatgggaagctcagatgggagccggtgacttcctcctcttctcagggcactatcaacatgatgtcaagtgctgagcagcaattttcagttcctcttcctccgcaacaactttatgtgcctgggacttttcagttcgtgctgatgtagggttttcctcagtatcaggccgagcctactcctgcaccgtctactcctatgacgtctcagtttggagctccgcgtctgccttacccggcagctcagtggggttcttctgttaatttcactccaggagcttcctcttctgcgggtatttctggagcttatctgctacccgctgtggatggcagacagcaaggagacgtggtgacaggtacgatttcagttgattcgtttgcggcccatgctctttttgactctggcgctagctattcgtttgtttcggaggattttgtgtcgcgggctggtctttcggtgcagaggttgggtcacccaattttggttagttctgctaatggctccattagtagctgtttagtttgtcaggggtgttccgtcattcttgctgatgaggtcttttctgccaatctggtggtgatttccatgggggcattcgatgttatcttgggtatggattggttatcccagtattgcgcagttatatcctgtttttggaagacagtgttattgcaggcgccgtcgggtaaggaggtggtattcatgggaagttctccaaagttcacgttatccttgttgccgcaattgcttctagatcgccgatcaaggaagtcagggatctttttctccatggtggtggagggtgaggctgccttgcgggtgcaggacatccgggtggtgtgtgactttgctgacatgtttccggcagagcttccaggcattccttcggagcacgatgtagcttttgagattaagctgattccgggtacgcagcctattcataaggccccgtatcgaatggccccaaaggagcaggttgaattgaagcggcaattggatgatctactggctaagggtttcattaggcctagcaggtcttcatgggcttccccagtattgtttgttgagaagaaggataaaagcaagcggctatgtgtggattatcgcgctttgaatcaagtgacaatcaagaataaat

SEQ ID NO: 91630 - DNA, 304 bp, Zea Mays
atttggacttatgaagattttgcccaaggtcaacacatcaaatttgtagagctatgaaaggggattaactttgctatagggattaaaccatggtcacatgaagaatttggagtaaaatgagcccaaagttgggctgtcagactaccctaagcctgaattcagactgacagtgggattggatgaacttagggctcaattttaagcaagatcctgtgactttttgtgggggcacgatgtagcaaagttggagctggtctattaggctacaactttgctacagaacaatggtcttgttgccatgtaa

SEQ ID NO: 91631 - DNA, 660 bp, Zea Mays
acggatatagttggtcctgcccattttggtggcaaagagatagatgaagaacttggattcttcattagaaacttggctggagacgagctaagcgaagaaaaggcttcgaagctggaagagcagactgaaactatgtgctatagctctggggctatgctttttggtggggtagacaatgttttgatgtgtgtgcctgatgctggcaaagcaaatattgttaaaaatgttacccgaagcatcagattttcggagatcgaagctcaactcagcaagctaaaaaagtggaaactttctcaacgcttggcctacacaagcattaaagtaaaaccctttttgttttaatgcaacttcggagagagaaacacatatacctaaattgttttccttcatgacttttatgcagggtctcatgctaagcaaggcatttaaaattcaacaagcaaaagacgatgatgaatatgaaacaaccatctcggaccttcacgatgaagttgaaaacttcaaggtgacttggaaaaggacactgaaatagcgtctttaaagaaggccttggccgaagctaaaaaggaaaatgaaaaaccaaaagagactcaaaatgttgatatggtaaagatcaaggagcaatatgactctattgatgaacttcgtaccatcttgaaa

SEQ ID NO: 91632 - DNA, 353 bp, Zea Mays
gccgcgtgcgcataatttctagaaaaaaagaagcctttatttcagtcataaatcaccatttaactctagcttttgtcctgaattgtcgtgattcctctagttcaatttagaatcatcttctatcctagattttctagattcatgtgattcatcttacaagatatcatgctcctgtaaaatctatagttgacagctgtttcaacaaaataaatttcagttttccataatcgtcagcccatagtagctttcttatagctcacagctaaaatcagattttcggaaatctacaacttaaccaaacagacccttagtcttttcttgtcctagatctgcctctggcctccagtactcat

SEQ ID NO: 91633 - DNA, 741 bp, Zea Mays
tggagaccgtatttacagagggcagaatttgagattcgtacagaccacaagtcctttagtttcttgggcgatcaggtgttgcattctgaattacagcgcaaggcaatggcaaaactcatgggtttacagtttaaagtggtttacaagccggacaaggagaatttggtggcagacgctttgtctcgggtgggtcagttgatgtccttgcaggctgttactgaagttcagcccctctggattcaggagatactgaactcctatgagacagattctaaagctcaaattctgctagctcagttgtgtgtttagagtccagatgaggctggttattggctgcacaagggtattattcgcaaggagaaactaatatgggttggcaacaattcagcactttgcactaaactgatcgctgttgttcatgacagtgtgctaggaggccattccggggttcaggctacttatcaccgtatcaaaaagttattcacttggaaaggtcttaagagggatgtggcagatttcatccaacaatgccaagtctgccaacaagccaaggctgaaagactccatccagctgggttgttacagccattacctgttcctcaaggcatgtggcaggatataacaatggattttattgagaagttgcctaaatctgggggccatgatactatgctggtggtggttgaccgtttttcgaagtatgcccacttcttggcaatgaagcatcctttttctactcag

SEQ ID NO: 91634 - DNA, 806 bp, Zea Mays
cccccagtgatagggagcacaagcttctccaaacccaatgacgaagcttggcggtttgtcatgctccttgttgtagttgtggaatcactgaaggtgaacgctaatgttggtaacttgttttcaattgctacacgacataaaaagcaaggtaacacaaagttaagatacgggaaccttcgtccctgagctaatacaccttcgtaaagatagcttaaggacgaaggttttaataatgagcgagcacgaagtacgattgtatggaaaataatgtaaggaaatatgcaagaactcatcttgtatgtcttagcattttatttcatatctttttatattgaataaagttacaatcgtacctttggcttcttgatataagatagcgtgaagatgtttcgaaggctaagcaaaacaaagctaagctatgacacaaaaaggtgaatttatacatggcactgttcatctatttatagaaaaattgaacagcttcgtaggaaattataaacaagcccataagttttacgcacatgatttaaaaatgatatagggatataactgtctttgtcctttctttcttgctgcaccacagcaccagtctccgacttcttctccttcctcagcctgcactcgaagcttttttttccacgccgaagataatggctttggctcctcctgtctccggacttcttgctgatacctttggctttttgtatcagtgctagttatacatggcatacaacagttgaggtacacacatgtcatggagaaactttatttaatttgctcattagcattgtagtcactttgttggc

SEQ ID NO: 91635 - DNA, 366 bp, Zea Mays
cggacattttgagtagcttttgatttttggggcgtattgctgggccgatactcagactgtgaatacatccttgttgcgattcaaacatgacaacaatttgttttcttctatttcggtgaggtcttcattgattaagatcgtttggttagggactaccacgtccagggggactttcttggtgccttcattgcgttgtagctaggccttgactgtctcttatttgttcgggtcaaggcttctaggtctttgccctcggtggtgaggcaatgtacgttgcgttgaccagggacagagtctgtctcaatattacaggtgacctgctggtctccgtacactattattatgccctgagggcctagaattttc

SEQ ID NO: 91636 - DNA, 411 bp, Zea Mays
cacaaagagagcctgccatggccttcctctgatggtggtactcgatggtgaagagatcgctctacacaaaggtccgaaaggcagcgtcgaggtggaaggcacgagcctcacgattgtcgaagaagtactactcatggcaacctaggcctgatgggcaatgccaccacgctctcaaatgatgtcctatagctcgactctcaaggatccaggagaggaccacattatccatctagtgctaggaagagatagcgagggacaccgtatcggtgaaaacgtgatcgtcgaggacgtagcactgtagggtgaggaggacgaggtcgtgtcagtgggcgtaggagaccacgtcaaggagtacgagcatcagggactaaatgttctagacaccagctgcctggacatgggggttggcga

SEQ ID NO: 91637 - DNA, 527 bp, Zea Mays
gcctagcatagctaggaaatttatatctcttgttgttttgattaaatttctctagtgtctttgattttagttaaaactgtctattcatcccctctagctggtgtcctagatcctacacccgttagctagtggcctcatcagacaggccttgactctgagtcgggctagatcgtccgtcgccatgtggctacggatagccacacgggtcctgccttgacccagcaggagtaggtaccctagttttagggtaccgacagaggcccatgggccaaccttgggagaggtggcgaacccgcaggtgggccataactgagctttgtctccaacaagctgaccaaaactggcgcctagcgtcaccgtgtttggagcccccacacctattggcttgcctagtgatgccatgccaccacatactggacttcacataaattttgcctagcttagaggcaagatttttctctattgtctctgtggttcattcgcgctctgggaggtagtctcgaatgtctcaagctatgatcaagcca

SEQ ID NO: 91638 - DNA, 814 bp, Zea Mays
tcagtcaacgagctcagaaagtagaagaatccttttttcctactaggctgcaactagaggtggcaatggattagcagtatccaatccatatggacaatttcaattaaaatcaaagggaaaaaatcaaaatccaaacgtaccccaatacaaaatgtttaatgtcaagtccaatccaatccaatagctcttaagtcaaatccatctagtatgattcaataataacaaaaccattataactacatgttgattctgcgtgcgtcaaaagctggaccttagaatttaaaagcttacgtccacaccttaaaattttaaattgatttaggtttgttagaaataatttagtatgattgtcccctaatttgtggtgagtagatatatacatgacccttacatcgaaagctggatcctagaattaataccatgtggtgataccttaaaaacttagtgaattagactaaagtttgttggagatgatttagtatgattgcctgctactttgtgtagatcggtgcaactaagtatataagtgggccccacgtcaaaagctggacaatagtcaaattaaaacctcaaattcacaccttaaaactttagcaaagtcaatgaaatgcttttggaaatgacttgatacgattgcccgctaattttgtgtataccagtgtgacaagtggttttgttatgaaatgacttgatcactggcagcaagaatcgtggtgaatctcaaattagaacagatttacggcattaagataataaatgtgctgaattgcatatcaaatgtttttggagttagacctagtaaaatatgatatga

SEQ ID NO: 91639 - DNA, 424 bp, Zea Mays
cagatcacctattgtacaacacaaaaatgtactgagctgctcaaatgatacagtgataaatagatatatcattaatcaatgcgcggcctggaatctttgaaaggttttgattatagaactattacaatatgaagcaagaactgtggatactaccagtgtaaagtattaaacaagattcgacctattacaattgagcaaaataagccacctatcaacccagggaaggtagcttacgtttttattcccagaacacgagactgcaaactaaaggtttttatttgacaatactggtcctgaaacccaagtcaggtactattgcctaactactcccaaaacactgagccaaaatattttgtttcatcatcttgaagtatagtttggagtcatcgtccattgtgcttgtgtctgtttgcttaatgtcctt

SEQ ID NO: 91640 - DNA, 376 bp, Zea Mays
caaagtttgaacatgtcttgtcatgtcatgattcaatgacccagattgaatcatgatgtcaagaggtgctgggcagacccacaatgaaatccatgttgatgtcatcccatttccatgaaggtattgataggggttgcaaggcactagctgacttcaagtggcttgcctttatcctctaataggtgtcacattccgatacatatttggctatctcccttttcatcctggtccaccaatacaggggtttcaaatcatggtacatcttagtgcttcccgagtgcatgaaaaatttggagagatgagcctcatccaagattttcttcttgaggtctctatttttaggaaccaccaatctgtcttcaaaccatagtatccc

SEQ ID NO: 91641 - DNA, 287 bp, Zea Mays
gcgacagattggacgtctggaagatggctctttggttggtcttcattttgcttcgtgcttcaatgcttctgttgattagacttgtacttcagcagctatttttgactttcctccgatctctatcgatatcttccttctgtctcgatacattcattgcatatactgtatggatgcgactgcctaggaaaatctattgaaaattcttggacgtccccccaatgggtgtagccaagggacggcttggtgcgctgagcgtttagcaaactgcccctgagtagtaacttgac

SEQ ID NO: 91642 - DNA, 570 bp, Zea Mays
atagaatataaaaatcatgtggactttctttttgagctagaaaatgtatctaaataatttttacacagtgtcaggagctagattcaatcgtgttcacattgctgttacttgcgcagacgtggatgggagcacggctagtggcgtcgacgaagggctcaggcaaacgacaacatatgacagcagaagctcgggaaacttcagcgcagcggcttcgcgggctcaagaacgacgacgatgaaagtagaggcaaacaggaaatgatgttgtgcactagagaggagagcgggaggctgtgacctttataggcgagggagagaggtgggattaaagcaggaatcaacgctcctcgatgtcaattgttgtgccatattgattcacagagaaacagaagtcgtaattgctccattgatggagatttgaagcaaaattcagacacaagaatcagaacggtcgcgagaggagaggagagaacgccggtgtgggagagcttgcagcggcaatcaaaatgccatttatggcccgttactgcctgaagagaggagagtggggagaggaagcggcatcgcggtt

SEQ ID NO: 91643 - DNA, 372 bp, Zea Mays
ataaactgcaagctgtcatttatttaggctaatgttgaaataaaaggaattgcaaatgaaagtaacacaaagattgcatggcattttgtaacggtgtttgcaagagtaaaaaattaaacctaactgtgaagaatttagccatccctaacatctatccataaaagtattgtaaccaaatctagacaagtggaaaaatatattaaaacaagagttaaaatgtgaataatcatgataatatgatatttagtaaataagcagtgtacagcaggcaaaagaaaaaagttgtcaatgtgagtctttcatttttacatccatgcactcgagacaataaattgctgatggaatgctgctacaagagtaccttactttatg

SEQ ID NO: 91644 - DNA, 472 bp, Zea Mays
ggagaacggcatcgtacttggcgtgcgcgtgcatgatgtacgtggggatctcgtgaacccctgactctactgacggggtcatgcatagtgcatcgtaatagtgaggtccgagctgcttactgttgagcagtcagaacggtggtcatggactcatggcccagttcttgccgctctcgcggtctcgtctcacggtctagctgttcgctttagattaaaatcgattgtttatttagactatggtcttactgttagcttcggattaaaacagtttgtttgaacgggtgcagctataaactagataacccaaactgtagtattgtacgcatattgatatccgaaacaataactcctgcagctagaaactagataacccaactgtagtactgctacggacaaacgttaacataatgcacgcgtgtcacgcacacgcttgagggagacctcctcttgtcgctaaagtagacgatggacg

SEQ ID NO: 91645 - DNA, 723 bp, Zea Mays
cgaaagcccaaggacacaccacagtccagcagggcatgggtcaggccttcgcaaccagacttaggccggcaaaaccgcacccagtcctaggtgcacaacattgcaaatcagcaacagactggggacaccgctcgtcgtcaagactaccctccgcagcaaggccgcgacagtaacacacctagaggtaggggcagaggccggggctcgcaacagtgaagattctattgccttttccatggcaaagactcagcacacccaaccagggattgccctgaaaccaaagcaacaaaagatcgaatggccagaaacaaccggctgacaaccaaagagttggcgcccacacctaccatccgcatcagtacaatcaacacaaattccacaatgaacacttccatcctcaccaacaaaaccacaatatataccaacaacaccaagaaatcctagctctaccgcctccaccaccaccacaacatctaaatcaatcgttaccgccaccatccccaccgaagcaagaatacttcgccaatcaaccctttcgaggggtcattcacatgattatcggaggatccagctctgaattcgacacaaaatagcagaagaaaaaacactatcgaagggtcaatcacgtagacctcattgggccagttgttaaaacaaagtggtctcatataccactcaccttcgacgcaagagatgtcgatctccgcatcgcaccccatgacg

SEQ ID NO: 91646 - DNA, 527 bp, Zea Mays
cgaccatatccacaaaacagatcttatctctacaactgaccctatccacaaaatagatcctatctctaaaaccgaccctatccaaaaaaaacgaaccccccacccttccaacacctcgccagaaaccctgattcggagtccaaacttaaaacggccataactttcgcctcggaactcgaatcgggcccattttttcaaatcgcacagaattcaattttgcatccgattctttccggctttgccggattcgctgttttttaaaattcccaaattcggcttggaaataggacttctcattttccaaacatttattccgattttagggcaaacttgcagaaattccagaggacgcgtcattgcacaaaaaaatctgaaacttggtgtgttatcttcttatgtgctgctgcaaaatagaaaaatataaaaaaatatttgaaaaaatcgcaaaaaaaagaagggtagcacataaccagaaacgccagtgttctgtgcgcctctgtgattattttgccccaagcatgttttct

SEQ ID NO: 91647 - DNA, 324 bp, Zea Mays
gacttcgtgagttggcctagctgggtctggaaagctagcctggcggccattaggggctgacctagccgggttgggcatacctgcacaaaagagagcaaagttggccttgtcgattcccaattccaacttggtcgattcttactgatcagattcaaatgaaaacatttgcatcaacctcttctttgatagaaaagttatgtccactggtgtcaaagctagatgcttggtgagccaacatgctagccttataattctcatatcttggaatatgccaaattcgaaattcggtaaagaaacaatgatacgaagacacatacaagatag

SEQ ID NO: 91648 - DNA, 593 bp, Zea Mays
gcatcgaacatcttgttgattggcaactggcaagtacaaaggcggatcgaaggctagtttcgtctttactccacagccgccaggctgccgatttcatccatgtcgcactgccctccatcattgttctgccatccatgctgtgctaccctccttcgccattgcctcgtcgtccccatatcctaacccaagctctgctttctccagcacatcgcacgcagcaggtatggtgccggtcattgcctggccctcccctctttcttacccttcaaggatgagattgtctaacttgcgtaactctagatattgatggcactgtttgatccatttctcatatgtgttaaaatgttaatatgtgttaacatgtcagtagaaaatttagagtagggttttctaattttctaattaattaattttgtaaatataaacaactctagaaaattatatttactatgaagtttagaaaaatctccaaaaaatgctcaagattaatgaagaaaaggattatgcttaaggaaggcgagattaaaatttaaaaatgtaaagatacctaaaaatagggatattcgacacctaaacgtatgttaacttttttt

SEQ ID NO: 91649 - DNA, 682 bp, Zea Mays
gattggctcggcaagggcgcctcgggcgagtactggcaggcttctgagtatctaaggtcgtaccagcctctgggaggggcgccaccaccgatgtcccagcaggagcagcatcagaagaatcctcagccagcaaatcaagcatagcacttatctctgcatcgctgggattcaggggcacctcaaaatggacctgtcgttcatcatcaggaatctccccgagcgaggcaaccaagacactaacttcttcagcagagggtcgcactctaaggcccaaactgccgtcagtgacaggtggattcgacacaaaaagggtgaaggctttgggaggaggtaggttccaggccgagtatgccactggggcaccaacatttgacaccttgcctctaaggatcatctcaagtcggttcaccaagtctgcagagggaattctcctgttggtaacccgagttgagtcggctaggcctcgatacagataagctgggtacgccctgtctttcaacggctgaatattcttgaagacaaaatcagcaacaacagcttcagcagtcagacccctctccttcagcaatccaacttcagccagcaaagcacctacctcagctacctcctgatctgtgggggactcggtccagcttggggtgcgaacatccggctgccttcccgaccgaggggggagagagtt

SEQ ID NO: 91650 - DNA, 455 bp, Zea Mays
gagcttgctccctcttcaacttatgaagagagaggggcaaaccatgatatttgcaaggaaaaccagctatctggcaaggccaaaaatgattacaacctcgagatcatcgtcttgatacctgatgggatagacattagatttctggttgttattgtagagcccagaagcctcgccaaaaagttgaaggatgtctaaagtaacattaatatcctcagccactggatgtatgaaaagaaccacatcatcagcaaaaagggagatacgatgttgcaaaagcctagatgaaagaggctgcaacaaaccttcatctgctttagaaaaagccgatcaagcacatcaatcactaggacaaaaagaatcgaagaaagtgggtcaccttgccgaagccctctctgatgtgtgatggtgctcccagggtggccattaagcagcacacgagtggaggaggtaaggag

SEQ ID NO: 91651 - DNA, 441 bp, Zea Mays
tgtaaacaatgtattcttcgctctctggctgactgaacgatttgatcggagaagatgagttttatcaggtgagacaagtgtatgattatgctgctcaaccattgaagagacataatacttcttatctgtacccagcttaacataaatatgtgcatcacatccgcatcttgactcggcaatgttcttctgtttcttagtgggtacatctgttgtgttcttcctcttgaaaccattccttgaacaaaaataccgcgtgttcacaatttgaccatcaagagacaaattttgggaaccaacccgaactgaaaatccgccttctctcgcatatgctttgtagaactcttccacatcatccatagaatcaaatgacatcccaacaacaggcttcgtttcatctgcacatataggtttgaaatacgaatactgcaatttaagacgagg

SEQ ID NO: 91652 - DNA, 798 bp, Zea Mays
gtcaatattgcagccataacatactagattccatagcacagtagccaaaaactggagtacgctcgaccttactagatttatgttaatacacagatcttgatactatgtttggaatttagagcttcaagattgtagactgtgtgggcctgtatagaatgtggcccatggcccattatgggtgctgcacaccttcgtataagtgtatccactcattctatcaatgtatggcatcctattgggtttcaccctctttcattgtaagcaaaagaaaaaaggttttaactctattgtgagtttagtagcatggcagatttggaggcatagcaatgcgtgtgtgtttgacaatgcttccccaaacatccacgcaattttgttgtccgtccatgatgaggccttagtatggggctttgctggggctactgctcttaggaatgtttggcagtagttgggtgtgtattctcgttttccttttccttagtatggggccttttccatgaccagcgagcctcccttccccatggcatgcttccctcccctgctcctttcttcatcatcaccgcgggcgcaggtgccactgtcgtgaacaagagtgctgcaggcgaaggagccgcgtgctcgggcaggcgctactggtgatgacaccactatcgtccccccccctctggtcagctctacgactagtgcctccctgtccggcccaccattggcccatgcccagtgctgatggtgttcttcccgcccgtgccccttgacgagctgattgttgcacactctgcactggatactgctctcgccacc

SEQ ID NO: 91653 - DNA, 464 bp, Zea Mays
acagtgccttttattggaaattgatgcatgtggtgagatcttgcaaggatggacagcctcacattcacaaataaaccttaggccaacaagaaggttaagcttccagttctgtgacttatcattttcaaggggggaccaacttcatttttttagctccttaagttcacttaagttcctgacagtaaggtcatgcgaaggtctggacacttggggagaaagtataggaacattaaccagccttgaggtgttggagctttcactctgtgatataccaatgtttttgggaagaatcgcttcgttgcagagtctgagtattgaaatgtgccatctaccttgtgatttttctcattacttgctacagcttccattcttgcggcagctacaaattgtttgttgcaacgctaagttagagttacctggtgaaataaccagagccatcttggctcgtattccaaatatcagca

SEQ ID NO: 91654 - DNA, 274 bp, Zea Mays
cccaccatcaccaaagatatatactattactacatagttaacaaactttatctgcctcctgtcctgctaatctatatatcccctctccactactgctaccttctctcgcgcgtctctgctcaaagaataatgtcagcgtagcctagctagctcatagggattcctctttcatccctcctgagatcgacgatctcaccaattaagaacacacacgcacacagcagctacgtacgtacctagctagctagcatgatggaccatcagctgttcgacg

SEQ ID NO: 91655 - DNA, 283 bp, Zea Mays
agtggtggttcgtggttgtgcttgcacgaggcccgaggtacgcacctaatcattcgggctactatcaaggctccatcatcatcatcacaattcacaacgagcgagagagctagcactgggttgtctccctctccgtctctcctcctggggatatacataagaccgggcttctttgggtccgagagagatgaacccaccatcggcaggagacgatccaagtgaaggagaaggaagccattgctctatgtggaatgttctaggcctcttcgtacatgcatggctc

SEQ ID NO: 91656 - DNA, 430 bp, Zea Mays
ggagcgggggaggttaaggatttttgtcctatcagtttagtccatagctttgccaagttgatcaccaaaattttagccaacgggtccagaaaattgcagtctatggtctccttaaagcaaagtactttcatcaagggtcggtgtattcaagataatttcatgcttgttcaacaaacaacttgtttgctctatcaacaaaaagaccaagaatgttgcttaagttagatatcacaaaggcctttgattcggtttcatggtcattcttgttgaaagtgatgcatgtgttaggcgttgggcaaatatggcgtgatattattagtggtccgttgggctcttcttccattatggtcctcttgaatggagtgtcaggaaagatcatccatcataaaaggggttaaggaaggggggtcctttgtctcctatgctcttt

SEQ ID NO: 91657 - DNA, 277 bp, Zea Mays
gatttgatatcaagagggacaaattttctataatccaagcttttggcacatataaagttaaatgatacaaattgaggcataagtaaagcattataccatttgtagtatatgaaaatatcaattgatgtatcattttcttatgaatgtcgaataagttatgtgttgtgcttatcattttaaaccatgtaggttcgctcaagaatattaattgaaagtgagcaatcctaccatatgattgacctagtatgcatgcatttttaatcaaagtatataccaa

SEQ ID NO: 91658 - DNA, 291 bp, Zea Mays
tgccatctttcttcaaccaaatgaacctaagagcttccttgtaaacagggcatgagaattaccgtgaacacactaggcgcagaatagcccatacggtggtaagtcatgcatagagtactggtaccaaacatgcattttgaagtttgtctttatagctttaccccttcctcccaagcacgtaccaattcatcaatcaaaggcttcatgtacactcccattttattccccgggtgtccgtgaactatcaacgacacgaatatgttctgtctttgaaagcatacaccaggggga

SEQ ID NO: 91659 - DNA, 880 bp, Zea Mays
gaggtcttaactaatttgcaaaacgttctactgaatattctaagagtcactgacatcttacaccgaggtccctagaacttcgtttcttctccaaataagtccctgaccacggtgcgctcgccgtcgatccccaacgcggcatgtacaggccatggccggcgacggctacctcgtctagctaccgggaggacataaccgaccaagggtgacctaggaacactcaccaatttggcatgaacacactgagaacgatctgcccgcgtgcacggcggaaaccgtgaccacgagctcgtgttcccgttcaaccctggccgaattgaccaaacggtggccacgatgagcatccagtgcataccaagttgcgaaaacggcacttgagaggcgtagaaccttaccattgtgggctggccacggacgagctatccacggcggcttagagactcgagttgggggaaaatggtgtcgcaacggctctgggcaaaattgggggtggacattggggctacacggccgttaggaactgtagtttcaccgtgtatactcaatttgagaggagggggcggaggcagtgcgaatttgggcttggatcatcacactgggtggaggtgtgcataccccgccgtggatcatggtgctatttatagccacggcggcccggccagctatctacggccacagataacttcattagcgcatgcataccacgtagggaagaggcacagtgagggagatcgaggcatgggtgagaccgcggcaaaagttactgagtcacggtggccgccggtgactaactccggccacgctcgactgggttcgcgggattgcgccacgttcgaagttatccatccccagatcgattcactggatcgcatgagcccat

SEQ ID NO: 91660 - DNA, 313 bp, Zea Mays
tcctgatcagttaactggcattaaggatttgtaacgttttcactgcccgttggtttaggcttcatgagacagtcaaactatcgaactgcactatatgagacagtcaaacacttcgatagtttgatcaatgaagaacatgtttacaagatgcacaatgtagagttcaacattaatttaggtgatcgtttttgacatataagtggtcccttggaattgtatctcaccagacaaaatgttgtggagtcgtacactgttccatttcaaatgccgccattcccaaaacatatattcttggaggccctggcggcggtac

SEQ ID NO: 91661 - DNA, 506 bp, Zea Mays
gaaagacatgctgcacaatcgcgaaaataaagggacagttacggtttgaggagcattagtacaaggaaatcaattttaaattacagaccttggcgtagatttgtattagcctttcctgtacagtcgtagtatccacgttcgtatccatgtgttattggcggcggttaacggcggcggaagggacaacaccgggcgtgttttggcggcgactaacggcgagggaatggccagcaccagtgctggcgatgacatgcaacctgtagcgtctatgcatagatcaacaggtacgtctacttcaatggacatgcatcctatagcgtctacgatcaccgattacacagagggtgtatctgttagtcccccgacggcgttgagggcacctagacatattgatgagaacacaagattagacgtggtaggagcagataaacacatccccatgagacatattggggcgcatgaacaggacacacctcatattcttcaaagccatgtaagttctctca

SEQ ID NO: 91662 - DNA, 722 bp, Zea Mays
gtcatgagtgggaagcgaaccgacacccatgctgtggctctatgtcaggtgtggttaatgcggccaatcatttatggcgggttagtttggaccgggcacgagagacactcgagttgtccctttccatcacgcccatcctcccttgtcagactctgccaggcccgaccccgggcttggtgcggcatggttcgaccgagggtgggtccttctaaggctagcgcacctatctcttctgactgattaacgaatcctagggatcaagggttgtttccttagcgctctcactgaccggtgggtcctagggatcggggatgatttccctaacactacacgacacccagcttaagaccgatcgaaggtatgtgttttcttgcttgatctaggtcttattgtgtctacaggactcaagagctgactacaaaccctcacaaagtgcacactacacaggtacatggacactcactaggctagccttctcaagcaaggctatcctagcgtttctctcttctagcttagtctgcaagccaggacaagcaatacacgcacctaacaagctagacctagatctcaactcgtcacgctcatctagcaaggtggcatacttggtctgcaaagttgtgatgttcgtcatgtgtagggcgcagtcatcatgttctgtctcctcaaacaccccaactgaagctctagcagactcaagcttcctaagcgtgctctcgtacttg

SEQ ID NO: 91663 - DNA, 473 bp, Zea Mays
gatcggtgtgcccacccccacaaatttcgccagcttcaacagatttctgttggagaccgtaggtagaggatgagtcttacatggtggccccacgagtcagacagtgtacggacgcccacccaccagccgttgcactagaacgcgcgcgaggctgattgtgtggcgcagaaataggcttcagttgcgcggatggcggcatgcttcttttcggtttcatggaggaagaaacgctggcaggctaaccggccaaatcgtgcgtgcgtgagaaatagatagattgctggccgcatgggtcccatgcgtaagtgtcacaagggaccatgcatgtgtgaagtaatggtgatgtcatctgcggctatatgaataattaaatcgaaggaaagagggtgggttacgtccacattttggcgttactgggcaagcagccatggaatcacgtagatgtgaggcttcattcatttttttgttttctt

SEQ ID NO: 91664 - DNA, 496 bp, Zea Mays
gtcgggggcaagaagaagcctggtggaccgttgagagtgagatgggtgatccagattcggttaggcatgagagatgaggggagttgagcagccgccgttggatcttatgctagtgcgccagattagaaactgaggatacctcttcgtgcggattgatctggaccgttgatcgcggagcgtgcggccacggatgcgtaccggttcgtttatggggggggattgaatccggaccactggattgtaatcggatggctcagggcctttgttaccccttcgacagtcctaatttataaaagagaccttgtgttttggtttaatcaaccctccgtccagtgcgtgtgtagcctgagtcttgggaaattttgcgagttaaaccctgaccttctctgtattagcgcgcctagtccaggaattgaagaaaataggaaatagagatttagaaattgattttgagtatagaaatacttgtaaaacttgtataatccatagaaaattc

SEQ ID NO: 91665 - DNA, 484 bp, Zea Mays
atatattactccatattgcaagtaggtcctcttacattaagctatttacaccaacactccccctcaagatgggctaaatatattcaacattcccatcttgttacatgccaattcactatccttaggtcctagaccctttgtaagactatcagctaactgattacgagacttgacatattcaacttcaaagccccgctgtcaatcttttccttgatgaagaatctatcaatctccacatgtttcatacggtcaaactggactggattatttgctatattgagcgcagcaacattatcacaatgaagtaacattgtctcatctttcaacacccgaagcactttcaaaagacctttcaaccacatcatctcacatatagctaaagccattgctctatgttcggcctcaacagtagaccgagaaaccacaccttgtttcttgcttctccacgaaacaaggttacctcccacaaacacacaatatccag

SEQ ID NO: 91666 - DNA, 479 bp, Zea Mays
gtcgtctggaccttcaaataatccagactccattcccttttacaagcttggcatcatacttgtaactcttatttgctcattccattgtttccaatgaacaatccaaaataaagaagaagaatacgtgggaaaacaaagatgaacattttaagagtgggaggcttcaggagagtacgcacaggaaaagtgacttgtttcactgcctagtcttttgtctcgtctgataattaccacgccattggaccttgaaaccattgttccataggccacaacatgcagcgtggatgcgggtagtgatgagtttgcacaattatggagtgcccgatcgatgttgtatgggagagacagaagcaaaatccggcgaaactagcccagaggtgttttactcgtcaaggcaaaacaaacattgaacatggtaacgtttgacagcataatcgtttcacagttaggccatgcttgtttatataggaatgtagtcg

SEQ ID NO: 91667 - DNA, 430 bp, Zea Mays
ctataagttctatccataggagcaagtccgaggggttgaatttgtttcccttttgtaactagataacgcatacgtgtacgccaacccggtgaggtccgccctcataagcccgacctattggtctgcacccatgcatgacaggttataaagaaaagattcaccccctcagatgcctctatgatagtttatcctactgctccatggtcttaccttgcagttttccagatattattttatctaacccacccgaacagttccctttccatcagacataatgacatctgtcggggaggaaatctccggccgagtggcgcagtgcacccgccctaattcctaagatgaggaggggcttaggcgttttgcttgatcgttgaagtgaggaagaagaactcaggaacacgcaagggtttagattggttcgggccgccgg

SEQ ID NO: 91668 - DNA, 663 bp, Zea Mays
ttttaagaatattcagccactgaaggacagagcatacccggcttatttgtatagtggtgtcaccgactcaacccggattaccaacaagaggattcctgctgtggatttggtgagccgactggaaatgatccttagaggcaaagtatcaaatattggtgctcctgttgcatattctgcttggaatctgccaccttccaagtcctttttcgattttgcatccaacccttcttctagtgacagtggtttgggtcttagagtgtgaccctctctcgaagaagttgaggttctggttgcttcacttggtgatcttcccaatgacgagaggcaagttcactttgagatgcctatgagtccgagtgatgcagatataagtgctatgctggacatgttggctgaggattcttctgactcggtccttgataaaacaatagctgctgcaattatcccagagcctgaaaaaaccgtgaatactcaaaagcctgatggtactcgcccgaaacgcctccgctaggccagtcatccaactgcccctgccaaggggaagaaaaagaaaaagtgacggcttcgacgagtgtcgtgtttggaccaggatgctggcccttttgctcctgctgctgaagaagtaccggtggaactctttactggagctgatcccaatgggtg

SEQ ID NO: 91669 - DNA, 539 bp, Zea Mays
atctgacgaggtatgcattaaatcaagaccgtctgatccaaaaacaagcgccaggatctaacctatccaagcgttattccttatctaatctacgccgcccaattcccatctgacgacacaagagtattcccccccaacaccgcacagccgaccggtggtgcgacagaactcgccatcacggcggagctcgccggcgagctccccaatctctgcacaaacgtggccctatgcatcgcggaatgggtgctatcccaaatcaagggtttggcggagacagggagaggtcgttaccgtgagcggtgtcgcgacggttgctaaccacgagcgacggtggaacacgatggtacagtgagcaattggcggtgatcttggtggttcgctcctctcgtgaaggcttcgggcacccttcctacaacgcgacaaagcttactggctcgccagcaagacctcaacggcggcaatggcgagcttcagcggtagtggcaccctctctctcctctcggttctctcccttgacgccggtgggagtggccaagaag

SEQ ID NO: 91670 - DNA, 537 bp, Zea Mays
cttggttccagtgaagttcatcccagccctcgagttctagccctgggtcactgctagtacgtggtgatcctcgagtctgcaagcctatgttagctcccctcttcagttccaggtgtgcctagccttgtgttcgcgcaccaacctctaccagtggtgaccatagccactagattactcacctcaccatggccaggacattccagggagttgcacggccgcgtggtccacgttccaccttcttcaaaggtcagtgaagctcttctagttggtagttccagttctactatcgtgtgttgcttggaacatagcggcgccgtcatgggttggcgccgtaggcagtctccacatcgaactgttaagccgcaccgtcccctgttggtttcacgcacgcatcgtagagttgagaggtctctgaagctccccatctcatttgtttgaacactaccgtgcggtggtcggggaattgagttcgtcggatccagtgttccgccgccgccgtcggtagctagtggtagagtcctctcgggtcgattgagc

SEQ ID NO: 91671 - DNA, 1036 bp, Zea Mays
ggtcttatatgagcgttatcgcagcccaagaattattggaaacaagtagcattcataagtcggtcctggttaaaattgaagaacaatccgataacatatgcacctaagtgctttaggtccttcagtagcaagtaagtcttatggagttttatgccaaacattaatgcctctatgttagacctcctaaaatatggtgttttaagtgacttttgtgttgtccagtttaagttgagaaaaggttaagaaacattaattaacctgcttccacccatgttttgagttgcaatgtctaaatgggttgctaagtcttatgttgtgattagccaactaatgttaagtaggagtcaattgcgttaagtgattgttatgtatatgttgtgtctcggatttcgataataaaaggttggccgacgaatatgttgtatggcggcctagactgttgctctggttagcagacttgttagatggttttgtttaagctcgtggtcacggcgatttgcttgttgtagtctaaatgcgtatggttatgatcgcggatgaaaagtagtagtgctcatgtgatgtctaaattgaaatgcaaattattgggtgaaaagcgcttcgatatggattattgtagagaatgcgttgttaattgagtatggtacttctagtgatcgaaatgacacgaataaaaattagtgagtctacttgttagttctcacttggttatttcaactctaacaattgtcaaagtgttagaataattcaagtctttagaacgcggcaatttttgaattgtataggagctgaaatttattaattgctgttttgggctgcacgcactgttttaattgtgttgtttgtttgatgaactaaatcatgttttctgtagaaaagtcatatacaagagttgtagataaccttattatattgcttgtactaaaatttgacagccatatgtctgacattttaggagttatgataattacaaattcagtaactgaatctgtccaatttctgtacagatttcagaaactgcattgtttgttcaatt

SEQ ID NO: 91672 - DNA, 705 bp, Zea Mays
cagcatctgtaattgatgtggagcattacagtattgcaggaccaggaacagcaactgaaagtgcagagaatgaaacagaagaaacaacagcagccgatgattcagatccacagtcacccactcacccaatcaaagtcaatggcagatagacactggttatagtgctggttcaaatcagaatacaccacaaggaagtccaactgagcaaggagtggtgtttgccacacccgcccacagatgcagcaagtggagagctgaggttcagaactctagaaagtgtatatgacgacactgatgaagtcactgattttcagatagcggtttgtgctatcttgctgcagaggagcctagaagtgtagatgaagcattagaagaaaagtgttggagggaagccatggtcactgaaatgaattcaattcaggataataagacttgggagcttgcactattaccacctggacaccgagctatagggcttaaatgggttttcaaagcaaaaagagaccctgatggaaagataaataagcacaaagctaggttggtcgctaaggggtatgctcagcgtgagggggtggattttgatgaagtatatgccccagtggcaaggattgagactataaggttgttgatcgctttagctgcacagaatgggtggaaagtgcatcacatggatgttaaatcagcttttttgaatggtgatctgat

SEQ ID NO: 91673 - DNA, 493 bp, Zea Mays
gtccgagactctccacgggagttcgaatggtacacgtggaggtttgggacccacctataggggtccagacggcatacgtaggggtctggactcatgatagaagtcactgagcattttgacctcttggactcgtggcggcactgattttgtcctcgaacggtgagcagatattgaggccaatggccctgttagacgggttttgacccatggaccatgctgcttaattccttagtacacggttacagataaccacacggaccttgactcagtaggagatggtacctagttacggagtaccgacacacttcttgatctaacacaagactcatgcacacctcacaaacacatctagtttcagctcgtgggcactttgtcaaatgatctcttttgtcttctcttcgatgaccctcttctgcacaaacatatatgcatgatctagcctttccatcggacttccttttatttgtgtaccttaaatcagtattaaaaatta

SEQ ID NO: 91674 - DNA, 464 bp, Zea Mays
ggaggtaggatctgaggtcagtttgttgtggtatgttgttttctcagaagcaacatcattgccatgttgtcttgtgttggcatcctctaaaatgcatgaaactggaactgggatacattgagactacttggttatattgtatcattgtgcttctattctagagtaaatataaatatctaaaccacttcaatttgatcaacaaattctgaaattccatatctggcgtgatgtgaattggatctctgttaagtgaaagccgagtacctttgtgatgactaaaagttggactctgatatttgcatattgagaacatatccttgattaaaagtgcatgtaggtgcaagaagccaatcacttttactacaaagatttataaggtgcgtacatgttaaacaactattttgtacaactcacaaataatcgcatgctacaattatgaccaccttttttgtgatcatgctctc

SEQ ID NO: 91675 - DNA, 535 bp, Zea Mays
gccacggcgaggtgcaggcgggcgggctgctggtgaggacgacattgccggtgaggatgacttcgagctgctttgaattatggtttttaatttttgtgcaatctttgttgttgatgggtagtggcgggggtactcggttcgcgataccttcgctctgccgcagatctctaccaaaatcattctctggcacaaactaatcaatagccatggacatttgatgcaagttcgtttcagtagctataggtgctagatgcaagaaagaagatggacacctaattaaatcgttcgttacctggacgaggccctgttcttgtgcgctactagtaacatgaattgttgaaatcaatgaacaacccttggataaagtaaaccaataaagcatatgcccatgtgatcacgacgattaggcaacttgagcaagattaggaaacaaacgatttgactcttttgtcagtgcttctattcccaaatagttagggggttgtggtgagggcgatgagattacgacattatgctgtaggctactgcttgctcg

SEQ ID NO: 91676 - DNA, 394 bp, Zea Mays
ggacaatgttcaaatacctatactgatacattcatttgaagaggtaatatctttaacaactatattgatttgcggttgtacatataaatgatttattgtttgtgttattggcttatgattgagcttaaaatgtgttggcaggtacaggttaatttgcaggatcacgcgaatatgaatgagagtggtgaccatgaacaaagtgatcatgctagaaaggtaataatggtattatactgaatgttggactgcataatattatatgctgagaaatatatacttttgaattgcagaaactggattttgcagtcgatgggataagcttggcaagaccaaataactcaaaacccaaaggaagaacaataaaggggagtgaacaaaaggttattaaattggg

SEQ ID NO: 91677 - DNA, 408 bp, Zea Mays
taaaattctcttagacatatcaagatgtggtgaaggatttgagcactaaccttagacaaatgtggaaaaatatatacacttttgacatcttagatatataaccaaacatgcccccaagcaagaatgctactgacaaaatggatcatgaatctaatctctctcggcatctcctgatgtgcacatatcgttatgcatatcaaagcgagagcaggatttcaatctcgcattccaagtttcaaccaccaatgccacagaaaaccgcccgcagcaacaaacacaacaaccgctcttatggttgtcgtctcttctctcgcctattcttaggctctcaacctccctccccacccagtgtcacgatccatcaccgcatttcctccccgccacctcctctctcccctccattctttc

SEQ ID NO: 91678 - DNA, 569 bp, Zea Mays
ccgcgatccccatgcatccttgtttcatcgtgccagtactagaaccaagcgccaacaccatagcagagaagaactcggagcagggagcacctgccaatgccgatgtcgtccccaattgacgttcgaggatccacgaagggcctgggaagttcattgcgttgcttggaaggcgctcgtggccgggagtggagggatcgatcactagggcggccggaattcttcaccgaacatcgtgatccgtcgtgccctatgggcagggtgctgcattgcgctaatcacggtgagtatgcctctgttgagttggttttgtccacctccacgtgtagacccctactattcggggcttggggcactagggtgtgaggtgtgacacaccgacaatggccaccgccgggcgggactcagcaccgtcgcgttttgccatcgggggaagaagacaaacgcctggccgttgatccgagtgttgatggttgggattagatccaagggtagctacgcgggagccattgatcttgggactgagggcttcaattagaagaggataacgtttcagccgtcttagatcgtgg

SEQ ID NO: 91679 - DNA, 342 bp, Zea Mays
ctgggttattgtagtttcaacttctatttgcttagtatcagctttgggttgcattttgtcagcttcggtaaccttccctgtggaagcgggacttatggagttggttgtttctaaaatatctaatacatttaccatcctccttctcttaggagttgtggcagaactcttttctgccttcagcgctgttgcttctgttgaaggacttaaaatccctggcatctttgttacttctccagtttttgacctttcagccttatctttgtcatccttcgtttcaactagctcatctgaaggtgccttcggcattatagtcggctcttcagccctctgcatgggaggaat

SEQ ID NO: 91680 - DNA, 404 bp, Zea Mays
ggggcatggtcttttctcggccacatgatctgatttgggtggcccagattagatcaaactttaaatttattggtacgtaatccttgttgtcggatctaaaatctacatcctaaattttttgaagcctcgatctcaactgagtcgaatgattgccgatcaacacccagattctatgtgatgaaagggtactttcacgtcctaatatgagccgtctagcagaggatcaagggcccaagaaccctcttccaccacacgctatcagaccagacgatgctaccagcaccatggcggcacacgtcggtgagctccccggactcgccctcacgtcacctaataccctaaccgaaagtcaccacatagagaggacagtaactgaaagcatctaggcccctggttggttttag

SEQ ID NO: 91681 - DNA, 396 bp, Zea Mays
ccgagactgacccgctataaacggtcgaccgcattaagtacatctgacactgagtcgtaatagagagccgatccgcctcccactcatgacctgcacaaccctttggtcagcagcgcattcatgacctacgagaccctcggcctgtggagcactcatgacttatcaagcctaggtctgagtgcatggaccatccactgggctcgctacacgatgagccacgtcgaggcctaggctatggagccacgtcgaggcctaggctatggaggccagaggtctgcatggcatagaggtagtaatgatggcaccgggtccctgcaccgtccacaccacccgttataataagcacaaacatggacgactagacgacaagacgcatacggataacgcgtcctcgcc

SEQ ID NO: 91682 - DNA, 589 bp, Zea Mays
tgtctgcccatgccttgttaggtttgaaatttatttgatcagtgacagattggacgtctggtagattgctcttggctggtcttcaccccgctttgtccttcaatgcttctgcttactagacttgcagttcagtagctatatttggatttccttcgatctctatcgatctcttccttctgtctcaatacattcattatgtatactgtatagatatgacttgttcagaaaatctattgaaaactcctggccgtccccctaaatgggtgtgaccaagggacgtcttggtacgcagagcgtttagcacattgtcctagagtagtaacttgatgagaccgtggggtgtaatcatatcgctcgagcagttgaccttagtccaaatgttgtcgtgttacgcgaagcggcgtctgttgcctggctcattttcagctagcttgaattgcttattgaatacttgcgactgttcggcgagtgtggtaggaagtggacggtcacccccgccctctataaatagcctgcttgcaccgttgttctcttcgctcatcctttgatcatgtgctactctcttctccctttgtcctcttctccatcc

SEQ ID NO: 91683 - DNA, 404 bp, Zea Mays
gagatactataccaacgctggttttcttcttctgctcggcgcatgctgtagtggttatagaccaaaaaaacatggatgtcacttaaacatatcaactttaatgaaacttacatgttctttatcagctcaaatgttagacttaccttcagcaagtctgccaacaatatttgctaccacagcagcttcaacaatatttttaagccctgtttattgttttcttcgaaaccaacttcaacatggatgaatgaataaggaccatacatatgaccatcgagataaatattgttatagtccttaacgttgagaccatctataatttttccttcataaaacttttgatttggaaacttgctgatggaagggtgcattctatattgaatatttagcatgtgctttgggaaatc

SEQ ID NO: 91684 - DNA, 302 bp, Zea Mays
gggacttggtgtaggagcacattgcttatagagtgtggccacttgcagatgggtgggaaatgccgaaggagactgctgctggctctagccaaggtggtttagtctacctaaagtataccttcaggtacatgagccaatttgatgaactgaatgatgactggctaaatgccatagaagcgacaagtgacgagttgcttggagcatattcaaagggcaaagatgaagccatgacaactgccttcggggctcgtggcaaaaagagattaaatagagtgttcgatgttatcgggtttgtgtaccca

SEQ ID NO: 91685 - DNA, 471 bp, Zea Mays
cataagggtaagaaatatcgcatcgtggatgaactcaggccactgttccgctccggccgccgtacccgcctgagtcacgaccgcttcggataaactcactggagttagccacctcgcgaccttgcgctatgtgttttggtgctttaaccacgtcgcagtgagtcaccttagccacccgttcatcgttggtgagcttgccacggtgaacgccacgaattgcttgcgccagtaacctcttccctctccggccgccaccgtgccaactccaaatcacgagccaccgtccccgaatcctataaattgagcacaccctcggctacgctatgtaattatgcacccaacacacccactcgtgcctccaattactcaccagagagcctcaatttgaaactttccccaattcggtccagagcaccgcgctacgtgagctcgccgtggccagcgtgctacaggtccgttcatgccctttgc

SEQ ID NO: 91686 - DNA, 747 bp, Zea Mays
gaaagcttccaaattataaagaagaagctcacaaatgcacccgttttgtcactgccagacatccatcaggatttcgtcgtcttctgtgatgcttcaaggcaaggcttagggtgtgtactcatgcaaaatgagaaagtcattgcctatgcatcgcgcttactgaagccgcacgagcagaattatcccacgcacgatttggaattggcagccatagtgcatgccctaaaaatatggaggcactacctaattgggaacaaatgtcacatcttcaccgatcacaagagtctgaagtatattttcactcagccagacctcaacctccgtcagcgaagatggctagaattgatcaaagattatgaccttgagatccactaccaccccgggaaggccaatgtggtagcagacgccctcagccgaaaacctttcgggaagaaaggaaccaacttcttagaagattggaaggaagaatcagctcagctgaatgcatgtctgggagacaatggtagcctagaagtcaagccaatgctagaagacctcatacgcaaggctcaacacttggacactgagacagcaggtcttatggaaaaagctcgcaaagaacaacttccggacttcaggacagatgaagaaagagtcctttggttcaaaaatcgtctgtgtgtaccaaaaggagaggcacgagaggtcctgcttgacgaagctcacaactcagcctactccatccacccagggaccaccaagatgtac

SEQ ID NO: 91687 - DNA, 578 bp, Zea Mays
cgaagccttccttggtgttttgccttacttcggcctttggaagcatttgtaccactgtcgacctgggatggccggagggcagcaccagcttatggggggcgcgagtttggagatgcgctgtgggaggaagactgactatctcgacatcccactcaaggacaacatcaagggatggcgcctggaatggttcgtcgtggagaatcatgggaattctctccccctacggtcggggagacagccagatgttcacactccgagttggaccgaatcccccacggaccaggaggtggctgaggcaggggctctgcttgctgaggttgggctgatgaaagagaggggtttgactgcagaggctgtggttgccgacttcattttcaagaacattcagccactgaaagacagagcataccccgcatatttgtatcggggcctggctgattcaacccgggtaactaacagaagaattcctgctgtggacttggtgagccggctcgagatgatactcagaggcaaggtgtcgaacatcggcgctcctgttgcatactcggcctggaatctgccttcttccaaggccttta

SEQ ID NO: 91688 - DNA, 447 bp, Zea Mays
cgcgcctgtagtcggtctttgcgcggacagtttggtgtagggtttagcacgggtagtcttttgaggaagacttcgattttccgcacttgttgtgctagtccggctgcacccttaggcgacttttgcacggatagtctttttgagggagacttcgatttttcgcacttgttgtgctagtccagctgcacccttaggcgacttttgcgcggagtgtcgcacgcgagggtggctagtgctgcccctcgtggtgactttgtattggtcgaatgtcgaagaccgtcgacgcggtcttttttcgacgtagatttttgcgggggatttttcgctttgtatattacatggctccgcctcgttaaaaacctcaccccccgggaggaaaagagtgcgggccagaataaaattgttgtgggaattacaagggcgagcgggccccgagcagtcaaacaa

SEQ ID NO: 91689 - DNA, 883 bp, Zea Mays
atcaacttctgccccagcggcaccgccgccgcctcctccgcaccaccgcctgtcaccgccgacccggaactcatcttcctcgcgattcgactacagcccacaattccactccaaaaccgaatcttcttcttctttttcttcacacagtacagattaatctacagttctaccgtaccaccaaacacgaaacaccgaactctttaacctctccgacgggatagcctccgcccgtcgaaaaagagcacgagccaacgtccgccgaggccttatctcccccacgcctccgatcagacgcaccaaatcctcaactgccccaacaagaacggcctggaattccggcgagggacggggacttcgttggaccgacgtctactggaccaatttaccccgcttcaccaagcccgcacggatttgtcgggcgagaagtttgggatttgttgattaacagatggaaccgacctccgagaggcgggaagcaatccaccgatcacgaatgggtttgattcggtctccgaagggactaggctgaataagaaaccgggatggatgggatttttctactgctccgtgtgagaggggagattgacgacgagcagtatcattaacatgggtggagagacgaagagatgagggggctgaatagaaaagtggaccaaactaccgtctggcggccggactccgcagcccggagggcgtaggggaaggtgtagtgtatgtataaataaaaaaattgcagattttttgcggggagatccttgaagactcatgaattgacgtgcgcgtgaattattggagaagggctgagtggcggtgtaggggatgtacccagctatacaaccatggctttgttcattgttcatccggaggctttttggtcggcagg

SEQ ID NO: 91690 - DNA, 478 bp, Zea Mays
gcaaatagttggtgaggtgtcatttcctcatagtcatcacggtcccttatcattcttgctagacttttatccttttctttgtatgctctcataaatagtctagtaaccttggagtcactccaatcttcacttccaagcactcttattttgttgaccaacaccattagtcggtcaaagagtgattgaagtgactcacccttagtccaatcatatcgggcaagctcactctccaaagcttcaattctgtgtctcttagctttggggtctccttcatgtaacattttgataatgttccaaatgtcacgagcatcctctcttccttggactttccggtacacttctggacaaaggcttccttttattatgctcacggcttgagcattgcggtgcacttcttgcatcattttcggagtcatctcttctccttggacgggcttatgcatacctatattgacaatctcccaaagactaggatgta

SEQ ID NO: 91691 - DNA, 494 bp, Zea Mays
agctgtaagtgctaatgttaaaatatttatttgtttgtgtcttaatgctagctgtattgctttggatctgcaaaaggagacatagaaacaagtgaagtcagagtcatagaagtcaactaaaacgttcagtcaatggaggaacagtgtaactatggcctgaaagggttctgattttgagccatggcgatgtctatcgagatgcaatgctgcttgcttatccatctacgcttgcagtcaagtttgatcactttcatggtttgggtaagcgctgtggttacttcgtattgaaacttagtgcttggttacagcaagctccatggttataaagtatttacatcgacttatctgccctgtaacttgtaaaagcaagtgtgtctctatcgtgcttgctggtacaaaccttactgactcttgattataatagaagttcgttatggcgtgtaaacaggtcataacggtggaagcactgagttctggtcactagcattgtggag

SEQ ID NO: 91692 - DNA, 338 bp, Zea Mays
aatttatatacatgtacaaacacatacatcaagttttctaaaacaacttctatttcgggacggatagagtacattattttctctcagctaacagaaagtagccgaatgctgtgaggcttctgagacgacgtgcatttcatgttttcgtcttgcagaaatcaaatgagacaacaagacctaccaaaacttcctagctagtcattcagctgcatcaccagcagagccctcggggaaagtacctaggcttttattttacgacaagttgttaaaagggtcagaactgctggtgcagtggaacctggtgtgtgttgacaagcagggccggtcctgacattttg

SEQ ID NO: 91693 - DNA, 323 bp, Zea Mays
ccttagtcaatgcaacagccgataacacccgctttcttcgggaaatggcaggacaacaaatgcaacagcaaggcgggcgagcctatccacaaggaccccgcgaaacttcatatttggatttctcagaaacgcatcccccgctatttgtcaaggctgaagatcctcttgaagcggatgaatggattcgggttatcgaacaaaagtttgggcttcttcgatgcacggagactcaaaagcccttatttgtggcgcagcagttgtgaggccctgccagcacctggtggggaaattatgtggctatccagcctgttggtcatcaaatt

SEQ ID NO: 91694 - DNA, 537 bp, Zea Mays
gacttttaagatatttcaaagcttcatgatcagaatggattatggattctttaggtaacaagtaatgttgccaaacttccaaaacgcgaactaaggcataatgttctttgtcataaaccgagtaattcagatgtggaccatttagcttttcagaaaagtagactacatgtttaccttcttgtagcagtacaccttctatgccaataccacttgcatcacattcgatctctaatctcttaccaaaatcaggaagttgtagcagcggtgcttgacaaagctttgtttttagcgtatgaaatgcttgatcttcatcatgtccccacttgaatggaacatccttctttgtgagattgttaaggggtgcagcgagagtgctgaaatctttaacaaaacgcctatagaaacttgcaagaccatgaaagcttcgaacttggctcacatttaccggtgtaggccaatcctttattctttaaccttctcttcatcaacctgaataccatttgcaaaaacaacaaagccaaggaaaacaacgcggtc

SEQ ID NO: 91695 - DNA, 723 bp, Zea Mays
gtggaatcgggtgttaactgcggataaaattatttgatttcaaatcaaatggaacacagtctgaagtactgttgttaacatcattctgatttgttctgattgtgtctcgccccgatccaaaactttagatataaataacgagtgaaaattcatctgactccgaagtattcaccaaattaaatccggtccaaatattattggcgatcttattttgttcgacccttttatacattttgtataccctaattttataacctcaaaaatatctacatttcgctttagtctaaaaatggaaaaaaaaccaaattcccccaccgccttccctcatcctaatcacgtcgtctctcatcccttatccattggaactcatctccagcttatgccctccacgtactagctctagaaattcttgtaggcattcctttatctcctccacctccacgtagaaagcctaggattttctaccagccacgtctttcatctcctaggcgttatctgagcacagctcatttgttttcttatgccatttcttctctgttcctgaagtcacggctccctggagatgttcagctcgtctgcgcttggtctttgccggtagccgagctgctccctatgctcgagttcctagcgtcctgcatcagctcgccggcagccaagctctctggcacaagcgcctctaagccctgctccttctccaaccgtgccaatgctcgccagccctca

SEQ ID NO: 91696 - DNA, 932 bp, Zea Mays
gcagagtgatcgcttatggctcaaggcagttgaggaagcatgaagggaattatccaactcatgatcttgaattggccgcggtggtctttgccctaaaatcgtggaggcattatctctatggcgagtcttgtgacatttacaccgatcataaaagtctcaagtacattttcactcagaaggagctgaatttgaggcagcgtcggtggctcgaattgattaaagattatgatttgtccattcattatcaccctgggaaggcaaatgtggtggctgatgcccttagcaggtccggggttccaaaagtggccttgcctttgattgctgatctggacgagtttggggatcgctttgtgctatgttggcactgctagtgaggagactcggatgcttattcagtcctccctcatggagagagtgcgtgcggctcagcagcaggatcgtctattgcaggaagctcgaaagagggttggtgacggtaaaccccgggagttcaccattgacgagaatgatttggttcgtttcaggggtcgtctttgtgtgcctcagaaatcagaggtgaagatggatatcttgagagaagctcataaaaagccttacaccgttcaccctggcaaaaccaaaatgtaccaagatttgaagcaaaacttctggtggaagcggatgaaggtttatgtttctaagtatgtggctgcctgtgaagtatgtcagcgcgtgaaggccaagcataagcggcctgcaggtttaccgaagacattggaaattccggagtggaaatgggagcatatcaccatggattttgtggtgggcttacctcgttctcctcggggcagggatgccatatgggtggtagtggatcgcttgactaagtctgcacattttattcccatgaagaccacaaatttcgcttcagaattggttcccttatatatgaa

SEQ ID NO: 91697 - DNA, 609 bp, Zea Mays
atctgatcccaatagagaagagtcctgcactttctgccatataaagcttcaaatggtgacatcttcagactggcctggtaactattattataagagaattcagcatatggtagattgttgtcccagctgcctccatgcctaagggcacaagctctcaacatatctcaagtacttggttagtcctctcagtttggccatcagtttgaggatgataggccaaactgaagttcaacttcgtacccatgttctcatgaaggctcttccaaaaccttgaggtgaattgggatccatgatcagaaaaaccttctttggtaccctgtgtaaacacacaactcaagccatgtataactctgccagctgagaacctttataagtagtattgaccggaatgaagtgagccactttggtcaatctgtccatgatcacccatatagaatcataaccctttgaggtgtgaggcaaccaggtaatgaaatccataccaatttcttccgagttccattcgggtacctttaacgggtgcagtagtccagctggtctttggtgttcagcttttactctttgacatacatcacacacaaccacgtgtgcagctacatctcttttcag

SEQ ID NO: 91698 - DNA, 600 bp, Zea Mays
gtagggcagggcacccctcggattctagtatggacctcgttaacatattcgcaacaaaattatcttcgtatagtattgttccgagcgaagttcgagagcgagagagtaggattgagaaacaccgacgatggcgccaccgtatcggtgtttcgccaccgcgcgcggctgggtggaatcggggttggggggaatcgccccgttgcccaaatcctcaccattcgatcccaatggacggccccgattagatgttgcatcccattcatctgatttagatcagaaccgttgaaattagatccgatggcagatgtcaatcgcgcttcataaaatcccgaccactgatccccgatccaacgtacgtggtgcgatactggttcagttattcatagcgcagatctgggtcgtgagtctctaatcggacagccagtgtctgcacataccccttcggccctataaaattgcgtaagagacagtggataattatagaatcaacccgccatccacattcgctgttcactgagtcttaggaagtttacaccgagccccctgtgctttttagtttttggtgcgcggacccgaggtcagggaaattggacaaaaaaa

SEQ ID NO: 91699 - DNA, 351 bp, Zea Mays
agtggcagatgcgctcagtcgcaaggcttcctgccattgtttaacagtgaggacttccgacattacattatgccaggagatggagaaattgaacctgggaatgattcaacatgggacttcaaatcatttgaagctggagtcagtcatcttacaaagaataattgacgcacaaaaagatgatgagggtatgaagcacatacgtgagaagataagggctggaatagccaaatgtttcaaagaagacgatcaaggtgtgatatggttcaataaccgcatagtagtgccgaagaatgaagaactccgccagcaaattttagatgaagcacatcttagtcgctattctattcatcc

SEQ ID NO: 91700 - DNA, 508 bp, Zea Mays
ggaattttatgtcatgagctccgagtttgcacacccacttggctgttcttcccactgcttctctattgcggagtatgtcttctatcgggaagcctgtaaccactacgactttgtggtcgccaaagtagtggcacaactttcacgcagtgaggagtacggcgtatagtagcttctggacttgagggtatctgatcttggagggcccgaggaccacgctaatgaagtacatggggtgctggactggatgtgcatgcccttcttatgtccgctcgactactaacgcagtgcttaccacatgagttatgcacgagatgtacaacaacaggtcttcagccgggtggtcagtgatggcttggctaggtggtttgaggaccggtggagtggtcaggtatttcttgagtgcctccaatgcttcttaggcctcgagagtccattggattctatccacattcttgagcagtttgtagaatggcatgcctctctcgccgagccgtgagatgaaacgacc

SEQ ID NO: 91701 - DNA, 389 bp, Zea Mays
ctcagtgataagggagtgcaaatcatcaaggaaatgcggaaccagaagattgaaaagtataagtgtttctgccaagatagtaaaggaatgttgtggttctaggactgcctggtagttcctaaaaatgaagacctcagaaggaaaattttggatgaggctcacctctccaagttctccatgcatccgggaagcaacaagatgtaccacgatctaaaacccctatattggtggataaggatgaagagggaaatagccatgtatgtatccgagtgtgatacatgtcaaaggataaaggcaagtcacctaaagtcggttggtgccttgcaacccctctcaataccttcgtggaaatgggatgacattagcatggacttcattgtgggtttacc

SEQ ID NO: 91702 - DNA, 392 bp, Zea Mays
aaaagtctcaaacttctagagtggatgctaaagctactagctgcataacaaccctgttcctcgaaccattttgtaactggaaagaggaaatttcaacaacaatttaagatgaagcaacttggacagatcaatatccccacgccctagccagttggggagcaccaccacagcaccaactgtcgccgcccagagtcgtcttctctccctcccatcccctgcactgggattaaaagaacagttgaagctgcgagagagaaacagaactttagccgaagctagcagtaagaggctagcgagccgaagctagcaagaagatagtgggctatggatggaaacggccgggtgtcttgtttatttgagatttgtgtgggatcaaacacgtgtcatcaatc

SEQ ID NO: 91703 - DNA, 330 bp, Zea Mays
ttttgtagaacacctattaggaaggagaaactggtacacaaagagccaaggatcacgtacaggcaccatctaaaacaagcgtacataggtcggacaccatgatctacaacaaagtatcggaccctcgattctatgaaagacaatgttcattttcacaatatgtgaattattcagttggtgaagtggcctgcatgcggtggatgtgctaatgagtgacctgcacgaggtggatgtgccaatgagaggagtacaaccaaatgtttgacttgttaaaagtacaaggcggatttggaatatagactttgtctatgtaaaaggtgtagttgacgc

SEQ ID NO: 91704 - DNA, 562 bp, Zea Mays
ggcttctttctcaggattacccgatgcgcgagaatgccgcagcgacgcaacaacctgtacacgcggatcgagggagggggagtcaggcattatcccatttctctggacgagtaaataccgaacacgactctctctcgctcatctcatccatgccccaggaacggtgtcgaagaagtcatcgtagaaagggggaaatcgccactgaagctcgctgggtagagcaccctcgctcctcgacgttagcgccacatctcccattccaagggcatgtccgcgtgtgctgacccaaggtactgaatcaagtgcacctatctcgataaatttagtacctctgcgcctgatgaaagaaactctccggtgtagctaccaatgttgcttgggtcgcgactatgggaggtcgtgcccctgctgttgtcacccagcccctacactagtctctggaacccgccaacttggccctagggttttgatcatttttttggtctcgctaggggagagtaggtgtgcactgggcgccagccatggcgctgccgtgggagccaggagccgccaccagcgtctg

SEQ ID NO: 91705 - DNA, 411 bp, Zea Mays
atttgatactagtaaacaagacgatgaaaagtagtcttggggcccacttgctggtgacctgaatccacagcgaccacaaaatcgtcaatcttggagcaactctggttctcctgatacgtatcctgcgtttccacgatcaggctgctccagcgcatccacatcagcttcagaacttgagaaagaaggcactcgcccggtgtcctccagtaacagaaccatcagctggaaacctccatcacatggtggcgatgggcgcgtcgtcgacatgatccaggtgtggactggtcttgcaacaaagttctggacattgcctggacctggcgtatcgctaaaatcatgtggtgtggtgtggtgtgaaacccgtcaccgtcagagctgcggcgtagagaagagaacggacggacctttttt

SEQ ID NO: 91706 - DNA, 587 bp, Zea Mays
cctggtttgactcaggtttgaccagccaacttctgttgatcttgagttcgtcgtcttatggaatcgttgttatattgctgatatttgttggtttggagttttctagaaaacccaattttggcacccaataggtgtgcccagtgggtgtgtatgttgtcttgtccttagaacaattacttgaggtgacatggcataataatacgttcgtgcggttaatttactgaccactagtgccgagttacaccatgttttgccagaagcgtgtcgtttcttggaaatttaaatgactcttgaattcttatgattgttcgttatatgaatgaaatatgaaagggcatcatatccttccgcttatttaaataggccaactatctattgtaaacttcttcactcgtcctcacttccacttccttgttatatctttctacaccccaatggcaggaaacaaggacgacaagggctggagggccagaggcgacaagaggaagcgtcctccgactccacccccggaggattttggtcactcaaagttctgggacaagaatacccctctgtcgccccctcaccatcgcatgtttatacgaaag

SEQ ID NO: 91707 - DNA, 531 bp, Zea Mays
attaaaaggaaccaaccttttagaggattggaagaaagaatcagcgcaactaaatgcatgtctgggaaacaacgacagtctcgaagtcaaaccaatgctggaagacctcatatgcaaagctcaacgtctagactcagagacagcaggacttgtggagaaagaccgcaagggacaactcccggacctcaggacggatgaccaaggagtcctttggttcaaataccgtctgtgtgtaccaaaaggggaggctcgagaggtcctactcaaggaagctcacgactcggcctactccatccacccaggaactaccaagatgtacctggacctcaaaaccagatactggtggaaagggatgaagaaagagatagctcagtatgtggcccgatgtgacatctgccaacagacgaaggccgaacaccaaaagcctgcaggcctattacaaccccttccgatacctgaatggaagtgggaagaaataggcatggacttcgtaaccagactgccccagacgcaaaaagggaatgattccat

SEQ ID NO: 91708 - DNA, 606 bp, Zea Mays
caaacatgcaaatgtggaagtgacagttgctcatatttacaagagccttatcgcactcttgaggcgatttgatgagatgcatgctaataccaatggtgggcatgatgagggcaccgaaggtaacttggatgaatatgttgctcatactgaacaagatgaccaagaaggacctaattgacggcgactacgtattaaccgttgaggtatggttggttttgctgatgtgaggtacatggcaatgatgatgcttttagcaaggttaaatttaagataccttcttttgatggtaaatatgaccctgatgcttacattacttgggagattacagttgatcaaaagtttgcatgtcatgaatttcctgagaatgcgcaggttagagctactactagtgagtttactaaatttgcttctgtttggtggatagaacacggtaagaagaatcctaataacatgccacaaacttggaatgcgttgaagcgggtcatgcaggctagatttgttccttcttattatgcatgtgatatgttaaacaagttgcaacaattgagacagggtaccaaaagtgtagaagaatattatcagaaattacaaatgggtatattgtgt

SEQ ID NO: 91709 - DNA, 301 bp, Zea Mays
acctagagggggtgaataggtgacgcatgaaaaatctcaacttaaacacaaatttggatcacaaaataaaagttagtgcaaaactagatccaagagagtgagaaggaggaaagttctttcacttgattgctctcacaagattgcgaaattgacatagagcagtattgcaagtgaaatcaagaactcgaagagagggaggaagaataaaccacaaagaatcaaacacacaaggcaaggtgatttatcccatggtttggtcaagcctcaaattgttgcgtactccacgttgtggtatccggac

SEQ ID NO: 91710 - DNA, 296 bp, Zea Mays
ctcttacaaaatgataatccacctcaatatgcttggttctagcatgaaagacaggattagctgataaatattttgctcccaggttatcacaccaaagtttagctattctcggactgttaatatttagctctttaagtaagatttgtacccacataatttcagctgttgcattggcaatagccttatattctgactcagtgctggatctagacactgtgggttgtttgcaagcactccaagaaatgagatttgaacctagaaacactgcaaagcctcccgttgattttctgtcatca

SEQ ID NO: 91711 - DNA, 892 bp, Zea Mays
cggcgacttgggagctccggctgtacaaggttagcaagatcttgccttcttctttgtgatgtctagaggaactgctatgtctattccccttcccctttgtggctttttctttgttgtttgttgtgactagatattggtcacgtgttggtgtcgcgcagtcgtcaaggaggcggcaccgaggatgtcggtcgacttcgaggtcctcgtcatggatcttgatccaacagtcgaggtggaagaacaccggctccagacgtttaacaggaggacgctaatactttgttcgatgtcggtaccagcatcaacctagacatgcctaggacggagactggcataggccccacaagacgtacccctaccgactctatggcccctactgatgtggcttgcactgctgccagtgatgatcgcggtagcaacaaatcaaggaagagggcacccagatctaaagtctagaacgacttcgaggagctaactcatgtcatcaatggtaagagggtcaggtatggttccatttgcaagtactataagcagactttgagtgccaaaactagctacggtataggccacttgctctggcatctaaagtgtaaactatctgtgaactgcttgtgatctgtatttgattctgattgtgatctgtatttgaggaaattgtatgtgttttgtgcctattacttgaactgtatgtatttgagtaattctgtatgaagtatatgtattcaggcccggctcagcacggtactgtaatgcttatcgtgctcccgacaagacatgacacggttaactcactattgtgtcatgcctgggccatgcccaatatagttgtgctggcatggcacgacacgaggtgttcaacgtgtcgtgtttacatggactagtttgagctgtg

SEQ ID NO: 91712 - DNA, 428 bp, Zea Mays
aaacaagttaacggccggtctccatgtccatgatggccactccttaaaattattgctcctggtccgtgcatgcattattgtcgtggacggtcgatgagtcacattcagattccagtaatgacacattattttgacgtcaatgatttggtctctgccatgccatgcactctcacccaatgcaaagtggcgtcgggtcgatggattggcgatacacttcctgccgtgtgtaggacgatatatagccggatccctcacaagtcacaaagcaaaaagtgcgctagccccacgtggccaacgggcaatggcgtcagatactcagatgagactgcacacctgcagcgcagacagggaaatgaatgaggaagggaggaccaggactcaagaggccacgagagcacacgacggcccgcggaagaaagcatcggcgc

SEQ ID NO: 91713 - DNA, 972 bp, Zea Mays
ggagtctgggatggccaaaagatcacagctgctttggtttcttgttcatgtggtgcgtgtgaagcattcattgtacacgatttcataagcatattgtcgtcactctaagatcggtcggtatacattgtcaaaaaagacgcatacaagacgcctgtttcgtgctcccaatgcacaccaaattaatgccaagcagctgatgtattccttagtgagcaagtgaggaatttctttaacgcagtttctttttcctgcttggtacggtggttgctctcttgctggctggctttggctaaagcagccggtcgtcatggattcagctcggagctcaagactcaaggaacatagcttttccacacccaaatgctgatcgaggccactttttgtacatgctcttgctagctaacagcatctaaacaaacttgaagtagacgccttaccctggcttcttttttttcaaataaaaacagcacagttactggaaaaccggaagtttctcttaagcatttgcatggtatttagtctaggtgatagaccatgagatccattatcctagacgatgattagcactatacacaccctctctctctctcccagaaacagtacttataagattttaattgactcagaaacagtactttctgtatcagaaaccaataacacaaaaaaatctaaccgttacatcagatttcatatatagatttatattagtttatacggcccatcttacagattagaaagacataatatgattatatattgggagctggagactaaacggccagatcagacgcgtggggcatataatagctagggtctcgagagcaagtgggctggtgctcccccaaacatggtgtcccctctgatggtggtagaaatttaaaaaagacatcacacaaacaaaaggcaaaccacaatctccacgtttatgaacttttcccaaaccaggcccctttgcttttctaccctttgtgg

SEQ ID NO: 91714 - DNA, 275 bp, Zea Mays
ctcaacaccatcggaagacgcaacctcgtcattaatgtcattgccttcaaggattactaagtcattatcattttgcacctcatcatcctcctcatcaacaaccatttcaatatctacgtccattccgatagcttcagttaagtctatctcaaatcgcccttctagcccatcttcttggatggactctccatcatatgtgttcgggtctaagttgtaatcttcatctttaggaacaggtaacctcctgtgcggcgataccttatacacaacatccc

SEQ ID NO: 91715 - DNA, 410 bp, Zea Mays
gtgtcaaagatgttggaagctagcttcgaagatagagcaagcactggcagcagtaaatgcgaacataaaaaactcgtgccaatgacgttgggtatcgaccccttttatacgtgcaaccttttggtcctaatcgctgcacccactggccattgggtcccactattcaaagctgccactacataacgagtttcgagaagttgtttttcggaccttcgacacaaggtctcccagtcacaatattttgtgatctaagcttgttatgaaaaaacgaactcgtcctgcaaggagctactgttagggcctacattgccgacggtcctcaaaacacttgtattacataattgtgtttcaggtatatagtggaagacaaacgaagcatgttgcttcggcataaacgagtgtatttcaag

SEQ ID NO: 91716 - DNA, 537 bp, Zea Mays
aagaagtgtcttgtcctgtgttgttatgatagtcttgattaggttgtgttatgtgttctccttgccatgctgtctaggaggtacggtaactatttaatacattttgcctctaaccaataaaaattgttgcctgttttgcctataaaagaccccccactttaaccagcctagtggttagcaagtgaaacctcttaaaaaaatcctgcttgtgttggtattttgtaacccttgtgtgttttacccataaagttacacttgcatagcttagagacccccacagcttgaccgctagaccgacccaagtctcctttgtgcacttgttgtgtcaaaaaaatgttgtttggtgtctagttgcacaaaccctatatatcccattagtaaggccatgtttctttccataaatccttgccacaaaaacttcctagcatttctgttgatcatcctaactgatctcgtttgatgacctctctttttcacctgaatctggtaatcattttccttgtgaatcatgttgtggccttatcatccaaatctccg

SEQ ID NO: 91717 - DNA, 482 bp, Zea Mays
ctgaattctagaaacacacccaccccaacaaatgctctgtaaaattggtttctagaagattaatgggacaaaaaaacagtgatgtttcaaagactgataatccactacagctgaaacgcatgttttcatgttacattgaattattgtgaggcatgattgtatcagacacaacacaactaaacaatgcaaaatcaagcagtagacattttacattggtggctaaaattgcttcaaaatagcagcctgacaatagcagctttgttttgctgtcagttcataatgttgacccaaattgaatgcaaatggtagcttaaaaatagcagcctaaaaatagcagcaattagttgatgtttctgtttccttcagaatggtggttattttgagtgaaaatagtaggagttagttcatgagaagtctgagcacaaaaccattcatagtagacaccaacccagcactttggcacaagaccattaataataaac

SEQ ID NO: 91718 - DNA, 790 bp, Zea Mays
gcccaggtagtgaatcttttctatttctatacctatctactgctttactgctcttgcttatcttctctaattctcgtgcagcgtgtcagtggttagtgggcagttttagcagtcaggatggtgcggacgaagaatgtcaccccataaggggaggagctaactaggatcctcctcgctcgttcagacaggataagggcaaggatgtttaccttgagcagcagagaggaaagaaaaagaggaagttggacagtgctacttgagcaacagtagcagtagcaggtgatagagcagagtagagaggacatttcagaattgcttctgaccagattgctttctgggtctgtcgcctctcgtctcggactcgctccactcctgctcggtttaacccctcagccccagtcaccactaccactccaccttcctcaactacgtcatctttcgacaatcctgagcctaccaccacaacacctgctacgcttatagcctccaccacacctgcttccaccgctcccactccttctaccactccaccagctccaacaccacatttctgagagtgggacaagaatgaggtgcgaccacttgttgaggaccctcgcctgtttgaccttcaaagggccactgttgccagagttcgtcggtttcatcatgtaccagtggtgtcttggctaccagctcagcaagatcctgccgcagctcctctcttcagtacctagacccaggagtctttctaccaagcttagctaatagcgcggattgctttgagagctcatcgtcgccttgatctgac

SEQ ID NO: 91719 - DNA, 920 bp, Zea Mays
gtgcgagagagtgaggagaggctccgaagtcgcttgttcgtggttgaggtggttaaaaggttgagtcctagctaagtcttagcttggcgacgaggctccagcatcggggtcctcctcctgttcgtcgatcttctaggcgtcgtctcgtctggtgttcgtccttgcgtcgtccgtccgaaaggaagttcccgtgttcggggggtggcctcctccttttataggctaaggaggggggtcgacccgtggtggcttctttgggaatgagctaccaggcgatggtaaaactgggcgtcttaccatgggttaaagccacatgtgcctgcggtcgtttggttgtcctgtattctttattacagacgacgttggtgtgagacaagacaccatcatttgagctatactgacccctagccttcgtagccctgggcttggtgtgactcgtcgtgttgcacgctgcaagcggtctgtgcacccaagcctcgtcccgataggtgatgagtgctctactaattggggatgcgcaggtcataaatgtgccatagtccaagggattgtagttcatgagtgctctatggtccgaggggttcgtaggtcatgagtgggaggtagaccggcgcctccgttgtggctcggcgctatgcgcagttagtgcagtcgattatttatgacaggtcggtctcgagcaaagcgcgggatccactcgactggttttccatcgtcatgatcgacccctctgtctggttctgccacgcctgaccatggctcggtgccacgggattcgtccgggggcgagttcttccaaggtagacgttatctgtctactccgacggaccaatgtgccctagttgttagagaccctttccacagtgtgctcgctgactgatgtgccccaaggtccggggatcgtatccccgacatgcccg

SEQ ID NO: 91720 - DNA, 391 bp, Zea Mays
cagggatgggtcttattccaagataaaagacttggctcttaaagccaactaagaaaagaaagggaaagccaaaatgcaagttgaggaagaatcctcaagtgatgatgatcttaatacaaacattgccttggtgagaaagaccaccaaaatgttgaagaaactcaatagagaaggcatcaagtttgattcaagaaagaagaagttcttctccagcaaaagaaagcccatctctgagatggactgctataattgtggagaacttggttatcttgctcatcaatgcaacaagcccaagaagaacaaattcaagggcaagaaagatgatgacagtgatgatgagaagaaggaaaagaaaatcttcaagaggaaggatggcaagcccaaaagaatc

SEQ ID NO: 91721 - DNA, 899 bp, Zea Mays
ttggctcctgctcatcgctcggtgcaatccactccgactatgacccgtggagacggaggaagagcattccggcatccaccagcgcctgtaggtcatcgtcggtgatggaggatgccaaccacaggtcgtggggaggaagcacattcactttcctggacatcaggactggggaagaagacgagaggagaatgcaagagtttttcatggctaaaggagtaggcggctagggcaggaaggtgagagcagagggtaaagaactgaaaggtccatctcaggtgaatttataggggcaggcggagccaccgagtcttgggccgagccaccctaagacaaaccgaaagccggttgggacgcttcgaattccccgcgcacgtgtgcagcaacggtcagcatgcagaccggcgcgtcttgtcacatttaattcttgcccttcctatcggctgacgtcagacaacaagcgctgcctcatgttacgcatcaaaagttgtgcctctccctctccctccccttccatctccttgcagataatgggtagaagacacctcccaccttgagcaattatcttcaaaaaggaaaaaggggaaaagcagagtattgtttaggggtttgaaggtcttgccctcgatagtgttcaggataccgcctcaggatgaatgggctccgagcccattacggatcagaggttcgaaggctggccccttagaagggctttgttgttcacttgttcacaaatgttgtgagtcaagaacaagacaacacaattgttaattgtaagagaccttcgtcctccgaagcattattcactcatgggtataatactcatcagacgaaggtctagaaggacataccttcatcatttaataagtaaacatgaaatacaaaggaatacacatgatagc

SEQ ID NO: 91722 - DNA, 938 bp, Zea Mays
ggccgactctagatggtgtgcaaggagacacaagcgattatcctggtttgggctactcaaggccctacttccagcagagaggatgcggcttatattactcgcaccatggtgcctgtagtaggggattacaagcacaacgggagaggggaagtcctcaagtcccaagagatgattgaggcaagtgccaatatctaagatagaatgagagagcgagagttcatctacatgtgttgtgggcatgtgccgttgatgttgatctatggatcccctgtccatggagggtcccctgccctatttatacgccaaggggagcgtccttagtgaagccgagtcttgtattcgaagatgagctgcccggtgcctaacgcgacggcgtactgtgcagtagattcgtgcttactgacttcccatagagggccgaggccgagaccgaggggttgtccatatgcccgaacccccgagggagatgtcgcccatgccgtagtggttgtaaacagcactggggtatgggtcaaaggctgcttacggggcgtgtcaccgtcctggcatgtgatgacgtcgagattccctgcagcactcatcgagatcagagcccctgcttggttgatgcaaaagtcttcccgaggcgctagctgagccatctctcgatgtgcgctacatgcaccagaaagggcttgcttcatggcaatgtcctcaccatacgacaacgacaggggagaaatggaggctcccaatcaagaggaggagtaccaacaacagataagcgcgcatcctggcgtcaaaggcctcgctctatcagcagcaggaggagctcaacgctcttatgcagaaactcaaccatgtctactgcaatgtcaagcaaagtcacctcgaagccaaaagacttcgggcgaagaagatgtgtgaccagcagcgacgacgcacaatatttcctcaac

SEQ ID NO: 91723 - DNA, 375 bp, Zea Mays
atcgattagggttcggcctgctggccaggtgctgcctgcttgcttgggatgtatcaggaatcatggccagcttttcctgctttccagggacatgctgctcgccgcagtcgcgacataccatcctttcgctcctcttttcaagtatttttccgtcttcccatggagtgatgaaagcctccaagcaagctgcaggacgcactcacacacgagtggcctggtggggcgggtcatcaagtatcaaagctcccaccactattttctaccactatatacacacacacactccaataatcttttatgttattacaaagtatgtttaacacgtctacacataaaatttccacattgtcaaattgcattattataaaactcttg

SEQ ID NO: 91724 - DNA, 297 bp, Zea Mays
tttgtttacttgtttaggtacaagaaaattgtaactttttcatgtggatggatgattatgtaaagatggtggaagggacagggttgaagagcagctcaagggagagatgttggcaactacgagggatttgattttgaatcgggataaactgggtgtcgaattgaagaaaataaatgaaaatttggtcaaaataagtgacaatttaggcaaagtaactgaaaatttgggtaagattatggatcagactagggccctctttgcttttatggttttcattgttgtgcttttctttgcgac

SEQ ID NO: 91725 - DNA, 280 bp, Zea Mays
gtgttcttaatcacttttatgctttttcttagtgatgaaatgaagtttttaatctttgcacatgtctttcccagacagagacaacataatcctacacctgtttcattattggagtaatgcggtgctacatgtatggttctcttcttaaagctgtaagactaaggatcaccttttcctcttcgaacaaggtgacaagtcattatgagtttatcacagtgatttgcttgttttctgcacaacacatgtccatacatatgttatagttgcactatttttaccc

SEQ ID NO: 91726 - DNA, 692 bp, Zea Mays
ccggattcttcatggttaaatccttatggatcatgatgatgtagccttcgagctcctgtcatgggcagacgttcattgaacatcctttccatggcccccatgagtgagtcggccatttgatgcaattcagcccgagagacagggggctctccgtctccatgttttccaccgtgaacacttgaattggatcctaccatgttagagggaagcaagagaaataaatggatgacagtaagacctaccgtgacaacaaaagctttgataccagatgatatgtaccgagttatatttggtactagggaggcccgatcttcacgacagtaggttgataaataggatggttgggtataaaagtaacagaagaacaaggtaaatgtgctgaaggacagcgagtaactgactttatacctgatcaaggtcggaggtgaccaagcgatggggagagagacaccgaaaccgtgtagacttcgacttgatctccaaacgaccgcagaaccacaaccggagctaatccacacaatgcgagatagccgtactggaactcgcaaggcacgaactagtggatcctagaaaaatcccttcacaagtccaggagaacaaggaagaacaggggtagagtaaacactcagcagctcggctgcgttaatcacttggattatcaaatcatcaaaggttatcaaaagttatcctac

SEQ ID NO: 91727 - DNA, 303 bp, Zea Mays
tagaatggcacatcatgttgtcctagtggatacatatttaacaaatttgaatatggcagtggaggtggaacttgtccatacccatacatcatcgatggtagtacttcaactggtggtccctgacctgattgccattgcatgcataagggttgaagattgggtcgtgtcgaagcagatagttagaactggagctacttgagctatgggttccatcttggataggaaataagatcgaacgacgttgaccgcttattgtctcctgttgtgaatgaggtacatcatcgtaagaatcttgtatgccat

SEQ ID NO: 91728 - DNA, 279 bp, Zea Mays
attcttttacagtaaagatagtaatacatatagcgaaatcctaatttatctctactacttattaagactgcaagggaagcctgtcattccctgttccgccgttcccatcatgcaatccattccctgttctgccgcactaagcacgccgagcccatgtgacagccccattccaggttctgccacactaagcacgccgatcccatgtgatagcctcggcccccatcattcccacatcttgcaaaccgtttccgttctaccacgccggacccacgtgacagc

SEQ ID NO: 91729 - DNA, 406 bp, Zea Mays
gtaaaacctatttggtaaatttacaaagctcctacccaacccaattttctccctacgtttaggaacctagagctactcccgaaatacacttgtgcgccatttctacaacaaaaaacatagcacaaacaatttttcgctcatttcctccatctacatccgcctgtcttttcctcccccaacagcgcatcagcgaattcatcaaagccactatgagcccacgacctcgagtacctactgcgacaaagctccaccgtaacctcggaccactggccaggaggacgatgtgacctcgacccttagcgttgttgtgaccccgacgttgtctagagccgcgatctcgaaccaccgtcttggaggttggcatggcctcgacccgattgctgcaacaaccacgacttgccatcca

SEQ ID NO: 91730 - DNA, 616 bp, Zea Mays
gcccggtcgttaccgaccatgctagagctaaactatcagtcggtaccgaccaaccgttcttttgcccgtttgaagtacagaaaaatctaaaaaaataaaagaaaatctcaaatgcgtcatataaatagacccctcgctctctacttggtttctattcctttatattatagtattccactctttattctaatatagattttaggtggagtatgaagtttgaaacctttgccgacttgctcaacgagcgatctccacaatgtctaccctatcggtgagggagatgacttcttcaacagcttttctttcgtataccattgtcagtaagatgtctatgctcatcctagtttcctaaatccgtaacctctattttcatacacatatcctcctcctttgtatccctactgaccatatgtggatgctacacctaccagtgaaaatcctaccaccaatgctcatcctccttccactaaagctcttacgataaatgctccttctactccaacctttcacttatccataccctcctctatatggatcatgtggtgctcctccttatatggtgttcattcgctcgctcccccattgatgctcctccctcatatgatgttcgtccttc

SEQ ID NO: 91731 - DNA, 1041 bp, Zea Mays
cgactctagagagtctatcgatttaagatcaatagcgatttgaagattacataaaacaacgacaagcctaagaatgcgaggaggcaaaggaaaaatatctagtacacttaaaggtgcaccgacatcaaaggatcatccagcaaggaaagtacgagatgacatctcttgtacctgctacacgtgctcctaatgtaagtaaacccatgaacatctaatcacttagtcattatatagatgagcagcgggatcaattaaaacaatacatggggggtatgaaagagtcctttagaaaattgacatatgcatatgaaaaatccaccgtttctaattttccattgcacgagattgatgctaaggatgtcacacataatttatcagctacaaatgggcatttacaaacccagccattttatggtatatgccaatgaactcatacaccagacaaccacaacctcctccatcaatttggaataaacctaatgtcctgcccatggccagaccgtctgggcctgagctcggactatccacgcctctggtcgatggccccgtcctttacggtggacaacccaaaatcatgccaggacccctatactctttgcaaggcttaactaacacgctcagaccgtctggttacacaagcaccattcgaatatcccgaaccatctacatttcataccagtccatccgaatttaacaccggacagtctgtgttccacaccggaccatccagagatgagtacacagaataggatgcggattattacccacaattctttcacccgccacaacaacacttacccctctctacggctcatcagggttgtagtatggctctaccctcatatgggaatgaacactttttggcctccaggagagcgaaaagaattaatacacaatatggagcgactagggtagtatgagcatgccacaaaatgacatagctcatcatccatgggcaagaggtcggcatatgaagcccggccacccacaccttcaggcccaagggctaccacccgtcactattgatacaatgagagagga

SEQ ID NO: 91732 - DNA, 491 bp, Zea Mays
gcacaatcatacaccatatgcgaagcataatttaacgagcgcataatacgcatcatcacgactcgacttataaatatagagaaggcgacgactaatttggcatgtcaccacctctctatataagtcaaaacaatttctactatcgactaagagttctaagtattaaacacattatttctttccacgcacaaataaacttcaacttaacaccagtgataccgatggatttttactaaactcatcatacacataaccctgtctcgcatacaatcatattgtggcatgcactcgagacactacaatcaatgtggcgcgaccactaatatatgaactctgacactcatgtcttatcaatacatcctccgcgtaaactagcattttctaaactactcatcacatcgataaatatactccctatgtattcacgaatcccatcgcattgcacaaaacaaatacacttttcgcataaacacatatcgatgcatttccca

SEQ ID NO: 91733 - DNA, 450 bp, Zea Mays
ggcctccaaggattccgttggtttgggtgggccgactccaatcattgtggaatcaggactcagaagaagcaaacgattgaaggaatcacgtgctgggttcaggcatggggcatgtccaaaaaggaactgcctcatgtgccatcataacttcgatggcccacccccgctatcctccaaggtgctgcggaatctggacaccaggctttgtaacctgtctgaggatgacctgtctgagcagaggttgaagcacaaaaaatcgtctgtgggacctgttgggccgcggagggttgacaggaaggacctggcagatgagaaaactgatgattcttctgatgaggatccacaagacaaccattaggcggatggtgggggatctgggcttgtgtgtgggccccattaacttttggatgtactcggttttacttttggttcttgcaggtcttttggact

SEQ ID NO: 91734 - DNA, 645 bp, Zea Mays
gtttgttagagcagacaaactagatctcaaagttctaaaaagaattctagaagctttcgaatggtgttcaggtctaaagatcaattttgagaaaacagagattttcccaatatattaccctgaatctttatggtcaaatttaatggaagtttttccaggcaagtactcttacttccctggcaagtatctcgggctaccgcttcacttcaggaatattaaaagaatagagtttcaacctctaattgagaaaatcaataaaaggcttgctgggtggaaaggtaggcttctttcaaaggcagaaagggaaaccttggttaaatctgtgttgacagcgcaaccgatttatcttctaactgttttcccagctcagaaatggttacttaaaaggattgacaagataagaaggaacttcctttgaaaaggagaaaatttggattcatgtagtgggggtcattgcctgataaattgggctacaacttgtttgccaaagaataagggaggtcttggcatactcgatctaaagcgctttgcaagagcgttaaggcttagatggctatgactatgatggacgaatagagacaaagcatggactgggttgcaattaccttgtgataaagcagatgtcgatctatttaatgcatctac

SEQ ID NO: 91735 - DNA, 425 bp, Zea Mays
gagagttgtcatacacgagcacaccttctatttatactaccccattcgaaactagttgttatgggcaacttgccctcttcttgtgcacttacggagggtccgcaccatatggccaaacggttcgccatacaagtaacgactatatttcatgtttgaatcctgtcagagctatcagaaaaggcaggtccggacggtccgtcgatctcggccagacggttcgagacctagcaacttaataaacccgagctctacccacctagcatttacacaggtggacggtctgcctaacaagaccggacggtccgcgacctgagaaacagtactgtccaagctcaaaccttggatagtatgtaatacaaggcaaaatcacatagtccctgcacaatccacatttggctcttgcggtccgcacaatcacacaagga

SEQ ID NO: 91736 - DNA, 573 bp, Zea Mays
gtcagatgttcgcgctccaagttggactgaatcccccacagacttggagatagccgagaccagggttctacttgccaaggttggcttgttgaaggagaaaggtctgactgctgaagctgtggtcaccgattttgtttttaagaacatttagccactgaaggatagagcgtacccagcttatctgtatcgtggcctcactgactcgacccgggttaccaacagaaggattcctgctgtggatctggtaagccggcttgaaatgattcttagaggcaaggtgtcgaatattggtgctcctgttgcgtattcagcctggaatctacctccttccaagactttcatcagttttgtgtcaaatcctcctactggtgatagtggtttgggccttagagtgtgaatctctcccgaagaggttgaggctttggttgtttcgcttggtgaaatccccaatgacgagaggcaggttcattttgagatgcctataaacccgagcgacgcagaaataagtgctatgctggacatgttggctgaggattcctctgattcggtccctgctgaaacactagctgtagc

SEQ ID NO: 91737 - DNA, 669 bp, Zea Mays
ggaaaagtcatcagaaaaatacgaaaagttatcggggttctctacaaggattgttatcatgtttcaaatatgttttgcacttagaaacattatgcaatgtcatgaatgcaacagagcaagttcagccttatattttgttttaattgttttataataaaagaaagtactaaaaactataatttgtgattctaaatcactcaaatctcaataaatcaaactaaatcttggaattttttattggttcaaaaaataaggtgttacacttcattatgactcctactgttccttgcgcgttgccgagggaggtggaacaggcggaggtgacaggacgacaccgtccgtatactccctacactcacctatgccgcaacctacaccatagcctttgcccacacaacaacaagaccaggcagaagaccagacttgtcgaagaagatatcgatccaccagctctgctcttactcacgatctctttgttttcctgggcctacttgttggggctcaggctccgtgtaagcccctcccttgggctataaaatggaggatgcactcagtagagggcagaccggcctaaagttgttcatgctgggatggcttcatagcggaaccccacagagggcaagaaaatactcccaaggattgaagatatctccatcgaagctcatttga

SEQ ID NO: 91738 - DNA, 524 bp, Zea Mays
gaagtgccagaaatgtggcatagctgatggtcacaacagccgtacgtgtttaactgtggaggataatagggttcgattggctaacctatctggacgtaagcgaggacgacctcctggttcaaggaacaaaatcatagctgcagcaccacagtggaatgagacatcaacgtcgaaaaaagaacagtggatgtcggagatgatgattcatctggtagagagtagaataccataagatttatgataaaattatattatggatgtaaatgtgattcctgtgtgtaattgacaatgtccagaaagtgtcataaatatgcttgcaaactggcataaacgtatgtggaatttatcataagccattaacaattctgtagcaaactgaatgtacatctacttagcatacatctatgtgcaaatatgcataaaactgtgttgtgtaatgcataaactggtcagactgtgaagcatgactgtacaaaaaatgagatgcttccagtatataacagtgataatatgtatcatacact

SEQ ID NO: 91739 - DNA, 389 bp, Zea Mays
cgcaaggtgtatggaagaagagggcgctgatcacccagatctcctgcgccggcgtcgtgcctggccaggatgatcccaggtgatctcgcccaaacaaaagggagatcttattcctggttgatcattacagctaatgcccagccgcctttatagccataggtggtctagatcatctcaggatagacatatctactgctactatttagccacataaaaaagaactaacctactatttaggaactgctactatttagccacataaaaaggaactaacctattatttaggaactgattaaacagaaactattcctgacttatctcttctccttattaggcgatggtctcttttcctggcgcctctttcttatttctgcgccttgtgaattggc

SEQ ID NO: 91740 - DNA, 326 bp, Zea Mays
agcacctttcactgaaattcagttttcaataactgaatataattcagtttcagccacaacacagtcccactttaagcagttgttattccaattcttgtatgggatcatgtccatcaccctttaaggaagttgttcaccaatatatggtctttaattcctctacaagcaccatagtctaaaaccttatataacagccataaatgagctccaaaacagccatcaatactgaattccaaattcagctactattcacaatctgaaaattcagaaacacagcagcaccactttgaaccactcttcttcctgggttccaaatgcttctaggg

SEQ ID NO: 91741 - DNA, 616 bp, Zea Mays
ggaggagcgagctcgcggggaaccttgacatcacgagccgaacgccaatcgaaggtatcgcggttattctcctgttcgcgatcggggaggtgggaatggtggcggagatgcgggggagtatccaccagtatctataccgaagtggaccttccctaggtttgatggattggagccgaagatttggttgaggaagtgtgctgattatttcgcgatgtatcgagtccctgaagctgtctgggtaacatcagcctcactgcatatggagggaaatgcttcacgatggttttagatttttaagttgcagtatggattagtaacgtgggaggagtttgtggatgctgtgatgaagaagtttggggcggatgaatattcgcaggcgatgaacaacctgatgacggtttaccagaaggggtcggtggaggaatatctgaaggagttcgatgaggtgaggtatgcaactgtggtgcataaccaaggcttggatgaaacattgtttgtggcgcattttatcaaggggttgaaacaagaactgcagggttcagttcagtcgcatatgcccacgatcgtggattgagctgctaggttggcatagatacaacagaagattttagaaaag

SEQ ID NO: 91742 - DNA, 441 bp, Zea Mays
gatggcttgagctgattaaagattatgaattggaaattcattatcaaccaggcaaggctaatgtagtggcagatgcgttaagtcgcaatgctttctgtcattgtcttacaatgaagacttctgacattacgttgtgccaagaaatggagaagttgaacctgggaatgattcaacatggaacttcaaatcacttgaagcttgagtcagtcctcctgcaaagaataattgacgcacaaagaaatgatgagggaatgaaacacattcatgagaaaatagtggtcggaaaagccaactgcttcagaagagatgatcaaggttttgtatggtttaacaaccgcatagttgtgcccaagaatgatgagatccgccagcaaattttagatgaagcacatcttagtcgctattctattcatcccggaagcactaagatgtatcatgatc

SEQ ID NO: 91743 - DNA, 367 bp, Zea Mays
gaagggatacctcaaaggagaaaaacgtgcgatggaagaggcttgtagaagacgactgcctgcctgcctgccctgccggtgcccatgtgcttcgtggcgcgctttctccctccgcgggctgcagcctgcagtgcagccgccttttacgaccatcgctttttattggcgatggcgatatgcatgcgtcttctacgtacatcatccatgcatcaagagttcaagatcaccatcatgaggctttttggttggaccggcaggggatgaccgatgagatgagcacgagcggaggacaatcaatgcacacgatcgaggagctcgagcgaaatatctatcgacctcgacatgcatgtgtggctttccgtgctgc

SEQ ID NO: 91744 - DNA, 653 bp, Zea Mays
gccaataaagagtttgaattactcgctcttgatggatacaactatcccacatgggctatggacacaaaagttagtcttacaacccgtggactttataatgcacttcttgaacaataagataatgctccaccaatagatgatcaacataagtatgctgctttatacatcataaggcaacacatacatccacaccttaagtctgaatacatgttggaagaaaatccacgtggactatggcttgcactcaagcaacgctatgaacagcaaaaggcaattatcttgctcgaggccaattatgaatgggcccagctttgcctttaggatttcaaaactgttggtgacaacaaccatgttgtacataggttcagcactaagatgcaaatctgtgaaaaggcactttcagatgcagataaaattgaaaagactctgtctactatgcttcccgctaaaagaatccttcaacaacaataccgtgagagacatttcacggtttatgttgaacttattcaaacattacttcaggctgaaatacatcgtgaactcatgttgtggaataatcaacagcgccctcttggctctgccccattgcccgaagtacatgccaatactcaacataaacccaaaaatgatgttcacactaagaactatcaaag

SEQ ID NO: 91745 - DNA, 403 bp, Zea Mays
ctttgttgacttatcttcgtcttctttttttgggggagggggggagatgactctttctatattcgttggtgattagtgagcacaagaatatagttggtctctttgcttcttagttggtctcctcagttggtctctttcaacgtgctccttgatttgttttttaatgacgaataatacggctataactgtgtttgtgatggttcattgcacatagatcaagcacttgatctagcaatgtttgttcgccttgtggaatatatatctgtcagctccacaccaaacgaacttgtgtcgtacaagttttactacatcaagcacttgattgcttcttaatacgtagctttacactaatacgtgaaagacaggatagcttagcatcatataaaatacagagcagtttttc

SEQ ID NO: 91746 - DNA, 692 bp, Zea Mays
gctcgacatgtcgaggctggatgccagtatacttaagaaaaattcgtgacctggcccccaggaggtagtctcgactgggacccggacctgcacacagccttggctaggaagctttagtagtgcgcccataggacccccactaactggtatcttttatcctttgattcgcgcaataggacctgcgggatttagaccgggaagccaatccatgtgtccggaccccctggatcacagctccaaatactaggacatgcgccgcagagtggtggagcgcgtaggcttagggtatgggaccaggctaagcgaccagacagctctggaccatcccaggggacgggtgtccgttctctagaaccggacccccggttgacggacccacaggactatagttccgaatactagggtacccgtcacagaatggtggagtgtgcaggcttagggtatgtaaccaagctaagcggctacacaacttcggaccaccctagtaggcaagtacctgttctccaggactggcccctaggctgccggacccccctatcgaggggccccaaactgcaggcctggctactcaattcggatgtccatataccagcaagggtgggtactatatgggtgggttagatgaaaaatgatgctcgtaagctgaagaaaaataagactaccacaaaaacaaatctaggggcgaatctttt

SEQ ID NO: 91747 - DNA, 403 bp, Zea Mays
ccttcccacactctttgtgtagcagcgatcgattgggtgtttgggactttggggcattggatggtctgcctcgccggtgaggtggccacgttcaccgccgctgctgggtgcgtgagggcctgagggggaagctgggtgaggacctttggctcctgctcctcgatctacggtggtgattagatggagagcgtaccgcttcagtgagtagatctggaccgtggatctgtgaagcgacatctaggattagtgtctggggtatcagattgggtcttctgatctgggcctctgattcgtgatcggatgctccttgggtgttgggaattgttttaaatctgtaccgttaatcaccaatccgacgactggaagtccataccggttcatcgtgggtggtattcgatctgtg

SEQ ID NO: 91748 - DNA, 977 bp, Zea Mays
gacaatctccgcaaattttttgtttgactcctcagggccagctcgcccttgtaattcacaaaacagctttattccggcccgcactcttttcctcccggggggtgaggtttttaatgaggcggagccatgtaatatacacgcaaaaaatcccccacaaaaaattacaacgtaaaaaaaagaccgcatcgacggtcttcagcattcgatcacaacgaagtcaccgcgaggggcagcgctggctaccctcgcgtgcgacactccgcgcaaaagtcgcctaagggtgcagccggactagcacaataagtgcgcaaaaccgaagtcttccccaaaagactatccgtgcaaaagtcgcctaagggtgcagccggactagcacaacaaatgcgcaaaatcgaagtctccctcaaaagactattcgtgcaaaagtcgcctaagggtgcagccggactagcacaacaaatgcgcaaaatcgaagtctccctcaaaagactatccatacaaaaaccgactacaggtgcagccggaccgacataataaacgtgctagatcaagtgcacaagtcccccacgggcacggccggatcagcgaaggcacacagcctcatcatacaaattatagttacacacatacaacgagggcatcacaccttacattggttcaaccttcgggatgatacccatctccctgtagttaaacaacattatcttcagctcctcaccctcaaaaagacttcacaactccccctcacctacactcgcccaaccggcgaggacaacagttcccgcttgccagccctgtccacacgaagacgaccaccctccacctcactcactctacgctttgccaccacccttcgctgcctacgcctagcactcggaccaagaagaacttcagcatccatcacacgcggagaagcctccgccgcagccacatccaatgccgcaaaataatctaaatcctcatccaaagactcttcc

SEQ ID NO: 91749 - DNA, 306 bp, Zea Mays
caaggataaaaatgttgcacatttgctccgtactaatcaaatgacttcaccgtcaattcaaaaagacttatgcaaagcttgtgctgatttgaccagcaaagctattattgaagatattggagatagaaacttttcagttcttgttgatgaggcccgagatgcatctataaaggaacaaatggttgttatattgaggtatattaattcacaaggtcaagttattgaaagatttcttgttattgaagaggttgctgacacgacctcgtattctctaaagcaagctttggattctatgcttgcttttca

SEQ ID NO: 91750 - DNA, 295 bp, Zea Mays
caccacatcaaaatggacttgtggaaaggaagaatagaacggtcatcgacatgacgaggactatgcttggagattacaagactccatcctcggccactcctctaacatccgcgaagggcgaaaggggagacacgctagctgccacagaaactagagcgagaggaggaagggagagaccacaaccgagaaaggaaggtagctagatgtggaagggaacatgagccgataagatctgggcaaggtcctaagcgcagaccacgaagacaacatatgccctgcagtcccctaccatccg

SEQ ID NO: 91751 - DNA, 357 bp, Zea Mays
ctcccgacacataaaaccaataatcataccagttgccccacttgttgcgggcgtagggaactagttccacaacttccgccgaagtcttcccagtcctcggcgtaaaggtgcacggcccaaactatgcaatcttgcttccaatttttctcttctgccagtgcagacaataattcttagcgaagacctctatggagggctgaccgccatacgaagtcactgcccagacatacttcgctagggccaccacagcattaggtgtcaattgatggatctgcacgtcatacctctgcaagacctccgccacaaaacaatgcgcaggtaggcgaaggccagcggtaaagaatgcctcgaacacaa

SEQ ID NO: 91752 - DNA, 802 bp, Zea Mays
atgtgacttccatgtcaaaacagagacactatatgataaacaacattattacaaaattataggaattggaatgaataaatttgggctccctatgaattttctaggaactatacaagttctaagaattgttttcacataaaaaaaatcccttttctaaattattttataagtttttctcactgtctggactaggcctcaattactggtaagtataggggccacgacgcaagtattctaagactcgatgaatagctggaatggatggcgggttaaatacgaaaaagagcaggggttctttaacaaaaggtcatggccgaaggggtattgagcgaccacagtcgcacgatcaagatccaatgcatcggattaaaccttgaatcagtacgcagcgcccatcgttagatccagatctgacggccgtgatttaatgaaaccgcgatctaatcctatccctctgcaaccgatccaacggaccacactacattgcatgaacatctacgccagatcgaaccccaaccgcacatccgaggatcaacggtttagaattggtcgcgcgaaggggaaagagataacctgatcccgaccgcaccttactagatctacggtcagggcacttcctcttccccaacggtgtagcacggtgcgccagtactccccacgacggaatacgccggcgagccctcccccaaaccgcgccagtaagcgattctcggctctaatcgactctactcgaagctatcgaggttgcgaacatgggagcacacacgtaccagagatggtgacgacaggaatccgaccccgc

SEQ ID NO: 91753 - DNA, 540 bp, Zea Mays
cgggcggtgtcccacgcctcatcaaccttggagcgtggtcttaagggtcaggaggctggtctggattgttcttctcccatggaagtgggtgaaggtccttcagcctttgaggtggctgttatagagagcttggccctcaaggatggcgctagcgcttacccagcccctgacggtgttgccggggatgacccggctcgtatgggtagcgcgagctatgacccagcccccgaggttgttcgagtcggttctccctctcacacttccatggacgttcacatagggtcttctcctctgcattctggttgcatggcagcagcccaagcttcaagtcaggaagtcgccttagaggccagcgctcctgatgacagagttttgacccctgctgatgatactgatctggtccccactgatgcattgcgggttgttccggttggtgatccttcatcgagccatcaactagcttcccacgacttgggagttccttcgttcttttccaacctccaggtaacttggtttttactgatctggctgtaccccagg

SEQ ID NO: 91754 - DNA, 354 bp, Zea Mays
atcacaggtacgtgaaccctaccggatctccctcttctccccttcctacacctcccccgcacgctcccaaatccaagtagcggatcccctcacgctcccaaatccccacacgctcccaaatctgcagattccctcggtcggtccccaaccatagcggctgtcaaatccccagatcaaatgcttattcggtgggtgcagagataaaactgtcgcatgcttcctccctcgcaggccgggtccaaggaaacctgctagctggttagtatgccattactctgctcatctgttgttttgctccagtgtcatcagcttgccaaaagaaaaaaagaaaaatggattacttgcttccagtgc

SEQ ID NO: 91755 - DNA, 423 bp, Zea Mays
gccattgtggctacttcctaggaatgaagcacgttatagtcgcctagaaggaatggattgctatgcatgcctcgctcaatatctcatagagtttgagtgacatctcttgatccatccctagagtatcgggtggtcacccccttttggcatacaaggttgtagtcattgccaacatccatgcctaggcagctggtgtctagaacgctcactacctggttcctatgcttctcgactcaacctcctcttacatctgctagcgcaacctcatcctcctcaccttgcagcgctacacccttgatgtccacttccttcaagatacagtgtccccatcggcctgatgtcagatggacaatatggtcctctcctagatccttggagtcgtcatggtcgagttgtaggacatcatccatgagcgtggtggta

SEQ ID NO: 91756 - DNA, 698 bp, Zea Mays
gcagagagtatgaaaatacctagaacaagctagtcacggcgagggctctttcacggtggcggaaaccgatttgggggaaagagcaattcgcgggctctggtgagtaattgagggcacaagcggttggattggatgctggattacctaacgaagccgagggtgtgctcaatttatagtgtgtttgagcggtggatagtgaattttatggggacgcgcgacggccggagaggaggaggtgcactagcgcacacgattggtggccataaccgtggcaacctcaccggcgatcacaggataggttaatatgagtcacgacagtgtggttaaagtgccgaggcacgtggcacaagaccgcgaggtgtctaactccggcgagggtagattcgaacgaccggggctaagcggacacggcggccggatggaacagtgcccatggctcaatagcggtgaagatctttcaaccccgaggcgttatccaggcctaagtgagcacaaatcacctcaccgacatgaatccatgcgcggggtcaccggcggctggttcactaaaccaacagttctttctagtcactgtatcatcaggaacttcttcagtcggtctgacaaatcatgtttggggcgaatttcctccaggttttgtatggtgactagatcaatgctctggatcaaagttgtagcttatcaatccagctcaaact

SEQ ID NO: 91757 - DNA, 432 bp, Zea Mays
ggaaaatctatgcgaagctcttcttctctttcccatgttgcttcatcttctccatggtgactccattgcactttgcacatctttatcaccttatttcttgtaactcaggtcaatgtatcaagaatcttgacaggatactccgtgtaagtcaaattaccctgaaaactgagctcttccattggtaactgttcttcagggacacgaagacacttcttaggttgagacatatggaatacattatgcacatcagacagattatcaggtagctcgagttgataggccatctctccaactcgcctaaaaactcagaatggtccaatatagcgaggggacaatttgcccttgactttgaatctcctcattccacgaagtggtgacatcttgaggtacacatgatcaccttcctcaaattccagtggtcttcttctatta

SEQ ID NO: 91758 - DNA, 471 bp, Zea Mays
aaaggaatgtcttataaacataatgcatttgttgcttctctcacaaagattattttctcaattcactgccttcgatttgtaacaacaactaaggacaatacgtggagataattattaatcagtcctagatgtggtaatgtggatgatatagcaatactaaccctacacttaaaaattggttacaagttgaactatataattgaatttgaacatgtcacatggaacaaatcgtttagcacattaaaaggaacaaatcctcgattgatacatcaaccttccgtagaaaccaaactattttgaattggatgatgcagtgatactgaaaatgggaacacgttgtttggagccggaggcgatatcagaatattagttaccgagctagatgcagccattttattctgcaccgatgaaacaggaatgcaatcatcagaaaagtgagtagatgagttgttgtataagctctaaagctac

SEQ ID NO: 91759 - DNA, 1096 bp, Zea Mays
agtgctcgccaaaagggtggacgtgaagaccctgctgatcggcccatggagtctggtgtcgcctgctggtggcccaccccctagcacctaagctacttctctcgcctactctgtcttgtaataactcccttggacacgatctttacgtgacatgttgtatttactttgaaccttttgctcttcgaatctcggcctccgtggcgcctttggtgttcatagatttttgtgactatgattcctcctatgttgattagcgtgattttttggtaggtgtagacctttttaactgcttctcgcgaggcgcggcggcctggctatctgggtgacttatttgtagtaccttcagtgaaagcagtcttggtcattggtgttttaggtcgaaaaaattcatcttccatctgacagggtcttatgagggcaaaatgattgatggggacgtctgatttctttcttgatagatacagggtttgaggcaccaaatcgattgggtccgacattccttacaaagactatctgctatgtgttcccacatgagccttccctcgcctttctcctgcctagctacgcttcgatccacacgcgctttgcgatgtccgtagcattagacaacacattcgtcttgatgccatgttcctcagagtggtgctccgagagaccgaccatcatgcaggtgagttcacatttcacttgctcgcaagtgtacaccattttatggatgcagaggccgtgatgatcccacgtggtcctggcatgttcagctttaggtatgtgtagtttggcatggccatgacttggcatagcatggcctcccgagtatggcattgtaagatcctgggaagtccaccacctcaaactataggcgttcgatctggaaattggctcggtcgccgaacatgacggggagagtgattcacccaagggggtaggcctgatggctgggtatgatgtcgtgggatggcatcgtgcttggtcgcagcgtgcagcgtgtcatccttagcccatcgaaggtctcaatgtacatgatgttgagtccacttcctccatccatcagcaccttggtgaggtgcttagagcctacgactggctcgatgacgag

SEQ ID NO: 91760 - DNA, 406 bp, Zea Mays
ttgggatcagcctcggtaaggacctccgctggtagttcttcacacacaggagcagaagggccagcatcctggtccaagcttgacagtcgccgaagctgcctctttttcttcttcttctcctcaacaggcgcagttgggcggctaacatggtgaggacgctttaggcgaataccctcaggctttcgggtgtccactgttttgttaagctcttgtacaaccgtaacagccattggttcagcatgggccgagttagaagattctccagccaacatattgagtacatcatctatttctgcatcatctggactcgccgacatctcaaaatgaacttgcctctcatcattgggaagatcacaaagaggagcaaccagagcctcaatgtcttcaggagagggtcgactctaag

SEQ ID NO: 91761 - DNA, 478 bp, Zea Mays
atccatacctctgaggctctctaagcctccaatgtttgtaataatataatggacaagaccctgcccctagggctctccagaccctaggctttagacttcagggcacccttatacttttggggctctcttggtcaaccctaaggggccattagacctttgaggctcctgacctcgcaacccctaaccaatgtctagatctcgaggcccttcaagtgggaaataaagctcgactaagaatgggagtacatgtagagtaaggaatatgactggctctaaccccaaggtaggacaaccctagaaagtatgccccttgtaccctgtacatcgctactccagataggcacgtgatactggttgtctagataaggatcgacatcgtataaaatgagatggatgacatgtggtcaagaaggtacattttatccattacacagacaaacaagcatactcgagaccactattcaatacgtgccattac

SEQ ID NO: 91762 - DNA, 314 bp, Zea Mays
agattctcagagtcttgactggccttttggtggagaagaaccaacccaaaatagccgtggacatggccgtatggtatggggttctgcacgtctggtttcgctgcggcgagaaagcagtctcgccatggcattgccaattgccatggacatgccagccagcccagccttccacagtgacaggttccactggcctgctgcctgctgctgatacggatcggagcaccaagcgatgcgaatgcgaatgcaacgcaacagcagcagcatctctctttgtagctttgtttgcttccccccagccttcacccttcagcaca

SEQ ID NO: 91763 - DNA, 625 bp, Zea Mays
caaaaattgaagaacaaggccctgcaagttgcttggacagagggactgacgaagatagccatggtacagtgaccagaaagatctctggtgtcgtgaggctgacgtcggtcatcttccaccgcaattcgcactcgcctaggagatttgtgctgcgggagtgatagataacaccgggtcaaggtgaaaatatccggggaggggtgaacccactcactggacggaccgaccatcgtgtcccgccgcggtcagtcacgttggcatcaccggagctcaccatttctccaaccgtgacacgcaacgatctctactccgtgtcataagggtcgtggcaagcgaccggttatcatccctggagtaattccctcccgcacgccacggtgagtcgaccaccgtaaaatatcctagccgcggtaaccttgatctcaatccaaaattcgtgataagcttggccggagtctataaattggaagcaccccctgttccgcctactcgttacgaactcattgaaccactcctcgcccccgatcgtccatcgtagcgccctaatttggaatttcccccaaatccattcttcgtgccgccgtgagcaccccctccgtcgacccactatcctgtccctccaccc

SEQ ID NO: 91764 - DNA, 443 bp, Zea Mays
tgatcctatctttctgcagggcttaattcttagcaacgctttgagggtgcagaagaatgttgaagatggaagctgcgtgatagccctcggcaaccttcgatcagaagttatcaagctgagaaatgaagccttggagaaaagataaaatcctactttcattggtggataatgtgaaggaagctaaagcgaaatttaacgctcaatctgaagctcataaagccgaagttgctgaccttcggaaaaaaagcttgccgaagctaatgaaaattttgaagttgcaaaagccagtcaagaaataagtgaatggtcgaacactaggctaaagaaaaatgttgaggagcttcacaaatccaaggagaggtgcttcgaaaaatccttggattgcgtaaggaaattaaaaactagctttgccaaggtgggtgcttattctttcgaagagaatt

SEQ ID NO: 91765 - DNA, 329 bp, Zea Mays
attttattctagtatggtctatacttttctcaatccattagatctgatctcactcttgtgcttgcgacatctttgtagatgccccctgaccataacctttttgtcttttgggattctttcctctttcatcattaagttgctatcatttggtaatcttatttccttggtattgacatgctcgtatccctggagtcttgaatactgttgtttcaatacctacctctaataaaaaaactctactgcctatttaaactttttagtttataggtccttggtcttactgtcttttgagaccctttcctattctagtgttaagtcactatcttttg

SEQ ID NO: 91766 - DNA, 313 bp, Zea Mays
tatatggattgttcctgtggcctgtgatctgaaagattgcatatttgctcttcccgactattctttttgctttagcagtggtcagtatggaaatgaaaagcttgtcgtcatccaaattgatcaccatcttatcgaaccactttgcatcctcagcttctcttctagtttgcaaggcaggggaaccaaatcttgaggccctcccagtgtttgccagagactgatatggaagtaaaaggctcctgccatagccatatggactcaatggggctggcaaggactgcaacatgctgtgactggaaatgtcattagtgaa

SEQ ID NO: 91767 - DNA, 609 bp, Zea Mays
aatggggtgtttccatgcaagacccagcttggctgggttcacaggctccagactacatatggtagctctctaatccatttccctgcaagcttttcgctcttgtcgaacacctttttcctgagtgcgtcaagtatcatcccgttggctctttccacctacccattagctcttgggtgtgccactgacacatactttatttggatgctcctttgcttgcagaaatcaaagaactctgagctagtgaagttagatcccatgtctgtgataatgttgttcggtatcttgaacctaaacattatttcttgaatgaattccactgcttttgctgaggttaaagaggccatgggtttgtactctatccattttgtgaacttgtcaatggcgacgagtatgtgactatatccaccatgagcttttttgaatggcccaatcatgtctagcccctagcacgcaaagggccaggtaataggaatagtttgcaaatgttgggcgagcaagtgttgttgcattgataggaattggcatgcttcacacttctgaaccaactttgttgcatcattcttcgttgttgtccagtagaacccggacctaaaagctttccataccaat

SEQ ID NO: 91768 - DNA, 408 bp, Zea Mays
cgcagaagtcgcctaagggtgcagccggactagcacaacaagtgcgaaaaaaccaaagtctaccgcgaagactatccgcgtagaagtcgcctaagggtgcagccggactagcacaacaagtgcgaaaaaaccgaagtctaccgcgaagactatccgcgcagaagtcgcctaagggtgcagccggaccagcacaacaagtgcaaagaaaccgaagtctaccgcgtagattatccgtgcagaagccgcctaagggtgcagccggactagcacaacaaaagcaaaaacgacaaaatgtccgcgccaagaccgactatatgcgcaccagcacagcataacaaaacacaccagaccaagtacacaacgccttcgcaggcatagccaagtgtgcgggggcacacaacctcatca

SEQ ID NO: 91769 - DNA, 448 bp, Zea Mays
tcccaatagaggtgtggaaatgccttggggatattgttatagtttggctaaccaagttgttcaaccatatttttcgatcaaacaagatgcccgatgagtggaggagtacattagtaccaattttcaagaacaagggagatattcgaagttgtaccaactatctagggattaagctcatgattcacactacataccaactattaagctcatgagccacactattaagcacaagatgcccgatgagaggaatgacacatatcaccgtgaaccaatttggattcatgcccataaggccataaggtcaaccatggaagcaattttcttaataagacaagtcatggagtagtataaggagcataaggacttgcacatggtttttgtcaacatggaaaaggtctatgtctatgataaaatacctaggaatcccatgtgctgggcattgaacaag

SEQ ID NO: 91770 - DNA, 371 bp, Zea Mays
gtgatttaagattggagcgaccaggccatagagtattgctcgcttcaaatttcgttggagctccccgtttcagatgttgtgatcgatcaggtctcggtgaagctgaattccaatctgatttgtgtggtatgttcgatcccgttcccaggtctggctttgcttggtgcagagtgtgtcgttgtgctgttccttttgagcgtttgaagctgaggaactcgatgggaaaaggtggaagtggccccgacccatgggctcttgtataggaatgttgatgtgtgtggtgtcaatggattgagggtggaggatttagggtttttgagagatttcattgggagttcctctttcccccatctcgacgcttccctttcgtc

SEQ ID NO: 91771 - DNA, 527 bp, Zea Mays
acgacgtactacgggacgtaccacacaatgcttttgaagtgacggcgatgtcgatcacagatcgatggttcgtacggaacacaacgaattatataggttcggtctgccgtgaagcgtaatactatacgtaatatgggtttctggtggttgtattgctctgagttcgaggattataagtgattgctaagggtagaagatgcaggtccctctatgatctagtggggtctaacctttttcgtaggagttctccctcggccttatataaccgactgaggagatatccttgtacagatcagagtgttcatgtgagtctatcccactaccagctacgattgcaccgaagcctttgataacgtgttggcccttcctgcagaactcacacacgtctgcatacacaatggcattcaatcgacctttttgctctggcacatggccgtcagaaccagcttcaaatacctcatgtcgaggcccacgatgcgtcccccgagcggcctaatgggggccttttaggcggcccatgaagcgag

SEQ ID NO: 91772 - DNA, 640 bp, Zea Mays
aatggatcccaagtctctatgagtgattgaggctagtgtcaatatcgaaagtggagggcaaaagatggagtgtggtcctctctcctctagggaccatagactcctccttttatagccgcaaggagggagcctaggagtacaagggttgtcgtaatgttgagaggtggcaagcctgagcccctgtagcagtatgcccgtcgggatgcccttgtcctggctattgccttcgatcaggaggagggtacccagttcctgtatcccgtattttgaccaagcagagagccggggctagggtcgggggctcagaaacgtacctaagcccatcttgtggacgagacatctgagccgtagtggttgaaatagcaatcagtatggtgaaaagtgcatggtaatccgccccatgtgtcatgcggaatggtgtaacacagacttgacaccggtcttgtggtttctatagccatcctgttgccagcggtttttgtggggagggttggcagcatcaggtgttcttttgttgatgttgttggccgaggccatgctcgggcgagatggagacttcttccgagggcaaggtcgggtctacgcctatgcacgcggtcatgctaggagtggtcagaacaatagtcaaagtggtctcctg

SEQ ID NO: 91773 - DNA, 648 bp, Zea Mays
tgggagttcgttttcctggacggaggagtcctcggatgaaggcctagattattttgctgcgttagacgtggctgcagcggagtccacgcccgtgtggagggtgctggggatcttcctagtgcgagtactgggtataggcggcgaagggtggtgtagaaacacagtgtgggtgatttttcgcgaagtggtatgcgtcgtcgtatggggatggagcgtggccgtctccgagtagaccgggttggtaaacgagaattgttgtcctcgccgattggggcgagcataggcgagggggatcttcggaatctttttgagggtgaggaattgaggataatgttgttcaattacagggagatgggtatcatcgcgaaggttgagacgatgtaatatgtgatgccctcgccgtgtgtatgtaactgtaatttgtatggtaatgtggcctgttggctgtattcgtatgcctatgttgatccggctgcgcccgtgggcgactttgcacggagtgtctttttaatgagagattttgattaacgcacttgttgtggtactccggctgcacccttaggcaacttttgcacggagtgtcttttaaataaaagacttcgattcacgcacttgttgtgctattcttgctgcacccttaggcgactt

SEQ ID NO: 91774 - DNA, 359 bp, Zea Mays
taggcggccaactccggcgaggctatctggactggccgtgaggcaagtgggtacgacgaccagcccttggtctcatccgtggtgaagatcttttcacctcgaagcattatccagccaccaaagggcacgaatcgcatcgccggcgtgaatccaggtgcgggggtcaccggcggcaagtgcactgcatctgtgatctcattcagttcaatgtaccatcagaacaccattcagaacacctcacagagcttatttgggggtgatttgctccaaatttcatgtagcaacctgatcattcatctgtatcaaagttgtagctctataaaccagctacaaatcgactatagagacctggcttattt

SEQ ID NO: 91775 - DNA, 833 bp, Zea Mays
aaaaaatccaaaaaaattgaatccacactataaaatgataggatggtgtttgggttcgtccacacacaccccggctaactctctagttcagttgccttcgcctctatttgtagcctctcactatctatttcaatgtggattctatatgaagttcgaacttcgatacgttcaccgacctactcgattagtaatctccacaacgtcacgagatctctgttaatgtgggacatgtctttttttaatggtctttctcccgtccttcatcagtaggaggatgtttctgcttgtacccattatatgggttcgcaacctctatttcaataatcatattttcctcctctgtatccataccggccattcattgatgctcctcctatcaccaacagttctccttctaccataaagctcctgacattgacactcctcttccttaaccttttgcttatccgtacacatatgggtatccatatgatgctcctcctaccaccaacagttctccttctaccactaaagctctaacactgacactcctcctccttaaccttttgcttatccgtactcgtatgggtatccatatgatgctcctcttaccaccaccaactctccttctaccactaaagctccctggactaacactcctccttaaccttttgcttatctgtactcggtatgggtatctatatgctcctcctccttatggattatatggtgctactcctccatatggtgcctctcatccgttctctcccccatttggtgctcctcccctatatagtgcttgtccatttcatcctcctgcaggcataatagtgccctaagcagcctcaacgatg

SEQ ID NO: 91776 - DNA, 655 bp, Zea Mays
gtcgtgcatagccattctcccatcagcgtactgtcccatccgctcgtcgtatgggttccttttccaggtctttcactaacagcctcgtggtaatgcgcggagggtcccacaggtcagccatatgtatcagttgtgcgtcgtgaggtcttgcctgtcgtcacgagtctgtgtcactcattggcgtgcataggcatacacacggtatggtatatctgttgtgcactacccaatattcgagtcactatagaagctctgatgctgaggtactttatgaacatggtcgtccggtccttcgaggctgtgggaggtgtggtcatgtcattagcggtctctcagcgtgactgcggcctactattcggatgactggtcatggcccgggatgtcatgtcttgtcttagttggcgtggactttacgacgtttgacttgggtttccatcttgctcctcttacttggttgggacctggatggtcattctatcttacagacttgctcggtgggggcctagtcggtcgctccgcctcgcggacttgctcggtaggggcttgtttggtcgccttgccttgtggacttactcgtcggtgacctggtcaggcgctccgcctcgtagacttgctcggcacggacctggtcggtcaccttgccttgcgggcttgc

SEQ ID NO: 91777 - DNA, 688 bp, Zea Mays
gaaggaaggaggaaagggataactcaaggtgatcttgtggttatcgttttatttgtgctgcaattcattttctcaattgttcatctatgcgattcggtagaggtgctatccagaattttgttggtggacgaacatcactagtattattagtttctggggatttttcgggagtaatcagtggtacacattgtgaaaatcatgtagagctttgtcatatctttccaacgagtacttatgcgctcgattcggaggaatattttaggagatatcgttccccgctaggttgctgtccaaaaactgaacgcagggtgtatcttgtgggctgtttggggccatttagattttggaatttaattatcatttgaatacaaaacttgtggggaattttatgtagatgcttctggagtttttgtttgatatcactgctgtcataattttaaagatatgaaattgtcaagcagcgccgctgcagtttggtgggtgatggggagaattgtcgctcgcgacgggtttggatttgtgcgtaggtgcggcgttgtttatgtgcgtttgttatgtggatttgtgtactaagatgtgtgtcaaaagcgggtggtggacttctggatcgtacttagagctgtgtccaaattcccgatgaaggcaagtaaaatagtgatcgtttataccgttggtccatttatgtgtc

SEQ ID NO: 91778 - DNA, 1231 bp, Zea Mays
tggagctctccaagccagctaggtcctcgatctcttcgtccctcatcacctgcgaaaacaacatatcaaagcatcagaaatcataaaaaagcatcctcccccaacaaaaaacaatcattcacacacgccaacgcccgaccagccctctcccggatgactccatgactgtggggaccccacatccggtcgtacagtgcccggccgaacgcttcagcacgtcgtcttcgacctagaacactcccttgtcgaagtcctcattattttggtcaaaggctttgaagtgcctatagccctcacgggcaaggcatttgctgccccttcgcaggtaacgagagaggcataagacatgaggcccgttgcgatagacgggagggactccaactcctcttgcaaccagccgaggaagcgggtccccacctcccccctgacttgttgaagggagccgtctccgcgtccagatcatgataagcatcgataaaaagtgtatgcaccctatccacgccaacccgtctagcggcatccaccctcttgtggtaggctcgcatgttcttcaccttcagctccaggtcagcagctcgcttctgagcggcttgggcctccacccgggcagtttgggcctctgtcttcgcctggttggtaacatctttatcctcactcagccggcaaacgagactctcattccctttctcaagtgagccaaccttctccaaaaggtttcgactcttattctcggccacatacttgtccctgatagcttcagtattcagcattcgaaggcgctctatcttgtcctccagtcgtttcctttcagactacaactgaggtcgcaacgttcaccaacgcctatgactccacttgatcggtgaagactgtagcctgccattgcacagacgtcggaaaaaagtcacatagcgtagctgccgcatgatagtagctgccacaccctcagccgcagatatgctggcaacctctccgcccccataagcagcagcgctgaatcgcgcccacgagtctagcgaagtcgccatctcatcctttgcctgggccctatcttcaaccatcttcgccggcattaccaccatttgcccagacccagtacctgcggccaaaaaatagatcaatagaagaacacataccatcataaaaaaacttacacaacaataaacacactcatcgccaggcagcagccctgtctgagcatcgaacatgccaatatcttcaatcaggtagt

SEQ ID NO: 91779 - DNA, 1219 bp, Zea Mays
ggttacgctacgatgatcgaagtgtctcgagtgcacgccaccatatggttgtatgcgagacagggttatgcgcatgatgagtttagtaaaaatccaacggtgtcactggtgttaagttgaggtttaattacgcgtggaaagtaataatggatttaatacttagaactcttagtcgatagtaaaaattgttttggtttatatagacaggtggtgacatgcccaagtagttgccgctttctctatatttataagtcgagtcgagacgatgcgtattgtgcgttcgataaattaggcttcacatatagtgtataattgtgctcacgattttgagcggacactccaagtaagtaaagtaggtttgtgatacaagtgtgtaatggagttagttattttaggataattattgaaatactcggctcgtatgataaacatgtaagcgttcgtgatttggaaagtaaatacatagcgattgcgatttggagctcagtggtttacgattcgtatagattggtcgatgtgcgaaaatacttgtgagtatgtgtgtttataaaaatgtggcagtgtatgttgagtctcggattgcgataataataggcaagccgatgtgtatgttatttagcggtctatgtcgttgctctagttagccgactgttagatggctttggttaagctcgtaatcactgtgatttgcttattttggtctagacgcgcatggttatgatcgcgggtaaaaagtagtagtgttcatgtgatgtctaagttgaaatacaaattattaagtgaaaagcgcttcgatattgattatcgtagagaatgcatagttaattgagtatggtacttctagtgttcaaaatgacacggataagaattagtaaatctacttattagtcctcatttgattaatttaacgctaacaaatggttaagtgttagaatggttcgagtctctagaacgcggcaattcttgaagtaaataggagctgaaattattagttgctgttttggactgcacgcagtgatttccccgtgttgtatgtttgatgaaccaaatcgtgttttctgtagatatgtgctctagaaaagtggtagataactttattatcttgctggtgttaaaatttgacaggcataagtctgatcgtttaggagctatgctttttacaaattcagtaactgaatctgtccaaattctgtacagatttcagagagtgaattgtttg

SEQ ID NO: 91780 - DNA, 338 bp, Zea Mays
tatatatactagtatggtgcccgtgcgttgcaacggcaataattatgaaaacaaggcacgtaactatcgctaccctgtagcgccttcgtcgccacccgcttcttctaggcgcaaatgctctgcaccaccacgatacgcaagcgagaacgaagcagaaagtggtcattttttgcatccagatagacatggcacccaattctctttaaaacttttgctaagacttaacaatacattttattctgggggctaaattattatcctactaacttgaccataaattagcaacaattattattatttatatgaaattagcaccatacttataatctactccaatc

SEQ ID NO: 91781 - DNA, 1532 bp, Zea Mays
gaaaactgtaatgtcaacaaatgttcaatgtaagaaaatgatgatgtctatgcaataaaatatcactattaagatggtaatgctacacctgaaataggggaaatggtctttttccttggagttgatggtatttagagccgcatctaatggtaacaataccttacaaatgtcaatcaagttttctagcatggccattgagttactaaagaagttgtgcgttgatgtacccataactaaaacatcaatctgctcttttgtagtttagaaatcctagtttctgcatgttgagtcctgcagaagaattaaattgaaattgttttcagtaagaaacacatcatttggtgcagataaatagaagattgaagcgaaataggtcgtaaacatactgcattttggcttgttatgtggaaaccaaaaggttcttgagtgtataattgtaattttagtgcatgtactgaacatatgtgcactttgtaagcaagtatgtttggacattacttatatctctcgttttcccaaaaagataacaatggtggtaataaagtattgactaaaaaatcaagaacattatgtgaacttggagaaaggggaactgaaagcggactcaagttttttttctgttcgaagtctcttcatgtgtaaaatataaagtcatgtaagctagtagtaataggatcagtgaaatcagtgcttatattaaatataaacgtcacttctcgttcagtcttacctatagcaataacccataatgtattatttagtttggtctttttgcaggttatttttgtatctagactctctatcagagaaagccacgtatatcacccaggataatgtatgtcacctaggatagattgttttaattgtttcttactgaaaagtcacccataatgtattatttagtggactgagatattttcagatgttttggactgctttgaacttcttcagttcgactacaggaccaaattcacctcccattatctcccatttctacataaggatggagctacctcactacatcaaagtggttcaccaagcatagctctttcacgttgatatagaatgcccaggccaaaaatgcatatattcaaagttatggtgcccaaaagtggagcacatcacactgaacccaaattcagttagttgaaactgacaccactcactacagcctgacagagctagtttaagaacattttactcactattttgcatagtaccaggcctcccactccacaacaacctttctatcctttctatggtctaccaatttagtataaacactttggcccaaaacactatggatcagtaacagtagggctccaaagtgaaccacattctactgtcagagttacattggtctgaacaaaaatcggataagaacacaccctgacagcccatcttcaagcaaccattactcctctttatgtagcatcaagccaacctcttctaaaggaacttgttcattgttatatgctcttcaattttgatagagattatggctaatactccatatatcaagcacaaaagaa

SEQ ID NO: 91782 - DNA, 281 bp, Zea Mays
aataactttgtatactagcttcttctaaagtttcctatatgtatcctcctctcccttagcagcactaccattccagatcccacaccaaccccccaggccatacccctcctctcccttagtagcaccaccattccagctcctataccaaccctgttgctttcttccctgtcttcctcatcctgccagctatcagcccctcctccatgtcatttccttgcccctaaaatgaatcactattgcctatgctttcagactagacaatagagcttatatatcaatgt

SEQ ID NO: 91783 - DNA, 524 bp, Zea Mays
ccacattttggagttgcatcccgcctctgcgagcaagtctgatctctcctcactcaagcttcgggcatggtgtttggatcctatgaagcttcgcagggatatggacctccacatcattgagcgagggccatttaatcaggaggcgagatgtctgacctacaagattagcattgctgttctttcggctccccttcagtttctcccggagagcagtctgtctccttcggatgaggatgagctccatggtgaggagctccatggtgaggaggacgaggatgtctggggtcagtccaaccctcggatccgacaactgggtcctttgcagcgtcagtctgtccaccttcgcctcggttcccatcagagagcgggcagagaacggactgcagatgtgcatggggatatggttgaggcgccagttttagctctggaaggtggtgctgctttatgtgttggtgatgactcgctgacctcccctagatcttcttcgcctcagcgcagaagtttggctgagccgctagagaagg

SEQ ID NO: 91784 - DNA, 450 bp, Zea Mays
acgttctaggcggcagaggatcccgattatttgccagcattgcttggcgaatccgaatctgaggaacaggtgcgacacatatgtacaaatggaaaaacatgctcatcaaaaacaacgtcgcgtgaaatatagattcgccctgttgaaatatccaggcacttgaatcctttatgcatgttactataccctaaatgcatgttactataccctaagaaagcacaccgggtagacctaaattagagcttatgctggttatatgggcgcaagtttggccagcatgcacacccgaaaatacgaagtgaggagtaatccggagtggcacctgtcaaacttgtgcaagggagtgtcgtgggcaatagttttggatggtgtgcggtttatcaaataaacagcagccaagaaagcatgatcccaatacttgagcggcatagatgattgagcaaggagggc

SEQ ID NO: 91785 - DNA, 499 bp, Zea Mays
tcaacctccgtcaaagaagatggcttgaattgatcaaggattatgacctcgaaatccactaccaccccgggaaggccaacgtggtagcagacgccctcagccgaaaacctttcgggattaaaggaaccaactttctagaagattggaagaaagaatcagctcagctgaatgcatgtctgggagacaacggtagcctagaagtcaagccaaatctagaagatctcatatgcaaggctcaacgcctggacgcagagacagccagacttatggaaagagctcgcaaggagcaacttccggaccttaggacagatgagcaaggagtcctctggttcaagaaccgcctgtgtgtgccagtgggagaggcacgagaaaccctgctcaatgaagcccacaactcagcttactccatccacctaggaaccaccaagatgtacctagacctcaaagccagatactggtggaaagggatgaagaaggaaatagcacagtatgtggcccg

SEQ ID NO: 91786 - DNA, 442 bp, Zea Mays
ggaagatctccacgggaatagattctgggcaatttcgagcgacggcgcggattctgagttagatgtcgatgaggagattcacgtacctgataccctggaaattttgaaggctgccgtccaggggtgttctatgcatgatctgcgggaggcagacgatgatgagcggtgtaagatgggaaaaaattattgatctagttgccgggcacattaggaaaaacccaaaggcccgtggcttgaagccgtgggttggggtcctgcctggtcctcgggtttcgccaaagatgacattgggagatgccttagaaaaggcaaggttcatgcccttgaaacacacttcgtcggcggcgttccggcctgatggtgtagctgaaaggtttaccacctcgccgggcagctcgccggagtcaggggctgggtacatgcatgagaatcacgacgtttg

SEQ ID NO: 91787 - DNA, 422 bp, Zea Mays
catagggatcgccttccagctgggtttcgcaatcagggattcatttcgaaacaagtccttgggcatatcctagaattcttttccctgcctttggtttcgatctaactttatgtcactgcttagtgggccatcttcgccaccattgtttgataccttttctgattttgtgaaggtggttctctctagggacgccccttcatctcccacctctacagctccacatcaacatccattgttctcccaaaccctcactggtgcgctcgattcctcaaaactattatcgtctccaccaagcttacatcggtcaaagggatccatcgctaaagctaacactttgtcaatggcataccacagggtcgaccccacaccattcctccctcaaggtttcatcgttgcacctatccagcattgcaaggtcatgg

SEQ ID NO: 91788 - DNA, 659 bp, Zea Mays
tgcgcccataacgcgttttaaaaaaaaggcctccagcccgagcccgagccagagacctcctcttctctcttctctctggcttctctctgctctctagcgatttgccctcctctccggcgaccttccaccggcgaccaccatgctccggcgacctccagggcttgtgctctccgtctctcctctcggtgagcctctcccctgtcttccctccctctttgtctcactgcttctctatgcagtgcccccttgcacatattctcacattcctgtcaaaatgtttgaatcaagtgaatgtgtgtgtccctagtactaccaagagcttccatgcaggttcctagctccttcgggagggtttcaccacctcaaataggcatttctccaaaaccctaattcaccgcacgccacatgctcggtgaaatgcccaaaccactcaaaattgctccgattgaacccaaacttttcaggcacctttcacaatacctccagtaacatattcgccaaatttcacaccaatccgatatactagccttcaatttcactcaattccccgtttcgagcgatcaattccgagccgagtgcccaaattccattttcttcgcctaaattcaaaccaagcacacacttcactcatatttacccatataaacctattcgtgaag

SEQ ID NO: 91789 - DNA, 283 bp, Zea Mays
tgtcagcttgctcgcacagagcagaccatcgtaattaaaccaagacaatgacgtcatacacactcatagataatgcattctgatagcaccgtgaagtgtaatcatggttcctgattggttagttaacccctcttcattacatgagtaatcatgcttctaatcaagcttaaacaagaaccgatcgactcgcgccgggatacattcatagatagatagtggcaaagataatagtattttgccttgtcgtcctagctaactagcttgctagcgacctggatcatca

SEQ ID NO: 91790 - DNA, 434 bp, Zea Mays
ggctgttgttattatgtatgtcgctgttgttttagtgctggtcaatttaagttcctagaggaagagtaaacggtaggaagttatgctgctaacttcctagagttgtagtaaaacagtaggaagctagactgctaacttcctagagtagttgtgaaacgacaggaagttagccgctaacttcctagaaagacactaaaacggtcggaagttagatgtgtgacggcgcaactacggtatggacggcgttatccattaacttctgagagaaagtctgcctctaggaagttaggcattagcttctgagagacctctcgaaagttaagctaacttccgaggaaaaccttctgagaagttaactttcgacgagattagctaacttccgagagtttagtgctaactttctaatgtttagactcttgaaagttaagtatttt

SEQ ID NO: 91791 - DNA, 342 bp, Zea Mays
gtgtgtgtgaataccttcttaggttctttctctccaactataatttgttgatcactggagatgtcagacacttcttcttcatcatccttgaggttcatgtatcttttcgaaagaaagatcttctcccaatgatcatagttgcccattctattgggtgtgtagggcttgataatcgagatagctaagatggtcactatgggttggtatggcaactgatccatcaagacggctacgtgggaagaagcataggtattctcaagtagccagactggctagtgtataatctttccgtctgatgcggcattaaagactaggctttgttgggcaccaatcagtgcgact

SEQ ID NO: 91792 - DNA, 408 bp, Zea Mays
caaaaagacgggacgacccctagacgggtctctgcattgagcagagactcgagggctcgtttcgcatgagtatggtgaatgggagaaagttgcacgaaaagcgccccttagaccaagagcgatcaatcaggctatggaacggggttatggaagatcgtatattatttcctccaccgacaccaccccgagcatagcattcgccgcggcatcaaagtcgctcgttaggagatctaagttcgttgatgttgttccaacaggcagaccgataacatcatgaaggtggccaccgaagtgcaactgcacattggcaagagccgtcgtcgcaccctggtgaaccccgaactccacagcctcaagaacgagatctgagatgtcaaggaggcatgatctcttattcctcccttgcgc

SEQ ID NO: 91793 - DNA, 401 bp, Zea Mays
ctgaacactgttcgggcaggaacttataatgagctagtcaacgtggctatatcctaggaagattgtatcttatcccacagcgcggagaagaagagaaaggcacatgcagcaccatcatagtcacatcccccgaaattcaagttgttcctagcaacagcagcaaggacgctgactgattaggccatcgtagaagtcggacaaccatttccagaaataggcacctagcaaaacagccatggaaatgtgaaaaaagttcttcacctacggcagcactagtcaccatgccaaataatgtcccaaaaaatcactagaaacagggacaaggatctaaccaggacaaagggaacaagcaaaccgtccatgttagatagggcaagttgtcacatcgggatttaaggaca

SEQ ID NO: 91794 - DNA, 502 bp, Zea Mays
cgcggttgtttttgctcttaagtcgtggaggcattacctttatggcgagacttgtgacattttcaccgatcacaaaagtctcaagtatatttttactcagaaggagctgaatttgaggcagcgtcggtggctggaattgattaaagattatgatttgtccattcattatcacccagggaaggctaatgtggtggctgatgcccttagtaggtccggggttccgaaggtggccttgccgttgatcgctgatctggaccgtgtggggatcgctttgtgttatgtcggcaccgctagcaaggagactcagatgcttattcaatcctctctcatggagagagtgcgtgcggctcagcagcaggatcgtctattgcaggaagctcgaaagagggtgggtgatggtaaaccacgggagttcaccattgatgagaatgatttggttcgtttcaggggccgcctctgtgtgcctcagaaatcagaggtgaagatggatatcttgagagaa

SEQ ID NO: 91795 - DNA, 612 bp, Zea Mays
cgttcttttactctgtctaccgtgcggttctttaattattctgtgttcttcgtgcatctcctcttcttcttcctttgtttgggcggactcatgtacaaggagaggtcaaatcttgatgagggcacagactccgacagacgatgtgttcagtgagtgaagctgctgaatgagagagaaagtcgacagagatattgttctgtgcagaccctagccaagaaactgccatccctagagagagagaggagagggggagctactagtactagattagcatagctagagcggctagagagagagagatcatctacttctgctgctcctactagctagatagtgagggagattggatgtgtgggtgcgtgtgtgtgcaagaaaaggtgccatcatcattgcacaataatgcaacgtgtgtctggtcctgcaagccgcgcccaacctccaaagctagctagcagtgaagtgagcgcaacatgggcacgcacggacgacgagatcatcagagtcagagaagagccggcccaccccattgcgatttcctttggacagttctggccggccgggtgctccgttttgtgtgcgatttccctttctccccccgccccacacgatctc

SEQ ID NO: 91796 - DNA, 312 bp, Zea Mays
tgcaggtgatagagggtacaggactctatcagctcatgagtctctgacaccgctatccacctatgctacttcggtcagcgatgctgctaggcgaactctatggtctctcagccacacttacctgtagcagctgcacgacacgaagtataggcatcttcctctatgtattcgtggagaaagctagaccagcattattccaagtggagctggagaagatcgcctcaacaccctagttggtgtggtggcaggtcttaacaccgacctggatagtgctaccctggacctctccaagttacacttggagctggagga

SEQ ID NO: 91797 - DNA, 530 bp, Zea Mays
aaaacacgttccccgatgtcaagcagggttgaatcacgattcgcctgagaccatgctcaacgaccattaaaactacgcctcgcccgagcccatccttaggtgaaggcagcacccgtgagaaatcatcgtctcgaccgagggcccctcttcacgaaacaacaatttccacctcgcccatgctcgtctcggactggaggatagccccgagcccaaccttatccaaaggccacatgaatcatggagacgtgcactttaaatgcgatgatttagatatctactccatgtgacaccgcagtcaaacatggatgatgggaccgcagtcccatctacttttgccggctacaatgacgcacgcccacgaataacggacactactccgccacgccggctactgttctcgaacaactctggacgggacatgcgcgcgtctaggcacaacatcaccttcgggagagaactttgccttgcccgagttcagcctcggccaactgccctagcaacaacaccccgtgaatcccgcaggaggccac

SEQ ID NO: 91798 - DNA, 392 bp, Zea Mays
cgacgatgtcgtactccgctaaattggtctgaacccggtgaaagatacttcttcaggcctgatatggtgaaaggaaccaaagaaaaagttcaaagaataattcataatttgaagaaagctcaagctcgttagaaaagttatgcagacaagcgacgacaacccttgtactttctcgtgggagattatgtttacttaaaggtttcaccaatgaagggcatatcgcgtttcggggttaaagcgaagcttgcacctcggtacattggtccattccctatacttgaacagtgtggaccagtggcatatcgacttcaactacccgaaaccttgtctgcagtacataatgtgttccacgtgtctcaattgaagaaatgtcttcgggttccagatcgaac

SEQ ID NO: 91799 - DNA, 545 bp, Zea Mays
gagggaattactatagaagtggaacctaccttagagcaagatatatggaaaggtcaggttgtgatgctaagattcaagagatcaaagactcgatggcagaaggtagaggtctagacatcacgaaagatgagcaaggcaaaatctggcttaagaacaggatatgtgttcctgagatgggcagtcttcgtgagaccatattgaaagaagcccatgactcagtttattccatccaccctagaagtaccaagatgtattagggtctaaaacaaaagtatttgtgaaatggtctgaaaagagatgtcgctgcacatgtggcagtatgtgatgtatgtcaaatggtaaaagctgaacatcacaggccagccagattgcttcatccattaaaagtacctgaatgaaagtaggaagaaatcggtatagatttcatagtcgggtcgccttgcgtcccaaaaggttatgattccatatgggtgattgtggatagattaaccaaagtagctcactttattatggtcaagcctacctataagggcactcagttggca

SEQ ID NO: 91800 - DNA, 690 bp, Zea Mays
agccaatgaggcggagagccagggaggtcggtcgccagaggcagatcgaggcctcacaatgagccagtgatgcagaccgccgaaggtgcaatcgtcatggggagtaggtgagtacgtgaatatcgcatgagtgtcagcggcggcctatgggagtgggatgctagggcagagagtaacattatatacctaaggttatacgggccatgtgttgggccgacatgccaaagaaggcaagaaacttgtacttcgaggctccatggggaacccgcgggtggggattgaaattcgccccacacttgttcctattcggggccccaaacctgtggatccgcggggataaacgtggacccgcctcagcacctatcgggtccaaaacctatgcggacctgccctgaacccgcctcgctgccatccctataggtgtgcggtctgaatgacagcgcgggagttggtgtgtcaggtcaaaggcgtcatttgccacgacgtggaccttgtcaacagaccaaccaccctgtcataggaaagttaactaatgacgatgagtaatccgctgcatgacaagatggcacataactacaaccataacttcgctacaatactctgacgaaagaaagaaagatcatccacagaagtccttcggttacaagaaacctagaggacaaggagctacgcgacaagacccgacccctc

SEQ ID NO: 91801 - DNA, 374 bp, Zea Mays
gaagatagttttacacaagtttgaaagaagggaggtgctcagaaagatttattcatcacgccaccttcaattaagccgtcggcctagtcccggttggtgatcgaggctgtcaccatggaagcaaaacaggctgaagcacgctgggagaagatgatgttggccatcgagtagctgacagaaaaggttgatgccatggaagaagagatgacgctgtttcgcaagcaaatggaggaggctgggaaggctgcttctcttcttcggttggaagccatggcaagggatatggatcgttatgggaatgaagaagcaggagaaagagagagcagaaattcctagaatataggagaaagaatgcacagaggtagagaggagag

SEQ ID NO: 91802 - DNA, 611 bp, Zea Mays
caataagtgcgcgacatcacccacagggtgcgaagtctttattataagacacgtccgagcaaaagtctcctaagggtgcagccggacatgcacaataagtgcgcgacatcacccacagggtgcgaagtctttactataagacacgtccgagcaaaagtcgcctaagggtgcagtcgagcatgcacaataagtgcgcgacatcacccacagggtgcaaagtatttactataagacacgtctgagcaaaagccgcctaagggtgcagtcgggcacgcagaaagcaaggtcctcatcccacctgagtaccacaccaacacgattacaaatcaagacaatcttacaataaacgcaacactcgatatgccatcatagtttacatacatacaacgaagggcccgtcgaccacttcgcacaagcaataccaatcgcattttgtcgccctccctctctattgcgatgcgggggagggcagcgttttcactcactatcgcaacacgaggttgaggccagcaaaaatgctacatcggctctgccttcggaataagacccgcctcccagaaattaaacaacatcatcttcaactcttcgccctcaaatagattccgcatgtc

SEQ ID NO: 91803 - DNA, 684 bp, Zea Mays
gacctttgctttggacctgaaacagcaacataaagattgacatgttgggatttgatttattagtgtgttggcacatgtaggtctgaaaacaaaaaagatttagtacccaactattatgaacgctttataaaaagtaatgtgaagtgacattacggcaggttcagttaatatatatagttgtaccctgcatttagtataccagcacgtcttaggtatgctaattcaaaaaagcatcctggcatttaaaagtataactaactgcagaaatatatataacatacatgactacatgattcttattcactgttatgtcattttcattctttgttctgcatttctcattccatcctccccacacagcccattcttatcggctgtcattccctgttctgtctttctcatttcctccgtcccgcaaagcccattctcattatgattcatacgtacagcccacgtctagctaaaatttaaaaacattccatcctccccgcacagcccattctcatgggttgttatttcccacgtacagcccacgtctagctaaaattcaaagcccattctcattatcattcatgcgtacagcccacgtctagctaaaattaaaaaaacattccatcctttccgcacagcccattctcatgggctgtcatttcccacgtacagcccacgtctagctaaaattca

SEQ ID NO: 91804 - DNA, 426 bp, Zea Mays
ttcaaattcgtcggggcttggactccactatcaggggagaagttgagccttcgggacatatggtgggggtttctacgagccctccactttttgtgtggcccttcgctcaacttcctcaaaaaggccatggtctaggacttcaactgtggtgtgggttgaaatccccttcactgctgactctacgctcaaacatggttaattgtagccggataagtcagatcgaggtcggaatcggccttcgccccaacactttccatttctttctttcccctctctcctgaccggttcgagcttgacaatatcatgttccatccaatgaagatgcacttcattttgggagagatgtgatgaatggtaagtaaactaaacaacttgacaccgatgagaaaacttcttgaaatattgacatactacatttgttagttg

SEQ ID NO: 91805 - DNA, 725 bp, Zea Mays
tagtaacacacatacaaataattgatgtttggttcttacaaagagacgaaggccacatacaaacattaaactcctaaatatacaaagttttaatcttcttttagcactttctcagcagcttcgttcagtagtctgttgacagcctcgtcaacagcttcgttagcgatttttattatatctaacgcttccttcatggccgggtcaacatcggggtcatatggctccggtggaggtgaaagttcagctacatcataaaaaatgtttgtgaattccgaagctaaaaacaaatcccgaagctcaacctcagttaaggtaactataagtctggcacgctctgcagcttcttcagctcttttggcctcttcttaagtgtcgtgggattctttttcatttttcctaatagttcatcagctatctcacgtccgccctttatccatacttcggagtaaaatttaccgcttaacgaagacgcttcggctgaggaattcttaatgtcgtcgactgagataacaaattctagctgaacaacaccctttgcatggtcatagccaaccttttccaaaattgatacagccccacaagcaccagcaaaagcacaaaaatcccctcgatcgctgagtatctcatcaaaagcttcggcctccccgctgatccactggataaccccatcggggtcatcgcagatgaacttctgctcgaaagagtatgctcccacctatgcaaaa

SEQ ID NO: 91806 - DNA, 423 bp, Zea Mays
atcgaagttacttcataagttctggcgaaatctctgttgcgtgaaacctagaccatccgcctgattaagtattcatacttggtgaagcatgacagcagcagctggcagcattttatgcttgtatttttaagcgtaaatcttcattcattacgaatttatgaaataagtcgtccgaataacaatataacgtcatacaaggacttcttcagattgtctgtggacgacttgtatatgcatagtctgagagggtgccactggttcctatatgattatggaaccttaagtatttgtggcttagctgagccaaagagagaaatttgagcctgatacaaataagattacccaaaaatgaaatgcttcactttagtttcccctctctgcccagccttgactcggcctagctgctcaaccagttggatttta

SEQ ID NO: 91807 - DNA, 585 bp, Zea Mays
ttccttatccaactttaagctcatttgttaagatttggataagcaccataaaaacggtttggtagtgatatcctcgcctacatgtgtgcttggatggtttggtttcaagcttacacacatgcaaagatatgaaaattgaggggacattatcactaccatatgatgctaaagtatacaaaatagaaatttacctttgtagcatgtttactacttttcatttcatccttagcatcatcttgctagaaacaagtgaaactagataccacatgagatcataataaatagggttctagttactcatttcacactaagactaggcttataaatatcactaaatcatcatcatccaagtcttagttctagcaaacacttatacacaagtatgttggaatataagacaaatgtgatgcaagcaagcaatgtagtgcacaaaacaaatgcatcacacatatattcacgagcttgctcccctacttgtgtgcatctcttgttcaataaaatctcataccattatactttgctcttgatccattcgtattaactcaactgatcagtagctccccctgagttcatgtccaattttct

SEQ ID NO: 91808 - DNA, 683 bp, Zea Mays
cgagcatgttgcaccgtttaaagtcatcgccgacttaagccgattgctccgttagtagggtatagtggtcaccctaagtcgagtaagcgtgttgattcctagtccaatcgaatcgaagtcaagtgatagttaacagtttgaatgcccttgaaaatgaaaactttattgatgatgtattctcccattatagagtacaatgttgccccgatagctttcgaggtcttgctaagggtaaaactttctaagatgctctatgttccatgaattccccacttccgtaccatctctttgagtaagtcgatatgatcctggccgagtgacctccgatacaatgaatggcccttcccatagtggtgacaacttatgccgtccttcccccgttagaattcggcgaaggaccaagtccccactacaaaggatcgatgtcgtatagctttatcatgatagcgcctcaaggtctgctggtatctggctgactgaattactgtgttcaatcgctcttcctccagcacatcaatatcctctagcctagtagcttctgcttcagctatgctttcgaagaccagccttggcgccccgaacttgaggtcggcgggtagcaccgcttccgaaccatagaccatgaagaacggggtatttccatgcagggctcgactaggttgagttctcaagctccaaaccac

SEQ ID NO: 91809 - DNA, 310 bp, Zea Mays
actttatcttcaggcacgatggacttcgtctcaataggtgctgaaggcccaacttcgacttcgacctgaactttcgtagcttaggcaaatttcttaggggcagggctcagggccttcgtagtctctataacagtgtctaatacgctggtcatcctcctcctcttgggagttgcggcaggagttttttgcatttttagcaaatctgcctctgtgggtgggctcaggatttctggcgtttttatcaccttttccaccggtggctcttcagccttatcatctctagcttcgactggcccgactgtaagcacct

SEQ ID NO: 91810 - DNA, 1148 bp, Zea Mays
gcaaagttgtagagctatgtaaggagaacaaatttgattaagtgacctagcactggtgttgtacaaaaataggagctaaatcggtttgaagtttggctgtcagaccactctatgactgaatgttaaatgacaatgagatttgctcaactttggattcaattcaagctcaaaggattgagtaaatgagttaggtctctatagttgaattatagctgaactatagtactacaaatttgttaaaggtggattagcaagttattacatggaattttgagaattgggcactgcaatttgctctgtcagaacgactaaagcggttcttgatggtacagtagcaaaagatctgctgattcagtgaacctcgccaccggtgaccatgcgctcggattcgctccaagcgctgtgattcgtgctcaacggagtactgatagttgctcggggtagtaaataccgccttgaggatgaacttaggccactgttcaaccccggccaccgtgtccgcctgactcacggccggttcagataagatcaccggagttggccacctatcgacagcgcgccacgtgcctaggtgccttaccacgtcgtagtaactcgtattacgcatgtccgttgattgccggtgagctcgccacggtgaaagccaccaattccttgcgacagtgctctcccctctctccggctgccaccgcgccatctcaaattcatgggccaccgccctcgagccctataaattgagcgtgccattggctccgctaggtagtcacgcacctaatccaccaactcgtgcctcaaatcgtccaccagagctcaccaatttgggatttcccccaaatcggtcaagaacaccgtgtgtgtgagctcgtcacggtcagcgctccacaggttcgatcatgttcttctcgctcttgttctagcattcctgtatgcccttgaagctcatcggcccaaccaattgcactaaaccggagtagatcgacgagaacactttgaattttccccggattgcgcggtcaccgtgagcagagaaattgggggctagaaccttgcaattgatcgaggggaaatgattgttaggggttaaattaagtgccagccaagctagagccctagtcgatgccttttccggccattacgagctcgtcgga

SEQ ID NO: 91811 - DNA, 705 bp, Zea Mays
tcctctgtcagatatgatagtccttggtattccatgcaagcgaactatctggtcaatgtagatttctgcatatttctctgccctgtgggtggtatgtaccggcaagaaatgagctgtcttggtcaacctatccacaatgaccgagatagaatcatggtgtcgggaggtattgggcaatcccacaatgaagtccatgcaaatatcctcccatttccaagatggtatgggaaggggttgtaaagtgcctgctaccttcaaatgactggccttgactctctggcaggtgttgcattcaaatatatacttagcaatttccctcttcattctggtccaccagtacaaagatctgagatcatgatacatctttttactgccggggtgcatggagaatttggaaaggtgagcttcatccaatatcttctttctgagctcggggcccttgggaacaaccaatcggtctccaaaccatagaatccctttactgtcctgacggaaacatttgtatttatccaccttctgttcgaccatttccttaatgacttgaacacccttgtcaccaatctatgccatgacgatctgctcatgtaaagtgggctccactgaaatataactcaaggcaccaaaggaaacaacttctattttcaacttgcacaactcatcacatagggtggtgattcctgcatccatattcatacaattgcactg

SEQ ID NO: 91812 - DNA, 779 bp, Zea Mays
attccatctcctccacctcgtcgttccctctgcaagaggggcctcaggacgggttgagggggagggatcttccatgccctctcatcccgcttgcggggaaaggcaaaaggttgcctcctctcgctctcaccacagcagctcctcggcagggaactttccctgtcaagaggaagatggagcttttgacgatgaggtcgacccccctccgtccgacgctcccttcgtcactggtctccacatgcatctagagaaagtgtcacgggcccccatgatcctactactgatttctcctcgaagggagtggactccctttagaaaataaggttcaacaatcctactcttctccccagacaccctagtgtctaagacccatggttcaagaatctctttcaagctaatttttacaattctgtcatcatctctaaaaacaccaagttgcccatcatcgggtgatagactgggaaggttgtgaggggatgggggatgatgacatgactgcagctctctgtatctgtgagagaaaggggttcaaacattgttggggtcttcttctccgccaaaggtcctcaagacatgaaccatcggtaaaatgatactgaggatttcctttttctctctaccgaagctccttaagacgaaggtcttgtctggaagcaacgatggcaagcactgaagctgccgctagcttcggcttaaaccaaatagaggatgaaaagaccagatagtccctagtgatttaagtcatgattataagcaaatgttgaaggtcataaatgtaa

SEQ ID NO: 91813 - DNA, 888 bp, Zea Mays
ctgaagtataaatttttggagtacctcttttgctaccccgaaatccttacgagacaacctaaactagagtttggatttatttacccgtcattgtcactggttatagaaagaaacctaaactccggagtagacctgctctaccctagagttttggaacagagttgctctagtgtgaagcagagccacgccccttttatatgtgaacatgaggtagttcaaagaaatattcctttctactgttcatgatagcataaggtgtcgttaggccgtgtttaagtataatctacaatataaatcctctattttacacgttctattgtggagagcttaaagccttttgtggggtccaaccattggttgtttattcaattttattatgtgtacatcaaatatttcctcttatatgtatactccacttataacatatcaaagtattgctgttttgcagttgggtagtgatgcctagaaaaaaaatctcgaatgcgcagagaactacacatctttatattaagaagaaaggtcccagagaccaaactagcaagagttacaaggccccattaaggatgcctaaaacacagaaaagaaacggatccataaacaagttaagtgtctaccaccactaaccgactagcagcacttaggacttaaatacgactgaaagtaagataaggccttttagcctcggccatctcccacatcttgcactctttccttgctagtctaagaaccacaaccaagatgggagccaatttgtcgaagacatatctattcctgtgatttcgaatcatccaggctcccaatgttactagagaattaagaccttgctatagtaacccacatgcagctccactaacttgttcccaccaagccataaaggaggtatgaccc

SEQ ID NO: 91814 - DNA, 858 bp, Zea Mays
gaaaaatttcatcagatcgctggttcgtgacgacaggttactcaccagtcaggaagataaactgcatgaggcccaccatcatttcactgaagctattggtagaaggggtgagagacagagggccgttcggtggggtaacctaggctatagtccatttgacttatcagatttggatttcttgttcaatgaggatgagattaaaaatgtggttatggggatgcactctgaaaaggcgccgggtccagatggttttatcgggatcttctataagagttgttttgagctgattaaagatgatctatcaagtgcaattcatgatttctatcaccatagatgcaaaaacctaaacctcgttaacgaggcaaatatcgcgcttttacaaaaaagggagggtgctgacaggattgacatgtttaggccgatcagtctcatcaatagcttcatgaaaatattgaccaagattttagcaaacagacttgcaccaagaatgaatgagattgtctccactgcccaaaatgcgttcattcagaaacgttcaattcatgataattttctctacgtccaaaaagttattcagaaacttcataggaacaatcagccagccctttttgtcaaacttgacatatcaaaagcttttgattccatcaactgggcatatctgttagaggttctgagagctctaggtttttcccagaaatggaggaactggatcgcaacaatattagggtcttcctcttcaaaaatcatcatcaacggtcaacaaacaaatgcaattaagcacatgcgtggcgttcgtcagggtgacccgctatccccgttcctgtttattctagcaatggaccctctgcagaggatgat

SEQ ID NO: 91815 - DNA, 443 bp, Zea Mays
ctgcctcggttgattcttcttgcccttgcagttcttgcacttcttggcgaaatacccattctcatcgcaaatgaagcacacaatctcatccatgttcatcatcttcttccttttgaattgaatagtctgactgagcttatgattcttctttccagcatgttgcatcaagttggcgctagactacccttcgggtgcctttattgaagtgtcctttgcccaaggcttttcttccacatcaagaccaaccaataaatcctcaatggaaacttgatgtcttttatgttttagagttgcagcaaagttcctccatgatgaaggcaacttagtaatgatgccacccgctacaaacttatcaggcaagacgtgtccatgctgtttgagctccctcacaataagttggaactcatgagcctgttctacaacagaacggtgatcaaccattc

SEQ ID NO: 91816 - DNA, 328 bp, Zea Mays
ccaagacatgatcaagtggttttcatagctttttggtcacacttacctctagtgctccacttgtccaaatgggtttgaattagggtttgggcaatttctcccccttatatgtgcatgataagcaaaggtatgacttctaagatgggttgcacttacttaggatcttgagctgcaactttggtgtacttttcccaacttaagtcacatgtgatgatgggcttacttgtgtagtcttgagtgaaaaactctaagtaacacctggggtgttacaatggtccatatcgttcaagaataagaaacaggccaatataccagggtgctaatttcc

SEQ ID NO: 91817 - DNA, 426 bp, Zea Mays
gttaacatcatattttgaggaaaataggctacacgaggaggctcgggcaagggcaaagtggtaagggcaaagtatggcaatgaaggaaatgaaatatgggtgcacaagtcggtagaatagtctctactcatccagccgaggggagcgctactatctccgtgttctcctaaaccacgtgactggcgccacctcctatgtggatctaaggacagtagatggcgtcacgctaccgtctttttgtgaggcagcagagagaaggggactgcttgagttggacaacacactagatgagtgtctcacttaacttgctcctttctagatgccatcggcgctgcgacggctttttgccacaatattggtgtaatgtgagccaagcaatgtgaccgtactctggcggaaacacctagatgcaatgtcagaggacta

SEQ ID NO: 91818 - DNA, 469 bp, Zea Mays
gcggcgagtccaactcctgcccctcttacccctacccatggtcggttggaaagggaggaagcgaagaagaagaagaagaagaaagcaggtgatcaaagaacaagtgaagagaacagccagggcaagcaggctatttgtagaggctgggggtgaccgtccacttcctaccccgctcgccgaacagtcacaagaattcaataagcaattcaagccgcctgaaaatgagtcaggcaacaggcatcgcttcgtgtaacacagcaccgattggacctaagtcaactactcagtcaaatgattgcacctcttcgtcacatcaagttactactccaagacagcatgataaacactctgcacaccaagacaccccttgggcacacccattggatgtgttgcccagaattttcaaagattttctgaagaagtgatatccacaaaatatacgcaatgaatgtaccatgacaaaagaagg

SEQ ID NO: 91819 - DNA, 572 bp, Zea Mays
ccttactgacttagtggtgcttgactctaaagggatagatgttattctcggtatggattggctcaccaagcaccaaggcaacatagcttctactgagagggtagtaacggttaccaaccaccaaggaataacaatcagatgtaagatctaccctagattgttaaactatatggtgtataacctcctaatagaatcagtagaagatgtgtcaatcgtttaagaattccccgaggcgttcccagatgaactgcctggtatgcctccagaacgagatgtggagttcaccattgatctggtccccggaaccaagccaatagcaaaaagtgcctatcaattagcagccccggagcttgtggaattgaagaagcaacttggagaactccaacaaaaaggatttatcaggcctgccgcttctccttggggagctccagtactctttgttaagaagaaagatggaagcatgatgttatgtgtagattatcgagacctcaatgcagccaccatcaataataagtaccctctgcctcggattgatgatctgtttaatcaactaaagggagccaagtacttct

SEQ ID NO: 91820 - DNA, 544 bp, Zea Mays
cgggcaacccgttacccgccagaaaataccatacgagtatgtggtcatgttcatttcaccaagaacatcaacaacttgatagacataatataatggcaaggaacatagttcaaacttcaaagtccacaaacatgatcgatcatccacaaccataattctcaaactcttaatataattaattattacaacgcaatgttttaggataaaatgaggactgagggattgaggaatcgagggcgagtgggcaactgggctgtggcctgtgggccggtggcatggggatattttgatgggctagtaaattaagcgggtaacgggtaatacccgcgggctaaattttatatccgtaaattacccgtgggtgagaagtgttgcccatatccttacccgtgggcaagatttcttacccatatccgtgcccatcgggtatgaaacccgcggatacccgtgcccacgggcagaattgccatccctaccgaggcctgcgaccaccatgtgtggccgtggttgggatgaaccttccccatcctccatgtgaccaaac

SEQ ID NO: 91821 - DNA, 521 bp, Zea Mays
ggatgggaacgtgaggtggaggattcttccaaaggacgaaggtgaggctacagtggagtagaacaggcggtggtggccagatctagaagaacgacgaatcacccccaaatcgtcagacgatagagagcaaagaggagaggttcaagagagtgtgagaggacgaaggtgaggctacagtggagtagaacaggcggtggcggccagatctagaagaacgaggaatcacccccaaatcgttagacgacagagagcaaagaggagaggttcaggagagcatgagaggacgaaggtgaggctacagtggagtagaaccggcggtggcggccagatctagaagaacgaggaatcgcctccaaatcgtcagacgacagagagcaaagaggagaggttcaagagagcgtgagaacgagcgctgacgaggcgaggcccagaagggagcgacacgttaggattgaaaacgacttaggcgtagctatgcctgagagctaattgaaccgtgtccaagccggtccatgtactac

SEQ ID NO: 91822 - DNA, 612 bp, Zea Mays
tgcagctcgcaaagcgctaaaaacaacacgtaagtgatccatatgttcctctaatgacttgctgtaaatcaagatatcatcaaagtaaaccaccacaaatttaccaataaaggggcgtaaaacctcgttcatcaatctcatgaaagtactaggtgcattagttagcccaaaaggcattactaaccactcatacaagccggatttagttttaaaagcagctttccattcatcgcccaatttcattctaatttggtggtaaccactactcaaatcaaccttagagaaccatttagaaccacttaactcatcaagcatatcacctaatcgaggaataggatgacggtacctaatggtgatgttgttaatggctctacaatctacacacatgcgccaactaccatttttttgggaccaaaatgacaggtacagaacaaggacttaggctctcacgtacatacccatggtccaaaaggtcttggacctgtcgctgaatctccttagtctcttcggggtttgcccgatatgcaacacgattgggcaaacttgctccaggaatcaaatcaatttgatgctcaatcccgcgaatgggaggaagtccaggaggtatctcag

SEQ ID NO: 91823 - DNA, 304 bp, Zea Mays
cgttgacgcggaggtggaacttgatgatgatcatgataggatggacgacatgttgcatgatcttggtagggatgttgaaatgaacgctgaggagccggggcagcttccacgcgatgctcaggaattcttctggctactcgccgcgggagaagagagactgcacgagcacactcaaatgtcagttcttgggactctcacaagactaatggcgataaagtcgaagcacaacatttcaaacagtgcttacaacgacatcgtccaactgatgggtgaggttctcccggagaatcataagttgccaaag

SEQ ID NO: 91824 - DNA, 419 bp, Zea Mays
attcgattcaaagctacacacatcaaatattacaaccttgttacaataaaagtacaatgtccattctactgtctcatacattgtccatttcaaaatgtttttacaataatagctattcctctttaaggactttctctgcaacttcgtgcagtaatttgtcaacaacttcatcaacaacggattctgccatgtttataatgtccagtgcttccttcatttctggatccgctaggggatcgaatggttccggcggtggagataattcagctgaagtaggaaaagttaatcagtccgaagcaacaaaaataaaccccgaagctaaaagacaaaaagcaatacctatacgtttttcacgctctgcaacttcttcaactcgccttgcttctgctggagcatcatgggtatctttttcactttct

SEQ ID NO: 91825 - DNA, 399 bp, Zea Mays
aaaaaaatcgatggaacgaacctagcagtagacaagcactcgagcatgcatggggttaggtcgtctgcctccgtacgtaatctacaggataaacacgcgattctagctggaggagttgacccggcaagtgggctttaatttctgcgtgcttcacaattatgccgcacacgcgtccggtcagtggtctggtcaccatgcatgtactgttccttgtaatgggttgttgctgctgctgcattatgcagtttgtaatcctgaaaggctgaaaccaaccatcaggctacagcacagtcccgtcatgttcactacgaccgatcaatgtacatatataatttgacggggtccgatggctgatcaacagcgtcgcgttgaaaggtccgtctgccatcgtcgctcggg

SEQ ID NO: 91826 - DNA, 360 bp, Zea Mays
ataattttagttgtaacttacaagttttgtcttttccactcagatggttggacattagtcatggagattgtcccaggattttccctctatcggggcctatatgaacttggtcagtatgcattctcgggaagcagtataggaactactggtatgacctggagaagtctgaaagatcccctcaatggaatgcgtgatgttatgatcgtaatgagtgtagaatgggcagtgctgctcatattagcattctatttagatcaaacctctttgctaggcggtggtgtcaggaaaaatccttttttctgcttcagatgtttacagaagaaatgtgcaacatcattgcatgaacctagctttgtccaa

SEQ ID NO: 91827 - DNA, 550 bp, Zea Mays
ctgaaactttatcttgattacttacacacactcattattatttgttggtttcttctccgtgtggtcgtccataagctagctcatctgaaattttatctttaatttgcaagcaatctagtaacgaactgctgcagcagaaatcacacttctgcgcgcactcaactcatgcaagaggaacaagtctcagttaccagctggcagcaacaccatatacgtttcagccttttagtgcagccctagcagcaagaaatgcactgtgcaaggaacgttgttgaattttgtcaatttatgcagaggcacacacaaagtttctccaacaacaaaaaaaatgcactcttcatatactacttgcaacaacaccttaatttggtatcttatccaagtatatgtgcacaataccctatattatattagtataattctgtcttgcaaaggatctatatatatgtgtgtgttattttaaaaattcattttaactcttgttttttatgtctacaatcaaatagacaataataaatctagacacatatataaaatacatatattaacg

SEQ ID NO: 91828 - DNA, 284 bp, Zea Mays
gtttcttcttccaaatagcgatctagctcattcttgcttttcacaatggttgttgtctttttacttgcagcaagtgatttgaatattgacaaaacagcagttgcactaattgtagttgtaaaagaagcgccactagatgatgtacccacacactcttgatcagattgcaataggtactgatttatcaaattagttagcacttcataactctttgaaacatatatctcagcttcttcctctcccaacaaagcaatataacaagcatgcaacattgtcatcttaag

SEQ ID NO: 91829 - DNA, 1067 bp, Zea Mays
ggcaaaggaggaagaaaaagggcatctcaaaagaaagttccaggttctccgggcacagcagcaggaccggcaccagaagactcgatcatttgggtttccacccaaggggccaaacttcagtagaccagctggacccgccccatcacggttcagccagtagagtcagagctctttccattccccctcagtggcaagcaatcaacccccggcgaatgcatcttggcactacggtgatcccagtcacttcaagaacaactgtccacagctgaagccaccaggacccgcctactccaactcgttgaatggccccaagaatacctcggcacccgccccccaggcgccctcctccgttagccagcagaacaaggccccgtaccaagggagggcacgagtgaatcacgtcgatgcccaggaggctcagcaagctccgggagtagtgctcggtgagttccttgttgaatttactcccgctaccgtacttttcgattctggagcatcccactctttcatagccactagttttgtggaaaagtatggcattccctctactcctctagagattcccttggtcacccgaaccccagggtccgaccttctatgccagctcaagtgctcccaagtcagaatccttttaagtggggtagtattcctggcagacttaaccgtcttgccatccaaaggaattgatgtgatcctagggatggattggctaactaaacacaaaggcatcatcagttgcgcagacaagacagtcctcctcaccgaccagcagggaaagtcagtctcttgtcaggcacagccacccgccagtgacccaatgatgttcaatctagcaacagaaagtatatcagtggtagaagaattcatggatgtgtttccagaagaattaccaggaatgccaccagaaagagaagtggagttctacatagatctgatccctggaacggcacccatcacgaagagaccataccggatggctcccaccgagttagcagaactgaagcttcaaaccacagatcttcagcaaaagggatacattcgtcccagctcatcaccttggggagcac

SEQ ID NO: 91830 - DNA, 363 bp, Zea Mays
cgttgctggagacagcctaagccattgctcctcaaatctacagccgccagggagcatcttcctcctccgctctcaagctagccagcgaccacggcggcaccgacctcctacaacggcgagcatcaacggtatgatcatccaggtactcgggtgcaccgaactacgagtaacgatagcaaaatgatgcggagtggtcagagcagagtgtgagaaggttcttacagacgatgcaagcacaaaaaggctggccatggcggggagcggctctataacggagctccaactcgggcgagcaatcatcgttgctccaacgaccaatctcccccgtgaaagtcacctagagggggatgaatagggcgaatc

SEQ ID NO: 91831 - DNA, 501 bp, Zea Mays
tcaagtaatcaattaggttcgtgatacaagttaggtaatggagttagtttgttttagaataattattgaaatgctctgttcatatgataaacatgtatgtgttcatgatttggaaagtaagtgcatggtggttgtgagttagagattggtggtttacgattcgtacgatttggtcgacgtacgaatatacgcatgaatatgtatgtttataaaaatgttgtagtgtatgttgtgtctcagattgtgataataataggcaagccaacgtgtatgttgtatagcgggctatgtcgttgctctaattagccgacttgttagatggcttgggttaagctcgtaatcgcgatgatttgcttgttgtggtctaaatgcgtatggttatgatcactgatgaaaagtagtagtgttcatgtgatatctaagttaaaatgcaaattactgtgtgaagagcgcatcgatatacatatatgtaccggatatgattattgtggtggatgtgtt

SEQ ID NO: 91832 - DNA, 273 bp, Zea Mays
gacgatatgatcccggccgagtgacttctgctactatgaatggtccttcccataagggtgacaacttgtgccgtccctcccccgttagaattcggcgaaggacgagatctcccactcaaaaggatcgtcgtcgtacggccttgtcgtgatagcgtctcagagtctgctggtatcatgctgattgaattactgcgttcagccgttcttcttcgagtacatcaatgtcctccagcctagtagcttcggcttctgctatgctttcgaagaccaacc

SEQ ID NO: 91833 - DNA, 518 bp, Zea Mays
gtcgccgaagccgcctcttcttcttcttcttttcctcaacaggcgcagtcgggcggctaacttggcgaggacgttttgggcgagcacccttaggttttcgggtctccaatgctttgccaagctcttgtccagtcatgatagccatcggttcagcatgggtcgagttagaagattctccagctaacatgttaagtacaacatctatctctgcatcatctggactagccggcatctcaaagtgaatttgtttctcatcattgggaagataacgaaggggggcaaccagagccttaatgtcctcgggagagggtcgcactctaagacccaaatcaccatcactagtaggagggttggacacgaatcggaaaacctatgaggtggaagattctaagcagaataggcaacaggagcaccaacatttgatactctgcccctcagaatcatgtctagtcagctcgctagatcctcagtaggaattcttttgttgaggacccgagtagagtcattaataccactgt

SEQ ID NO: 91834 - DNA, 586 bp, Zea Mays
gtaacagccaaaattctcatgaagcccatcttctctggccttcgtctgataatgtagctcatgcactcggcagaaagcttcagcatttgggtccattccctggcttcgaagggcccaaatgaagatgttgagcctaacgatagcgttaggagtcagctgatgaagataaatttcataattatccaaaacttctccaatcatctcatgaagcagaaaccgcaattcagctttgaaaaatcttttgaaaactactacttcgtcattttttggctctagggtggtttcttcgctggcaaaacgaagaagcttcttctctgtctccctgaagtaaccgagcttcatcatcatgggcacatcggcctcagagacagtagatttttcaaaatctaagtcgctgggctttgctgggattagagtgttatagtcttccatttcatcagcattttcttcctcaatatcagcttcttcagcctcagcagtacgtgcatcttcgtcaatagccccctctgtcacaaccaatcctgattgcttcataacttcggaaatcggggctgtttctgtggcttcggcctcctctccgtcacgg

SEQ ID NO: 91835 - DNA, 404 bp, Zea Mays
atgcaccaagaatctaaagagaaacttttcaaaagttggtgcattctctttagagcaaaaaatcatccgtggtgaccccgctggagttatccaatggattaaaggcgaagccgaagctttcgaggagattcttagtgacagaggggatttttgtgctttcgccggtgctcgtggggccgtgtccattttggagaaggtttgctgtgatcatgccaaggttgtagctcagccagattttgccttctcagctgatgatattagaaacccttcagtcgaagctactaccttgggtgggaagttttatttcgaagtatggctgaagggcggtcgagaaatttttgataaagccattagaaagaatgagaaagagtctcatgacgccttagaagaggctaaaagagtcg

SEQ ID NO: 91836 - DNA, 697 bp, Zea Mays
ttggacacaaggaacatacccatcattaccggctctccttccggtgtagtggccacttgcgtgtaataaattcgcctagttttcttcacatttttgcccgctgaactatttgccatgttccctttgccttgatttgagctccctgagttctgctgattgttgaattcattctacctcggatatgggcagtctttgataaaatgaccagacttcccacagttgaagcaaccagttgaggaactagggagggcggggaaacgagcaccaggggcactcggctgatttgtagaagtgggggcagtagcagggtgaatcaaaacaggttgtttaaacggataggagggtggacgaggcgaagaacgattttgattgaaaggtcagatcaccaaccttgttcgcttctcaggtccgtgattggacatgtcacctccaaatcccttggattttccttggcctgcattattggcttctactgccagcgccgtgctgatagccctgctgtatgtaagatctaggcaggtggccattttcctttggagccggttgttgagtcctctcataaagcaattcttcttttttaggtcagtatttacttggtcaatcgcatattgggataaatgattaaacttgttcagatactgcatcacagtatcccctccttgtttgagtcgaatgaattcctcttgtttcatgtgaa

SEQ ID NO: 91837 - DNA, 371 bp, Zea Mays
cccgaagctgtaatgaggatggggatttttgtctaggctgtaagaagtcaagggctggagccgagcgcgaagtgcttctgcagcatgcacgagttcctgtatgagacgaaggccactggcaaagaatagtaccacaacaacttcggttgttatggatttattgctcgccccaatgcaagccacccggtaccaacattccgaaaaagatggcctgggtcctggatgggggagtggttttatgttaaaaatgatttaaaagcaagggaagacatcaaagaaatcatctagcgtcccatttggtctcgcttcggtctccgaaggccgaaggtggaaattgatagcaatgtcgaagcatgtcagagagcttttag

SEQ ID NO: 91838 - DNA, 295 bp, Zea Mays
cagctgctactgctgcttgtcaggctgtttggctagctcggctgctggctgaaatcaatggttcatctgaaaagagttgaatgcagtgactactgcatcatccattgtaaatatttcattctgaaaatagttcgatcaaatatgcatatttctgctgccttggtgcatcactaaaacttagaagtgtttgattcatcaggtaagaaaggagaggactacatgtgaacagaatcacaacacttcacaagaaagcaagcaaaacatccccatttcatttggcaaggtacatacatgg

SEQ ID NO: 91839 - DNA, 343 bp, Zea Mays
aagagctggcggaaggttgtatggaacagcaaagacaagccagcatgagtaggacggtgcagttagattaaaaggcgagaaaccatctattgccaaaccaaagcggacattccgcacttcatcaacaaagctggaatcaaaggcatctagtgccttccatgcatctgtatcagctgggtacgccatgacatctagattctcacgtacgccttctttgtgccacctatgtgtcgtgctgtattcttggagatgaacaaacgtttcaagcgaggtataagaggcatgtaatgaagctgcttacatgctacctcggtcgtcatgatcaaaccatcgtcgttttcaa

SEQ ID NO: 91840 - DNA, 471 bp, Zea Mays
cgcacacagccggacggtcaacgtatctaaccggatggtctagcgtagagtttttttgaggaagattgttacccaaatcctcatatgtcccggctaaactttctgtcagatcctaccgcaccacagcaccataatatagcattccaaacacatgggagtgagtattttccgtctcatagaaggcaagaaagagacggtcgttcctatgagccacatagggcaaatattaatacgccacaaaacccaaaccaatgggggaagataacatgccaatatccaaacaacctcacccatatcggactaaagagccggtggtctcccacagactgctatcgatatagtaagggaagaaatagccagagcgttacgagataagctcggagttagcatggttcctaggggagtcttattggagaccttatgaaagctgatttgatcaccacccatacgcacagggaaccaggatacccg

SEQ ID NO: 91841 - DNA, 476 bp, Zea Mays
gttcgactatggctacaacaccatcataggaatccatgggctaaccaaattcatggccatcccccactacttgtacatggtgctcaagatgcctggaccctaggacatcatcactgtccgggtcgacttccaaggagcagcagagtgctactgaggggccatctaaacgccccaaacagctggcccattggtagcaccatagcaaccggtggcgaacacgacgcatcgatgggggatgacctcatgatcccgatgacagaatcaaccccaaccactaccatacgaccggtcgaagaaaccaagaaagtcaaccttggcttcgctaacgaacgcaagacggtggtcatcaactccagccttactaccaaataggaagacacgctcgtcctcttcctgtaggacaaccgatacatgttcgcatggaaaccttcagacatgccctgggtccctagggagttggcagagcataagctaaa

SEQ ID NO: 91842 - DNA, 845 bp, Zea Mays
agatatggcagcgtcggaggggttctcggcaccagggagagcgcgacgtcggcttgaaagagaagagagcaagcaaccttgaagggagcagggcgggcggctcgactccgacgaactgttactgctgcttcaagtgtcggtgaagaagagaagggaagtcgccgagcactgatggacaaggttaaatctgatggaactgatggctgatcttaaatgctccaccgatgggaaccttcccaacgaggaagagataggggctcaggccgagcgctacagttgctgtactaggaaggcacaacggccagatgtggtgagctagtgttccaattgcacgcccaagataaggagtgccatgcatgctgtagcgagaaagagcaagggacgtatgagtgaggatccaaagcaacgtacgtgccgggtgccagcagctgattggactgggtctgggacatgcagcttcagaacacaaactccacgcgtgatcaagggcacagcacaacagtgaacgtcggtggtgtccggacaggaaacaagcagacatgatgttcatcgatagtggatatgctttagacctcacaaggctcagatatttgaagccttaaatctatcctttgctaccaccgctgccaatacctacccatatctcaaactggtaggaaagaactggaatacaacaacaaattaggatcttcatccaaactctaaacttgctgaatccaacacctcattacctgactgcactctcatctttccccccttttgatctcacaatttccaatggcaacaggtcaaccttagttaacaaaatttgttccttatacatagctctacaaattttctgcagc

SEQ ID NO: 91843 - DNA, 385 bp, Zea Mays
tgagaatggaaaaattgtcgctctgaagaaagttcggtttgccaatatggaccagagagtgtccgatttatggcaagggaaatccacatcttacgaaggcttgatcatccaaatgttgtcaaacttgaagattcggtgatgtcacgcatgtcaagaagcttgtatcttgtatttgaatacatggagcacgaccttgcatgacttgcagctacacctggctttaaaattctcagaacctcaggtttaccctcttattttttcctttggcattccatttgtattgaggtttaagttctcacttcaaaagatggtcatttcaggtcaagtgttacatgcaacagctactttctggacttgatcattgtcataaccgtggtgttttgca

SEQ ID NO: 91844 - DNA, 543 bp, Zea Mays
taatggaacctttccagaagaaataaagtctgtgttaaacaccaaagtttgataatccctataaagggataaagacccatatagacccgaaaaggaataagatgaggtaccaaaggacttgaagttcaccgaataagcacatgtgcattccacgatctttactcatgatattttccactatatgtggaattacggtatcctctaaagccccgatggcagaaacctataaggtttaggtgttattggcaaaatatccccattgtgccaaaatgacagactataacgatatatctgatcgatgaaaaatccctaatggattacgatctttgatggacttttgttacactatcatagatattgcaatggatgaacgcctggagcgatgtgtcatatttataatatgtactatttcaactatattatcccctaaagtcctatagaaggacatgtcacttgctttgcacaactatgtataattgtggtgtaagatagaaaattatagcaccccaacctcatccattctcgttatttcagatgaacaat

SEQ ID NO: 91845 - DNA, 1080 bp, Zea Mays
tggggttaaaccaagacaacatgcaacttgcggtgaatgagtttatccctcaatagtaatttatcaacgaatcagaataaatggcccccgaagatcctatagatttggaaggggattttcacaatcaaacaaatgatcagtcacatgatttaattttcttcgatcaatcgggatgaaccgcttgttaccttagagccattgggcaagatgtcacctttaccatagaagacctcatggctagaatttatgggcaatcttcaagctcctcaaaagattttaagattagctcaaccccataacttgctcagttattcgcatggtgggaaatgtgaagattaggctaacaagtgacaactacctttaaatttgctgtctaatatggtatggttgaacttctaaaagtgcttatctatcctcgctcctcggcttgatgatttaggcctagaaacggctggcttggcaattgtacctttcaaacctgcatgggctactcaacttctaaccctttaggcctctattttggtttcacctagatctgccccctcattctaacatggatgtctgtactcctgtacttattgagcaggagggacatcaggttgggggcttcgatgcctcctaggggcccctggtggcctctagggtggtgtatgatagcatggtgaacctgggtgcatggcttaaaattcctaggctaacatctatttctaaccctgcttccactagttgtttcttaggtttgtgggagtccaagactcaacttgattatgaagacccaacttgttccactggcagatagacccaagaagaagagtagaatgatttatgaacatgtcaacctagaggcttcgtgtcagggatatggtcctcggttcatggggcccatcagatggcaagcacactggggaaatggccctgacatctgcggcccatcggttagctagaggagataggtaatgtctaccctaaaagacccccctcggacgaaccccgtggcactgagcttggtgtcgggtgtagcggaccctaacagggggccgagcgtgtcgaagggaaaccactcgagtggatcccgactcg

SEQ ID NO: 91846 - DNA, 374 bp, Zea Mays
attgaagctgaccccaatgggtgtaaccttgttgaagctgaccccaatgggtgtgatcgtgcaccatctattgtccgtatttttgacgaggacgaagaagaggaagaaaaagttccgctaattcgtaagaatagccggcgttacacaggtagtaggggggatagtgatattccttctccagctctatctgctcttgttagccttcaagaattatccataacagattttgaacaggcccttgaggatgtcattcctaaagatatgttgttggaaccaactactggtgatatgatggatgtttgctctgacattccagacgtgggattagaggtatcccggggagtatctcgcgcatcgtcgaccttgtaaggcag

SEQ ID NO: 91847 - DNA, 378 bp, Zea Mays
ggcgcgcggttacgtgtcctatggcatggcaaggccttaggtaaaagaaggacggcgtatagtaatcgactgcgacgtggtaagatgaccgacggcgtggcataacagcaaagaacggcggcacgccggtgatggccgtgcggccacgtcgccggtaaggggagaagtgaccgagtggccacagtgctccaagtttatccacggtgagatcttttcaaggtgagcaacatccacacggccgcggcaccaatcccggcaaagaggtcgccggcggtgagatcttttctacggcggtcgatctgatccggttagggcactgtaccatcaggagtttcagtcagacgaacctgacagcgcatattgaagcttcattttctc

SEQ ID NO: 91848 - DNA, 726 bp, Zea Mays
ggcggctgcaaaaatcccaagggaaaaggggggcggctaggtttaggggagactaatgggccggatcaaggttctaggcccaactcgcccatgacagctcccgaccccgtcgcaaaccactaaccaaagaaattctactgtcttacaggtgaatgttttccaccaattccaaattcccaaagcgcatcacccgaatgaggaaaaagaacaaaaagaataacctccacttctcctctttgcaaacccggtatcacactctacccccttaaaaagaattcgacctcgaattctgacgcttctatcggaacgacaaaaggaaaaaaattaatgaatcaacaacacttacccacaacaaaaagttccggatatttctgccgcagctcctcaagttcccacgtagcctcacgctcagactgattagtccataagaccttgacatacttaattgatctcttcctcaaaacacgctccgaggattccaagatacgcaccggacgatactcccaggtcagatcctactgcaccgcaattggttccatctcaaactgatggtccggatcctgcaagaacttcctcagcatagagacatgaaaaactgggtgtacccctgccatggaatccggcaattgcaagcgataagccaagctgcccacccgggccaagatagtgaacggtccaatatatctcgggctaagctttccggagacactgaactgaacaactcct

SEQ ID NO: 91849 - DNA, 635 bp, Zea Mays
gaatgagtgttattgaagagctaaaattgtatgtctacttttgttacctaactcctgtaactaccgagcattgtactgttcttttgttttgtttgtttttagttttcaaaacacttacaaggaagtgaatcgactgtgccctttgagacatgcctggccgacagccaaggcgtctagaattgtggtgaatcttggcggtccgtgttatagttttttatcctttttccgatttcacaaattaaaccgaaaacgtatttaaagtcgctagttaccatgcccaccggagaccaagttactcctgcatgattagcgctacgaagacacgaggtggcgagccctgcatcattgcacctctgggtccaccacgtgtcgcatgggactggctcggctgttgtttgcgtctctatttcttgcctgccgtagaaatccgatcccatgtatcctcagagatgttcttactgcttggccaaatcctacggatgacattgtattggagtgcaaatcgacggtacccagaggtcatggtgacgtggatggctttcctagacgcaaatgtgcgctgatttcgttttaacagatttcttttcacctactctataattaaggaccgagagcgaggcgcttgaaacatagag

SEQ ID NO: 91850 - DNA, 353 bp, Zea Mays
gttatatcttatcacacatttcattttgtaattggcaatgatgccacgtaaaaacaccaaatttcgacccacccacccatccaatgtaaaggtctgtttctgcagtgagtttggactaacctgaattgctgatgaccacctgtgcacagctggatcctttttcctttttaggtaaagatctgcctacgctgtcagtttggccttccctggattgccgatggcactcagcaaacagctggatcctcttttctgatggccatcaacaaagatctggatccttttttctcccttccttgcagtagatataaattgatccttacgtaacattcctgtgatgtagtgataaatgacat

SEQ ID NO: 91851 - DNA, 373 bp, Zea Mays
tcggttcctgctactgaagaagtgcctgcgactggatttactgatgctgaccccaatgggtgtactcaatccgctgctgatcccaatgtgggtgatccatctgttgctgaacccaatgggtgtgctgcttgtgttgccaatgtggatgacgaggaggaagaagatgaaattcctttgactcggaaaaacagtcggcagttcatcgccagcggtgaaagtagtggagttccttcttctgccttgtctgccctcattggtctgcaggaactgtccctggccaactttgatcagactcttgaggatatggtcccagaagatttgttatcggagccagtggatgatggtgcaatggaggtttgcgctgacgtgcctg

SEQ ID NO: 91852 - DNA, 534 bp, Zea Mays
ggacgagatctcccactgcgaaggatcgatgccgtatggccttatcatgatagcgccttagagtttgctgataccgtgctaattaaatcaccgtattcagtcgctcttcttcgagtacatcaacatcctccagcctagtagcttcagcttctgctatgttttcaaagattaacctcggtgccccaaacttgagatcagcaggtagcaccgccttcgaaccgtaaaccataaagaagggagtatttccatgcagagctcggctaggatgagttctcaggctccaaaccacatacggcagctctctgatccattttcctgcgaacttctcattcttgtcgaagactttctttctgagtgcttctaatatcatcctgttgactctttctacttgcccgttggctcttgggtgcgccaccgaggcatatttgacctgaatgctcttttgctcgcagaaatcgaagaactctgaactggtgaagttggatcccaggtcagttatgatgctattcggtatcccgaacctaaatattatgt

SEQ ID NO: 91853 - DNA, 386 bp, Zea Mays
gagaaggcaagggtctcgctggaaagcgacttgtaatattttttggtcttgtaaggtacttttgggaagtattaacataacagtgacagaacttatctgtatgctatttgcctttgctgtgtgtgtttgttaccaacttctccttggtacctggcccccctagtatgtaggctcgacatgtcgaggctggatgccagtatacttaagaaaaattcgtgacctgacccccaggaggtaatctcgactgggacccagacctacacacagccttggctaggaagctttagtagtgcgcccataagacccccactaactagtatcttttatcctttgatacacgcaataggacctgcaggatttagaccaggaagccaatccgtgtgtcc

SEQ ID NO: 91854 - DNA, 639 bp, Zea Mays
attaaaatatatttagcctaatagatccatctcatattaaaagattctatcttatccttatagattcatcttgtcctaataagcatatttatcccactctagagtaacaaccatgatctagtccaaaataaattaattagatcttatataagtctaatctagtcataccaagttaatctataacccatctaatctgatcatatttaatctaaggtgagttacttaaacatgttagttgataatggtaaagtagattagaccctactcctataaacatgtcttaacctaaattggcgtcttaggcctactcgaccaatatacaaacaacctaacctatatattcttgttaggttgtctaagctatctatttcacaacaaaatattctaacctacccacctaatctaaatgttcctaaagatctgtacctagccaacctaacaaagcaactagaccaggtttggccatagcacactcgtcctatgccatctacctattagctatatgttcttatctacaagttatcttaactatatgtccctagctcggatgatgatgttaagaccagagatcgaaggtgatcgacctcatcaagacaaggaagaacagaagccagaaaagatcttcaaaagtcgggatcc

SEQ ID NO: 91855 - DNA, 903 bp, Zea Mays
caagaacctccactacaagttgcaaggagcttgtgagtattccttgtaggttttatcgttgggtgtcgactccggggctattgcatcgtatgcactctgccccctcctatgctttggccttgattttgagacgccatacttggaccttctttcaatgctgctaatctatggtgtgcatgtttttcttagcttattatattccgtgtttgcaaaatctcacctagctctgttgcaagttgctttggctcttggttttagtggagctatggttgtggcaaacgatgaggcctttgccctagttgtgtacataactactattcacactcttatgctcctcaccattcaattgaagtaaagaatgtacataaccactatccactctcttatgcccactgcctctctgttgaagtaaagaatgcctttcttagtgatgagaattcataagggtgctctttatgcaacaacaataactctttccataggatggtggactacctatcaaaggattttagtgcctcattggcattgtatgttcttgtatgattgatctattgcatacgaaggatcctcatgattgtcatgttggtgaaagttgcttttcgaagaatctagggcaccctttctttcaatatatggaccacttctttattggtcatgattggatgcaatgacttggatattgtctctaccttagagacaacttagtgttgtagcgctctaaactcaaatgacttgttgacccagttgtggaggtgtcctaccacgtttcccaaagcatcgttgaagcaggtgtcatagcttcttcatgaagtcaaccatcctctcttgaaggttactatcatcgtctacaatatcattgtgctatttacatgtttgccaacctaaacacaatttcatcgaaat

SEQ ID NO: 91856 - DNA, 508 bp, Zea Mays
gtctttccggtatgcaaaattgtagcacctgaagtttttatgtagcccattggatctagccttcgtttggtagtgcagctcatgcactcggcagaatccttcggcattcgcactattaccctggcttcggagggcccatatgtagacgatgagcctaacaatggcattcggtgtcagctaatgaagatatatttcaaaccttttcaaaacttctcctatcatgtcatacagggtaaatcgtagtcctgccctgaagaaactcctaaacacgacaacatcttctttcggctccggaatcacttctttgcctgcaaagcgaataagtttaccttcatcttcccccaagtagcccaactttttcatcacgtctaagtccttttctattacagttgattttccaaactcaatatgattaagttttgaagggctcataatgttgttgtcctcttcattctcatcatcactcccgtcttctgccacagtctgctcagcttcggcagtagcttct

SEQ ID NO: 91857 - DNA, 521 bp, Zea Mays
ggcttctgtctccaacatggtacgttacagataaggcgcttatggctctggcggcgacaaacactcaattagttgagacgttcatttccaccttggaagtcgacgatatgataatcaagaagcggggaagtggttaggctaagctaagtcgctgattgctagctgagggactgacgcatgcatgacgtctcggattctgaactgtgataccaggaccaggagctatagcgctgctgatgtttgagtaacacagtagtactacgacagtatatattactcccaaccgattaatcacacaggacagttagagggcggaggagctagcttagctacgctatcacatcaaatgatcacgatcaccattaattggacgttttctgttggaggttgacgctgtaacctgaaccttagtatatgtacgtacgtatagccaccactactatagccagtcattgtttcccacatgacttctctctatacgtgtgccatcaccattatgttgcacacaccgttttgttaac

SEQ ID NO: 91858 - DNA, 278 bp, Zea Mays
ggatccttagacctgagatagtcattgtttctcactatttatagtgatgcactttagggttgttaaacactactctgtaactgggtagttataaaagtagttttcggttgtaccatgaaatacaagataggatgtgaacagataagatggaatttgttcctcctacataacaagagagatatctttggaccctcgatattttcatattaaaaaagtgcatgatcataccaatgtgattaaatagttaatcttgatatgactaaagagttagtcacaag

SEQ ID NO: 91859 - DNA, 301 bp, Zea Mays
cacatcgccatgcgcgccgtggggagatgggaaggctccagagtgtcgcaggcgaagcttcgcttcagcacgtcgcaggaggactctccggctagcctcacccgaacgcgcctcgaaggtgcttgggcaacatggcctcggctcctcattggcgatccccaatctctcacaatacgctggcagaaaacccaatccccctggtggtcgtgcttaatggtgatggtgtatggaagccacgagccacccaagcatatatatacttagcacagggaatcatatcccgctcggatcggtgattagg

SEQ ID NO: 91860 - DNA, 1119 bp, Zea Mays
caagaagccggagtacgtctggaaagaatatcacgagaatggaactgagaagtgctctatggaagtctacctaggagaaagccgaaactacccgaaccacccctctttccaagtcaccttcaccggacactgcttcccagacacttgccaagatgttgcccgaaaagccctccgccagctataccaaaactacagcagggaagtctttaagaccccccttcgttactttccacctagcaacaaaaatacccctacctagaggaaaagacttcaggccctgtcaggaagagatcctactgaagatgaccccaccatagtctacatggccggatatctccacacactcgataaccactatgacgacctttcctcccactgcacccacctaaactcctgggtggaaagcttagagcaacaggtcaaggaacttaaaaaggagaaggtgtccctctaagaaaatctcgaaatagcagaaggtgaagaggccaacactcgtgaagcctaccgaaccctgaagatagattacgataagaagttaaagaagctcacccccactaagaagatccggaagaggaccaagagcccaggatgccagactgaacagaaaaaggaagccccaccagcactacctccctccaggatagaaaacttgtcagacgttgaggatatgtccctagctagccttgacgaccttctcaaggaatttggggacactttagaaagggagttcggaagcaccttagagagcgctcgcgtgtagtgtgacttgtggtaactgtatgcttgtaatgaacttgtgtgatgaataaaataacatggttgaagaaaaaaattggcatgtgcatagtagtaattctctccccctggcagatggcttcggataaaaccacacctaccgcctccgggattggagcaaggtttcccctaggagctaaaggagaagccggtggagaagggagtgagacccacctccccgcacctccggaggtgccattagatttagcccaagttctggccaaccaaacccgattcattgaagtcctcaccataagtcttgagaaccagcgcccgaatggcggaaggcctcaggataggatgggagattttctaagactcaag

SEQ ID NO: 91861 - DNA, 357 bp, Zea Mays
ggctataaaggggaatttgtgtaaaattgaagcctgggatatcggattggcgtgagattttgcgaatatgttactagaggtatcatgaaggtgcctgaaaaatttgggatcgattggagcatttttggctggtttgggcatttcaccgagcacgtggcgtgcggtggattagggtttaggagaaatggccatttgaggttgagaaaccctccctaaggagctaggaacctgcaggggtgttcaaatgatacacaaggacacacacaagtgcttggatcacaggtttgcataaggatttgatatgagctcaagaggtggaaggaaagtggagaaagctcttcactgggcattggaaac

SEQ ID NO: 91862 - DNA, 317 bp, Zea Mays
acgatgtcacacaacacaatcaaacaaaatatagagtgaaaacaaaattgtttacgaaggttgcacataatgtgacttcaggaccttgaacaacccaccataatccacgcgagtacaagctctagcgtatctggcgtcaacgcgtgtgcggctatcagggctacgatagtatagtaagcctccgtaataagcgcaacaggcacaattatggctcggtaattggggtacacgataaatccacgcaacatgcgcaacagacacaattgtggctcgcgacagacagacattgcctacagggcatgcaaaaaatacgcggc

SEQ ID NO: 91863 - DNA, 550 bp, Zea Mays
gttagatctataaaatccccaagactcaggccacctagagatggatcgtgggttgatttctgtttctctcggggtttctttagaaatttatcccggcgaagcggtatcaggtgatcgtagtgtttcgatctaaattggacggctccgattacatccaagtttttatgaatcgatataccacctgtaatcgtcggatcatgatccgaggcccctagaagcggccacgtccacaccagatcccaaatgatcatctacggatctacggtcatgatctgttcacgcgattggtcactctatgagttgatctggaccgcacatcccaaaaataaccgcctaacgtgcgctactctctgttcaccactacgcgagctaaacgcggtgccaccgcccgtgtcatgcgaagagcaccgctggaatcaagcgattaagcgcccccggtcctagccttaagttaaacgggtgctacacgaagggggaagcaggtcgaacacgatgggccaacataccagtggaaatagtcaccaacgcgggttattcacatgaagcggtg

SEQ ID NO: 91864 - DNA, 679 bp, Zea Mays
ccgggacaaagggctataggttgtatgatcctatagccaagaagctccacatatattgagatgtaatatttgaatataattgagcttggaggtggaatgaagagatcccagatgaaccttctacccgtgtgtttgaagtggagttttacactattgtccgatagggaacaacaactgatagtggaaattcatgtgtagtatctgaaggttcagctaaatcatttgctctcaatccatgatcaccttcccttggttagtgtcaattggcaataattcaggtataacactaacacaatcaacacctctaggaagccatgttgtataggcagtcgagtttgcaacaccaccaactagagaatcagtgaattctaatggggtgtcactgagatttagaacattggaaaacattcatgacaccactgaataggtaacaaattctaagtatagtgagttgtgttatctagcagcaaaagaacctaatggtgtggaggattccttgagagaacagttttggagggatccaatgttagatgaaatgaagtcaattccgtccaactaaacctgggagctagcagtgctacaggcctcaagtgggtctttaaggtgaagaaagataatgaaacacaaggtcaagtagtaacaaaaggctatgcttagtgtgagtgggtggactttaaag

SEQ ID NO: 91865 - DNA, 493 bp, Zea Mays
gctcttttgaaaaacaaacagggccgaaggggtatgcactattctggatcgtcccgaactcgatctagggctaggattaaatttccataatactgaatcggtatgtgctgtcgaccctctgattggaattcaacgcccatgattttaaatgccgcgatgcaattccaaccacccgatctcgatccaacggcatagccaacatctaacccaatcggtaccatcgttacaatccacacggttcaatctgccatcaacggccaaaggatccatcttctaccccgatgcagacccgagcggcgcgtcttcctcacaacacctcctcccctacccatcggccatcggtcaggcgcttaagtcccccatggcggcagccatggccggtgtttcggacccagcacaacgacgttccaaccggaccaagaacctaagctacgtgacgcggagaacccagcgaacaaacaagagaggacgcacctgcgaccggaacaatgac

SEQ ID NO: 91866 - DNA, 367 bp, Zea Mays
ctggacgacgctacagtggccccttgctggatagaaggtctgccgtgagttcttgtaaaactgcttgtcaatctgtgcagtgagttcatatgttcctgaatctttgtctgttacatatacatgcttctttttcctttcatacatgtacatggtctccgtcgaactagcagcattggggttacaacccagccatcgtcttttgctgtcctgatggtagggacaagaaaccggaagtagttttgttttcttccctttatgacatttatatatgtattaacagaaagctattgtcctgcagcactaccattcatgagcatggccaccacaccggaggaattcttcatcaaggatctcatggagcagccac

SEQ ID NO: 91867 - DNA, 487 bp, Zea Mays
gaaaatggaaaccagagagcaatagtattttttatagcataatcaagtgataaagttcagaagaaaaatatatgaaaccatagtccagtactgatctggaatttatgattttatttaggtattagaatttaataaaggcaatgattaaaaatatgaggacacatgcaatagtggtaagaaaaatgtagtagacccctgacaactaatgcaccactgtaaaaatggtaaccaccccagaatatcacactaagtgggttaaacaaataaaaattggattttgccaatacttcaaataaatcaaaaaagactaaaagtgggaaacagtgagcaaccctatttttccctaagtactcatgatgtgtactataagggaaaaatacaaaactaaggtcaaaatataatggaatacacccccaccctctgcctcatgaaaaagatcatatattctaagaaatcatacaacccatcccctataagtaaaattaac

SEQ ID NO: 91868 - DNA, 982 bp, Zea Mays
tgcccaaagaaggtcactcagcagtcgccagctttcaacacctcagcaagacaaggagcgccacagtaagcaccaggaggtcgtggtcaggcctacaattgtggaaatgtgaaccacttagaagctgaagcaatccaggatgctcaggacgtggaagtaggtatgtttctagtcgagtcccatccagcaaaagtattgtttgataatggagccacacattcttttgtttctacatcatgggtataagcacataacatcttcatagaaccaatgattccacctttaagagttaattcagttgggggaaaagttcaatccgatgagatgtgtccgaatctaaggattgaaataagggggatagacttccccgctaacctagtagtaatgggtactcaagggttagatgtcatcctagggatggattggttgtaccgaaatcaagccactgtcagttgtgacaagaggacagtcaagttagtgtccccatctggaaaggaagtagtaactgagttgtacatgcctgaactagaaggagcctatcactatttgtctgtagatagcaaggaggataacctgattgaggatattagaattgtgtcggagttccccgacatgttccctgaggagttaccaggcttgtcgcccgagcgtaaagttgtgtctgctatagagcttatcccatgcaccgcccctatttccaatagagtctatcgagtgtccggaccagaattggtggaactcaagaagcagattgatgaattgttagagaaaggctacatcagaccaagtacctcgccttgggcagccccagtgttatttgtggagaagaaagatggtataaagatgatgtgcattgattacagatccctgaatgaagtcactattaagaacaagtaccccatgccccgaattgaggatctattcgatcagttgagaggagccagtgtgttctcaaagatagacctgagatcaggttaccatc

SEQ ID NO: 91869 - DNA, 667 bp, Zea Mays
ggataaggtacttaatatctttgcagtgtaggatttgtttgaacttaaatagtttgttatctcatacatgaatatcccttagatgtgtgtaggttgaggaggcatgtgtttggtacaaatctgaagatgaacaacagaaggcatttcaattcatgcgttgttggaacaagttaaagacacggccaaaatggcttacaaaaattaatgatttggctacggctaaaacctcgaacaagagacagaagaccagtcatgatggtgttactattggaagggtaccaagtgaaacatgtgcaggtgaggtccaaggcatagaggataatcacttgacaaggcctctaagaaagaaaaaaagctacaacaatactgctacaagagaataagaaaagtgtgacaataacattggaaaatatgtggacacaaagaaataaaccaaagttgataaagatctcaaaaaaagaggagaggtttagtaaagcctttctgtggtggaaccgcccagattaatccagcttaagtgcttaggtcccacctcaatgttgatgccacacttaaatcagattaaactgttagtcccttgaatctagtctgattacccacttacaccaaattggtaaccacttctcacatgaaggtgagtctatagaaatacaacaagtcataagaa

SEQ ID NO: 91870 - DNA, 614 bp, Zea Mays
aaaccctcacaaagtgcacactgcacaggtgcagggacactcactaagctagccttctcaagcaaagctatcctagcgtctatctctattgcctcaatttgcaagccaggacaaatggtacatgcacccaacggactagacctagatctcaactcgtcgcgctcatctagcaaggtcacgtacttggtcagcaaagtggtgatgttcgacatttgtagagcgcactcatcacatcagtctcgtcggacaccacaactgaagctctagcagactcaagttccctaagcatgctctcatacttggatctaaactctcttttctcatgagcatcctacctaagtaacttatcctgactagccaatgtagcgttcaactcttctatctcagttgagagatcatcggcagaaggtagtacctcagaagtagtgtcgtcgtcgatgtctttgtcgtcgctggtgccgaccgcgtcctcaccaagtgccttggtgtagaggcctcccacggtgtccatgatgaagcatagcccgttcagcttgtcctcgacctgcctcttagtctcctcattgctcgaggaagatacgacatcgtctgagttgtggtcgaggtcgccgaag

SEQ ID NO: 91871 - DNA, 356 bp, Zea Mays
gctggattgtttgtgggggcttttcggtattatattacatggctccgcctcgttaaaaacctcaccccctgggaggaaaagagtgcgggcctgagtgacattgtttgcagaaatacaaaggcacttgggccttggatcttaaataaagaatttacgtaggttatctatattccatgaatgctctaggtcttcgccagatgatgtggctagcctataagtgtttggcgatgcttttgtcttgattatgtatggcccttcccactttggctctagcttgccccgggactctgttccgatggttcttgtgagtactaagtccccttcgttgaattctcttaggacgacattgttgtcac

SEQ ID NO: 91872 - DNA, 668 bp, Zea Mays
tctcaataaaagtgtacctcgtttcagcatccatcaacctccgacttagatatgtcaccacatgctcctttccttcagtttcttgtgtcagaatagccccaatgaccttatcttcagctgcaatgtataatctgaatggtactcctgcttgtggtgcttttaacacgggagccgaagacaagtatttttaatgagatcaaatgcttcctgctgctctgccccaagcgaattcgacattattcttaagccgaagaataggggtgaaggcatcaatcttctcggctaggttagagataaaccttcgtaaataattcaccttgccgagaaacttctacacttcgaccttataggtcggaggtcccacattccgaatagacttgattcggtcagggtctatctctataccatgttcatggatgacaaatcctaaaaacttaccagccgacactccaaaagcacatttacgtgggttcattttcaaaaccatatcgacacattttatcaaaggctttgcgcaaatcagcaacatgagaactaaattcagccgatttgactacactatcatcaatgtagacttccacagtgtttcccaacagctcatggaagatcaaattcatagccctctgataagtagcaccagcatttttcagaccaaatgtcatgacaac

SEQ ID NO: 91873 - DNA, 372 bp, Zea Mays
gccgattccctgctccatcccaccgggcgtccctggggtccgcacccaagacgcctccccgttgtcctcacttcctctctccaacgcctgttgcctatctcactccacggcatggatctggaattgtgaatccctcactgaggccccgaatccaacaaccaatgctgccttcttctcccccctcccctctgcacgacattgcctccccagccggcggctgaggtgcagcgccaagtggccaagtggtgccgccaatcccccatgtgatcacatccctactcggcaacaacctcctttctcacaccactgacaccgcacatcatccacatccacgcctccgtgccagtagcagcaccgtcggctcccgctgcc

SEQ ID NO: 91874 - DNA, 316 bp, Zea Mays
atctaagtctagctattgtccttcccaaagaagcaagccccaggcagtggctgctcccaagtcagccatatctcttccccacacagcagtctattgtcttgagcaatctcaagtctgtgcaaaatttccctggtcaagctaagctgagatttaacatttctgatccttttataactccacgactgcaaagcctttgcaagccttttcaacttcagagccattctttcctagggacaagaaaacatcactgtctgctcccaagaggtagacactgtctccaaaaaaatctagaatcttagtccaaaaactctcaaaa

SEQ ID NO: 91875 - DNA, 420 bp, Zea Mays
gtcctgggatacgggctgagtgcggtcccattctttggcctcgtgatgacactgagtgttacgatgcctattccgatgttggtgtgcctcgcattgcgggggatcctcctccagtacggtgggctcatcatcagagatgggagtgtcctctactctgacctagataaagaggacatccggaaagaatgagctcggggttgtgtcccgcgttttgaccatttcccacataagcagagcggctgggatagtcgtcgatcttgttcccgtggccatgccggtgccggggctgtccactccttttcgccgagtgatatgagtcttcacccgtgtgggtgacgtggacaaaggagtctgccgcgtcaagggaagtgcctcagtcaatcgggacacaagtgctgctatggtcccgggcctgcccaa

SEQ ID NO: 91876 - DNA, 439 bp, Zea Mays
ctgatccatgccgtggatctgcccacggacggcggggatcgtactgggcatccggttcggccagatcagatcggaaccgttgatccgctgatggacgtgggacgttagatcgtggcactttaaaatcctcaccatagatctaggatccaacagtccattgagtgtaccggttcatttaatggccagtctaatctgcgccctcgactttggatctgacgatcagaaaacccccataccctttcgcatagctcatcttgcaaaagagtccttgtagtattgatgaataaacccgccgtcctctcctagtataaagtaattacggttggaccctggtttcttataaaacagcccctggacttccctgttattctacccatagtccaaagatgacgccagaattagtaaaataaaccataaattgattttttagcatgaaaat

SEQ ID NO: 91877 - DNA, 622 bp, Zea Mays
gaattctgacgcttctatcggaacgacaaaaggaaagattaatgaatcaacaacacttacccacaacaaaaagttccggatacttctgccgcatcagctcctcaagttcccacgtagcctcgcactcagactgattagtccataagaccttgacataattaattgatctcttcctcaatacacgctccgagaattccaatatacgcaccgggcgacactccaaagtcagatcctgctgcaccgcaattggttccatctcaatctgatggtccggatcccgcaagaacttcctcaacatagagacatgaaaaaccgggtgtacccctgccatggaatccggcagcagcaagcgatagccaggctgcccacttgggccaaaatagtgaacggtccaatgtatctcgggctgagctttccagagacaccgaaccgaacaactcctttagtaggtgataccctgagaaggacttggtcacccacagcaaattccagatcccgcctcctcacatcagcataactcttctgacggctctgagctgccaaaatattctgacgaatttcccgaaccttttcagaagtctgctgaacccaatcaggaccaaccagggatctctctcccgaa

SEQ ID NO: 91878 - DNA, 918 bp, Zea Mays
tgcgaatgtaccgtgccaatttaagtcattactaacttaaactgaccgttctgttggtagggtatagtgatcaccccgagttaagtaagcgtgagcatgtaacaccaccttaagtcattgcggacttaattcgattgctccgttagtagggtatagtggtcaccccgagttaagtaagcgtgagcatgtcgcaccgccttaagtcattgccgacttaagctgattgctccgttagtagggtatagtggtcaccccgagttaagtaagcatgagcatgtcgcaccgccttaaatcattgccgacttaagccgattgctccgttagtagggtatagtggtcaccccgagttaagtaagcgtgagcatgtcgcaccgccttaagtcattgccgacttaagctgattgctccgttagtagggtatagtggtcaccccgagttaagtaagcgtgagcatgtcgcaccgccttaagtcattgccgacttaagccgattgctccgttagtagggtatagtggtcaccccgagttaagtaagcatgcaggttgacaatgaacaattcgagtgcctttgaagtctttttattgatgatatattttccagtttacagagtacattgtcgtcccaatagcttttgagatatagctaggggtaaaacttcctgagatgttctatgttccatgagttcccaatttccatgccgtccatctgagtgagacgatatgatccaggccgagtgacttctgctactatgaatggtccttcccatagtggcgacagtttatgtcgtccctcccccgttagaattcggcggaggacgaggtctcccactgcaaaggatcgatgtcgtatggccttgtcatgatagcgccttagagtttgctgatatcgggccgactgaatcactgtattcaatcgttc

SEQ ID NO: 91879 - DNA, 694 bp, Zea Mays
gaagaagaagaagttccattaattcgcaagaaaagccgactctacagaggtagtagaggagatagtgatattccttctccagccctgtctgctcttgttagccttcaggatttatctataacagattttgatcagacccttgaggatgccattcctgaggatatgctatcagagccaactgatggtgatatgatggatgtttgttctgacattccagatgtgggattagaggtatcctaggcggcatctcgtgcgtcgtcaaccttggagggcggtcttcaatgtcaagaggttggtcaagattgctcgactcccatggaggtgactgaagatccttcagccttagatgtggctattgcagaaaatccagtcctcaagggtgatgttggcggttactcagcccccgagggtgttgccggtagtgatccggctcaggtgggtaatgcaagctataacccaaccctcgagggtgttgccggtagctatccagctccgatgggtgctgcgagttgcgacccagcccctgagggtgtccaagcgagttctccttcccatacctccatggatgtccatgccgggtcgtctccacctcattctaatggactgatactgatgcatacttctttagcttcaagtgagggagtcgccttagaggttggcgcaccggatgacaagattttgatatctgctggag

SEQ ID NO: 91880 - DNA, 992 bp, Zea Mays
ccttcccttgatttagtgcaaggaatgcaatgcttttccacaaaattcttgcttatgaaggtatgtgatgcaccagaatcgaagagaatagctgctgggtaattggcaacaaggaatatacccatcattaccggctcgtttattcggtgttgtagccacttggatataataaatctgtcctgttttcttgaaattcttgcccgttggattattagcagtgttcctctttccttggttggagttcccagagttttgttggaaattagttttattttgcttcgggtatgggcagtccttgatgaagtgtccagactttacacaattgaggcaaccagtggaagaactggggagagcagggaaacaagtaccaggggcactcagctaattggtaggagtgggggcagtagtgggacgaataaaaactggttgtttgaatggatatgaaggtgggcgaggcgaagatcgattttgattaaaaggtcggatcaccaacctagttctcttcttaggtccttgttttgacctttcacctccaaacccttttgactttccatgtcctgcagttttagcttccactgccaatgttgtactgacagccctactgtaggtaaggtctaagcatgttgccattttccgctgaagcctgtcattaagtcccatcataaaacaattctttttcttcagatctgtatttacttggtcaatggcatactgagacagatggttgaatttgttgagatactgcattacagtatctcacccttgctttaaccggatgaactcttcttgtttcatatggagcactccctctagaacataatgctcccggaatgctagcttgaattcctcccaggtgatctgatgtccagccggttgaatttctataaaatttgcccaccaagtactggcaggccctcttagctcttgtgcgggcgtgcggcaaacagcggcttttgcgtctccatgcaacgaatcaacccaaacttctgttc

SEQ ID NO: 91881 - DNA, 390 bp, Zea Mays
gtgtatttttagaaagtaattatgaacttcattctgatgaataggaaagagttgcaggctacggtggatcaaccagctagacccacatcttaatcatgacacattctccatggtggaagaggagcgattgctagtggcacatcatgcatatggaaccaagtggtcccttattgctcgcctctttcctggtcgcactgataacgctgtcaaaaaccactggcatgtcatgatggcacgtaaatctcgtgcaatccaaggcattaagatgatgtcctcttctaacccctcaccatcagcaaaagagtctccacacttcatgccaaccatcaatatcaaccagaactatggaaaaaatatgcactcgcagctcgatgcccaagtagaagtagc

SEQ ID NO: 91882 - DNA, 323 bp, Zea Mays
caacatttacgacccacaccgattaggcccgttcttttcgcggcccatttgagagagacgctcaccactcacgcggcacaccgcacacgctggtcctaattctgaccgttgcaactccaaaatccaaatctgccgcccggtttcatagccacctccaacgtctccttcgccggcgctcatcccccctacacatccccctccccgttcttctccaaggcttcaaactcgcagagattcgcagtctgcactacgtctccttgacctcagcagcggccacacagccacgcgcaccgagagaagagagattccccacggcatggcgg

SEQ ID NO: 91883 - DNA, 622 bp, Zea Mays
catatttggagaacaaatcaaccaccaccagcacagtattagcaccaccagagcgaggaagaccctctataaaatccatactgacaatctgccaagcatgttcaggtaccggcaaaggctgcaaaagtccaggataacgactcctgtccggcttagcttgatggcagactgaacaattcatgacataaaacttgatttgatttttcattccagcccaggcaaacaactgtttgatacggcgatatgtcactggaaaacccgaatgtccgcccattggaccatcatgtaaggctctaatcacttggagttgcaaggtctcattagcccccagccagactcgacctttgtacctcaaaatgccttgagacaaggtaaaattaccctgagaattcctagttactgacagttcagacaacaactgttgtgcatgtgcatcactggagtacccttccacgacttgagtcaaccattgtggtgtacctgatgaaatactgaacagcgaggattcactttcagacattggtcgacgtgacaaagcatcagcagccccattgtctaccccttttttatatacaatgcgatactgcaacccgagcagcttagtgaatacccgatgttgcca

SEQ ID NO: 91884 - DNA, 955 bp, Zea Mays
gcgtggcagataataaaatcaagatcttcggtcgatgccgcttcgggtatcggtagtgttaacttctctggtagaatttcctttactttctctattggcctagtttttgaaggtccggccttagcgcgggtaggggaagcgcttgcagcgacaacttctcccaattcttcaactttgttttcggaaaccctagtaagagcaggagtagccaccttcgaaggattcagaacaacgtctagaacactggccattctcctccctttcctaggagtcgccgctagaatagttgatgtccttgttaactctggcagtgatggagaattctacagctttggctgctggtcacttttcaaactttctaattttgacttctctagttcagcggtggtagcttcagctgccgtagcaggtattactccacagctgagaaggtagcttcgacagattcaacatcctctatctttgaaccttctacaacaggtagtgcaacatccctctccaaaaaataagactttggccgatgaatgacaatattcattcttttgggttttgacgcagtagaaggggcaattgatgtaatcctcctcttcgtcccttgctttcgagccggaaagcagtaatcggggtacacaaaaccaataacatcaaacactctatttagtcttttctttccacgggcaccgaaggcagtattcatggcttcgtcttcagcctccgtgtatgcccccaacagatcatcagtagtcgcctcaatagcttcgagccattcgtcatctggctccctaaactgacttctatagcggtatatatatttcaaataaaccaggccactttcgctcgagctatcagtgttctccttcgtcatttcccattcattaacaaggggccatactttgaaagctatgtgttcttgaaccaagtccctggtgctaatgtaactgcacacaatgttgaa

SEQ ID NO: 91885 - DNA, 867 bp, Zea Mays
gtggccgtcatcccctctattgatcccaatagctagctccctttctggggtaaccatgcttctgttgtatctgagttcgatttgctccatcttgtcgaaattggtgttcttccctcaaaggagttgagttcctgccgtatttggcaagggattgccgtgcccacggaggatactcataaatctgtggttttcgtcgctttcttgtttcgggcctgggattgcccgtttccccttttcccgtgtctccttgatttctacccgcttagtatgactcacttgaaccccaattccgttctccaaatctccatcttcgtgcatccctgcaaagcctatcttagaatgaacccatattttggactatggaaatatctttaccactgtaagctagggatggatggtggacaacatcaaggagttggtgaggctagccttgaacttcgacggggtaggaaagttaaatacctagatagcatcaaaggatgacactttaagtggttcacaatggataatcacagcaagtccttgccagctcattcttgaagacagctagatgttcacgtgccaagttggatagaggccccaaccggctctaaagttgtagaggtgaaggtcttgttggttgagattgttggtttaaaagacaaaggtctgaccgctgaagctatggtggtcgactttgttttcaagaatatccagcctctaaagacagagttcaccctacatatgtgtataccggggtcatagatccttcccaggtgacagacaaacgaatttcaaaggaagacatcttgagtcgggtcgagatgatgctcaggggtgctattgtgaatgtcggtgctcctcgatcttactctgcctggaaccttc

SEQ ID NO: 91886 - DNA, 1985 bp, Zea Mays
gactcgctgtgcagtgcttccttcctcaacgttccttctcccttcaccatcccactccacctaacaattgggagaagttttagcccagctaagcggctgtggatgggaggatcctaagagcaccctggaaatccaaaaccatctcgtctccgcagcgggagcccaggcttcgtatgacagcggccattgccgatggccactacgcgcgcctacaagcttcgtatcccgtgaattgctggtttggggattttgaatttgaacttgaagtcggattgctcttgactgctttgtttgaactggtgcagttaagttgggctgggttggggttgattcacccgcgatgatcgaattcgattccagggctttgcgattgagtgtagtgcagcgcaggagttgcgttcccaccaaggaacgtattcaggaccatccgaattgtcttgctacttgggttggtgggcatagaatgaaattttagtgctgcaaagtttcagacctgaaatattacagcttcctgcctcaaatcaacctaatctggtggtctggattaacttgagacaggagactactgttgttttccaggaatcgtgacttctgttctctgtagcttatcatttgcttggtaggttgtatcaattgctgttaatagggccacactgtagttagggagatctatacaagttgctcaatcctcaattacatacgtgtcgattcttttgtctgagaacttctacttcacgctaggtagtttgtttcatagagaatgtagctgctggtatcatggatagtgcagctgctggtatgaacttagtgctatgccgaaaattggtatcatttcgatcattgcaatgatgaacaagcatgctcaagtgctattgttgctgtctggttggaggtctttgttttgtaaatttaaccttcttttttactctggcatgtgtggttctttcggtaattgattgattaacatgtttgtgctatttaaacactctatttcctcttaatgaaaaacatgctatggcacggtcgcgaaaaaaatgaattatgaaagaatgaattaagaaagaaactctaaacatgctggtaaaatgaattgatatgtgcaattgagtaattgtactctggattttcagtcaatatttttcattgtggaaatgcgtgtctagatccttctggaaaaaatgaattatgaaagaaactttaaacatgctgggttcatggtagtcgaaaacattttgttatatctttggatatcatgctgagataagactttaattctcttgttgttgcatgcaaccttcaatatatcttgtctccttgacaatgaccagaggagtttgtcgcgcacactttgaatgtcaattgtgccaagtttgggaggcgagcatcaaggatcctcatcactggtggggaggatttgaaggtcaatctttgggctatagggaaacccggtgccctcctggtaatttcctatcccgacggtttatgtgtaatgtcaatatgtcattcttgctcttttttggcaacatctacttcaggtgtttttcattgtacattgcagagtctatcaggctttacaagtccagttgagtcagtaagctttgactcttctgaagttacgataggtgctggtgcagcaagtggaacgataaaaatatggaatattgaggaggcgaaaggtattaaccagtgttggtactcaacagtcagtgcattgaaaacatgaactgcaactatgtcttgcaataatctcagtttctattgacaatttgcacaatgtgcagttgttcgaactttcactggacacagatcaagctgtgcatctcttgatttccatccttttggagaattcttagccactgggtcttcagatacaaacatgaaaatatgggatactcgaaagaagagatgcatccacacatacaagggtcatacccaacgaattaatgtgcttaaatttactcctgatggccgatggattgtttctg

SEQ ID NO: 91887 - DNA, 318 bp, Zea Mays
taacgtgcccttgaccacccttgtttcttaatgatccatgagcggtcattctactttgcatatccttggtgatcccattgtctccttgtaactccacttggtaatgaatctttacttcaacccttctgttggaaccttacctatctaacccttgattgttttctccactttgtcgtttcgcaagtcttgccttaactatatcctttgttatgcttttaattattatcatatgcacccttgacacctctatatcctacattgatgtttgtctcatacctgccctttaaaatcgcccctctttcgtctcataccttcttt

SEQ ID NO: 91888 - DNA, 535 bp, Zea Mays
ataagaatatggactgcaccatagagtgggactgcattggaagagcagcccaaggttttaaagagtcagttttttttgcaaccacaaccatctgccatgcaaggcccaatttaaatactgaagattggaaataccaagaccctcaagatctttaggtcgagtggcagtgggccatgccactaaacagtgacccccgttggcatccttgcgacctgtccaaagaaaactacgacgaatcttgtcaaaggccttaatcgcccactttggaagctcaagagccatagcacggtaaataatggtggtagtgaggacagactgaactaggatggccctgccagcctagtcatcaatgatttattctagaggttgtcgagaacaactatagcaggattgtccaggtggtggtgccaaatggaggaagagacgataaggctagcttgagctttattctaggggttgtcgagaacgactatagtaatatgatcaaggtggtggtgctaaacgaaggatgagatgataaggttagcttgagttg

SEQ ID NO: 91889 - DNA, 594 bp, Zea Mays
cggacgtgaacaccttcaacgacctggtgctcgggctgtgcgggctcgggcgcgtgcgagaggcagccaggctggtggacaggatgatgacgcggggatgcatgccaagtgcggtgacatatgggttcctcctgcaggggctgtgccgaacaaggcaggccgatgaggcgtgcgcgttgctcgagaggttgccagaggtgaacgtggtgatgcttaacacggtgatccgtggatgtctgacggaggggaagctggccagggcgacagagttgtatgagatgatgggttcaaaaggatgcccgcctgatgtgcacacatacaatattttgatgcatggcctttgcaagcttgggagatttggttcagcagtgcggatgcttgataagatggaggagaacggttgtgcaccaaatatcgtgacctactctaccttgctacattcattttgcaggaatggcatgtgggatgacgcaagaacgatgctggatcagatgttagccaagggctttagtatgaactcccaaggatacaatggtatcatatatgccttatgcaaggatggcaagcttgatcaagcgacaaggcttgtccaag

SEQ ID NO: 91890 - DNA, 885 bp, Zea Mays
ccatgatcttagtgtcttttgagaccctttcctattctattgttaagtcgctatctttttggcaatttgtactctcttggtcttggtatgctcgtaccattcgaatcttgcatactcttatttttttatatatgcttacctttatatcccaatgcatgtttaagacattccggttaacatgcttttgaccacccttatttcttgatgatccatgagcgaccattctatttcacacacccttgatgatctcattgtttccttataacttccctcggtaaggaatcttttatttcaaccattctgttgggaccttacctatctcacccttgattgtcttatcccccttgccgcttcgagagtctttcctttaactgcatccttggttatgctttcacgatcatcatctttacccttgtcgcctctatatcttaccttgatgcttaaattatacccgccctttaaacccttccctcctccaaatcaattttatagttgtattctacctattgtcccttggtcgtactctcttcccttgtcgcttgtgagtttttaactccatcctttgtcgtgctccagttgggtattacctttacctttctcatctcttgatcttacctcggtgattacactatgtccattctctaaaatctccaatctcttatcccaatttgagagcggtgttttacttatctcacccttgacaacatcctcttctttaccgcgtgcaagccttgacttaactccattccttgctgtacttgtaccacttgctcttctatgccttcatcttttctcttacaccctcgtcagttattgcctttggcccttgcgatatttatgtcttctacctaaatgcttaccttaaacttatcctttaaaattctc

SEQ ID NO: 91891 - DNA, 283 bp, Zea Mays
ttcagtttcaggtggttgcagcttggttcaattttggggagcagaaaaatcctcacgcctctgctatgctccacttgcgacagtttggattgaggtcgtagataggagtttgaaaggatggtaaatgggagtgaattcgatgcttccagtgcctaagtcatgtatgcttggtgtttatccgttgccggtgaccaccttgtctgcctgtctctagtttgcgcatcactcaggttcactgctctactgtgtggcttcaatcgtgcatggtgcttgtgctgttaag

SEQ ID NO: 91892 - DNA, 339 bp, Zea Mays
caaagactcaccagcgggctgcgccaccacgggcagtccgtcctgccgtggttggggtctggggggtggatgacgccatgtccgccgttagctgttagatgggcggttaagattaattcatgccacagtgaatcgttcaatggcaagatggccgttggattttaatcatgcggaaactatgagactgaggcgatcgtaacctgggggccgtggatttcagatccggcgaccaggagcaaacgcggatacataactggcttaaatctaatctggcgcattgaagtttgatcggatggcttcggtcgctcgataacctttcggttggtggctttacaaaag

SEQ ID NO: 91893 - DNA, 509 bp, Zea Mays
cttccttcttttgtctgcaagtttgcgaaaatatctctatactttttctcagtcaatagatgagtggcaaacaaatgtatttggctgccttctggtgatccatcatccataacttgttgcaactgctttttaatctcaagtcgaacagggtcattgtcagcagaggtaatggacttgttagtagtcattgaacgcgactcaaaagcctccactagtcttctcatgtactcttccctcgaatcttttttcttctttggtttaggggaatcatggcgcatcttacgcttcccactagcatttgtgcaggggtcaggggtgctgttttcatccccacctaaagtggcttcgaaatgatcatcagatgatgaattagcatcctcgacgccaggaaccagggttctttcatttgtgcagacaatgggtccaaacataaccttgagctcatcctcattctctaggggggctgttttgaacataatacgacctggcattgcctgcgcgaacatggt

SEQ ID NO: 91894 - DNA, 675 bp, Zea Mays
cttacccacaacaaaaagttccggatatttctgccgcaccaactcctcaagttcccacgtagcctcgcgcttagactgattagtccataagaccttgacatacttaattgatctcttcctcaatacacgctccgagaattccaatatacgcaccggacgacactccaaagtcagatcctgctgcaccgcaattggtcccatctcaatctgatggtccggatcccgcaagaacttcctcaacatagagacatgaaaaaccgggtgcacccctgccatggaatccggcagcagcaagcgataagccaggctgcccactcgggccaaaatagtgaacggtccaatgtatctcgggctgagctttccagagacaccgaaccgaacaactcctttagtaggtgataccctgagaaggacttggtcacccacagcaaattctagatcccgcctcctcacatcagtataactcttctgacggctctgagctgccaaaatattctaacgaatttcccgaaccttttcagaagtctgctaaacccaatcaggaccaaccagggatctctctcccaaagtctcccagcacagaggggatatacaccgcctgccatacaaagcctcaaatggtgccatcttgatgctagcctggtagctgttgttataagcaaactctgctagtgc

SEQ ID NO: 91895 - DNA, 502 bp, Zea Mays
tccatgcaaaagtcgcctaagggtgcagccggactagcacaataagtgcaaaaaatcgaagtcttttccaaaagactctccgcgcaaaagtcgcctacgggtgcagccggaatactagtacaaaaaaatcgaagtctcttctaaagaactccgtacagaagcctagggagcagcctgatcaacgaaagcgcacaacttcatcacacaaaagtatggttacatacatacagcgagggcatcacacattacatcggctcaaccttcgggatgatgcccatctccctatagttgaacaacattatcctcaattcctcacccgcaaacagacttcgcagctccccctcacccacactcgccccagccggcgaggacaacaattcccgtttgccagtctcgtccacatgaagacgaccaccctccatctcaccacgatgacgcctatcacttcgcgacaactcacccactctccgtttcgccatcgccctccgccgcctacgcccag

SEQ ID NO: 91896 - DNA, 655 bp, Zea Mays
tgttttggtgctttttttgtgtgttttctatgtgtgcatcataatatagtcactgaccattatgatgtttttatgccattgcagttcaagggcccgatatacagatgtgagctgttgcattacgagatcttccaccctttgaaccaagctggaattcctggatcgcttgataagtttagaattggtggtcgtccgttgccaattgaatgagatagtagtcagtcgaacaattagattcatgcaaaaacaatcagttgtgttatgcagtagccagaaacaatcagttgtgttatgctctccagtaaacaatcagttgtgttatgcagtagccagaaacaatcagttgtgttatgctctccagaaataatccagtaatgttgtttaggttgcaaccagcgcactggttccatttgcaactggtctattcatctagttgttatcgtactctaaactgcagtttccaatattgtttgaaaaatctcagtcattgcagttgcaaccagtgtatgttttagagttccaactggattataatcgtacttgcaaaacagtgtatggttttgcagttgcaaccagtgtatatgttggtgttctgtacccaccggcgaggtggagcccttccatgtgaggcagttgcaaccagcgtatatgttac

SEQ ID NO: 91897 - DNA, 912 bp, Zea Mays
catgggaagagatactaaacgaagacttaaaaggatgatgagcatcaacaagagcatccaccagagacacaagggtgattagcaagtacctgggcacgaagaggctcaaagtcatcacgtggacgagtcaagaagtcatttgtgcgacgaaactcaaggttagtcttctgagtgggatagaactcacatgtgctaggagacatatgtggaccaaagtatcaagttgacgcctgacaatagacatccgactgtagaactcatcaactatagaatcaccctaacataaggactactgacgaataccatcaagataagtagagtgactcaagataagtagagtgaccagtacgctcctagcgattttaagaagggtccacatttgatgagaactgtcacactgaataacctctgcagcaaagcggtcctccatactagcagtgagaatagaaccagctcgagcatcctcatccagccatatccaatatgcactatactgagcctcatatgatgccagctgatcaccataatatgcaagcagctgctccttagcctcaggagttaccttatctgatatcacagattgggctggagccttaggacgatgcgggtagagaagttcgccagtaagaaaatcacatagacgaagaccacacatatgccaccgcatgtgagaaacccaaacacgatagttagtgccatcaaagatgagcagacaacgtgtaatggtacacccccgttcggcgcagacgaagagcaacaatcgatgacgagagcgcagaggaataagcggtgcaagcagcagtttttttactattctcctaacaggtcagagcagaggaaccggcgggtgttcctaacagagcaaagcagaggaagagaaaaatggtcagtccggcggctggaagaccggtg

SEQ ID NO: 91898 - DNA, 652 bp, Zea Mays
aaaagaaagaaaaaggaataaacttcaacttctcttttcttagaaaattgggtatcacactctacccccgtaaaaagaattcgacctcgaattccgtcgcttctatcggaacgacaaaagaaagattagcgaagacaaagaaactcacccataacgaaaagtttggggtacttctaccgcatcagctcctcaagttcccaggtagcctcgcgctcggactgattagtccacaagaccttaacatacttaattgatctccttctcatgacacgcaccgaggactccaagatatgcaccagacgacactctagagtcagatcctgctgcacagcaatcggttccaacttgatttgttggtctggatcccgcaaaaacttcctcaacatagatacatggaataccgggtgtacccctaccatgcaatccaacaattgcaagcgataagccaagctgccaacccgggctaagatagagaacggtccaatgtatctcaggctaagcttcccggagacaccgaaccaaacaactcctctagtaggtgataccctgagaaggacttgatcccccactgcaaactccaagtcccgcctcctcacatcagcataactcttctgatggctctgagcggccaaaatattctgacgaatttccc

SEQ ID NO: 91899 - DNA, 562 bp, Zea Mays
ttgtgtgtatataatttaaacatagaatctattccttttaaattatcaaaaaggaaataacaaaacttctgaccgccgttataaaaaatatttatccttgaattgtgcttatattgtgatagttattgggaaagagagagagagagagagatagagagaaagagggaaaaggcaagccgtgtttttgcttcaaatttcactatccgtcctctctgtggtatgtatacacacctccaacggagggagagagagagagacggagggagagagagagagagagagattcgcagtgagactagtacagctccatgacaagagctaggatcggcaacatatattgttagttggtcctgtagttgagtactacatgcatatatataacatgatcattattgttaacagtacgcggcttgtcatcttcttgccctctctcagcacagccagcgtgtaattcccgttgtagttctccgttttcccacacgcgctgtcatctagcgctggaatttgggaattcctggggagatgaaaggatcacatgcatgcatgcaggcgcgctcatcga

SEQ ID NO: 91900 - DNA, 725 bp, Zea Mays
gttgatatgtatgtactgaagccaaacgtaaaaactgaatgaataagcgtaaaccgtatcagaattttgcataatcaatacagagaagaactgaaaatagagtacataactgaacatagaaaggcaacgcattggcactggatatacaggggcatacagtaaataagtatataaaaagacgtaaaccagttcagttatatgcataatcacaccagagtagaactgaagaacgtacataactgaataaaacagccaatgcattgaagtactatgtatatgctgcaaatatcataaaaaattacataaaaattcataaaccattgcagatagatgcataatcacgccagaacacaaatgataaagtgcataactagcatatataaatatgtccatctaaaacatatctggaacgacatatctaggagtttgctaagagcgcatatggacaaaagtattatctggatgctaacataagccaacaaaccaatatgtacatcaacaccattcagtgacagtaccctaaactaggctagtactaaaataacttgaagccaacaaaaggcaacagaccatcatgttcagactaccattcagtgagagtaaactatactaggctactactgagagaacttgaatctatccagatgtgaaaccatggagctgtttctgtttagtcaatggaatattatgtattgcagtatgtcacacccgggtttcaggggtcc

SEQ ID NO: 91901 - DNA, 446 bp, Zea Mays
aaacaatgttaattccaattatgcctaagggataaggtagtttgatgtgatgacatgactcaacactctcatcttgattattgtctaaatgggtaattagatatacttcaaatggggtgtggatcatatagaaaattaggtgcaaaccttagttcgcagcaaagtaggtattaatcttgacctactaaaatggagtaattaatcggtaaattccccctcaagttattaagaacctctgtaactcccgttactcttgaaaagcaaagagccagctccagatatagccttgcatactccttggagtctttcactttcttattttctggttttggatgggacagtctagctgattacattttagtacatagggtgctattcccaatgatttgttgcagatggtcagatgtactacaggtactgcgagcactacttatacccggctacag

SEQ ID NO: 91902 - DNA, 415 bp, Zea Mays
gcaggctctgctttcataggggctccttacccccctctcattttctcatattcttaatataaaactatgcagctcttcttcgtttcagaaaaaatacagttatccatgtatttgatgttatatgatacaatattctgtgggtttcttgtaatcttgtgttgctatccgttatgcaatagtagaacatgaattaactatttttgtttagtgtatgtattaaaatgattgttttatactatagaggttttgtagactccagctatagagctatgttagagtatcaatatttttgtaaactccgataacccattttgtagactctgataacctgatatactttgtaagttttagtaaattcatgtctatttactatgaatggggaagtaaacaaggttttctttcattttaaatgcag

SEQ ID NO: 91903 - DNA, 380 bp, Zea Mays
aaataaacaagtttctataattatttttgtattcaaaaccattttcttaatccatttctatagttttccctattcactggactgcgcaccaaataccagaaattgtaggggctggcgtgcaagaaatcctaagactcagcctaaccacgagttgtactgcgggttgattcttatctttcacagggtctctgtagcgaaaaggcatggcaaagaggtacgcacagatcagagccgcccgattatggctgaacggtccggattaaatcatctcggtacttacggctgattcactcggagccgttggatcccaatccaaggccacgcatacgccacaaccccggtccgatctgtccattgggtaagcgatcaacggtcacgaa

SEQ ID NO: 91904 - DNA, 821 bp, Zea Mays
aaagaatgcagaaaatgaaagttgccaaatagcccttgggaaccttcagtcataagttatcgcgctaaggaacgaggcgcttgaaaaagataaaatactgctttccttagtagataggctgaagagcaacgaagcaaagcttaatgcacaaaccgaagctcataaagccgaagtcgaagacctttggaaaaagcttactgaagctaatgaaaattttgaactcgcaaaggcaaagcaagaggtaagtgaatggacaagtgcgaggctggaaaagaatgtggaggagcttcgtgagtccaaggagagatgctatgagaaatccttggattccgccaagaaactgaaagacagctttgccaaggtgggtgcatactcattggagcaaaagtttattcgaggcgatctcgaaggagtcattgaatggatcggcgaagagggtgaagcttttgaagaaattcttagcgaacgtgggaatttttgtgccttcgccggtgctcgaggggttgcagcgattctggagaaaactggttgtgaacacgttaaagccgcaacccaggcagaagtcgacttctccataaacaacacgaaagagccttcgaccgaagctactttaataggcgggaaattttattccgatgtttggatgaggggcggccgcgagattgctgacgaagctataaaaaaatgaaaaagaatctcatgatgcgcgagaagaagccaagtgagtcgaagaggatgctgagcgcgcaaggcgtatatgtattattactgaatcttagctttggtgtttgtttttggcttcagattaacaacttgttctt

SEQ ID NO: 91905 - DNA, 505 bp, Zea Mays
gaaatttagtatttgctttcatgattactcgtatcttttttccctttgaaacgaatgtttggacgcaacacggcaacaaagtatccaatcgagtaagcgacggctgattttttccaatcaattatccacgatgccgccaaaaatttaggagaatatgcttttatgactacgcagcctgttctgtttgtataatattccacatatgaggcatccggttagtatttttcctgtactgcagcctaatcaaatcttgttcagagtagtatgctccaatagaatgtaccctggattggtgccacacagcattcttttccatactttgcataatattgctgtaaaagtctgaactgcaccatgatcctcttcatttatcccatcctaaattatcatcactgcttttcgcagaaaggcactgtatatgtttttatacgacaggctgtgattctataatgaatatcatacactgacttttaagtttgtgcaaattaacaaaattaagcaattt

SEQ ID NO: 91906 - DNA, 523 bp, Zea Mays
ttaacagagagggattaacagaaaaatatacattgattcacgcagatagattccatactcataatatgcaaataccaatagacagcagtactgtgcatgttcattaaaaagtatactccaaactgtagggttaccgttggaaaacataattttgtaccagttttgtaaataacttcggttgtgcattattattaatagatacagccattcaggtcacatgaaccacaggcccgcctcttcactgtcagatctgtcccctgaacactggagacctgcaaataaaatagtgctcggtggatgcctggacatttgatttgctttccgagaatcacccatagtacattagcaccacagcatgcttctgtatgaagcaaataagtatgtctaaaagctgatgcctgccatctggttgtcccctcaatgcttgatgagttgcacagttgcactgctggttcctactatcactgcaactgctcttatttgaaactgcagaatttcctactagtcttgatgtcatcagaca

SEQ ID NO: 91907 - DNA, 487 bp, Zea Mays
gaggtatagcagaaagctccaaacggggtgatgaatgcagttttttcctcgtcttcttttgctaggctgatctgatggtacccggagtagcaatccaagaaggacaacatagaacacctagcggtcgagtctaccacctggtctattctatgaagtccgaagggatccttcggacagtgtttgttgagatctgtatagttgacgcacatacgccaatccactttattctttttgagtacaagaacaggatttgctaaccactcaggatgcagtacttctctaatgaaccctgctgcgactaagcgagttagcccggcacgaatagcttctcccttgtcgggcgtgaaacaacgcaacttttgtcttatcggcctagcctggggatagaccttcagtttgtgctcggccagctctctcggaactctcggcatatctgcaggttgccatgtgaatacgtctcggttatcttgcagaaactggacgagcg

SEQ ID NO: 91908 - DNA, 362 bp, Zea Mays
ctcagacgccctcgctagacccttcgctgaggcctccgccaccctagacgccctcaccagacccttcgccttagcttcaacctttttatttttcctcattgctagggccacaaccttacccttagaacaccatttgttcacaccgccaagctttgccccaccctttctcttaggatcatcagtatctccagcattagtggagccctcctcaggatacgagccatagcggagaccgctcaactcgaagacacgattcaacctgacattcgaacctcgtatgtcctagctcctcggcttctctgtctttgtcgaatacttcccaacaatcttcaccacctctgcctccactttcctgataaaaa

SEQ ID NO: 91909 - DNA, 416 bp, Zea Mays
ggaaaatggatcagagagttgtcgtatgtagtttggagcctgagaactcaacccagccgagctctgcatggaaatacccccttctttatggtttatggttcggaggcagtgctacctgccgatctcaagttcggggcaccaaggttaatctttgataacatagcagaagctgaagctactaggctagaagacgttgacgtactcgaagaggagcgactgaatacgatgattcaatcagcgcgataccagcaaactctgaggcgctatcatgataaggccgtacgacgtcgatccttcgcagtgggagatctcgtcctccgccgaattctaacgggggagggacggcataaattgtcacctctatgggaaggaccatttatagtagcagaagtcactcggccgggatcatatcgcct

SEQ ID NO: 91910 - DNA, 303 bp, Zea Mays
gtaacgtgttcattgttttttagatggagacgaaaaagtaaatgtgaatcaagatgatgatatcgattggttgcataggaatgagacattcaaggaagatgatgttttcacaacgagagacctcctgacaccaggtacatgactgttcactcgactaaatttgcaaaaacaactgatttcaggcggtttaacgtagacatgccttattccaggctgtgtgcatgaaactattggtaacacgcctaaccataatttggaaagggctgcctactttagggagcggtacaaaaacttaactcccac

SEQ ID NO: 91911 - DNA, 341 bp, Zea Mays
tacggtacggtgcgcggttcggaagctgtgcgccggggatgaggtcgatctagtgctcaatgccacgaagcggtgggagacccggtggtaagtctttgggaaagacatcagcatactcctacaaaaggttagcaaccacagggggaatacccaaagatggtgcatcatcaagtgaaatgaggacactagagcatacaagtgcatagcatggcaaatgagcaccgtgtagatcatcaaaatcagcacgtgtagcaagtaaaacaggagccttcaacttgatttcagaaggaacagagggtgatggatcaagttgtttagcagttatagtagctcgggcaaga

SEQ ID NO: 91912 - DNA, 328 bp, Zea Mays
ggactatctgagaatgtgatgatgatgacatgatgcagggttaggttggtcctggaatatgataccgtgagggtctagatgcaatgctcaaggcaattaccatgtgtagtctaatcttcgcatgattcaggtggatgtgagcgttgcggtagttgctcgttttcatatccaactttgcagcttattctctgtcgccgttgtcacatctgagccatccaaatgaaattcatgtaggacagtaggaggcttgcattcagaaactacgtacattactactaccttttcttctcttcttcatggcaaagtgcataggacactctgcccacac

SEQ ID NO: 91913 - DNA, 462 bp, Zea Mays
gtggtgatcactgcaattggtctgtgccaaagggatatacgcaggtgaatctgtttgcaggtcatctcctggatgacttaatgggatcaaattggggccagattgagcatcaggcacagttggcacatcattcatagcacgatcatagtcttcagggggaaggtctactacaacccaccacacaacaacctccatgagttgcaactgggtcttcatagtcgaagtaacataattctcccaatctagttgagaatcaattgggatgactcgtcttatgacatttggtggatgaccaatgttaagcactccgtcaaccgcaatgtcatcatcttcatggtaatctagcttttgtttatcctttgtaaacacatcactcaaggatggtctaccaacgaatagcacggacacgtgtcgcatgtcaatgaacttggcatttccatagggatcttcttccacatcgcc

SEQ ID NO: 91914 - DNA, 790 bp, Zea Mays
agtcaccctaagtcaagtaagcgtgagcatgtcgcaccgacttaagttatcgctgacttaagccgattgctccgttagtaggttatagtggtcaccctaagtcaagtaagcgtgagcatgtcgcaccgacttaagtcgtcgccgacttaagccgattgctccgttagcagggtatagtggtcaccctaagtcaagtaagcgtgagcatgttgcaccgacttaagccgattgctccgttagcagggtatagtggtcactccaagtcaagtaagcatgagcatgttgcaccaacttaagccgattgctccgttagcggggtaaagtggtcaccccaagtcaagtaagcgtgccgatttcaagtcaagcccaatcgaagtcagctgtaagtcaagaatatgaatgtctttggaaaacgaaagctttttgatgatgaagtcttcagattatagagtacaatattccttcaagagtttttgaggccttgctaagcgtagaactttctgaggtgttctatgttccacgagttccccacttatgtgtcgtccatctgagtaagccgatatgatcctggtcgtgtaacctctaatacaatgaacggtccttcccatggtggtgatagcttgtgtcgtccctccccgaccaagtctctcactgcaaaagattgatgtcgcacaactttgtcgtggtagcgcctcaaggtctgctggtacctggccgactgaattactgtgttcaatcgtgcttcctccagcacatcaatgtcttccagcctagttgcttccgctttcgg

SEQ ID NO: 91915 - DNA, 780 bp, Zea Mays
gcgcaggttccgacatttgggcctacgcaagcaaccgctgctggcaatactaattttgtggcggcctcaaccgtagtgcctgccgaggataattaatttgactctgtttctgagtgttttgagtctaatggtgaatctgggagttcgttttcctggatggaggagtcctcggatgaaggcttggattattttgctgcattagatgtggctgcagcggagtctccgccacgtgtggagggtgccggggatcttcctagtgcgagtactgggtataggcggcgaagggtggtgccgaaacaaagtgtgggtgagttttcgcgaagtggtaggcgacatcgtatggggatggagcgtggccgtcttcgggtagaccgggttggtaaatgagaattgttgtcctcgtcgattggggcgagcataggtgagggggatctgcgaaatctttttgagggtgaggagttgaggataatgctgttcaattatagggagatgggtatcatcccgaaggttgagccgatgtaatatatgatgccctcgtcgtgtgtatgtaattgtaatttgtatggtaatgtggcttgttggccgtattcgcacgcctgtgcttgatcaggctgcacctgtgggcgacttttgcgcagggtgtcttttagtgagagacttcgattaacgcacttgtgctattccggctacacccttaggtgacttttgcgtggagtgtctcttaaataaaagacttcgattaacgcacttgttatgctattccggctgcacccttagctg

SEQ ID NO: 91916 - DNA, 299 bp, Zea Mays
gcatgtcatcaaacgacatagtagcatgaccattatacagacagttccaaaacccaacagttaaacaaaaccaccggggaataacccaaaaagccccacagttcaaaagaaagcaaattctcgtcgaccagccactcgacatctgactacttgtcttcatctgcattgtcttctttcttatcattattgtctttcttgtttggctttttggggccgacacatcctaaggaattcttcttcttcttcaactttttgtcagacaaatcttcttctgacatattgcaaaatttagctccaag

SEQ ID NO: 91917 - DNA, 648 bp, Zea Mays
ataactttgggtttatgaagtttgagtctagaaccctatagtaactttgaagatctttgattagtgaacaagttctgttaatagagactaagctgttcttaacaaatatagagagaaacaggtggctgaacaggggtgggtcagttgagtactgtagatccggatgatcaaaaatatctgccactaatcttttcccttgccgtgctccactgttgtacaagattgagataaagatgagggaatagcagggatattcagaaccttggccatcaccgaaatatctaaagtttaggctgaaaaatatctgcttcagtaaaaccttatctgcctaccctctgccgtggtgcactctaccatatccctgccttgctgtgctcaagggtccggcgtggatcttcaggattgagccacgcatccatacccatgcgttcactggcacctccagagcccccctcgctgtaatcccatgaacctagacatcgcttgatcttttccctgcccatttaagagtaaccaaagggggggagaaaggggagtaaaggagagatccctgcctctgtcgtaagccactttgtgtgacttcaaaacagtattgttgccttcgcttctccagactataccctggaaacgcccaagcctctagccaag

SEQ ID NO: 91918 - DNA, 660 bp, Zea Mays
tggagttgtcaaaaatcgacatcgacccctacctggcgctctagctatcggtattaagtaccggcaacacactacgggggtggccccgtagcacttttgtgaggaaggcgatgacgatcgcaactcgatggtacgtgtagaacacatcggagacacaagtgattgtttaggttcgggtcacccggtggcgtaacagcctacgtcctgtggttttctgtctatgtgcgaatgagttctctagaatacggggactatggaggaaaaagatgagttctatggggtgtctaccttgttttcatagggccctctcctcagccttattgtcgactgagttgaggttacaaacaaactaccatgagtccacgatctccatgatccgcttgttctgccactcgtcgcgttgggctatggtcaaatgagtcgtccgttgatttccacacacaacacgtacaggacgcgactggattctcgcatatgcatgcctacaccttcctcggaatccaatgtctcccgtttgaccgaggcccatcggggggcttctgggtggcccatcaacagcctttcggatggcccatgaatgtcttcggaccgtggtgacctaagggatatctatccccaatagccactccgctggagaaatctctccgacagatattgtca

SEQ ID NO: 91919 - DNA, 511 bp, Zea Mays
caataaacaagttttaggaattcttttaatattaaaaatcaatttctgtatctatttacctattttatatgctctctggactgggcctcaaattccagaaaactcaggggctctggtgcaataattccaagactcagtctactgctaaagaggacggcgggtcggtttctggaaagcgcagggattcttttgtaaaacatacccgcgaaggggtacgatgcactctgggccgttggattaaagttctacggttacgattagaccggcttcggaacgaatcggtatccaataggcatcgcacgattagaaatctacggtttggatttaaaatcccctgcgatcgccccgactcgcccgatcgcgatcgaacgatccgcatttaccctggcctgatccgccccctcgatctaacctgcacccttgattgcacaatctacggccaggctctcatccccaaccactcgccacaacagcgaggttgccgcacgcgctacggcggcgctcatcgccg

SEQ ID NO: 91920 - DNA, 377 bp, Zea Mays
ggtttctatccgaattaaggcatggtaatgtgatttcaacgagaataccccgttccgtgttagattctagtaaaacacgtctggtttgttctatagggtaagattaggctgctaacttggggcctacaagatccctgtgccatgataagtttggccgagacgagcaaagtacctcagcgatggatatgttttttggtctggctatgttgtacaaaattgggtactgggtcctcagtgctggggagcctagccaaacatcttcccaaaaacgcacctgtgagccatcctttaccttgaaggagccgaataggagaaagtttcgcttcaccttcataagaccgtacaaaaaatgtgagtccccctgcctccattctact

SEQ ID NO: 91921 - DNA, 277 bp, Zea Mays
tggacttaagcttgctgaaaagctcatccacgatgagagtctcatagttgggcatcaaaatgatcgtacagaccttcaccccccaaaccctccgatctagagcatgtagcaatttcagcgctccctcatgatcgtcatagggaagctatgccttgttggcacacatcttgttcacgatggactggaatcgagagaacatggtatcgatcgtctctccggccaactgaacaaagttctcgtactatcactggtacgtctcaaagagtctagttttcac

SEQ ID NO: 91922 - DNA, 311 bp, Zea Mays
gggccaccgttctggaagaaatagcccgtttcccaacattagccacaacagcaggggcaaaatcttggatacgagacccatccaaccaccgatctgtccaaaataaagtattatatccattaccaaccagggtaacaattgaagaagtaaagaatctcttgacatgttgttgaataggaaattccagactagaccacgacttgagcaggttagaaatcccaagcccaccgagatttaaaggcctggtaacaatgtcccacgaaacaaggcaattaccaccatttacctcctttcttcctttccaaataaat

SEQ ID NO: 91923 - DNA, 535 bp, Zea Mays
gaatgtgccctctctctttcttaaggacataggggtgacatacaaagcacctcgtggagcgagtcccacaggcgaggccctcccagtcccatacgacaacgccttcgggagccctcgcctcctcttggtggcgcaccgacgttctctaggcttcatttcggtacactgactcttctcttacttttgccacagttttcagggccctagacgaagactcaccatcctatatttcgccacagacacatctaacgcaacaaaaaaaatccaaatcatcttccgaggactcttcatccatctttgtgaaggggctcaaccatccttcactacccgacgaccattaagagccctcgtcgctaagccccattggacttcgacaagacaacgatttaacacattcagtagccccaacaatttctttccccttgtctaagaagccaaaatttgcttgcgcaggcccaatcaccggaacctacgcaacaactgactttaagtcttaacaaatatcataagtagtgtcacaccaagcctactccta

SEQ ID NO: 91924 - DNA, 582 bp, Zea Mays
tgattgcttgcaacggagggggcctggagggaactttgaccctgctgactgaaacatgacggagcagaccctactggtttgttgaagcttggtcctttgggaggaaacccaaaagatcaaactctctggtgtctgtcctgctgctgagctcggaggacttgaaactttctcttgaggtgacctttttcttgttctctagccctttccacttgtatggccttgtttgagagatgtgagaagctgagaaaatcttggctggcgaggatagtcttgagttctggtcttagccctttcaagaaacgggccatcttcttggcttctgtgctgacatcgtcaggcgcatagcgagccaattccatgaacttgtggacgtattcactgacagttctccctccttgggttaattcccaaaattcttcttctttgagctagacgatccctaggggcacatgatgctctcggaaggctgcttcaaattttgcccaggtagcatctctgatggcagcgcagaaagtatcccaccaggatagggccatccgagagagttgatgagcggcaagatgaacacgctggttctcaagg

SEQ ID NO: 91925 - DNA, 408 bp, Zea Mays
cccgggtcgaggaacatgcgggatggtcggagcgatcgaaggtaatggcatggtcagacgttgggatcgcttatcggacattaatacctcatgtcgttcgagcttttgtgtccttttgaagcgtagtagtcagacccgccaaagatcactaggcatttcatcagagaatgtggggcccttctctcctgctcttcgttccttcagggtttgaccattttctgggcggtgcctctttacgtaggaacttcctaagcatcttgtagtccctgtagacatgccagactaggtagcgatggttcgggcatgggacctcaagcagtttttcgaagtggtcgatggcctcctcgaccagaggtctccttcctttttggccaactacggccaccagcacttcatcgtgccatctca

SEQ ID NO: 91926 - DNA, 810 bp, Zea Mays
gttgttcttggcaccaagtatgagaaacatcgatatggtattgcaacaaatagtacttgatgggagcctacaaaatgttttccccgattgaattcctttcagaatttcaccattaacaacatgaaaattctgggtccgaactatgtttgtcgtgaagttgcagccctgtcgttaggcccatgccaggacttactttcgtgaactgatttttaggttatcaaaaaatggggtgctccaaataagagaccatatcatgtttatttatgttaaacttattagtgatcagatttctcataacttggatgtatatagaagacacaatagaatgattattagtgagtatcaaattcagatggttattttccacaatactatttgttctggtaagtttttattgcttctttatagaattggttgttcttttcacaagttttgtgttatatttgtgcacctaacaatgctcctttgtttcttcctaaattcttgcgctgttagtgcaagttccaaatccactgttttggcagccatttatatgtgacatcatatagatatatggatatggatggttgcactcccctttccctcttcccctatctcaatacattgatactattagtctgtatcaaacgtgcacaaggaacagcctttcaagtatgctaaattagttaaactgaattaggctcttagtttttgcattttctttttaagcttttaatttttctttgtctcaaggagtgaatatcctacaattgtttgcatatgacatatcgtgtacctttgaactgtcctccgccttattgtatgtttgtt

SEQ ID NO: 91927 - DNA, 288 bp, Zea Mays
ctcacgcttacttaacctagggtgaccactatgccctattaacggagcaatcggcttaagtcggcaataacataaggcgctgtgacatgctcacgcttacttaacctagggtgaccactatgccctattaacggagcaatcggcttaagtcggcaatgacttaaggcggtgtgacatgctcatgcttacttacctcagggtgaccactatgccctattaacggagcaatcagcttaagtcgacaatgacttaaggcggtgtgacatgctcacgcttacttaacccagg

SEQ ID NO: 91928 - DNA, 457 bp, Zea Mays
gcgcgtgcccgcgcccgcgctggtggcttttcagaaagacccttagggttttggctaactagaactgggttcgcttactattttctcgagtcactgacggtttacagaaaaggcccccacgttctaatccttcaccgcccgaggtccacgacaacggcagcgcggaggatgaactccggtgaggttgtgccggtggatttacgcaatgaccggtgctcccgagcgactatcaccgaattgagccttccctgatcgtttcccctaagttaatttcagaaatggtgacctgattcgctctggccacggtaactgcgcggatgaaccaaagaatcatgcgttcccggcgactggcggcggtctagctcaattatatgggtcggcgagcatcgtagacacatgagaatacttaaacggggaagcagaagacatggactgacctagatcgcgctggccgcgg

SEQ ID NO: 91929 - DNA, 441 bp, Zea Mays
cagacatggacgacgggtttaatccctagaaaccgagggactcttttgcattattgcctggccgaagggtattggcgcatgggagccgtccgatcggatcccagcggatgagattagattttataaccttgtcaaccgatacgctgggtgggctgttggatcagcgatccacagtccagatctaatgaacccgtgatctaacccggaccgtcgatcacaaaacagacgaccaccgatcgatcctacccaaccgttaaccttgatctaatccctaccgtatatcacgagatctatggtattgcttcaatgaaacccactcccgatcacggttgttgactccagatcaacggttgtcaataccttcctctacccaggccgagttgtgcgacggcgcttgtgcccacccgacgagggatcgtcggagccttgtgctcacgcgcc

SEQ ID NO: 91930 - DNA, 374 bp, Zea Mays
agttgtcaccactataggaagggtcattcgttgtatcagaggtcactcggccgggatcataccggcttactcaaatagatggcacggaagtggggaattcatggaacatagagcatcttagaaagttttacccttagcaaggcctcaaaagctatcagagcaaccttgtactctgtaattggagagttcgttatcaataaagttttcgttttcaaaggcattcgcactattgactatcagctgacttcgatccaactggacttggaatcaacacgcttactcgacttagggtgaacactataccctactaacggagcaattggcttaagtcggcgacgacttaagacggtgcaacatgctcacgcttactcgac

SEQ ID NO: 91931 - DNA, 464 bp, Zea Mays
ttttggcgccactttgtcaattgggccatttggttttaagtttgggatcaaggtgaacatgtttgatctttggaaagggggtggttttggacttaggagaactctgttttttcctttgtgctcacccccttgggtggatcttttggggtttttctgaatactttttagggtcactttcttactatcatttgtggggtatcaagtgtgctacatcttttataattgacccaagtcatgatcatgtggttttcatacccttttgttcatgcttacttctagtgctccacttgtccaaaaggggtttgaattagggcttgggcaattctccccattatatgtgcataacaagccaaggtatgacttttaaggtgggttgcacttacttaggatcttgagctccatctttggtgtactttttcccaacttaagtcacatgtgatgatggcttacttatgtagtcttga

SEQ ID NO: 91932 - DNA, 862 bp, Zea Mays
ctacgcgcctgatgacgtcaacacaaaagccaagaagatggcccgctttttgaaggggctcagactagaactcaagaccatcctagccagccaagatttcctcagcttctcgcacctctcaaacaaagccatacaagtggaaagggcaagggaagaagagaaaggtcacctcaagaggaaattccaagtccttcgagctcaatagcaagaccggcaccagagaactcgatcctttgggtttccacccaagggaccaagcttcattagactagctggacccactctgtcacgtttaagtcagtagagttagagctcctttcaggccccctcggttgcaagcaaccaaccgccagcaaatgcctgttagcactgcggagaccccagtcacttcaagaacaactgcccctagttgaaggcatcaggacctgcttactccaactcggtgaatggccccaagaatacctcagcacccgcccccaaggcgccctcctccatcagccagcagaacaagacccagtatcaaggaagggcatgagtaaatcatgtcgatgctcaggaagctcagcaagctccgggagtagtgctcggtgagttccttgttgaatttactctcgctactgtactttttgattcaggagcatcccattattttatagccactagttttgtggaaaagcatggcatcccctctacccctctagacattcccttggtcacccgaaccccagggtcagactttctatgccagctcaaatgctcccaagtcagaattcttttaagtggggtagtgttcttggcagacttaaccgtcttgccatcccaaggaattgatgtgatcttaggaatggattggttaaccaag

SEQ ID NO: 91933 - DNA, 820 bp, Zea Mays
ggctacggtagcgagctaagtctggcgagcccgtacctgagccaccactgcaatagagtttaaccaaacaccatgggtagcatcagtgacatacctagattcctatgctcatggaaaaccggccggggacgaagcaagttggtcgggcgatgggggagctgttcacggtgtcagtctgcgacgatgcgctcttgttccagccaaaacatgatagtatcgttagggataacagctaagtgagcttcactaatctaagggggacatggaacaagcacagcacagaccaatacttgcctgagttagcctggccacggcgaggtgacaaattggtaggcgtggtcacaactcataggagtttggcacgtgcagctctggacaaagcacactgatggctggggaaaggagaagctacacgaacctgaaggcacatggaccatctgctgcaaggaacctaggaaagaagttcactgaaccatgtcttttagggcagcttaagtgtggcaggtgtccctagacttgcacaaattcagtgcaaatgtattcccagggtgccagcagtacatgggcatcccatacgtggctttcatgcccaagttcctcacagatgcacagacacacccataacactgaacctagtcagtactttcagcccaaaatatcaacttatccaattactaaaataggaaatagagcagataaggttcactgcccacaaatattcactgtccagtaatacagacagaggaaggacagataaaaaaactccactacggcaggctcaaacacatccaaaggtttgatattttctgcaggaaaaaag

SEQ ID NO: 91934 - DNA, 284 bp, Zea Mays
gatggctcggggcctggatggaggaatggttttatgttaagaataatctgattgagagggaggatattaaggaaattatccagcgccccatctagtctcacttcagcattcgaaggccaaaagtggctattgaaagtgatgtcgaagcgtgtcactactgtgccgaagggcaagaaaataaaggttttaacccaccggcctcgatatattgaaacgtccatagtgcctgaatttggtgaagggacctcctctgctgccgaagcaaaacaagctgcttccgctgc

SEQ ID NO: 91935 - DNA, 370 bp, Zea Mays
gagaacaacatattgaaggaagaactgagcgaagagtgccaaaagaaactgatgttttctacattataaggaaaagaacagttccgagggcatcataagacaaaaggacacttttctcagtagattgtgtgggaccgttagaaaggagcaatggacccaccgcgggcctaacaatgggcctccacacatatcatctaaccgaacatttcttaaagcagtttatttcaatatgactcgagaagaagcaaaactagcatctgacatcattagagcaatccctgatcacatgatatggggagaggtaaccaaagcaagatttgttaggatgtgcctagttcatgaagcggtcaaccgacacactaaactaatc

SEQ ID NO: 91936 - DNA, 780 bp, Zea Mays
ggttcagtgcaccgccgccggtgatcccgcgccgtgatcctcaccggcgctgtgattcgtgcctaatggcgcgtagataatgacttagggtgaaaagatcttgcccagggatgaggtcggggcactgttactgcccagtcgccgtacccacttgcgtcgcgacgtggccggacgatcatcgtcgtggaaatcgtcgttcaccgtgattgcgctatgccatagtcgattcaccacgttgttgcaagccgcaaggactcagtagtaaccatcgtagctcgttaatcagtgaccaccacggtagctcgcgccagtgactcaccccctctctccggtcgctagcgtttcccttccaaattcggagccactgctcaaagcttctataaattgatgccccattctgcttcgcctagttgttacgaacctaggacaccaactctcatctccgattagccaccatagccagagaatttgggttttccccctaattggtcgtctgcaccgccgtgaatcaccctgtcgtggtcagccacctccaggtccgctctcgccctcctcaccctcgtttcagcacccttgcacgctaagaatgcttgtcggctcgaccaattgaactagacagtgcttaattgccaggaacacctcggtttgtcctcggtgttccccgtcgtcgtgggcagaggaactccgggccggattcgtgcaagtgagggatggattagggtcgcaacgggtgggattaggtgttaaccaagtaagggcaccagtcattgcgcatcccgc

SEQ ID NO: 91937 - DNA, 579 bp, Zea Mays
cagggctactctgcaaacgttaccagacacaggctaacccccatatggacggcgggtttatttcaaataagcgcaggggctcttatgtaaaagaggttctgtgaaggggtatggggcactgtgagccgttcgatccactacggacggcatagattagaagctatcaatacagaaccggtacacattattaaccgctggatcccgaaccgagcgcacggatttaatgagatctagatctagcgctgaccgtcgattgaccgaccgatggttacgatcaaatcacgtgcagagttgagcggcgtctaatctacaccgtccaaacccggatggacggaccggaaacccccttcttcttcccccggccaacagcggtggcgccgcccgaagcgcagcggcccatggccggagttccttcaatcccgcgctgcagtttcccaaaccccaattggatagagctacgcataaaggagacggtggcgaacgtgggcaacagagactcaccggtggttacgaagtgcagatcgcaggccatggcgtgctgcggatccacagcgcatcccgatgtccggcgaggaattc

SEQ ID NO: 91938 - DNA, 380 bp, Zea Mays
ggccgacctgctacctgaagcagtctgggcgctgaacacgaccgagtgccgggcgactggattcactccctttcgcttgctatacgaatcagaggccatgaccccgcaggaaataaaacatgggtcacctcggacaagcgcttcagccgtccccgacgtagacaaaccaacctccaaatacctcctcgacagagaccatgtcttcgccctgcaggccctcaacaaataccaagctcaaacaaaggcctggcgcgaccacgcagtcgtcccaagagaactcgacgaaggggacctcgtactcgtccgaacaacccggacagagtcacggggcaagctagagccaaagtgggagagcccattcatcatcaagacgaaggcgt

SEQ ID NO: 91939 - DNA, 723 bp, Zea Mays
gttaaccaatccattcctaagatcacatcaattccttgggatggcaagtcggttaagtctgctaagaacactaccccacttaaaagaattctgacttgtgagcatttgagctggcatagaaggtctgaccctggggttcggatgaccaagggaatttctaggtgggtagagggaatgccatgcttttccacaaaactagtggctataaaagaatgggatgctcctgaatcaaaaagtacagtagtgggagtaaattcaacaaggaactcaccgagcactacttccggagcttgctgagcctcgtgagcatcgacgtggtttactcgtgcccttccttgatattgggtcttgttctgttggctgatggaggagggcgccttgggggcgggtgctgaggtattcttggggccattcaccgagttggagtaagcaggtcctgatgacttcaactgggggcagttgttcttgaagtgactggggtctctgcagtgccaacaagcatttgctggtggttggttgcttgcaactgagggggcctaaaaggagctctgactctgctgactgaaatgtgacggagtgggtccagctggtctgttgaagcttggtcccttgggtggaaacccaaaggatcgagttctctggtgccggtcttgttgctgagctcagaggacttggaatttcctcttgaggtgacctttttcttcttcccttgccctatccact

SEQ ID NO: 91940 - DNA, 311 bp, Zea Mays
gcgaggccctcgccgtggtctatgaacggcatcgccggggctcctggctgtgaaaggagatgaaaggggaatcacgcctcaccattggatatggagcaagtggtgagattagaggaagtgtaccgcttcggccagattcgttatgggccgttgatggcgtgataatgcaatcgcagattagatcaaggcgtggggcggtgctgaccgttgatcttttctcggacgactacaattatgttagggcaatacctgttcgtggatgcgtctgttccatccgatttgggcgtggcgtgtgttgggccgtcgatcgt

SEQ ID NO: 91941 - DNA, 457 bp, Zea Mays
gttgcaccgtcttaagtcatcgtcgacttaagtcgattgctccgttagtagggtatagtggtcaccctaagtggagtaagcgcgagcatgttgcaccgtcttaagtcgtcgcctacttaagccaattgctctgttagtagggtatagtggtcaccctaagtcaagtaagtatgttgattccaagtctaatcaaatcgaagtcaattgataaccaatagtttgagtgcctttgagaatgaaatcttttattgatgacgtattttccaattacagagtacaacgttgatccgatagcttttgaggtcttgctaagggtaaaactttctaagatgctctatgttccatgagttccccacttccataccatccatttgagtaagccgatatgatcctggccgagtgacctccgacacaatgaatggcccttcccatagtggtgacaacttgtgccgtcctt

SEQ ID NO: 91942 - DNA, 543 bp, Zea Mays
cacagccgcccgatcggccatgaacgacgccgattagatcatcactttaaccaaacggtacaaaatatgggtcattggatacaagatctacggcgtaggtttcaaataagcacgatctaatctccttcgctcgatctagagtcagcggccaggatttacgcggaagggtacgcgacttctaatccgggtcgtctagacgccatccaacgaccacggtgccaccagccaccccctcctccaaccctgccgatagcaggcggcggtgccataacttcccacgacggagcatcagcggagcatggctattcgatgccccggtgccttattcaaaaattagctagttgctatacatagtagggagagtggtgggttccagggaagtgatcacattacgaatcggctcgcgatgacgccgagccacagtgaggcgcggatctatggcgtgagaaacaacgacaagcaatcgtcgacgccccgacaccctaatccgagcacaattcggcgcgaattgaaccaaagaaggtatctaagagaaggagggcc

SEQ ID NO: 91943 - DNA, 503 bp, Zea Mays
cattgtcgttattacagctagccttttcagagcctatacatagcctttttttagagcctatacatagcctttttcagagcctatacatagtctttttcagagcctatacaatacctctcctttcgtcccgcctttcgtctatatatacacgatcctttgtacatttgcttcattctgcaatagaaatgtcttccgggtcttctaggggcaaaggtgtgggaaatgagcgacgaaaggatggagggaagttacctcccatctgtttcgatggccctcttggtccagattattttgaggaggcggttttccactttccagttcaaagtaaaagagatttcaacaaagaggttagacttaggtcttacgataacaagagagaagattggccgaagtgcatgcatggtgaggattgcttggtgcagatgttcgtcgaggggggcattgatggaggccggtgtttcttcagatgtccttatgcatatgtaaatattcattctaatcct

SEQ ID NO: 91944 - DNA, 389 bp, Zea Mays
caccctcaccaattaaatcgcgaagcacgattaaccaaaacaaactagaccgacagactcatgtttcaccacaggcaacttgaccatccaaatgtatatcatacttgaaacatgattgtcacagatgaatagatgatacagctgaaagcatataggtcttttaactagtctagagaagtaggcagacagcactgccaatttcagtgcaacacaataaatagcagccaaccagacagacagtcacagtacatgttctagagctctgcttctaaacaagcaaattaacctccaaaattcagaagaatggtttcgtttggcgtggacatcaaatgcaccagatagtataaggcttctagcaaaatggcacagcacatttaattacactcatg

SEQ ID NO: 91945 - DNA, 411 bp, Zea Mays
aggacacaaatgcaacggcatcatagctcgatcgtgcatactctcccaggttcgtcatcaagccctaggtccactgtcgagcatgaaacggtaagttaccatgtattttgaacgcaacgttgaagcaagaacatggtttcgctggaacccacatccaaataaaggaaatgtcctcagtgaaatctcactacatgtcgttgataaacctagatgtagatgtcctcgatatttaaaggaatataaattgactaggtagatgtccgtgcgttgcaacggtatacaaaatattcaacaaaatgttagtgcataaaaaagaacacatatttcaattgcaccaaaaacgatacattccccgcttgcaaggttagggccgtattttcttcctactttgcacctcagcgaacagtaaaa

SEQ ID NO: 91946 - DNA, 680 bp, Zea Mays
tgctgaggatggccggcaacagtgatgaagtggctggtacaaatactcggcggccatggagaatgagatcatccttcacctgccatggggcggtcagagtaccctctctgatctgattgcagaggcgctgaaattctggatcagaggcgcacactcttgtcgtagatcctcatataactggaaggtggggctggacactgcgttgagcaggccgtctgctgtgttgcgacgagacagggcgtctgcaactgtgtttcactggcctgccctgtattccactgtgcaatcaaatcctaacagtttgctgacccactgatgttgaggtactgtggacagtcgttgatcaagcatgaacttcagactatagtggtctgtgcgcaccacgaaccgtcgaccccagaggtaaggtcgccaatgacgaacggcctgaaccaagccaatgagctcgcgttcatatgcggtgagcttgatatgccatgctgcaaacgacctactgaagaaagccaccggacctgctccttgatgcaaaaccgccccaaagcctgatcctgaagcatcacaatcaaccatgaacagttgttcaaaatttggtaattgcagaactggtgctgtggacagagcttgtttgagttcctgaaatgctgtattagctgcagcccccacgtgaagccctccttcag

SEQ ID NO: 91947 - DNA, 513 bp, Zea Mays
tattgctgcattcactattttgatttcatcaagagtaccctttagggctggatcggtgtcaggattgtatggctctagaggaggagagagttcagctacaccaaaatataagtttttgtcagatacgaagctaaaacatgacaaacgtacctatacgtctttcacgctcagcaaattctttagcttttctcgcttcttatgaggcaagatgagattcttcttcactttgcctgatagcttcgtctgctatctcttggtcgccgttcatccaaacttcagaataaaatttcccactaagagcagtagcttcaactaaaggttctttaatgtcattcgctgaaactgagaagtctggttgaattacagccttcacatgttcacagacaactttttcaagcagagatatagccccccgagcggctacacaggcaaaaaaatcccccttgctagtaagaacttcgtaaaatgcttcaatttcaccctcaatccatttgatcacaccctcgagatcac

SEQ ID NO: 91948 - DNA, 658 bp, Zea Mays
actttcaaagatcagccttggcgccccaaacttgagatcagcgggcagcaccgcctccgtcccatagaccatgaagaaaggagtgtttccatgcagagctcggctaggttgggttcttaggctccaaacaacatagggtaattcccttatccactttcctgcgaatttttcattcttatcgaaaatctttttcctgagtgcatccaatatcatcccgttggctcgctcaacttgcccgttggctctcggatgggctacagatgcatacttgatctgaatgctcttttgctcgcagaagtcaaagaattctgaactcgtgaagttggatcctaaatccgttatgatgctgtttggtatcccgaatctgaatattatgtcttgtatgaattccacggccttagcagaggttaaggaggcaatgggcttgaattctatccatttagtgaacttgtcaattgctaccaatacatgagtgtatcccccttgagctttcttgaaaggtccaatcatatccagtccccagcatgcgaaaggccaagttactagtatggtctgcagttgccgtgctggcatgtgttgttgctttgacaagtattggcaggcctcgcaccttcgaactaactcggctgcatcgttctttgctgttggccaatagaat

SEQ ID NO: 91949 - DNA, 511 bp, Zea Mays
gacagagcaccattggattgagtatgggcgtgtaggattagatggtgcggtgagtgatggcttgccgtcgtggatgactgggctcgtcgtgtcgtcacagttctcgaccggagttgaggagagagagtgacgagggtagaagaagcgctctgcacgggagcgccgccgccttgtgcctgtgcgctggagggtggtgaagacactgtcctagacgttgctgccgtgttgggtggttgggaggaatgggcgctagaaaccgtagggattgaatccaaaggccaggcgtggatcgcgattcataaaaccttaaccgtcgatctcagatcttgcgatccttaacgcgtaccggttcagataagtggcagtctaatctagaccgcagggagtagatcggacggcccgagatgcttcataccctttcgcgaatgcatatttttataagagcccctgcattttctagaaaataacccgccgtccaccatagctttggactgagtctatggaatcttgc

SEQ ID NO: 91950 - DNA, 414 bp, Zea Mays
tctgcaccgcacagaggatccaccggagaaaaagctttccttggaaatctccaggaaagccaaaacaagacagcggacagcgcaacctcctgcgccccagacgaagactatttcttgcaagtcgagagccgggaattcacttgcccgaagaactctgttgtccacttcgcccacaaaggagtggacacggattacaagaaataaagaagcaagcgttcctggaaagggaacggagctctgtcgagctatctttccggcaccttcgccctcaaagaagggcggaagggaactcgccaccactgcaactcctttctaccctgacatcctcttcatcggggggagattggagtcgtctcccatctccgacgacgagccaaccatgccaggggaagaacctccctagcgagaagctcg

SEQ ID NO: 91951 - DNA, 728 bp, Zea Mays
attcccatgtctccctaggtttttgtttacatgcaagactccagttaacctgaggtggttttttttgcattgatgtcaacccctctccataagcagtgctttctgtacttttgtccatttgtttgattacagacctagggagcctgagagagcacatgaagaaagtgggaagtcacaagaacaccgagttgaccatttgtaacatgcccgcctatgacaggaacaaggaagttgaagacaaccattttttttgtttttctggacaagggtaggaaaggttccagggtaggcctagttaaacccattggtaatcccaagtacgcgaagtgaaaggtcctaatttgacactgaaatggccaaaacttccatattttgtgctaacacgtttagggaatatatgttggacttaagataattgacgcgcagaccagtagatttagcaaaagagtttaagattgccttcgggaagaatagtttcttctgacatgcttccaagaccagtacggtgtcatctgtatattggatgatcaggaagtcttgcccacatctttgttggagaagaaaccttagaatacctagcactttcgacctgttgactattatttggagtaggtcagcagccaacaaaaaaaggagcgaggagaggggtgaccttgtctgacccttctcttgcaatggaatggttacctagggcaccattcaaaagcactgcaaatgtaccggaattc

SEQ ID NO: 91952 - DNA, 1039 bp, Zea Mays
ggccgacagaggacgcgatgtacagagtcatggcggacgtggtggactcagcttctagggcgagctcctcgagaagtagctcgttgcggacgtcgtggaaggaggggaagggctcaaagtgcttgatgaaggctttcagatgtttgtagcgtcgctgagactacacagaaggttgaggacaagcgtgcgatcagagacgggctccctgagatcccgaagagagtccaccatgcccttcattcgacggtagtactcattcacgaagaggtccccctaggagaagagccggaaggaggcatcgaggtggtgagggtgggcctctcggttgcagaggaactaagccttgagagcaacccatgcctggcgagcgggtgcccccccgcaagcggacgacatcctaaagctcaacggtgagggtgccaggatccacgagagcatcacaatattcattcggtgccaggacaggagcaggtggggagtggcgttggtgacgacgtggtcattgagggtgtagcgttgaacagtgaggagcacctggtcgcaccagcgggtgtagtgagcggacacggggtcgaggacgacggagacgagtgcctggatgttcaggacacccgctacatgagcgtggaggttggtgatgactgcgacctcgaactccgaaggaagtggtggctgtggggccgtcggaggaggctcgacgacaaaggagccgagaaggtgaagtttcgcctcaaccagctaggaagcgagggcatctgtcgtggtacgcttgtgctcccaggccacaacgactttgacaacagtgagtgccacgactaaggtggattgagctctggcgatgtcggaggaggaccgagcccacgtagttgcagccttgtaggagcagcagggagggatgaggcggggttggaggtagcttgcaccctgatcgacgcgccgacgacaggaacgatatccggcacgggtgctgtagacaaagggtcggccgacaagtcgcctgcggacaaactggcggtgggaaggctagtagtgagggcac

SEQ ID NO: 91953 - DNA, 607 bp, Zea Mays
gcttccccctctctgttcttctcatctatctctgtttctttctcaagagaagttcacctcccacacccctctctaaattcaaatcttgtgaaatcgtgtgagatctgtgtgtgaaaatgtatccactatcctctagtgagtttcccctgtaggtgttgagctccatagggagggtttcgcacttaaaacaaccatttcaccgcctctcaaaaacctcgcacaccaagtgttcggtcaaatgcataaaccagccaaataagctcaaatcgaccccaactttttctagcacactctagctactatcagtaccttacatgccaaatttcacacctattcaatactccaagcacctattacacaacctattcatctttatggtgatccttttcgagctgagtgccaaaattatttttcctcagccaaacttcaaaccaagcactcacttcacttattctcatacctatttacctatcagtgctgtatcagctcatttttctagtcatttcatgccccgtttcgaattctctatgacacaattcatcgttcaaacgtcgttctccccccgtttgacctctgttttttccaaaactctcagtttttgtgtcat

SEQ ID NO: 91954 - DNA, 608 bp, Zea Mays
gtgatgtgtgagcacgaagcagagtacgcgatggcaacggtcgacggaggatgcaacgtagttgatgcgggagcagacgtttacgtactccctctagtcctccttgagcagcaggtgggcttagatgtggagcgtcatgtggattcgacaataggtcgggggaggaagaaggtctggcctcagggtggtagtagattcggttggagtggacgaaagtgaaggtttaggtgcggagatgagagagtactcataggcatattgagtgctaggggtggcttctattttgcacttcaggatagggggcctgctggagctatgaacagttcatcgggctgcagaaaaagggatagagagcgtgatagggaggctgctcaagttggtcataactgtggatttattatattaattaaggatatacttttacagtaaatctatgacacatgcacatattgatatgtttttatataaagttggtcaaatataagaaaacttgtctagaacaacaacggtcagatgtaacattctttgggtcactagatgtcgctttgaatgagacctaaaggcctgtggaccaactcgcaaccagaactatacatattgtcgtctac

SEQ ID NO: 91955 - DNA, 564 bp, Zea Mays
atgttattttttgttggctgtcttttaataactacaaaagtatttagtcaagagactatgcaaatggattgtacatatttttgggcggtctgatgggtggaaacgagccccctataatcattttgcattagagctgaatgtattgagtcttattgatggtttgaagataaaaaatcatagtctataagacacgatctaaaatcatttagtgttgacttgctagactcgatgtcacaggctgtgcccctgcgcttggtctcagcccacgtggccacgtgcagtagttttgggatgacttgtttcagtatatgaggtggaaccatttcatgttcaaagtctaagaaatttcattctctatcaacactacaaaagtggttttgtcttatataataggatccatattgatagggaacgagaccttaagttggtgatagttaaaaaatatcaaatacttatgaaatgtttattatatcttttaaattgaaaaacatcatagcgcatcggttcaatcttccctatatgtttcagattgaattagaaggaaggtcatatgcagcactaggc

SEQ ID NO: 91956 - DNA, 665 bp, Zea Mays
gtcaggacccaacatttggcgcccaccattttcgcttcgaagacgaaacccatgatggctcctaggaaaccaaacactagggccaactcctccctaggatgaagtcgtaaaggcagtcctcgtcgctaacaccaagaaagctaaggtcgcaatcaccaatgaagtcttgccaccctagaaaaaactgccccctccattgtcaatgaactagaaggtgacaccaatcatttccactgcaaagagcaactcactccataggtaagtgtccacacctgtagcttagagaccccaagtcatgcccctttcaacccataaagccacccttaccatgccaaacttgcctgacctaacaagaaacatgccttctaccccttggcttcgcactcctagagcacaaccaacacccctcgatgaatatacccccaaatgaggaagacaaagacatttttcgagacaatgaagcctcgatgtcaacaccaaagaccaactactcctcaagagtctctgcatgtgcaacaaaaacctgcaaacacaagaagagaccttagcagccaagagaaagcatagcaaaatccaagccaagatacaccacctcataggaggaaagagaacgatccagagcccttgaacaagaaattgcacacctgcaaagtcaacaatttgcc

SEQ ID NO: 91957 - DNA, 480 bp, Zea Mays
gacgtttgggcctgcgcaagcaaccactgctgacaatactggttttgtggcggcctcaagcgtagtgcctgctgatgatagtttgtttggctttgtgtctgagtgttttgagtctgatggtgaatctgggagttcgtttccttggacggaggagtcctcagatgaaggtttggattattttgttgcgttggatgtagctgcggcggagacttcgccgcgtgtggagggtgtcggggatcttgctagtgcgagtactgggtatatgcggcgaagggtggtgggaaaacgtagtgtgggtgaatttttgcgaagtggtaggcaccgtcgtatggggatggagcgtggccgtctccgagtagaccgggttggtaaacgagaattgttgtcctcgccgattggggcgagcataggcgagggggatcttcgggatctttttaagggtgaggaattgaggataatgttgttcaattacagggagat

SEQ ID NO: 91958 - DNA, 341 bp, Zea Mays
agccgcctaaaaatgagtcacgccatttcgcgtaatggcaccggttggactcaagtcaactgctcaggcaaatgattatacccctccgtcacatcaaattaatacatcaggacaacacgataaacacctttcgcggggcagaaacccattgggtgtatcgcccggaatctgcaagattttctgaagaggtgatacccacaaaatatacgcaatgaatgtaccgcgacaaaaagaggagatcagctgaaacgggaggaagtccaaatgtggttactaaagcgcaagtccaatcaacagaagcattaaagtacagggcggagtggtgtctagccaaaggccct

SEQ ID NO: 91959 - DNA, 298 bp, Zea Mays
gtggttcctctcgcacttcagggtagattgatactagaggaccattcgagagagggaaataaacgttgattacatgtcagtcatgctacaacagctccccacgataggtgatgccaggtcagtcgatgatattccatctattaaaatttcttttgataatcagattaaaagtatcacggaggatatagaaaggatggcgcatgcattaggaaaaattcacatgactaattttttattacataaattaggcgccaaaacgattgcgccaaacacatcggcaacaaatgggtttccccag

SEQ ID NO: 91960 - DNA, 695 bp, Zea Mays
gtgacgtgagctgtagatggtgcaactctgccatgagggcgatggggaggatctgatgtgccgtagcacaagctgtggagccttgtcatcgactcaggaaatccaaagagttgtctgatctgagtggcatgcagagtgacatcctcgcgctcaaagcggaacctcaaccactgatgatcagggtctatccaaactgtggcatagaaaactctgacccactcctcaatgtatctgccactagaggtcagaagggaaagcaaacctggcagataagagaggtgaccctctggctcggcaccgatggctgacagaaacgtagggagatccaaaagccggtgcgccctcaaagcaatctgagctgacaactgcgccctcaaagcaatctgagctgacaactaagtcctggtgctgaagagcggcgcagctgctgggtccctctaggctggcaaccaagactccacggctacgtgtctgaaccggcatacgcgggcagcaatggctcgctgaagatcaagcagtcgcggatcagcagcaagcggtctcacctcggtctcgtcacgctccctgaagcgaggtggaggaatgggtggaacggaagcgggagcaggagcagtggaagctggagtagtggaggtggtggacacaacaggcgtggtggatggctcaggagcgacaggagctggcgaagtgggagg

SEQ ID NO: 91961 - DNA, 589 bp, Zea Mays
gttgtggcagatgccttgagcagaaaggcccagtgcaattgtatgagcatggatgcaagagttaccaccctgtgtgatgagttatgcaagctgaacctggaagttgtttcttcaggtgccttaagttacatctcggtggagcccaccttacaagagcaaatagtccgagcacagatttaagacaagggtgttcaggttatcaaggaaatgatcaagcagaaagcagaaaaatacaagtgcttccgtcaggacagcaagggaattctatggtttggagattgattggttgttcccaaggaccctgagctcagaaagaagatattggatgaagctcacctttcaaaattctccatgcaccccgacagcaacaagatgtatcatgatctcagatccttatactggtggaccagaatgaagagggagattgccaagtacatatccgagtgtgacacctgccagaggatcaaagccagtcatttgaaggcagcaggccctttgcaaccccttcccataccatcttggaaatgggaggacatttgcatggactttatcgtgggattgcccaatacctcccggcaccatgattcca

SEQ ID NO: 91962 - DNA, 503 bp, Zea Mays
gcttatagaacgtctgcagagagaagatatcaccttagttaccgttgtgttctctatacttctatgatatttatttacctgagaaacgacatatggcattgcagagtacatcccaacagcagctctctctctgtagaagaccgtcctctcaattgaaacaattggctgcacagttgaacaattgttgatgccgacaaacatcacaattgtgtacattaatccaataaccattctgagagtggttgcatctcccttgcaatagaatacaccaagtcaccaacactttcagattcggaaggttggcaccagcgaccaaaatgaagaaagtaagaaaatttacattgtggtgcctatcctctagaaaatggagtcgagcagcaaggcaactacaaagtgaagtaaaatctaacaaggtcaaggttgtaatctggactacgccaataggccagccattgcttccaaaggcaggctttgaactatcccattgaattccaaggaattag

SEQ ID NO: 91963 - DNA, 847 bp, Zea Mays
tgtgaatgctttccacaaaattccaaatccccaaaacaacaaccggatgagggaaaaaacaaaaagaacaacctccaacttctcttctttgcaaaccgggtatcacatccacgtatcgacaaaacagcccacgcaatcacgccctatagacgtgaaggcacgaactgggtgaaccgcagttcagcgttctacaactccctcaggaatcgaaagaacaaatgttgcaagcctctcaaggctcacgcataaacaaaactctacgagtttgtgtattctgaattcaaaaacataagatatgtcctttcattgcctagtacaaggtatatatagagataggggcgttcagctttgattaaatggttggatgtgcatgctctagtggatttagtggctggttcgcgtgtctttttagcttctggcagcagttactaaaatgagcataactccttattgggacgtccaaataatgaaccgtttgacgggctgaaaagtagaattgaagacgcttccatccacttatagaacaccgtctaactccttgtattctgtccgtagtgatgcttggaatttgtaccacgtgtcagtcatctagcttctggttgcattcccatgctaaggtgatgaaccaccattttattcatgcacaccataggcttcttggttcagatgtccagaggcttgaatccatcttgatcccatgcttgttcatacactccatcattcctgaggacattgaaacaagaactcaaaagcataggctcattcaacatagactgattattaaacataaggttagcgttcacctgagaatgaatttccttctgcaattgtttagctctactccttg

SEQ ID NO: 91964 - DNA, 756 bp, Zea Mays
gtatagggttcacaatttagggttcagggttcagggttcgggctttagggtttggggctctgtgtttagagtttaggcttttggggttcgaggtttaggatttcaatttgagttttaggatttgaagtttggtgtttaggatatggagtttaggatttggagtttaggatttgaggttttgtgttttgggggttgggttttagttttagggttcggggttccggattcatggtttagggtttgggtctcggggtttaggattttggggttcgaggtttagtgtgctatagctcactggatgctaaaaacatccttacctgtttcagtggccaaaacatgggtggtggacgggaggaatgaaattgttgttcgacgatgaaaacatgtgtcgcgggaggccaaaaatagccttaccggcctccggggccaaatgcgtgtacaatggttcggacactagtgtactatggtttggacactaaattggttgttcggccatgaaaacatgtgttgtagctcacgcgaggccaaaacagccttactttactttttagggtttggagtttggggtttagagttttgtgttttggtggtcgggtctttgttttagggttcgaggtatagggttcacaaattagggtttggggttcaatgttcaggctttagggtttggggctcggggtttagagattaggcttttgggattcgagatttcgggttttgatttgagggttagggtttggggtttaatgtttaggg

SEQ ID NO: 91965 - DNA, 708 bp, Zea Mays
cgaacgggcacgagctagtacgcgcgcgaacgaaaatacaagcaagtttgtattattgctagctgatgtagtcttctccgtgacgaagtggcgttccaggattgccgtgtgtgaccaggccagcagctatcttgcgacatttttttttttaattttgaactcaaagtgtggctaacagctgcaccacaattaaagtttcccggtggctgcgcggcggtacagtagttaagtaattaaccgacgacggtttgcctagttcagacagagaggtgtataaaagttgcacgctttcagctggttagcccgccagttgcattgcctacctgtgtgccaagttgattttgatggacacgtacgtacgtacacgtgggagatatgtacgtcggcggtcatgacaagcagtcaggtaggttaaaatctagacgagcgagctgagatagaggccaccaaagtgagatatacgcgacagtgagatagagaccgcgacggctgcgacccgactgcatccaatccggagcaatggatcgcgtctaggtcgaccgcgcacgcacctcgacctcgacctcgacctcgacctcgacggataagcctagagctagcgatgatccagagatgccactgtctctgtctgccgccggggagacgaagtcggcgattggatgggctttgagcatgcactgcatgagaagtttcttgcggcgattggtc

SEQ ID NO: 91966 - DNA, 337 bp, Zea Mays
gttgttgatgaaaatgacagggacgaagaagatgaggtccctctgacccggaagaacagtcgacggtatattgccagtggggagagtagtggggttccttctcctgctttgtcagccctcgttggcctacaggagttatctctggcaaactttgatcagaccctggaggatatggttccagaggaccttttgttagagccagcggatgatgatgtgatggaggtttgtgctgatgtgcttgatgctgggttgaggtcatctcgcgcctcatcgaccttagagcgcggtcttgagggccaggagactgatttggatcgtctcggtcccatggaagcaa

SEQ ID NO: 91967 - DNA, 1049 bp, Zea Mays
cggtaacttagtagtcatggcaaagtctttcatcatggcagtctgaagtgtggcccaaacctagtattcgtcacttcgggcaaggactattaattcatggccgaagctcatagaaatgcttcttaccagtttctagggctttcagtccaaacccatcactccacaagccttgtttcaatgcaccaaggagctagatgagtaccttcagtcatttgtcaaaaggttctggtttcggactcaggccccagcagttcaggatgacattgtcatcgagctatggtcaaggggctcaggccaggaccaactgcgcggtattttgcaaggaagcctcctcattcccttgaaaattactatagaaaatggacgagtacataagggctgatgatgatttctgccaaagaaaggaagaattccacagatacaccgaagtcgccaggggctttagaggaagttttcatccaaggcatgtccgaagaattcataaaccatcgatgacgaaaggatggcccaatcttagggccagttaggacagcagcaggcaaattctcagcagcaaccctcacatagcacatttcgtccacctgctctgagaggaaggggaggccaaagctttggtggcagattcagtgcacccccaaggaaaccattctgcttgttttgtggtgaggacaagggccacactataagaacatttcacgataccatcaacaagtagaaatagcttgattcgtcaagtacgcaacctttacagtcaaaagaggtgttcagtacatcttcatattgttcaccctacatcctgcaatacgtccaaactcagtcgcaagagctaaggaagagtctgcctttgacctcaaatgcctcaagtaacctagtaatgagtgcatggtcaccagttgcctcctttgtcctaggaccacctccttatgatcaagtccctgctaaccaacccaagtcccaaggttagacctacaccaaagggacagaagggagggatctgaaacccgtactgtcaacagtatggtctcagaggcaaagcacatatattgagg

SEQ ID NO: 91968 - DNA, 709 bp, Zea Mays
gcctctgtaactacttcatttgggactgttagtgcttgagctcgaagtcggaggaatctttagacataagcttgcaggtattcatcatgatcttgtgtacattagaatagagcctgagcggtgacaggcttcatctagaaaccatgaaagcttgtgatcaacatgtccttcaatttctaccaagaggttattgtccctcgcttaagagaagaataccatgtctgagcaacactcctgaccaccatgacaaacgatttggacatgacagctgtgctgccaccgtaatatgatattgttgctttgtagttcatcatgaattgctttgggttagaatgaccatcatacatggacaattgaggtggtttgtatgaaggtggtcaaggtagtgtctgcaactccacatctagggaggaagcatcatcatagagaaaatcattgtgattgaatgcttcgtaccgaagattgtcttggttgtggtcttcattccgaagatcccgatattggtactgatgttctagctcaatgttgcacatttctttggttgtgtcatcaatcttctcatgtaactctgagagacgaagcagcttttctttatgttttccacttgttgatggatgacctctaggttttgtatttcttgatcaagtggtttgtcttcttgagtcaaactgactgccttcctcttttgattgcatgcctactacaacgc

SEQ ID NO: 91969 - DNA, 696 bp, Zea Mays
ctctttttgactctggcgcgagctattcgtttgtttcggagaattttgtgtcgtgggctggtctttcggtgcagaggttgggtcacccaattgtggttagttctgctaatggctccattagtagatgttcagtttgtcagggttgttccgtcattcttgctgatgaggtcttttcagctaatcttgttgtgatttccttgggggcatttgaggttatcctggatatggattggttatctcagtatcgcgtagttatatccagtttttggaagacaatgttattgcaggcgccatcgggtagggaggtggtattcttgggaagttctccaaagttcacgttatccttattgtcgcaattgcttctggatcgtcggtcaaggaagtcaggaattcttttctccatggtggtggagggtgagaatgccttgcgggtgcaggacatccgtgtggtgtgtgactttgctgacgtgtttccaacagagcttctaggcattcctccggagcgtggtgcagcttttgaaatcaaactgattctgggtatgcagcctattcataaggcttcgtatcagatggctccaaaggagcaggttgaattgaagtggcaattggaggatctgctggctaagggtttcattaggcctagcaggtcaccatgggcttccccggtattgtttgttgagaagaaggataaaagca

SEQ ID NO: 91970 - DNA, 273 bp, Zea Mays
ctagcagtagcttctagctagttctaatttttgaactctcccatctctcaaaagtcatcatcaaactctcctaggatattgagtgcctccccttatccaccatcgttgccaccatcaggttcatcttcacaatctgtgatttctgcatcatgtggatcattttcttcctattcagcctctgacacattttgtgcagctgcagcaccagaatttcttcttgaatacacattatgggctcttcttggaaagtttcggccacaaagtgcttttgat

SEQ ID NO: 91971 - DNA, 400 bp, Zea Mays
atgtcgaagacatgagccgtgcaagtggtgaagctgaagatggcgagctcaagaaggtggtcaggatccgtaaaccaaacgtgcgcgtgggtggtccggagtgggtaagggcgtagaagtctggtcaggtcaccaacagaaaggttgtatgtgtgagtggttgagtcatgtaatggcttagttaaaaagaggaaagcgtggagaagaagggtatcaattgtaacagaattttgtttccctacgaaaatactcaaccacttcgcccattctctcttgttctctgctatttctgctctcttgttcttgctggagattggcagttaacagacagacatgtcgaccccaccgccgtccatcgccgccgtgtgggactggcggactgcgattgctgaaccgggca

SEQ ID NO: 91972 - DNA, 504 bp, Zea Mays
aacgatgacatttagggctttcataactttcttggtggatctcagacttaaatcattcatctccagttcaactcccacccctgcaatgtggcaactgcaatgtgcgatggtaccatgtgtttgatggactttagccttccgggggaattagatggagctaggagaatccagtggtggaaaatttccagtgatcagttgcaaggagttgccaaaaaaaggtctaaattctcttattattctttggtttggatactttggaatcatatagaaatgattgtgttttaagcagtgttatcctaaacggtcatttagaccgtttacatgccgtttaaacactacttagtagctaactgtgttggccattaatgcggtttaattcgtttaatcccatataattcgttttagtctgttgaaatgcctgtgtagtccaattaaacgctaaacagaggatgaccgattgtttaccgtttagcgttaaggataacactggtttttagaaagttc

SEQ ID NO: 91973 - DNA, 495 bp, Zea Mays
gttttttttgttctatttgttatgttcagtagaaaaatagaataaaatagtatagcacgtgtatataaattaaaacatgtataaatccaaccgcaatttatgagaaaattgtaaagcacattaagattctatttctttctctgcttccacctatctgtttctgcgcgcacaatgcaccaaatccactttttcattttctattgagccgcatgggccaccattttcggatcctattgttgcagtggccgcatgcaaccgctttgaccacgacctctaatggcgcaggaaacatgcaaggctcaactgctctctcggcctttgttgaccactgcatgcatgatggccactgcatgcacacaccacacggtagtgagctcatccatgcaacgacatttctgcatgcgcattgatggtgctcatacgagcgcaacatcacttgtttgaccggtggataaaaagggagagggcctggtcaacaagaccaggagaccggag

SEQ ID NO: 91974 - DNA, 428 bp, Zea Mays
ctttttttgtgtttatgtggaaacctgcaacatttttctttgcaatagaaatttgaatcatattaaccattttgtgtagcttattgctgctgttttcatagagtatgatcttgagtgcctccttgcctattcatgactaaacttgactgtgttgttcatgttactattgcattgattacatacaaagacattatttattgattattagaagtattagtgcttactggaatacaaaaacagaaaacaacccatccttatgtctttgtatgtcttgcaatttatttggatgactagcatttgtagatagatgtggccagagttgattgtgtaagtaccttgttatactaatgttgcagattgttatttttcgaggtcatattacacaggagttgcagattcgattcaccccccttaagaaaacatctttg

SEQ ID NO: 91975 - DNA, 390 bp, Zea Mays
tagcctttcacgtccggggctcgcgggagaccgtcagctatctgtgctagtactcctccgactttactcggcgtgttctgtgctcgagaaaaattggggtacaggttttgagcgaggagagggttctctcaccgaagcctagcgtccttctcggctagctctcgctcccgatcttgagcctgtcggcgatcgcggcagcgggagttatgcctttctcggtgcactcgttcgttgggagtttctcccactttagaggcttcgtctcgggacacaggctgtgccggatcccgttccccagcatcacgatgtcgctgcatgtttcgacgtctgtttctccatcaccgggcttcacgctggggaggttcctccccttgtatggtaggctcatcg

SEQ ID NO: 91976 - DNA, 1040 bp, Zea Mays
gtctttatccctttatcgggattaacaaattttggtgttcaactcagactttatttcttctagaaaggttccatcagggaactgtaatctcaactagtagatattctctctacacttgagaatggtcattcatcaggaacacattattcagtatgagatttatatgttgcatatttataattcaagaatatgagtcctccttggatctcatgacggatcttttaaatcctattaactgcatagtttaattcatgccatttgccagattatatcatatagcggaacagtgtttattcagcacatatgtgggatggatctctcacaagaccacttgaaccatcgcattcaccacacattatttcaatagtgcccataatgtccgaacttcaagctcgtgactttcactttgcgattattggttcaacctcgattgcatttatcattgacccgataagagagcttcaaacactcatgcctaggactttgttttggatccctttgcaatctagagaggcatatataggtgtcgacatatttgtcttcctcatttattagtgatctccgtcatttcccaaaacgaaagattcattgttccgtattcccagcacaatgatattgcgcgcattgctaggaacttcatcatcaagatgaacctcttcgtgaggcaaatcaccatcagggtgaattaatcggaggaaagttatcacaaaccacgtgaatctgcaatcagaacatatgctttgactaaggctgatggatcatattcgcaggcatccccgagaatagatcaaataccaataagtcaaatgtggatatgatattaatcccaggtatatccacatctacatcaggtagaagcattcagaccaatatggttagtcctcaacgatttctggcaaactccatatacacaggagtacacaccgaacggcaggttcagtttagcttatgtgcgtttaatagaatattgaggcattacactatatgggcattcctccccctaatgccgagatgttctaaaagcatacagataaaatccc

SEQ ID NO: 91977 - DNA, 377 bp, Zea Mays
aagaagaggattatagcattttgatcccatcaaaacccagccacctagattttgagaaatctaatgtgtctgaagccgatgtgcccatgatgatgaagctgggctactttggagaagctaaaaggaaacttgttcgttttgccggagaagaaaccaccccagcgccgaaggatgatgaagtagtggttttcaaaagctttttcagagcaggattacggtttactctaaacgagatgataggagaagttttgaaattttttgaaatttatcttcattagctgacccctaacgctatcgttaggctcaacatcttcatctgggccctccgaagccaagggatggacccagatgccgaagcattctaccgagtgcacgag

SEQ ID NO: 91978 - DNA, 442 bp, Zea Mays
gaccccagttgcatattgcacaagggtctggtcatttcgaagttcaaactcagcggactcataaccatggtcatcagcttctccctctttttctcgtcagccttcatatagaaccattcatttttccaaccagttggccatttcgtgcagtagctaaggactggtgccttcgtatcctttcgatacgcaaaattctaacagccaaaaatttcatgaaggccctctgcccttgccttcgtctgataatgcagcttgtgcactcggcagaaagcttcggcatctggacttatcccttgtctttggagctcccagatatagacgatgagtctaacaatggcgttgggagtcagctaatgaagatatatttcaaaattctttaaaactacccctatcatttcattcaggggaatcgcagccctgctctaaagaagctctaaaaatc

SEQ ID NO: 91979 - DNA, 407 bp, Zea Mays
aaattagcatagaggaagctaccgacaatatgctgtcgctggtacctgcagaggtccgcttctatcttcggcaagccaacgctttttgagaaagtcctaacaaccttggcctcggttcgattccgaaggcaccttagtttcccttcattgacaccaccaaatagcagagaccctggtttgtatccgcatgatatagcatatttctttagctcttctttttcagtgtctattaactcttgtccaagtatatcttgaaaattaaaattttcttcttccaaagtgtcttcaatttgctcttttcctttttcaattgtcgtgttcaccgcaaccgcagcagcttcttcttcagccattctcagaagtatattgtcaatatcaccaagtgtggtctctagattaggatcttc

SEQ ID NO: 91980 - DNA, 504 bp, Zea Mays
cttcagaggcaaagatacagccaagaggtaacgaaccaacatgcaaagtgagacaattgatcatggaaagcaagagcattggagcaggaaattgcaggcatgcaacgcgaagacccccctcaccaacaaccagttggtgcagtcaacaaccaaaatatttatcacttccataggccagccaacatgcaagttgctttccaaggattaaactacctcgatgagcgaagcctcctatcagcacagctccaggcctccccgtggccgcaaaactacagagcgggcacctatcccaagtacaacgacaatacagacccaacccagtataatgagttaccaggtcgatgtcgcatcctcgggaggagatgactccaccatagctaagtcattcatcatggaagacctcaccctcacatggtactcaaggctatcgcctttgtcgatcaactcatggaagacccttcgtgataaattcctgctcaatttccaaggctataggcctgagac

SEQ ID NO: 91981 - DNA, 663 bp, Zea Mays
cgtggacaaggactcaaagctagttattctgaggtctaataagcactcacggttgaaaaatcacacctaggtctaacccattattttacggatctggtcaggtatagtctcgtggataaaaatttacgttgatacccaccatattcgatgtgtgtaaaactcatggacaaccgcatccgtaggtgctactgctaagcctacgtggcttgttcagttgtgcatcttgctcagtcaaaacctagaagtatttggtcttgatccctactaccatttcctcggatcagtcgttgacctgaccgccgctggtgctcggacgggacgtacccctaatgccagtaacatagacacagttattaaaggggtcagccgagaggaccgcgcacaagcacaacagctcagtttctcccgggtcccaggtcccagcctctctcactcactagtcacatgacgcgcgactgcatcgcatcaccatcaccttgcattaccataccatcccctggttctggtcaacggtcaccagcactgcctgtgcctataaagatggactcagatcagacctcaccacatgtgcgccccaccgcgccttcttatacgcaacgcacctggaactcccctccgtccacaccccgtctcgcctatcgtcgttccgtcatggagtcctcc

SEQ ID NO: 91982 - DNA, 669 bp, Zea Mays
caccaaaccagtaacttatataaattagatgtggagaaggcttcacaataacatggaaataaaatttcatactttcttcatcttaccttgatcgttttcattttccctcgagacaccatgatagcagttataagtgagcatgctagctatgaattgacctctggaccaccaaaactggtctgaaaaacatctatctaaatcatcataacaacaacagactgcaaataccagtgtcaccttccaaagttacctcacccatctggcatgtgcttatgtggttggtgttgccatccaacaggatagcacaaagggtgaacaaagcaaaccaattttgatagccaaaattaaacgtggaactcttctcggtatatactaatgagcccattccatcagttagacttaaattagtttttaaaggggaaaacataggagcctaaattagttttaatcagcatttcaagtgtcaataactcaatattatactctttattttgataggacacagatttcaactgaaatccatgcctcatcttgtaatagtacaaaacaatgtagacacacaccataaacatttaacaggatcacataacctattaagaaaagtatataagtgagggcattgcacgctaaataaaagaatggactaaaagcacttttattttctttttg

SEQ ID NO: 91983 - DNA, 645 bp, Zea Mays
atcggtgcagctttgttggaggtatgctggacattgtctgggagcatggagagaaagttggcacgggctttaagtgcaaatattgtagagaaaccaagagcggaggggtggtaccggtttgaaggagcatttcgcacatagagggaagaatgtgaagaaatgtctttctgttaatccaaacataaagacatatttccaatgtgacctggataagacaaagaacaagaagaggaataggtttaggcaacagctgaagacagatgaggcatcacgtacccattttggtgaatcaaatgatgatgagtaagaggatgaactttaggcagttctacattcgtgtgaggagcacgaattcagacagagctagtgcaaggtatgataggggtggtggatctaggtctagccagagggcatcttgagggccacttgataggatgttgggaaggagtaggaaacacgtacctaagcatgttagagactacaatcttggtcaagcttctataccaaggcaaccaaggatagatactggtccctgaacaagtaagggaaggagctcaaaagagattcttggtagggcttgggctaaggcttgttatgccattggcatcccagatcgaaaggtcgataacccatattttagggcta

SEQ ID NO: 91984 - DNA, 317 bp, Zea Mays
gcaaaatctggatcaaagttgtcaagagccttccatgcatcaccatctgacgggtgcaccattaacccatcttgtctgtccgtacaatctttatgccacctcatgtgcatagcggtcatcctcgagagaaacaaacgtttcactctaggagtgagaggcatgtaccgaagctatttgtgtgcaacctttgtcaccaccttctccccttcttcatttaaaagctccacgtacctcgacttcccacattttaagcatttctactctctgccatgtttcttccaaaaaagcatgcagttgtcttggcaaacatcaatctt

SEQ ID NO: 91985 - DNA, 660 bp, Zea Mays
aaaattcataagataactaaacaacttagattatcctccattaaagtgtatctattttaaatagatccttcttaactcaaaagattctattttatcctaataggttcaccctatgttctatcttatctcatcctatcctaaccactttgcttatctcgaactagtgtaacaaccgtgatctaatccaaagtaattagatattatctagtctaatctagtcatatcccatctaatcaagatcctacctaacctaatataatctaatctagtgtgagttactaatactggataagaccatactcctaattcacttaagcctaaactggtgacgtaagtcaactcagccatatacaaccacctgacctatataataggttacataacctatcccacccatctagaagcaaacgaccaaattagattctgactaatctcattaaactcatagccatctactaaactagctcctctacctacgtgttacatacagatctatcttaacctcttgacccaaacccggatggagacaccaaagagcaagaaagataagatcaacctcgacatggaagaataggagtcaaatcagatctcgagatgattcaagatttaccaccttggatggagtcttcccttaccaagttcttcttaccatcatctaac

SEQ ID NO: 91986 - DNA, 409 bp, Zea Mays
tgatctctattaattgatgccccagtgagctccgttaggttattatgcgcttagtgcaccagcttcgcctctgattatccaccctagcgtcccaattttatttttcccccaattccgttttccgcgccgtcgtgaacatctcgctatggccagccatctacatgttagttcaagcttctctgcttgatgttctagcctcccttaagtctcatgttgctcgtagacccgtttgattgaactagacctccctgaatcaccaagaacacctcgatttcccctagagtttcgccgttgtcgtgggtagaaggactccggaccggatttgtgcaattgagggtcgtattagagtcgccaggggtagaaataggtgtcgactgagttagggcatcagtcgttgcatatctcggcc

SEQ ID NO: 91987 - DNA, 320 bp, Zea Mays
aacggtccggaccctggcagctggtcctgagtcctcaggttcttggccttcttgtgtcgtcctttcgacgaccagcaccatgctcaccgcttccgcagccaccgtgatgtacagatacaacgactccccaggctctggggctaccaatattggtagggacaccaggtgctgcttcaactcctggaaggcttgttccgcctcttcggtccaagagaatgaaccggacttccgcaatagcttgaagaagggtagcaccctctcagccagccatgaaatgaagcggctaagggtagctaatgaccccgtaagcttctggacgt

SEQ ID NO: 91988 - DNA, 466 bp, Zea Mays
ctccctcgcaggtgctccaccttccaaaagaagccgcggggcaattcttcgctggtgcgcagagagaggcgcaacggaagccgtcgcgcgggaaacagagtgaaaggtgtgaggggaaggccacaacgtctccctgtttagagtaaggggggtggttcgcgacatcatggagacgaagatgcagatcaccggcggtgatgaaggagcatcgtcacgctggtcggccagcctatgcctcaatcatcggtaagagcacgttcctttagctaagcgcagtttctgctcacgtcggtggtaactcaatctcttgatgtaagactacttaagtcacttagacaaaagcattagtctcacgattctagtcataaagagaactttccttttataagtgtcctaaggatttgaattccttatatgagactttattcttttaagaacttggaatatctctctctatgtctagaac

SEQ ID NO: 91989 - DNA, 737 bp, Zea Mays
ttgtctaatggtgtagtagaaagagcaaatggaaaaatctcacagtagtcaagaagtggctacatgatgacacgaagggtaaatgccccgaccaactgctcgaaatcatatgggacctaaatacaatagaaactaggtgcacaggattcacatccttcaagctaatgtacagtgttgaagcaatgacgccacaagagttaaaattcaaatctctaagagtagaaaacaactcaatgtcggggacagacgagcctgcgaccaaatatttgctcaaggactataggaccgaagctggaccacaactggagtgtgaaaaatctacacaagttttacgtgtaaaaggacttcgatcgtaagggccttaactgcccatgcagtatttaaaacactaaacatttgggtctatacacttctcctcataaagggggtgaggtttttaatgaggcggagccttgtaataaaacaatgaaaatcccccctactcatgtgtcacagccaaaacagctcgctcgagcccaacattcagccaagataagtcaacgccgcagcaagtaagatatcgctcgcaacgtgcgatagacaccaaagggtgtgaagacgtctaagggtccatccagattagaataaaatcttagcaaagacacctaagcgtgcaaagacccctaagagtgcaaccagattaaaataaaatctaggcgaagacacctaagtgtgtgaagacgcctacaggtgtatcc

SEQ ID NO: 91990 - DNA, 812 bp, Zea Mays
caaggatgatgagattgacctctcctcggccaacgctcccattatctgagggttggttctccaccaggcggaggctcgtcgatctgcaaatgagcctatcacatattttactgccagcggagggtccgctcttctccaggacatccgattccaaaaccctacattgcgtattcgtgatgctaggatcgatggtaatcggttctggacccttcagcatgttgatttttataactctgtgattcttcccaagaagcatcagcctattctacatcagagatacatcaactgggaaggatgtgaagctattggagatccagagatgacacaggctttgagggcctgtgagaggaagaaaatgaaaaacattatgacattccaatatgattggaatgatgaggtcattgctcagttctattccactctttggatcaagctggccgatgaggaaagtccctataactttccttatctaaatttctatatcgaaggctgctggtacaaggtgagctacaagaggtttgctcacattcttggattctctgatgaagacatttctggggacaagatcaaaattcacgacttttggcaacccaccaaggatgaagcccgggaccttcatatatctgagactggtaaattttgggagtccataaatctgcataagttttatagatatattaattctctatgcagaatgaccctcattcccaaagggggtaatcagatgaacatcctgggagagagcaaagtcttgctctcatttatgaagcccaatagctcggaaagcatcaacatttttgacatgatttggc

SEQ ID NO: 91991 - DNA, 881 bp, Zea Mays
gaaggtcgaatcctgagctgatgataacctgacctcagatctatctttgaaaacacgctggctcctctcagctggtcgaacagatcttctattctgggcaacgggtacttgttcttgattatgacttcattcaaagctcgatagttgatacacatccttctggtgccatctttcttctccatgaataggacaggggcggcccaaggcgaggtgcttggccggatgtaacctttctcttacagctcatcgatctgcatcttaagctcaaccaactctggtccagatactctgtaagctcttttagaaatgggggcggtgccaggaagaagctctatagcaaactcaactttccgctctagtgacatgcctggtaaatcttccggaaacacatctggaaattctgacacaaccttgataatctcgagtgaatctgcttcactgctatcaacagccatctgataacaacttcctttctttggctcaggcgagactagcttggtcaccacttcctctcctagtggagacatcaacttgattgtcctcttatcacaactgataactgcctgatacttatctagccaattcatccctaggatgacatctattccctgagtacccattactatgaggttagcgggaaacgcaatcccccttatttctatacttacattcaagcaaatgctatcggttcgaataattctaccaccggctgagtcaatttggatgggggttgacatggtagtgattggaagattatgtgcttctacccatgatgcagtaataaatgaatgcgttgctccagtatcaaataacacttctgcaatatgggagtcgactggaaacatacctactatcatgccaggggtttcctgaactgcttc

SEQ ID NO: 91992 - DNA, 765 bp, Zea Mays
ttatttgaaaattttgaactcagatttgaattataattaaaacagaaataggaataggaaaacaacaaagaaaaaaggagtcgggtatacgccgtcgggggccattgcgaaggagtcgtggatggtcggtctgctctgtcacgttcgtgcatggatgggttgggtgcatggatgcgttctcttgttcaggaatttcctcagcagcccacagtcttttgaaggcgtgtcggaccggatagcaatggttcagacatgggacctcgagcatcttctcgaatggtcaatggcttcctcgatcgacggtttctttcctttctaacaggccatgactactagcattttgttgtgcctccacttgtccttcttcctcttatctagttgtcctctatagcctccgtcgggctctttattgctcttggccttctgcctacggtggtagaaaatcggcccactgcttcttctctcgatgcgtggtttgttgcgatgtcaagttctctcgtggtccatggggcttctgcaccatagcttgtgcaccagagtctcactcgtggttcccatgatgaaagcactaataatttcggtgtcagcgaggttagttaatttgttgtgttgtcgcgagaaacgccggatgtagtcccgtaaggtctcatcaggcttctgttggcaattcttgaaatcccatgcgtttccagggcaaacgtacgcgccttggaagttttctatgaaaatttcctcgaggtcggcccagttttggatgcaaccagg

SEQ ID NO: 91993 - DNA, 1114 bp, Zea Mays
cttagtcaagcgatccactaccacccatatagcatccctgccccgaggagaacgaggtaagcccaccacaaaatccatggtgatatgctcccacttccactctagaatttccaatggcttcaataaacctataggccttcacacgctgacatacctcacaggcggccacatacttagaaatgtcaaccttcatcctcttccaccagaagttttgcttcaaatctctgtacattttggtttcgccagggtgaacggtgtaaggcgttttatgagcttctctcaagatatccatcttcacctctgatttctgaggcacacaaagacgacccctaaaacgaaccaaatcattctcatcaacggtgaactcatagggtttaccatcgccaaccctcttttgagcttcctgcaataaacgatcctgctgctgagccacacacactctctccaggagggaggattgaatgagcatccgagtctcctcactagcggtgccaacatagcataaagcgatccccatacagtccagttctgtgatcaaaggaaaggccacttttggaaccccaaacctgctaagggcatcagccaccacatttgccttccccaggtgataatgaatggacagatcataatctttaatcaattcgagccaccgaggctgcctcaaattcagctccttctaagtgaaaatatacatgagacttttatgatcggtgtagatgtcacaagattcgccataaagataatgcctccacgattttagagcaaagaccaccgcaaccaatttgacatcatgagttggataatttccctcatgcttcctcaactgccttgagccataagtaatcactctgccttcctgcatcaacacacagcgaagaccaattggagaagcatccgtaaaaactgtgaaacgcttaccactctcaggcaaagctaggataggggcgttcaccaacttgttgttcaatgtctgaaaactgacctcgcaattgctggaccagacgaaaagaacacccttctccaagagtctggtcaaaggcttcacaatgctggaaaaaattggtacgaaacgccgataatattcggcaagcctcaagaaacttcggatttcaga

SEQ ID NO: 91994 - DNA, 306 bp, Zea Mays
tagaaaattcagctatgtactctgctactaattgggtttgacgaatgtggaatagtttgtggatcataatggcgtgctcatcgcggccaaaacgatcgtcaaggagggcacaaaatccggaccaggagagatggatgagtttccgctcaatggattggaaccagcgagcagcgggaccttgtaagtacattttggcgaccttaacccaaatggtagagtctacggagtacatctcaaagtacgactcacaacgggatcgtcatagtttagggttctcgccattgaaatgagggaacgacattttgg

SEQ ID NO: 91995 - DNA, 298 bp, Zea Mays
atgaattcttgctttctttctttctaattccccgtgtaaagaacttccatggttctatgaaattgtactgcgctggagcctgaaatagagtgttcttatctgttgggttgggtgaataagtgaaagtgcatacttcgttgtcatctttggtgttacgataatattatgactgttttagtaattccttgatgaatgtgtttactttgttgtcatctttttgtgatgattgtgttatcaatgacaccgaactgtttagctgtttatgagaagtgtaaacatccaaactgcacaccccaag

SEQ ID NO: 91996 - DNA, 993 bp, Zea Mays
gtttgggtggcgggagagcttggtggtgttggcggtgtagagcttgatgccttggctgccgggtagttgaacgggacagcatggacaggtagccgtgaagctgggacatggatcgtcggtgttttgcggtggtggctggcaggcgagagtgtttgtgaaataggcattttgcaatcgtggctccggtgaccgtaaccacggcagttgcggcaccggacgggatcccgacaagcccgaacaagatgctccagcgagaggcagcggtagcagacagcctttgctgtaatgggttgtggaggttttggttgctggtgagcggccttagctggggattggagagccttaaggtatgatgggattgctggttgttgagttgcagtaatggccgtaagacccttagggagcgaggcgtgcatggcgggagcaggcgtatcctttgcttcagatcgagcagcagccctggacagatattgtgcctttagacctgacatgcctggagccccgagcctggatacgctgctgcactctgaattaaccacattgcagttcagctcggcatggggggcagcattaactgcgaccgcaccggccacccctgaaatttgaaagcattgcgccattgttgctcgtcgagcttctagcaacgagtgatgaatgagcagcacagatgaagcaaggcgcagcgaacctcagacaaccagagcattcgcaacattctgactggaaacttttaccctgaacacccaaggatcgacctgaacaacacctaggcgactcggaaaagaggtgaggaggaagttgacagaattgcgaacaaaatgcagattgaaggacggggatgggagtggaggggtgatccagacggaggcaggggtggagagaaagtagcctgtgacaatcgggttgtagaaattgcgtaggaagtggtcctggagttcaactccaggccttaccggaaccgaaggggactgatgctgcacctcaatgcctcgc

SEQ ID NO: 91997 - DNA, 430 bp, Zea Mays
gacgactttggcagttccgttgcgtatggtggacttagtgccttcaactgctctgttgttttctccaccttctgctcttcagtcacatttgtcctagcttcgacaggcatagagtgacttggctcagagataggagcggccccctcaattagcttcggcacgtcggccgtttcaatgcgcctaggtcgacgcgtcaaaactttaaccttttttgaccttgacgcactagaagtcaccgaggtagcagctttcctcttcttcccttgctttcatgaaggataacagtagtctggatacacaaacccgataacatcgaataccctattcaacctctttttgccccgagatccaaaggcagttgtcatggcttcatcttcggcctttgaatatgctccaagcaactgatcactagtcgcctctatggcatcta

SEQ ID NO: 91998 - DNA, 492 bp, Zea Mays
cgatgggtcatgtctgtggattagggtttaggacgaggtactggcgttagtctttcctgcgccctcttaatcctttatacagcatcgtgtctcgtgtgaccgggggctccaaccgaggtcagcgtgggccctcccaatcaaggcctgattatggagatggacacacccaacaacagggagatctgctgtcccctctattgttcgtatttgtggcagatttgttacagtcaataataaaaacaaagcaaaggatcttcgacttctcaggctaccaatacaacaaagatgtgggcatggcttctccattatccaatacgctgatgacatcatcctgattacagaagcctgcccccaaacaactcttcttcctcaaggctatcttaaactctttttcgctgattctatggggcttcgggttaactatcacaactctaacatctacattgtcaacatatctaaacagaaaatggaggtgctatctgtcagtgtttg

SEQ ID NO: 91999 - DNA, 529 bp, Zea Mays
tccatcttcagggttcggtaggcttcacgggtgttggtttcctcgccttccgctatctcgagactctcttggagggacgccttttcccttgtaagttccttgacttgttgctccaggctttccacccgggagtttaggtgagtgcagtgggaggcaaggtcatcatattggttatcgagagtgtggaggtatccagccatgtagacgatggtggggtcatcctcggtaggatctcttcctgacagggcctgaagtattttcctccaggcgggggtatttttgttgctgggtggaaagtagcggaggggggtttcaaagaccactctactgtagttctggcatagttgtcggagggcttttcgggcaacattttggcaagtatctgggaagcggtgtccggtgaaagtgacttggaaagaagggtggttcgggtagttttggctttctcctaggtagactgccatagagcacttctccattccattctcgagatactccttccagacatattctggcttcttgcggatcc

SEQ ID NO: 92000 - DNA, 316 bp, Zea Mays
agaagtggacccatccaaggtagaagctgtctcaaattggaagcaaccatccaatgtcagcgaagtacgaagctttctgggaatggcagggtattaccgccgttttatcaagggattctccagcatagcaaagcccttgaccgaacttctcaaaaaggacaataagtttgtgtggactcccaagcgtgaagaaagtttccaattcattaaagagaaacttacaactgcaccagtcctgactctgccagacatacaccaggatttcgtcatcttttgtgatgcttccaagcaaggcttggggtgtgtcttaatgcaa

SEQ ID NO: 92001 - DNA, 286 bp, Zea Mays
agattttctaaggctcaagcctcccacattcgctggatccagcaatccgctcgacgctgatgactggctgcgcataataaaaaggaagttagaagccatcggatgccttgagaaccagcgtgttcatctggctgctcatcaactttctgggatggccctatcctggtgggataccttcagcgctgccgtcagagatactacctgggcagaatttgaagatgccttctgagaacatcatgtgcccctaggaatcgtccaacttaaagaagatgaatttcgggaatta

SEQ ID NO: 92002 - DNA, 526 bp, Zea Mays
agttttccccacaaagttttccaaaagtaactcaaaaatttagtcacgatcagaaacaatggttcgtggaatcccatgtaaacgaacaacttctttgtaaaaacaattcagcaatatgtgaagcgtcatcactcttgtggcatggaataaaatgtgccattttgctaaatcgatcaaccacaacaaaaatggaatcccttccctgctttgttcgtggtaaaccaagaacaaaatccatggatatgtcttccaaaggcaaactaggaataggtagtggagtgtataagccatgagggtttaaacgagacttagctttatgacatgattcgcatcgaaggacatatcgctccacatcccttctcattttaggccaaaagaaatgatcggcaagtacttgctccatcttcttggcgccaaaatgacccataagtcctcctgcatgagcttcctgcaaaagtaaaattcgaacagaacactctggaatgcagagtttgttagctcggaacaaaaaaaccatcattaacat

SEQ ID NO: 92003 - DNA, 309 bp, Zea Mays
cgagaactccgcataaggcaaactggattcccagcttctatcgaatgttaacacacaggctcttaatagatcttcgaggaccttgttgaccctttctgtctgcccatctgtctgagggtgataggcggtgctaaagtctagcttggtgcccatagctttctgaaggcttgtccaaaatttggaggtgaactgggttcctctgtctgacactatctttcttggaatgccatggagtctgactatctctttgagataaattcgggcaagggtggctcctccaaaggtagttttcactgggatgaaatgggc

SEQ ID NO: 92004 - DNA, 554 bp, Zea Mays
ggtgaatgtcttagctgctctggataccgcggcatgcaaggaataggcctggtgcagctgacaatgtagacagcaagaaagaaatggaacgcgtgcccggaggcgtattgtgcagcacggcaacagcgttcaaatacgcatcaatgaacaatgaacacgcaagcaggaggttgaagacgaggataaacgtgttgggccaggcccgagtaggcctaacagaaggaaccatttcagccacggaaggaaaagaagcaaaataggtaggccgaaattgtcgatgtttcggcccatatagtgaatgctggtgttcttttccttttctagagaacaggaagcctgggaggtggagccgtggaggtgtgcacgtgcattcaaattggccatcagtaaacatggaacagtttgcgctttacggaaactaagagtttttaggaacctttaccaacacattttttcttgtatgtttgcgcatgaactggatatgacatgcatgatttttttaaaaaaaaaaaacttagcaagatgctgtaatgcgttagaagtatataatcaag

SEQ ID NO: 92005 - DNA, 519 bp, Zea Mays
ccgggtttgtactagcctcgactagcacaacatgacctggttctgtggtagaaggggcaactcctgcacgtttaataagctctggcacatcagccatctcaatgcatcgtggtctacgtgtcaagaccttcactttcttcgccttcggcacactagaagatgctgaagcagcaattttccttttccccttttatttccgaacaagaaaacattagtcagggtagataaacccgataacatcgaaaaccctattcagtctctttttccctcgagcgccgaaggcgactgtcatagctttgtcttcatccctcgagtaggctccaagtagctcatcacttgttgcctctatagcatccaaccaatcatcatttggctcgtcaaaccgatctctgaaccaaaatgtgtacttcagataaactaggccactttggctggagccagcggcaacctccttcggcatttcccatccacttgcaaggggccatactctgtaagcaatatgctcttgaaccaaatccc

SEQ ID NO: 92006 - DNA, 372 bp, Zea Mays
ctcgcgtgcgacaactccgtgcagaagtcgcctaagggtgcagccggattagcacaataagtgcgaaaaatcgaagtctaccacgaagacttaccgtgcagaagtcgcctaagggtgcaaccagattagcacaataagtgcgaaaaatcgaagtctactacgaagacttaccgtgcagaagtcgcctaagggtgcagccggactagcacaagtgcgaaaaaccgaattctaccgcgaagacttaccgtgcagaagtcgcccaagggtgcagccggacttgcacaacaagtgcgagaaaccaaagtctaccgcggagactatccgtgcaaaagtcgcctacgggcgcagccgggctagcacgataacaattac

SEQ ID NO: 92007 - DNA, 409 bp, Zea Mays
caaagtccctagagatgattgagacaagtgccaatatttaagaccgaggtggccgagtgaagagttgagtgttcagtggtcggatcgtctatcgtctcctgtcccttgggagggaccctactgccctatttatactcgcaggggagcgtccacagtgaagtcgagtgttgtatctgaaggagagatgtcctggcatctacaagccgacgtgatagtgaactgtgttgttgacttacgtgtgttgattcttcgtagagagccaaggcagatgtcgaggggttgtccgtacgcccgagcccccgagggagaggttgcccatgccgtagttgttgtaacagcgccggggtatgggctaacgactgcttacagggtgcgttagcgtcctggcatgggatgatgtcgagattcc

SEQ ID NO: 92008 - DNA, 458 bp, Zea Mays
atgtcgagaaataaacttggtctacttgatgggcaaggatatacgtgtcgtgtccttgaagcaatttttcaggttggatctgtgtcatcccaaattcggtcctacaatacttcgggtcataccatttacactcaaagaaaactagcgctaaaggcttatttatagcaaatgtaatctcgattataattttgattttcccgtaatagcaggcttcgtgtccttccatgtcggttgccctagtaacgactccactattttgagtggcggccataggatgactagattcgaaaatgcttgaacgaaatcgatatccattgacgttgtaacgtccataggttttggcagttacgcatccaatagataactgacgtaagttatcattcaaattcatttcctccccaaactgtcaattatgccacaaagcattagcaaattttgtaatattagttaactaaaat

SEQ ID NO: 92009 - DNA, 519 bp, Zea Mays
agtctccatcttcttctaaatgatatcttctttaactgattatgttgtggttggttctacctaactgtcgttcctgggccatccatgcctcgctagaggtgtccgccctccactaactcacctcccaccgcgccatcaccatgctcaagcgtagttccaatgaccacaacaggatgctcgtccctctctccgccctagagctcatggtacatctatgtatcaccagtcgtagggcacacaacaatatggcttcataggtgtgtaaggtcgagacgacgcgttagaggcataaatagtcctttctaaaaataactactttggtttatcaaaacaaattataaatgtcgagctagagagagctcatttacacaagcctgattagcaaggttacataagcataggaaaagctcaacatatactaaggagcaagaagtataaagcgtaagccacactagcactactcactagaaaagctacataagctaaactagagagctaccactatttagctacacatga

SEQ ID NO: 92010 - DNA, 293 bp, Zea Mays
gcagcatgcgctaaatttacaggagcctataacagcccttgctggaggcgtacccgaggccagcatccgctatacgtagcgaacaggcccactttagcggaccttgctggagccagtcttaaaatgatggattttcctaatgaagctacaattgtatcaaacttagacttgcactgctgtgttccgtaaatattcgtatacgcattttgactggcagttgagatatggttacatgtttgatagttggatgtacttcgtgcataactgttagcgcttacatctaccaggtctta

SEQ ID NO: 92011 - DNA, 767 bp, Zea Mays
ttattttggtcatgaatattcattactacctttgcattctgattatactctgtggattacctttcttttacattaggtataaactttttgttcctctcgttatgctactttcaagggtggtgctgccagatttttctttactgtctgtctccatttcttttcttatgttgtttaagttttgtggaaagggtctttggtaacattcattgtgtgggagcaatgaggtgttacagtcattttaccaaagtgatagggcattgatcagtgcacaaatttagttaaggctggttgcaagctgcttcgcatacgagggactaaatattgttcgaacctgggctgttagtcaggctactgaagtttagtttcagttcactaaaactttggataaggatgccgccatcgctttgattggtgtcgttgtgctgtctctcgtgtgatggcgtgtcccccacgacgtggcccaacctccgagttcgactctgagcaggtgaaacttggatcacagcagctgctctcgggggctcatcaggacgtcttcaatcctatcctaggtcaactccctcacgtcacctctccttatctgcatgttgtttttgtttctcctatctagaatacgtataagtctctggaaatgttctatcatcctgtgtctctcaagccatcgatgccaaggccctctccacgcttctagcacatgccagctcctagaagtctccctacgtcctcgcgtggtggcctcaggctgttgaacgccagcgtcgtttgcg

SEQ ID NO: 92012 - DNA, 309 bp, Zea Mays
tagcaaaggaatctatttgtcaacaaaagtaaagtagggcaaaggttagctcacctaaaggttagaaaggaacaagggaaatcccaaagcccgaggcaccgacgtgctatcagatggtggggtactagcaaaagcaatattgagagtagactcgagccccaaaggaggattagagctcacgcccaaggcaacacttagtgggaccttagctccaacagcgtgcagcggattcccagcgcccgattcactgacctctaaagtgatcagaccaacaagagcagtaggaaggcttgtcaacactggctcctc

SEQ ID NO: 92013 - DNA, 751 bp, Zea Mays
cggcggtgaatcgatgaagcgcggagattacgacggtggaagaggtgggggcggtcgtcgatggcgatcgcaggagcgaatgacggcgacggggaggaactgattattttagggtttgggtggacccgagctgaattaattgaaaggggtatgatttgtctggctcgttgaccatattagctcggttggcccgcgggggagcggcgagggactgtgggtccactagtcagcgcacagtcagtgtgaaggtttggttactgcgtgttcataataagcataaatagctgtgcaaagtatcgtaaacagtttacaaaaaagaattaatcaagacccacgccaaagtacgtaatataataaatcccaattgatatgtagttgttaacatcgaattatacaatgataaatcccaaatactacaccacaccgaccaggccgcatcgacgtgtcaatttatgtaaccgttggagtcataatatgcaagtataaacgcggtcaattccaacgcgggacgtgaccacgagccggagaactcgcgtggaacgcgcagactcaccgtggtagttacgcgtttatgcatacagaattcgagtgaaacggatgcataaatggtaatagagggtgcgcacgtacgacccaccttcactcggtacatgtgcgcggtactccgaccacctgccacgtcgacccgcgcccggcacacctagcctggcaggggctccctgcattgatggaagcccagggctcctaatac

SEQ ID NO: 92014 - DNA, 356 bp, Zea Mays
tgatattcttctaatacgtgttggacaaccagctgagaatcaccaaatgccttcacatgttttactcccatacaatttaaagctccaagctgaacaaaagggcctcatattcggcttgattgttagtgcaataagttttcaatcggctagagaagtcgaaggagacattacttggtgaaacaagcacgatgccaattccttgcccttcattgcaaaccgatccatcaaaataaaaagtccagggaataacagtgaggtatgatatatctagtttatgagtatcattaatccgatgttctacaataaaatctgctatgacctggcctttcatagatttcaatggttcataggccaag

SEQ ID NO: 92015 - DNA, 786 bp, Zea Mays
ataaatttgaaggctaggaatttcaccacacagaaagagatcacaacgcagcagcagatactctatcaaagctaggatcaagtcgggcacaagctccacccagcatctttgtccaggaaatacaacagtcgagcatcacgttagggccagtggaggaatgcaaggcaatggagcagtagagccagacccaaatgactagagggagccgattatcaaatacatcaacaacaaggagcagtcagacgacaaggctgctgccaagcgcattgagaggcagtcagcccactatgatgtcataggggaaggactatacaagagaggggtcgctagagtcttcatgaaatgcatccactcagctgttgggaagtgtttgctggaagaaattcatgcagggcagtgtggagtacatgcattgtcaatgactagtagggaaggctttcagaacaggcttctattggccgacagcaaagaaatatgtagctgacctagtccaaagatgtgaagcggccaattcctggctaagcagcagcatttagcagcccaacaaatgcaaactattctagtcaccttgcccttcgtgctgggtgctgaatatgatcgggccattcaaaaaatctcagtgagggtacacccatgtgctagtggctattgacaaatttacaaagtggataaagtacaagttgattgcaaccctgacgtcggccaaggcagtggagttcatctaggaaatcatcttcagattcgggatacccaacagtatcatcacagacctgggatcgaacttca

SEQ ID NO: 92016 - DNA, 968 bp, Zea Mays
ccgccggccatccggctgcagctggaccggcccgccccgtggtttagtaagggcacccttgagaggtctgctgattgtggcttatccgtcggttcatgggttggcggtgccggaaagattggattctgatggatgttttgttggcctgtgcctccaggttcgtgcgcttcgtgagcacgccagaggtgctggagttgacgagcacctatgatttagagatgtcgcagctggaaggggctaggaagatatatgcgcagggagtaagtgccaagcaattgtttcagatgctgggtgtttttcgtcttctgtttcttcgtgtagctattgcctaaatttctgtaccttattcagggtactggagacgctacctcaggtggaactggtatgtaggatgattatgttcagtgtttggattggcattccatcatcaattggggtttcgatattgctagcttattccatctatgttcatacctgataacgtttctctgcgcctttttattttggaaattttagtccatgttaactcgagtgacattgaaatatcaaatatctaattgatggtaaaagtcagaagcaaagaaggaaaatatagatgggaacacaactgggataattgatccccatggaattttaggagctcttgactatgaaacgatgcattggatagcaccaaatttgcattggaagcaatctatgtctaattcaggaaagacataaatactgtaattaattgctaactgtttgtggggttaacgaatattgttataatgttgcattgctagtgtggtctttcatatctgctgtgtctgaatctaatttatgtaatatctggccatgcttattggcagctgaaaatgttacaggctcagcagcggcggtggcagcagatattacaaagtaagcctctctgtcatgtctgttcttattcatttgtttcttcttttccgtataactcgatttatctg

SEQ ID NO: 92017 - DNA, 413 bp, Zea Mays
ccagaagcaccttttattatctgccccagtcgttatctgagatctgtcatcaggcaaagtagtggtagcgaagaactgaaacatctctctgcctctgcactcggtactctgccaaagaaagtagaaacactcacacctctgcttagcccctctgtgctcgcttcgatctggtcaattctttctggaacctgtgatttctcatcctgagaagatgacgctttctggtacgccagatcgtgatgatggaacacatctgggctctacgttcagaactagtagtgcctgcatctctatgttcctgctctgtcgtgtactagacatacaacatttattattattcttcggacggctgctgtttttttctccttgcgcagaactgctcacagaaaactggcgtgtgttttttttctttt

SEQ ID NO: 92018 - DNA, 366 bp, Zea Mays
ctaccaaaattatgatcgttcgttcgtccgattgttcattcgttcgttcataattcctattcatcgttcatgttcgttcaaacaaactattcgtcgttcatcgttcatttatacgactattcatcgttcattcataatccctatgaattgttcatcggatcattcataatcactattcatttttactattcatcatccgttcgatcgcctgaatattcaactcctcatccatcatgatgatcagctcacctaatacctgctagaccaatgtctcagtcatacgaactctggtggccgtgattttccttctagtaagaactttccggttggtcaccatcctagaattgctccaagttgagcacgatt

SEQ ID NO: 92019 - DNA, 353 bp, Zea Mays
gtgagctctctatacttaatcaattggattatgtgcaaattatgtttgtttaagtcatagggaagcttccaagagcagccaaaagggtttgaaaaatataggctcaaaagagcctaagttgggctgatctcgaccccaccagaccgggtccgcatgagcctggaacttagccgctgggcggcctagcacaccgaaccgggtctgtgtgcaccggaccgccagtacgaccgaacttcacagtcttgggattttatttttaaaatcaccggaccatctacaggaactggtatggtggtgcaccagaccatctccaatgactctcccgtgggcgtgcactggccaacgactacctg

SEQ ID NO: 92020 - DNA, 440 bp, Zea Mays
cacatatgcgctgtaagattaccttagctaccacctgttccatgtctagcaaacttctcactcctaaattgtcacactgtgtcaatgaatacattcagtaggcattggtattcgtgaatgccttgttttgggggctgcagaaattttggcaggggtctgcattgatagttgccttgttataagggttataatgctagtgtttcccataattcagcacttgcaggagtagagcacatgagatcgaataagtacgtactactctggatgttaccttgcctcaaaatctgcatattctaatccatttctctttcttgtccccaacttgttcactaaatgagtgcctttaccttccattagtgtagtaaacagtcccctcatgacacttaaagtgtaataaaattgggcaattggccaaatgtaatgctattattttaaacaag

SEQ ID NO: 92021 - DNA, 360 bp, Zea Mays
gcactttgcacatctttataatcttattccttgtaacttgagttaatgtatcaagaatcttgatggggtactcagcataagtcaggtcatcttgaacattaaggtcttccattggtaattgttcttcaggcaccctgagacatttcttcagctgagatacatgaaagacatcatgaacatccgcgagatgatccggtaactccaattggtatgcaacctctcccactcgctttaagattaagaagggtcccataaagcgaggggacaactttcctttgactttgaatcttctcattccacgaagtgctgacatcttgaggtacacatgatttctttcctaaaattccagtggtcttcttc

SEQ ID NO: 92022 - DNA, 469 bp, Zea Mays
gagcaagagcgggagcaaggcaagctagtgtggtggaggtggtggatgtagcatgtgtggtggaaggctcaagagtggtaggagctggcaaagtgggaggtggagtggttactgggtcttagaggagcaagcccaagacgagaggcaacgaactcggaaagcaatctagctggaggcgatcctcagttgacctctctgctctgcctgaactgctactgctgcgacggcaactgctgcacgggtggctctatccatacgtctcttcttcttgccccattgctgctcaaggtaaactgctttgcccttatcctgtctgaaggggcaaggtgggtcctggtcctctcctccccctgatagtgtgacattcgtcgttcgcaccatcctgcacagactattgacatgctacatgataatgagtaaaggtaagcgagagcagtagagcagtagataagtagagatagagaatgta

SEQ ID NO: 92023 - DNA, 461 bp, Zea Mays
gaacacggccaaaccataattgggaatcagtataagtagtttttataacggtatttttctatgatctatgatttgcatcttttttgtgaattgtgagtgtacttttgaaagttgtttgatttgatgacaactgtgaagtttctgcatttgacttctgaactgtagctttaaaagaagtagcaaaaggttgcatatatcttgttaacaaatttattgatgcaacatacattgtctagcaattccagatgaaatatacctagttcaaatatctcacaagtgacagcacggtcgccacttctgctttatccccaggtttcacctaaaaaagctccccgaactagtaaaatttaacaaattaacactgaaatgaaactgctattactctctgaaacttgagttctcttcagcctaataatagcatataagaatgctaaaatagtttcttaaaagcatcaatttac

SEQ ID NO: 92024 - DNA, 392 bp, Zea Mays
gccggcgttgccgtgctggtgaccccatcggtgctcaagttcagcgccaagggggaggagaaggggttcgaggtgcatttcaaggtggttaacgccacgctcgctagggactactcgttcggagcgctcgtctggaccaacgggaggcagttcgtgaggagccctcttgtggtgaaggcggcgttggcttttgattagttctgctcattggtctaggggagctttaggaaagcaggtttagagaggatgcattagtttcatgatttgttaaaaagtgaggctgagaacttggcctctgaatcaataaattataataattatataagcaagctgtttctactgtgtaataaaaaccttaatctctgtagaaatttggtaatattggttaaacc

SEQ ID NO: 92025 - DNA, 544 bp, Zea Mays
cgctacacacgacaacaacatgggggctaacccacgggccggccacgcactaccacaaaaatgtcagtgtaggactcgatataggggccatatgacgaatgaacgagacgatacaccatatcaggaatatggctacgcacgaccctacggactacgccagcagcactaagccaaaccagggcaacagatcaccctcatacctgtagagaacaagtcggctctgtaaggtcctgcccttgagctataaaaggacaggctctcatttttcttacacacaagcacacaagctataacacatttcattgcaatactacgatcagcattacaatggattagggctccggtctgaaccagtataaccccaatgtcccaagttcatcgttcgagtcctagagattcaccattcggagtgagtctgcggtagcatcccccaccaaacacaaatctattgccccccggtttctgaaaccacaacaccttagtaccacatcagttttttacaaagttttatttgaaataaaaatgatgttttattgaaataaaa

SEQ ID NO: 92026 - DNA, 466 bp, Zea Mays
gaaacagtggagttggtatacgaacaaaattgaacatcaaatgttgccttgaaggtgggaggaaatcaaaatcaactagtaaagaaggggatcaacctgcaaaaacagtaaaaagagggcctacaaaatgcaagagatgtggtgaacttggacataggcaaactagctacaagtgttctttaaatggaacaaaaaaggaaaagaaagcctagagctcgaagaaatgccggagaaaataggccctttaaataatggtgcaatggacgtgtccccaaatgagtcaatgtactaactagtcatttttatatgtcaattcatcatttttctctactgactaaacatttttttgtagtcaagtgatgatcgtaggtttacaagatggaccgacacatcttgaaggtgccacatgtgcacctgtaccacctccaagtgttgaaaaagaagcaactccaagtgctctaatctc

SEQ ID NO: 92027 - DNA, 340 bp, Zea Mays
tttggaacaatgtaacagaggttgtgtaatcatggcatgtaataatcaagtatgttttcttctttagatgccatccagaactcatgctcaagatggggctggaacttcccgtggtggggaggaaactccgaacccgccgctagtacctcccacgctggttgtggctatcactaccttaattaatgtcattactgataatactcgttttcttcaagaaatggctgggaaacaaattcatcagctgggaggaagaggttaacaccaggcccctagagatactacgtatatggacttttcagaaactcgtccacctattttcatcaaggcggaagaacctttg

SEQ ID NO: 92028 - DNA, 639 bp, Zea Mays
cacaagcacattcattactagaatagataacataggagacaatggccccttctatgctgaatgtttctccctagtacttcgtctagaagcacttgtgtggaaaaggtggccaacaagccacttaagatgtctctccaaatctaccaaaaccaagcttctaaagcacttacaacaaaaagaccaggaaatggagtccaaatcttttctgatatctagttttaggagaacccttggtcgtttgtgttggtggagcaatctaacaatttgttgtgcgagcatacaattattttaaatgaatcgatcctcaatgaaagcactttgtcttagtgacactctgtaatttttcagccagtctatttgcaagcatctcaatgactaacttgacaatgttgtgtaccaagccaataggtcagaagtccttgcctcgtcagccccattcttcttaggaatgagtcacataggttgtattcagctgacctaaatgattaaattttctgctccaaactgctgaaattactgccaacatcccccctaataataggccagcaagatttatagaacctatcagtgaaactattgttgttgtacgtgtaaggcttacagatttgtttaatatgctttacttagtgattctctcag

SEQ ID NO: 92029 - DNA, 559 bp, Zea Mays
atgcctaaaagttggatgggtgccttagcaagatcgaatgccataaccaagaactttgaaatggccatggtgtgccggaatgtcgttttagacacattcatcgggtgtatcgacacatggtggtaaccactacagaggtctagcttcatgaagatgcacatcccctaagttcgtctagcagagcctggactatcgggatgggaaatttgtcctttactatcttggcgttgtgggtgcaatagttgacaaagaatcatttggacctatttttgttctggacaagcagcactagggtagagaaaggtgacgggttggattgaatgatgccttggcgcaacatttcgtcacactgtttcttgatttcatctatcaacagtcaagagtagtggtacgatcgacggggtggatggtaggaggtggatgtggtggtcaaacggttgtaggtaggcacaccttctggctcgataaacacatctacaaaaatggccaggagcagtagcaatacattgttggtggagggaaggcctatggtcgtgtggcacctatctcagtccatttg

SEQ ID NO: 92030 - DNA, 526 bp, Zea Mays
gccgacaattactccaaatccatcttctggtcgttatcatcagcaggcccttgaagctcacccctaggattcctcgcattagcagctttcagcagaagtttggccccgtcctgaagtaaatcttgcagctctttcttgctcagacctgcccagttaaagattaaagcacaagcatgacacacaatttcgacaggagagctgaccacaatgttttgaaagcaaacattattcctggctttccagattgcccaacagatggcagcagcaccaacagtgctaatttctttggcctcacccaaattattatcaagtcaaacccagcattgatgaaaatttccaggaacaacagtggaattaaagcatttagcaaccattccccacacacatttggctgtatgacaattgaagaaaagatgggtggttgattcaaactcatcacagaaaccacaggaagaatttcccttccaatttctcctgaccatgttttctttggttaacagcacattattttccaataaccacatga

SEQ ID NO: 92031 - DNA, 379 bp, Zea Mays
ccaattcccagctacgtacaagccatcatcagctacgtaccgtcctgcaacagccacaacgtacaagccagcacaccgtcctgcaacgtacaagcatctgcatctgcatctgcatccatacggccagctacgtacgtacaagccagcatcagctacaacgttgtagtcctcgccttgtccacctcacctagctcggtcatgaaggtgcccacccaaatactaagtcaaagcgaggaaagactgcatgcattgttattgtcgacgatataactacagttattggcagcaaaagggcaatatgatcgtgtttcctaattaatggtggccaaaatatttgccttgttttcaccgacaacagccaagcaactatacaaatgtc

SEQ ID NO: 92032 - DNA, 477 bp, Zea Mays
aaaaaggcgaaggccatgtacaaacattaaactctcaaatatacaaagttttaatcttcttttagcactttctcagcggcttcattcagcatactgttgacagcttcgtcaatagcttcattagaaatttaaattatatctaacacttccttcaaggctcggtcagcttcgggatcgtatggctccagagggggtgaaagttcaactgcatcataaaaaatgtttgttaattccgaagctaaaaacgaattctaaagctaaacctcagtaaaggtacctataagccttgcatgttcagcagcttcataagctcgtttaacttcttcttgagtgtcatgagattttttttcattttttctaatcgtttcatcagctatctcacggccgcccttcatccacaccatggagtaaaatctctctcctagcgcagaagcttcagccaaagggtctttcatgtcatccgtcgagaaaacaaat

SEQ ID NO: 92033 - DNA, 489 bp, Zea Mays
gcgtgggccatccctctctcgtttgataggggacgcagcgcagggcagagcagagcaacacatagcagagcacctagctagcatccctctcatcactagtagtactatcgtacaaccagcccagcagcagcagactctcatcattatcgtaccactactagccctgcagcagcgctgcctgccggctacgctgctgctgcattcccgcatgcttgagcaagttgtagctgtagggagggggaatcgcatcacaggagagctgaggtggagcgccgagacgagaggatacacatcatctctatttcacgtgtgctgatttaattagtatgcgtgcggttgtaataattattaattaattcagaaattgaggcgtcgacctactggtttgtacctcgcgctttgggcgttggactgcaaaaccaggagtagtagacacaacatccgaggaagcctgcaatggccacacatgctacgactgcgatggcggct

SEQ ID NO: 92034 - DNA, 375 bp, Zea Mays
gtcagataatacaaagactgaatattgactatcagtgagttttgaagaactttaggcttgattcattctcaaaggagtaagcaactgagcaagatctctatagcaaaattgtagtttgtatgtagggctacaagtttgttatagatggattgacatgttcttgcacagaaatccaagctctaggcgtcgcaactctggatgtatggcgctctgaattgggtttccaatggtagagtacactgaaatatcccaatccactgaacctcgccgccgacgagccgtgcgctcagactcgtgccagccgcggtgattcgtgccccgcgcagttggataacgcagagagctaagaaatatcaccccgtggatgtactccgg

SEQ ID NO: 92035 - DNA, 897 bp, Zea Mays
cgggaatgcctccacatcaacttagagatccccgacgaaggagatcacctcgacatgccacagaaaggtgaccagcctcccccacgcgtttaggaagagggggagccaggtggagcctagacccctcctgggagctacatggctcacctcgagtagctccgagaactacacaacaagctcggggaggaacaacaacagctgcaactactatggtaggcactagatagggaatacgctagcaaaaccctcgacggaggcacgtgcagaggcacgtgacgtccaacattgcatcatggaggacgtcgacaccaccgcacctgccgcccttaactggaccagtcaaagcctcacaacggttgcgatcttactccacaccatgccggagccctctaccaccgagtggtgccacatccacagcgaacttcgagagctcctagaatgcgccactgtccagcaggccaagatctcggcctctctcatctaggagcccaccgcaagtcactaggcgggatcctctcatttcaatagggaggcctctatccattctacacccaccagagagagggcacccacggtgcacgatcgtctctaagacaaccaccaaccccaaggggtccacgaccgtctcggtggacgcattcgacaccatgagacgtatggctaccgccctcagcggcgcgaccattacgatagtagggaggatcagggcccctctcccgagctaccgggtccataggtcttcagcaaggccatccgcagagcgccattcccacctcggttttgagccccaactactatcactaagtattcaggggaaacaaagacggagctctggttcgctgactaccgactggcctactagctcggggcaactaatgatgacaacctcatcattcg

SEQ ID NO: 92036 - DNA, 682 bp, Zea Mays
ttttttttattggaaaaagaagctatggatcaaaacttgacgatgatgaatcagaaatctctgccattgctgctccaacatccatagaaaacacgaacaactacttcccaacggttcaaatatgctagttgacaatctgaggatcaatattctggtataaaaaaagcaaatcagaccaaaaaaaatgatgcataaaaaacaaaaaagctccataccaccatcagcactgcacgcaccacccacgaaaaaaaggaaaaactagaaaaacaaaataataagagcgcccaaaaaaacaacacaaattgaatcacaaaaaacctgaagaaacatgttgcaaactagagacttgtcttcagtgttcttctcactaaaatagagatccttggccaaggtgattcgaatttgagggatgtcctcagtgcggatcttgagcatcatatcaacaaatatatcccaatattccatgtattgaagtgtgaaaataccgcagtcatgcctatgataattaaagaaggcaaaattactacaagaaataatttgttgtggctgtttttaaaccatataaaatatgtagaaaaaattaagatagcaactgaatttggattctaataaaaagaaatgatagagttgaaacttacgtattttcctactttggtactgtaggatataaaattttgaatga

SEQ ID NO: 92037 - DNA, 284 bp, Zea Mays
gaagatcatgccaaaaggcatcgagaggggccaatcgaatgggaaaaattagctcggaaaactaatccaaatggagaaatctagaaaacaagatctcccttaacatccaaaacatgagaaagacccctcttaaagcgcacttcatagtcatcctcaaggagttgtgacacagaaagtagattgaaatgcaaatttgaaaacaaggcaacatccttgaggacaaaaatctcgttcacttgaacggagccacgagagacaaccttacctctcgacttatccccgaa

SEQ ID NO: 92038 - DNA, 787 bp, Zea Mays
aggctggcggtgacaggttctgtgctgcaacgagcaatcgctcgcataccaatggagcgaggagctggacagagacgaggcacagggccaggagccatgcactccaacagtgcctcatcttttctgcttcctacactactgcgaccatgccaatgcacctgcccgggaaatgcaacagcaattcttctcccccttcagaaattcatggggatggccaatggacaacaatctcttagcaccgtggaaccgattgctcgacggaatccattggttttgaccagagaactttgcaacagccccagaatggcaccaccttcggggaatacatgcatgcagaacgcgtgaaattggagcaacaagcgagagcttgtgcaacagacacctggagatgttcggagaaatgcacgagcccgggtgaggaagctcagacagaatcgcgaacgtgggcgaccaaggcaaagatcgttatgcaatgcaaagctgcaatgcgcccacgaaatcgagcaaatccggcaatgcagagccccctagccgcgattcccaaatccgttaagaaattgagtcgaaaaaatcgggggaaacgaaaatgcagataatataagcccaggactaagataccgtgccaataatgccccctacaaaacgaaaaaattctagaaaatttgcagcaccaaatccgcggcaaagaaatttgacgcgcgatccggcgtcaccgtggacgtggaggcgatttctttccctgctccctcttttctcgtggcgtctccccgaaacgggggaggaagaa

SEQ ID NO: 92039 - DNA, 518 bp, Zea Mays
caaactggcctggtaactgttattgtaagagaactccgcatagggtaaactcttatcccaactgccaccatgtttaagagcacaagaccttaacatatcttctagtacttggttagttctctcgatctgcccatcagtttgaggatggtaggccgagctgaaattcagtcttgtatccaagcattcatgcaacttctacaaaaccgagaagtaaactgggatccttggtctgacatgatcttcttaggcacatcgtgtagacaaactatctgtgccatgtaaaactctgctagcctagtcccgaatatgtggtcttcactgggataaagtgggccactttagttagcctgtccacaatcacccaaatagagtcataccaagtagatgtgcgaggtagacccatgatgaagtccatgccaatttcttcccacttccattcatgaatcttaagcgggtgtagcaaactggtaggtctctgatgttcagcttccaccctctggcagacatcacacaatgct

SEQ ID NO: 92040 - DNA, 307 bp, Zea Mays
taaccttactggattatccacaatttagctccaaagctggactaatgtcactgtcagtccaggttcagaatacccccttgaccgacatccctacttccagggtgttttactccaagttccatgtagttcttgggctaggtcacttaatcaagttgatactactatagtagctcaacaactttgccataataacttatagcaaatcccttatggattaagagatgcaagagcccaaagttgtctcagtagcattgttttgcataattccaatccttgagcacttgtgagtttttgcacttcaccccaa

SEQ ID NO: 92041 - DNA, 556 bp, Zea Mays
gaggcgtaataccctacttcatgtggtggtttcctgtattgtggtgagtttacaaggtgtgactatgagaatggtgggctgaggatgagatgaaaaaggtaggggtgtctcctggccttatatacacaaccagagagagcccccgcaaaggtgtcgattacaatctccatacttctctcctgatttgtagcgaacaatcttcctttatcccggggaaatcttgtgctcctgtgcccgagttatcgttggtggttcagtctgttgggtgggcaccataaacccggcccgacatacctgcactcatgcaacagctaactcagatgtgggcctctttcgtatcagaaccagctagcatttgctggtttctttatcccacctaccaacagtcgccccaggaaggcgcctgctgtgtggccccggatgcattttcgtgctcatgtggacccgagggatatccatcccccacaagcccctgatctttgaattgatttgaaaggtgttcattgctctcttttgagttcaacattcttttctaagatttcatggctccgttggg

SEQ ID NO: 92042 - DNA, 1498 bp, Zea Mays
aaattaattaatccttttagttagaaggataaaacttctttgttttaaaccatagagtcagttcaagcctcatttttcctttgcacgaaatatgattctgaagggatatatagatgtgcatgttgctaaaaaggtggaaggtaacataaaataacagtatgcttgctgattggagagaagggattcattttgttcacagaataattgtttggcttctataattcctctggtgtcttaaactaggttaatgtattgtattgttgtagggttataggaggctgagtcactgtgagagcaactccatcatggccccaacttgagccctcatagctaaatataggtgcccagaccaaaaacacaactccagcatggcccttactagagccctcaaatttgggtggccacccaaatcctccctctagcactcaaacgatggttcaaggcttgaagccaacaccttctcaacccgccccatcatcctcgttgaaggcctcttcgatctcctcgtcggccaactcaacgcccggcgcaacggcaatgaggtaggcgatagctggcgtggaggagtggcacgacgcgagttgatgaagagaggagcggcacgggtgggtgggggacgtggaggagctgtgtggctcctggagtcgcctggtacccgtcgcgatggtagagacttagagataggtgcgagtggtaggcggtagctggcgcagcgtgggtggatgaggagaggagcgaagcggagcgaatggatgaggagcaacacggctcctcctggtagtgtctggtctcctccctcgatggaagtgtacctcctgtggtggttggtaggtgactctgcctttgctcgcataaatactgatgagactgaggatgggaagaacaaagaatgacaagcgagccctttgtgtcagtgttcatcaaatattatttaagccgatataaaaacttaaactgggggggggggggtaagacaactcctaggtattgcattaaaaagatggttttctcacgcaggtcgagaaaacttccaaacctcagccccactcatacacaacaccacaacctatgtgagaacgaccactagtaggcccaggccttagacatgtgatttggcgtgagataggtggtggaacttttttaaccctagctgagttgaatccaggacatgagtgctactcaagccaccgtctcaacttgaggccttttcgctgctggaatagatgtaaaaaaccaaatcctaaattatatttttgtgtttttggccaataaggcagctttcttgtattggtccatttggggcctaactcttccttcttaatataatgatgcgcagctcttctacccgttcgagaaaaaaaattatgtgacagttccctcaaatcaaaagtaggggccttgatttgagttttttttttgctggagttgctctgatagtaaatgattgctttgcatgaatctagtcgaatccatgcgtttgtcctccaaagctgatcac

SEQ ID NO: 92043 - DNA, 435 bp, Zea Mays
tctttggttgcatggctcggcacattgttaaaaggccatgcaatatgctcaaagctaatactctaaccaatttcattccacatttagtcacaaagctccttgaatggcatttatatggaacattagcttcttggagaacacaactagaagtgtttgcttataggtcagtgcagttgtaggagagagatttattagaaatgctcattccaatgtcaactcgtggtcacaacaattatcactcatgctctcacaaggtgcaatcaacaacctgcaaaacacttctaaggaagatgccaccttggttttgcctccaacagccctcacacatcaaggtgttggagccaattatgaggataaggtatgtctcccactcgtgttagaaactcacaagttcataaattttgttcgatgtttgtgtgacctcccactcccgta

SEQ ID NO: 92044 - DNA, 394 bp, Zea Mays
acaaatatacacatatacataaaggaaataacttttctttctttttttatgatctcttacaaattgggtattacaaatcctaccccccttacaaaagaatctcgtcctcgagatttaagaaggactaggaaagaggtggggaatgtctatgcgtagctcttcttctctctcccaagtagcttcatcttctccgtggtgactccattgcactttgcacatctttataaccttatttctcgtgacacgagtcaggtatcaagaatcttgattggatactcagtataagtcagatcatcttgaacactaaggtcctccattggtagctgctcttcaggtaccctgagacacttcttcagttgtgacacatgaaagacatcatgtacatccgcaagat

SEQ ID NO: 92045 - DNA, 530 bp, Zea Mays
caaaattactttgggagccaactcaaattgatatgaaatcaatcacaagcaagagaataagggagaggggagaggaagaaccaaatcgcaaagtaaatattaatgcaatgaacatgacgatttgtttcctgaggttctgctttgaagaacgtacgtccccattgaggagcccactaaggacgggtgtctttcaacccttcctctctcaaatggtcatagagaccaattgagtttttcttcacttcacgggggcacaaagtcccacaaggacttccacacaaagaacgaagtctttttctttgcttgacaacaatgagaatgggggagagagtgaaaaatgaaatctcaaatcaagatcacaagaactctcaacactcgaatgcacaagctgctaagtctctaaaactcgaattgatcgaatgtggcgcgtgtttggctttggaagcataggtgttgcacttcaatgtgctagttgggggtatttatagcccccaaccacccaaatagccgttggagttattgggcaaaaa

SEQ ID NO: 92046 - DNA, 620 bp, Zea Mays
cacacgaccatcccctgaccgcgacagaaaccggtgtgataggatcgtctagtgtttgtcgtatcatcccgagggcgccggtaggatttcttgggtcggagcgttgactgggaccaaggaaattctcgccggaattcatcactgtcgcgactccgccttgcatcgtgggggcgtgtccctgcgactcaaccgctggtaaagtttcccttgccttgcacgccatcattctctgtgtgtgtagcacccgttagctcgtgaattagggaatccatgcgtcgggtcgtgtatctcggtgaggacaccgctgtggggaatgatttccaccgcactcggttgtcaggggtagatgatgaaatctgggccatgggatctacggtcgatggcggggatggaatctggggagtgatggtcccctagggcgtgagatggtgatcggaaggatccagggagatctcggcttcattaaatccttacccttgatcttagatccaagggtctctgctgcgtaccatttcgatgctaggataacctaacctgggcggtctgtctttgatcggacggcgctagatccccgataccccttcggctacgtagttttgcataagagacctcagagtttt

SEQ ID NO: 92047 - DNA, 432 bp, Zea Mays
ggccgagtgacctccgctactacaaatgacccttcccatagtggtgaaaatttgtgccgtccttcccctgttgtaattcggtgaatgaccaagtctcccactacaaaggatcaatgtcgtatagcctctgcctcagctatgttttcaaagaccagccttggtgccccaaacctgaggtcagcaggtagcactgcctccgaaccatagaccatgaagaagggggtgtttccatgcagagctcgactgggttgagttcttaggctccaaaccacataaggtaattctccgatccacttccctgcgaacttttcattcttgtcgaagactttcttcctgagtgcttccagtatcattccattagccctttccacctgaccgttggctcttgggtgtgctactgacgcatatttgatctgaatgctccgttgttcg

SEQ ID NO: 92048 - DNA, 546 bp, Zea Mays
atctctatattttttctcaatgaacagatgagtggcaaacaaatggaggtcgctgccttctggtgaaccatcatcgatcacttgttgcaactgcgcactaacctcaacacgcacaaggtcggtctcagtagaggtgacagacttgttagtggtccttgaacgcgactcaaaagcctccacaaggcgtttcatgtactcttcccttgaatcttttttcatctttggtttaggagaataatgacacaccttacgcttaccagtcgcatttgagcaagggtcaggtgtgctgttttcacccccacctaaagtggcttccaaatgatcgtcagatgatgaattagcatcctcgacgcctggaacaagggttctttcatttgtgcagacaatgggtccaaacataatctttagctcgtcctcattctctagggggctgttttgaacataatacaacctggcattgcctgcaccaagatggtagttcctagtttcagatggccaatactattgttagtctacaaaaaaacgtacttacttcattttgcttgg

SEQ ID NO: 92049 - DNA, 376 bp, Zea Mays
ggggcatgggaagacgttggcgatgtcctggcagcaactgggagcggaccaccggcaccaccctcagtagattcctgctgctgagaatcagacccgtcggtgggcctagtatctggcggaggaggcgtggccttgggagcagcggaggaagaagccctagcaaacagatgatgggtgaagacttgtcggcatgatgattaggcacatggaaaaagggactacacttacttagggccttggactttccactgaccctggaagcgaggtgatcaccgctcctgctgctattgctgctgctgttgctgttgctattgctgctgctgttgctgttgctattgctggtgctcctgggagtgatcacccccggatggtggcg

SEQ ID NO: 92050 - DNA, 478 bp, Zea Mays
gaatggctccatattagtacatttccgcaatttcaactatatactatgcttaatattctgaaagttaagatcgccgaatttggatcgaacaacactcttttcaatatgtatagagtgtcgtccggtctaaactagcagatcttaacttttgaaatattaggcatagtctagggttgacattaggaagacgtattaccgtggagccatttaccatgcaaattcaattttctctctatctaaagcatcttataacattgcatgagatggtccaacaatataatatgacgttcgtagttaacgaccctaacttctatgtggtttatactcatataaagagagaagcatataaattatttaaatttaactaagcatgtgaattttgcatacattactggtatagttcttcatttgaatccattaaagcatatcagtgaaatgtcgtacagagagaccacactaattgatttgaggtcacact

SEQ ID NO: 92051 - DNA, 486 bp, Zea Mays
tgacaacagatcttctgggaccatgtcttcgagagtctgatcaaagtttgccagagacaattcttgcagaccaacgagagtagacaaagctggagaaggaacaccactactctccccgctggctatgtagcgccggctgttcttccgaatcaagggaatttcctcttcctcttcctcatcttcatcaataatacggacggtacacccattggtatcaactttggccggattacacccattgggatcaacatcatcaaggtcacacccattgggttcagcatcagtcgggtcacacccattgggttcaacttcagcaaaaactggcactggcacttccttagcagcaggagcagaagggtcggcatcctgattcaagcatgacactcgacgaagacgtctctttttctttttcttcccctcagcaggagaggttggatgattggttcggcgaggacgcttcggatgaatactatcagacctctgaat

SEQ ID NO: 92052 - DNA, 598 bp, Zea Mays
cgagtttatgagggcggacttcaccgagccggaccaggtttatgaggccaggcctcaccggtctagaccgcagataaatactataatactacaaaggaagagttcattctcatgctaccttatgggcagaatgtacggggccgacctaaccatccgagcgatcatgaacgtcaaactcgaaggtcaagcatcgacccatactaccttggcaatattcgagggtggagcttgacagtggccgacgacggataccccaaacgccatggagcttgggttgtggccgacgtgttgggtcttagcgtcgcaaagcctagtagtgggtctatgcagcgggctacgttggtcttggtgctgcctttgaaagcccaccggttgtgaatcatctaggcccctagtgaaattttggtaattaataacaacaatttgtggactaacaattcttagagaaataaggatgcaggttggaccacagagaagagaaagtcttggagacttataaacattggttgtggatcaggtgaaggcaaaggtataatataggtttcatttttgccagtcacgaggagtttagagaaggaattgaccagatttgtaggct

SEQ ID NO: 92053 - DNA, 344 bp, Zea Mays
accgacataacctttatctcgacggtttgagcaccacaattcacgaaagtctacctagacatctagcatcacctagagagcctactacttcatattgcaattcatacagaaccgcggcgtgacagtaataacacacaggtaatcgacctttcttcacgaccttcagctaggtcaccaacagatgacatgatgactacgaaggcatgtcaccacttcatcacacccattcattgcctatatgcgcactaattcattacttgcgacacatgcactcaaaatcagtccacactacacaaaatacatctatctcttatttatgcgcagacttaacacctttcgggata

SEQ ID NO: 92054 - DNA, 312 bp, Zea Mays
gagttggcagaaagtctcatacatgatataacatacacttctctgatccaataccttgaaatggtttctgagatcttgtgttttttggaacctgttggttaacatgggttatggggttagggatagttttcgcaacacgctacatggtaattgtgtgaaactttaattgagtgtgtttctgaggcatgcataagttcaggtaactgcagggttaggccatgcctttcggatttgtgttatagtaatttgtccgctgtccctgaatgatatgcttacattttatttgggtactattttgtaataaccatttac

SEQ ID NO: 92055 - DNA, 497 bp, Zea Mays
gccatcccggaaagttgatgagcagccaattgaacatgctgattttctgggcatccggtggcttctaatttcctttttatcgtgcgcagccagtcgttagcatcgaggggattgctggatccagcgaacgtgggaggcttgagccttaggaaatcccccatcctgtcctgtggtcttccactattcgggcgctgattctccaggcttctagtgaggacttcaatgaatcgggtttgattggctagaacttgggctaaatctaatggcagcttcggaggtacggggaggtgggtctcactcccttctccgccagcttctccttcagctcctaggggaaaccctgctctaatcccggaggcggtaggcgtggttttatccgaagccatctgccaagggaaaagagttactactatgcgtatgccaattttttttcaaccaagttattttattcattacacaagttcattacaagcatacagttaccacaagtcgcacta

SEQ ID NO: 92056 - DNA, 383 bp, Zea Mays
ggaagatactcctaatccgccacctataccaccaatgctagtcaaggctatcgctgccttggtcaatgctactgcagataatacccgcttcttgcgtgagatggcggataatcaattttagtggcatcgcaggagagctcctccacaaggaccgcgtgaaacctcgtatctgaaattctctgagacgtgtcctccactctttattaaagcagaagaacctcttggagctgatgagtggataagggtaatggagcagaagttcggattagtccgttgcacagaaacacagaagccgttatttgctgcccaacaactgagaggccctgccagtacctggtgggcgaatatttagcggttcaaccagccggacatcaggtcacttg

SEQ ID NO: 92057 - DNA, 846 bp, Zea Mays
cagataagcctcaagaaacgcctcgagcgagtacctccatcaaatctcaaaagattagcaagcaaaggtggcggacgctcaaacggttttaggttcactttccctcctctgcagcaatggttgtacacaatttttttctgggtggagcaggaatcgtttttaacacgctcttggaaccagaaaacagcatggcagtatgggcatacatgttcaggtccaccgtagtatgacctctcagggtaggcatctacacaggaagaagagaaatggtagcaccaaagcaaagcaggaagaatgttaccaaaaatgttgggcataatacacaccttttagagcatctatgtatgacctgtccaaaggaagcgtggttgacaatggctcgtcaggtaccatgtgatgtactctactgcgccggcgtcgcctattgaatgcggcaagcgctgaagggaatgacattatagatctactacctgtgccgacataagcatcactaacaccatattgttttttgttgaagtaatggctgaacaaacatgggtgtacgcacgtgttccctatagaacaggtattggctggttagaggtccccgaaaggttagatgggtctacttcgtcttcaccatgaaaaatgcgatgggcatcagttgtctcaaagactgggcaatctaaagaggttgcgtattttttggcccgcaagagaagtatcgcaaattaggatggataccggccatcgcatgcataaacaaagcagcaaacttgtgaggactaaccctgtgcaattgcattgtgcctcgggcgcttcgcttcgtggcatctcgcaacacgcacacatggagaatcaggcata

SEQ ID NO: 92058 - DNA, 534 bp, Zea Mays
attggtgtaatccagccaaagctgatcccaatgggtgtgaccttgatgatgttgagcccaatgggtgtaatccggccaaagctgaacccaatgggtgtaccgtttgcattattgatgaagatgaggaagaggaggaggaaattcccttgattctgaagaacagtcgacgctacatagccagcggggagagtagtggtgttccttctccagctttgtctgctctcgttggtctgcaagaattgtctctggcaaactttgatcagactctcgaagacatggtcctagaagatctgttgtcagagccggcagatggtggaatgatggaagtttgcgctgatgtgcctgatgccggttagagttatcccgagcaacatcttgtgcctcgtcgaccttggggcgcggtcttaagagtcaagaggccgatctagattgctccgttctcatggaagttgttggaggtccttcagccttagaggtggctgccacagagagctcggtcctcaaggatggtgctagcgtttgcccagcccccga

SEQ ID NO: 92059 - DNA, 318 bp, Zea Mays
gcatagtcttttctgtttctacccgtgtgattgatgactatgtctgtgtaggtgtgctcgtatgagtctgcccaacagacacgtgacttttacccgtacccgcgcatgcagctaaaaagctaccgcaaaatacgtgagttgcatctgcacatacatgtctaaccgagtgcatataggtaacgaacatgctctcggagctagtcaacgcatgcagagagccatgctagcgaggtacatccaaccaatcatgcagtatatgactccagcatgatattttcatgcaaaatgagaatttttgttgcagcggcgaacctggca

SEQ ID NO: 92060 - DNA, 667 bp, Zea Mays
attcattttcatctttcaacttatcacatttagcttttgacttcctaatgatttgagtgtattccttgagcaagtcagctagttcatcataggaaggtgaagcaaattcatcatcactatcactatcactatcactatcatcaataatatcattatcattttgtaccttccgttcacctctagccatgaggcataggtgagaagtcgatgagggtgttggtggtggtgaagagaagtccccagcgatggcggcaactttttcatcatttttcttcttcacttgaagaagacccacttgatgactcaatgtcagtgagccagtcaccaacaatgtatgccttcccatttttctttttgtggaacctcttgtgcttcccatccttcctcttgaagaatctcttttcctttttctcatcatcactgccatattctttcttgtccttgaacttgttcttcttgggcttgttgcattgatgagcaagatgaacaagctctccacagttgtagcaatccatttcagaaatgggctttcttttactgaaaagaatttcttctttcttgagtcaaacttgatgccttctctgttgagcttctttaacatcttggtggtcttcctcaccatcaaggcattattagcatcaagatcatcatcacttgaggattcctc

SEQ ID NO: 92061 - DNA, 583 bp, Zea Mays
gtggtatcctgttggcttggaagagctctgtgtgcaaggttttttcagacaaggattgacaatttttcagtttcagcgcaatttcagcaagaagggagatcagcgtggtggctcactggggtttacggcccctaatcagatgatctcaaaatacaatttctgcaggagcttcagatgatccgttctgcttgcattggcccttggataattggcggtgatttcaatcttatatatcaagcaggtgataagaacaatgataatctgaacagggcaatgatgggaaggtttaggcggctgcttaatgatctgcaattaaaggaattacctctgttgggtagaaaatatacttgatcaaatgatcgggcttaccctactctagttcgcctggatcgggtcttctgtacagcagactgggatgatggtttccctaattgtgttcttcaaagctctgcctctttaatttcagatcactgccctcttttattgggtctgaatgagctcactcaaggaaagaggagattccattttgagagtttttggaccagattggagggtttcttggaggttgttgagggctcttggt

SEQ ID NO: 92062 - DNA, 366 bp, Zea Mays
gaggattggggcgcttcaggtggtatcagagctgttaggttggccgcaggacgtaacccttagcctgatccaaaagtttttgagtcaaaactattttcttaaaaaaattcttgctctcatcccttcatttcaaaaatgttttccccctttccttctctcaaaagtcagatggaggttcagtgccaaaccagcttttgccagaatgaagagggtttccccaagttgctgaaagcatgcacagttcgccttggaatcaggagccagctagagtatgatggtcgtgaattcgtcaagcatggcacagagaagtgtgtcgtgactgtatacattggatccagtccgcaccatgtggaatggagtgtcact

SEQ ID NO: 92063 - DNA, 455 bp, Zea Mays
gtttagagaaacaagaaacaaatgttatagcttaactttaggggaaaagatctggccgatttagctttcgcagggttatcatcctatctgagggagaaactagaggggcaagattttactgacataaaccaagtcatgcagcgtgctatcacccatgaaagtcgtgctagggacaacaaacagtatagccgatttagagatacgaatggcagggagaaagagaaacaaggggttaacatgttagagcccaataatgacagtgatgaagagacagatgtatgtgtggctgaatgggtagatgcgccaaaaggtaggcccatgacgtgtgcttttttaaagccaagtccagggaaaagggaagagatgaaatatacatttgatgtgtccaagtgtgataaattgtttaacatcttattacagaataacatcattagattaagggaggggcatgtgat

SEQ ID NO: 92064 - DNA, 613 bp, Zea Mays
atcagatcaatgtgcaagacagcttaataagttgtcaacattagccatgatcattgggagagaatgcaaacagaacatatattagttaataaattatagcccatagactttatacacagacaaaaaaggatatgcaaggtcagatcaataatgtgcaagatgcatatatatacggcatgtccgatcagaaaacctctctctctccattattcgactagccaagtcaatgcgatcaaatcaaacggcctaaaacttggtcggtcttggtgtgcatgggagctagcggcctgccagttgttagatttcaatatttcatgtttgtttgtaactttgtacggttcgccatgcatatcttgactaggccaataataagcaaattcctttcgaccatatatacgcaagtcaaataattaagtaaaccctgcattcagagtgtatgtaaaccatatataaacagctgttgacacatcgatcatgccagctagctagccacacgcaaacatgtacctaacatactgcaccgaacgatcgaagagagatatatgcatgggttgtcattatctgtcaagtgatgaactatctttgactccggctccaagcttagcttctaaac

SEQ ID NO: 92065 - DNA, 556 bp, Zea Mays
ctcctcctctgttgcttctatggacgtccacattggatcgccactagtccagtccgaagaggctgaggtgacacatctctctacaactctcgctggtctggtcactttagaggccaatgatccaaacaccgggagtctgtcgcttgctaacgaggctgaggtccctctgagtcgcgcctttgatatcgttgctgctgatcttccctcatcaagtaatgtatcaactcttcctgctttgggtcttcctctattcctctccaatcttcaggtgagtcgacttttgttttttactgttcccttggcaaactagcctttttgcttatcttttcataatcataggatgttcttggtggtgtatctgcccaactgagatcctgcggtgctcctatccccgatcaagtttcgtctctgatgcagtggaaccctccactgcttcaaaaacaaatagatgatatgagggtgtcaaatattggttagtgagctaatagcttccttatttgctttcattactcgactcattctaaatcttgcgctcttcttctacttctttatcata

SEQ ID NO: 92066 - DNA, 377 bp, Zea Mays
ccgacaagcgctagagaagtaacaatgcctgttgtgaaggaaatgaagttgccaccatcgatcacccatccatgctgccaaccaaaaatggcagcgatcacttctagaaactgatggatgcattgtgcccgaaccttggctacctcgttcgccataagctccacgattgcgagcttctgaagcgcttcatcaccaatcctcccagcaaagaaggcgaagccagaggaggtcgccaagaaggcagagcaggacatcaccgatgaaggctttcttgagccaactggatgtcgtatgatcctcggcggtcctgaggcttatgatgacaagcgctacctcaaggtggcacaccgctaggtacaggcaacagaccctgttgt

SEQ ID NO: 92067 - DNA, 564 bp, Zea Mays
caattacatctgcatatacatataggcataaatataaataaaaaatcataagatgactatacaaactaagaatacccccattaaaatatatccaacttcacaagatccaccttatcttaaaagatccatcttggcttaaaagattctcccttatctcaatagatccatcttgtcctaaccactatacttatctcatcctagtgtaacaaccatgatctaatccaaatttgagttacttaaataagttagataatgttggcgacaaaaattaggccctatctaatctattatgatttaaccttgtgggtgattcttaatgctggtacaaaggataaaaccatactcctaattcacttaagcctaagttagtgccatagatcaactcagccatacactcccaataagttacataatccatctatgtaaacctattaaaaaaagtcctatccacagaccctaactatcttaaactacaactccctagctcagatggagataccaagactggataccgaagatgatcaacctcatcaagaaaggataagcaccaactcaagtcttcaa

SEQ ID NO: 92068 - DNA, 649 bp, Zea Mays
gctcaaacaatgggagaacgaaaatagtttgatgcctgctaacacaatgtattagagcaatagtgttttctctgtcccccgcaatggtcatgtacggggtatttattggtaactaggggacgattccaccctttcaaataaggttatgcccctagttacctacgttatccctagaatattcccctcccatgggttatcgcgagtcattacaacgtgattaagtacacccatggacggacacactaacaactctacccacacattggcttacaagtgggaccctgcggttttacacccccccattacaataacacgcgggtaacgacacgtagtcttcacgctccatgcgtccagccatcggtagtggtggaagccttcgccattcccatctgtggcaggaaatgctaaagccttcgcccgttctgtacactccctccgtcatggggctctcactcttctagtcttcgcttgctcttgttttccctctgacgcgttccgcttctgcggtggagacgatcgagcgaggggggtgttacaccttcgccccaacaactcccactttaagtaacttctgtttttaggtctaaataaggcgactgctgacatgttttcaaggagttctcaaagctacttgatgatgaggtatatt

SEQ ID NO: 92069 - DNA, 432 bp, Zea Mays
ttttctttctagtttctatagcgcaacactgaataatctgcttttgtatctttgggctagtcaaagtgcaattacctggagcgttgttaagaacatacttgttgacctcttcgctatttacagcaagaaatttcaagatttcaatatagtttcctctgttgctagactcttcactttcatcatgtccacggaatgacaatccttgatgcaaaagaaacttcaaacatcgaagtgaatatgtcaaccttatcttataaagattgcgatcatcatcactccacttctcaattttattatcaattgctgcattaggatttataaagctaagatatttctctttggctgtcttatgtgacatagaacccacatgttttagaagtgcttcagaccctttattccaattattccaaccatctgaagtaaatgcagaag

SEQ ID NO: 92070 - DNA, 678 bp, Zea Mays
ggcgggtcctggcggcttcagctggggacagttgttcttgaaatgactgggatctccgcagtgccaacatgcattcgccgggggttggttgcttgcaactgagggggcatggaaagagctctgactctgctgactgaaccgtgatggggtgggtccagctggtctactgaagcttggtcccttgggtggaaatccaaaggatcgagtcttctggtgccggtcttgctactgagcccggaggacttggaatttccttttgagatgccctttttcttcctcctttgccctttcaacttgcatggccttgttggagaggtgagagaaattgaggaagtcttggctagccagaattgtcttgagttctggcctgagtcccttcaggaaacgggccatcttcttgccctcggtactgacgtcatatggcgcgtagcgggctaactccgtgaacttgtgcacatattcactgacagatcttccgtcttgagtcagctcccggaattcatcttccttaagctaaacgagcctctggggtacatggtgctcccggaaagccgtttcaaattctgctcatgtagcatctctgatggtgatgttgaaggtatcccaccaggctaaggctatcccggaaagttgatgggcgaccagttgaacacgctgattttccgggcatccaatggc

SEQ ID NO: 92071 - DNA, 840 bp, Zea Mays
ctcgtttagatacttaggtttatcaatgcattatagaaactaagtatggtagattggaagataattgagaacaaattcgaaaagaaattatccagctggaaagggaaatacatgtatgtgggtggaagactagttcttattaactctacccttacaagccttgcgatgtttctgacgtgttttttttgagatcccaagaggtgttttggaaaaaatggactattacagatcgcggtttttttggcaaggggaggataatgagaagtcactttattctagtagcttcggctatatgttgggcaatctggttgagcaggaatgatgcagtgtttgataatgctccaataaaatcttctttgcaggtggtttttcgggctatgcattggctagcttctggacttaactacaacttagacaggatgatcaagaactaataatcaaggcaggtcgtagatttaaaggagttggtgatgcagatttttagacatcatggatggggatctccatgtagactttgtctttagtctcgtttcgccgcactatgttttgcttttctccgagttctcagatagtgatattcctatctgagtctgtaataattcggctatagtctctttgagacaaagaccgagaactttcaattcccattatctaaaaatgtacatagaaagagtcaactcacaaaaatatagaaatagtcagcaatgcttgttcgtcttgtctatcaacttcacaccaaaccaacttttgtcgtacacattttaatagatcaagcacttgatagcttctttcaattgtcatattaaaaatttagattgctgctaggcccatattcttttt

SEQ ID NO: 92072 - DNA, 460 bp, Zea Mays
gtagttttctcttgggagtcatcttttttggtggagctgcaataggcatcctttgtggagtagtggttctagcatgtgaagagctgccatcagttagcaagaatgcaagacgactgcatacatatgtacttcacagttaattaaatattccttattctcgtttgtccattgatgaacacaggcagtgtttacaagtcgtccgaatcgcgattagtcgggctggtcgcctggaagagggcaattaggtggacaaagcgattaggatttcaagttgtcctagtcgtccgactagtcgtcgacttgggcgattagtcgtccagtcgaacacttgctggtcgtttttgtcgtcgcaattttggtactgagcttcactctattttttggcccatctatagtagcccgcccctctagaagtaaatcagccgccagaaaccctcccagccgccacaaacctgctaga

SEQ ID NO: 92073 - DNA, 386 bp, Zea Mays
gtgatgtatggcaatggtaccgcagtggttcagctcgaacatcgaaagaaaagttggcccaactacactctgaaggccctgttgttcgcttgcgccatgttgttttccgcatacatgaatctttcttcactaacatcaatcaccatcaagatactgtttgtggttgatattattgtcttcttcatcatcaatggagtactctacataaatccgcctgattggggcaatgccttggtctgcatctcatgcctcctcctacaagtggcattgtgccttctgactgtcccattcaacggatgctacgccttcgccatcttcctcgtggtgtgcctgatccttgttgtcactctccttcaaccaaagtttcagcattcagtaaagaagta

SEQ ID NO: 92074 - DNA, 669 bp, Zea Mays
acaaagtagcgggtggagatccttggggatgaggagctgacacttgtggccatctggttcacgcggttccacaacaaccgtatgagccggtagcgtggcgggtccaaggacggatgctacaactgtggcgatcccgaccacttcgttgccagctgccccaagaagggcaaatcggagtctggcccgcacgaccatcactctggtcggcacaagggcaagtactcctccgacaagtacaagtccaagggaggattcaacaaggaggcgctcaagaagaagtaccttcagaaggcaaagatcaaggagcgtgccttcctcacctccctcagcgacctcgaccacgactccgacgatattgtatcttcctcaagtgacgaggagactgagaggcaggttgaggacaagctgaacgggctatgcttcatcgccgacaccgcaggaggcttctgcaccatggcacttggtgaggacgcggtcggcactagcgacgacaaagacatctgcgacgacactacttctgaggtactaccttccaccgatgatctcgtcgctgagatagaagagctgaacgctgctttggctagtcaggataagttgtgtaaaacctcaggtgtttatcatcagctcgaccacgagtgctgactttaacacgtgatagcggtgaataaa

SEQ ID NO: 92075 - DNA, 312 bp, Zea Mays
aatttgcttatctcataatagtgtaacaaacatgatctatttcaaaataaattaagtagatcttatctagtctaatatgattacaccaattttattctggtcccatctaatctgatcagatctaatctaatcgacaaacatgttagataatactggtaaaataagattggatcctactcttataaatatgttttaacctaaattggagtcttagtccaacctggccatatgcaactaccttaaccactcgatagttgcataacccctctgtttaaccgacagagattctgacttacctacaccatataatcc

SEQ ID NO: 92076 - DNA, 423 bp, Zea Mays
attggatatatctagattagactagtttaagttagatagacctaccagggtaggatatatattattaggatatgttagaatcttttgagataggatggattatatggttaggtaggtcagaatctctgtcaggttaaaacagaggggttatgcaaccatcggatggttaaggtagttgtataaggccgagttggtcggtcattcttaacttagtggagagtgaattaagttaaaacatattttataggagtagagtcattttttcatcggtattgtccttcttgttaagcaactaacattagattagctccactttagccttcgttaggttagattaatctatcacattagatcagatttaagttatatttgtgtgactggattagactagataagatctcattattttggattagatcttgg

SEQ ID NO: 92077 - DNA, 440 bp, Zea Mays
caaacttgtacggggattcttctaattaaggaagaaacatgcaatgtggagaattgaaccacaaactctatatatggggatacaaaatattctcatattcctttggaaagaggaaagaatattttgacaatcgctttgtgcggtatcatgatatgttattatcatatcccctttggtattggaagtatcaaggatgtgttgagatatcctaattgctatcttaccatattatagagatatccatataattcctatcatgtggaaacacaaagtgatagtgatggatattgcatgtgtttcacggaaacatttcttatggattgtattcgacatacatcctctcgtacaatgtgttgcatttattaaacttttcatgtgatgatacttaccatgctgggtaagactgaattggtaattccattattgggataaaatgaaaa

SEQ ID NO: 92078 - DNA, 364 bp, Zea Mays
agatgggtagagggtttagtaggtagctatatgctagatgtgattagttatgtaacctgttttgtaggtcaagttgttgggtgtggccgagttgatctaagtcactaatttaggcgtatgtgaattaggagtatggccttatcttttgtaacagcattaagtaactcaatctagcttagatcataatagattagatagaatccagattaggttggtatgactagattaaactagttaagattagatagatctaccagggtaggataaatattattaggatatgctagaatcttttaagaaggatggacattgtttaggctagatattttaatgagtgataatctaagttgattagttatcttat

SEQ ID NO: 92079 - DNA, 635 bp, Zea Mays
gcgcgatagctgaggatcggagccttcgtatccttgcgatacgcgaagttataacaaccaaaattttcatgcagcccgtcttctctggccttcgtttggtaatgcagctcatgtactcggcaaaaagctttagcatttgggtccatcccttggcttcgaagggcccagatgaaaatgctgagcctaacgatggcgttaggggtcagctgatgaagaaaaatctcaaaattatccaaaacttctccaatcatctcgttcaaaggaaaccttaattctgccctgaaaaagcttttgaaaaccactacttcgtcgtccttcggctctggagtggtttcttctccggcaaaacaaataagcttcttttcagcttctccgaggtaacccagcttcatcatcatggacatatcagcttcagacacggtagatttttcaaaatccaagtggctgggttttgacgggatcagaatgcgataatcctcttcttcttcatcagcgttttcttcctcaacatcagcttgttcagcttcgacagtagatgcaccttcttcaaaggctccctccgtcacaactaagcccgattgtctcatgacctcggagatcggggctgcctcggtggcttcagtctcctctccttc

SEQ ID NO: 92080 - DNA, 363 bp, Zea Mays
ccaaaagactctccgtgcaaaagtcgcctaagggtgcagccggactctccgtgcaaaagtcacctaagggtgcagccggaataataggtgcgcaaaatcgaagtcttttccaaaagactctccgtgcagaagtcgcctacgagcgcggccggatcaacgaaggcgtgcagccttatcatacaaattatggttacatacacacagcgagggcatcatacattacattggcttaaccttcgggatgatacccatctccctgtagttgaacaacattatccttaattcctcaccctcaaaaatatttcgtagctccccctcacctacactcaccccaatcggcgaggacaacaattctcgcttacc

SEQ ID NO: 92081 - DNA, 723 bp, Zea Mays
ggggcactgagaaggtccatgtcccttgcattgaaggtaagcaggacatgggaccactttgtttgaccactaggctggtgacgacgatgtgatttaccctttagtagtaatccttctttggctgcttgttttcaaattctgagctagatcctcctgtaatcatatggattaccccctgaaggggtggctgggcgaagtcatcttcctgattaggtggcggagggggttgttggtggggtttgttgcttgtggtggtggtgatggtggcggtgacgggagagctagcctttcttagttatggagttggggtgttgatgggggaagttggaggggtgttggttgtagttttgatggtaatatggaaaacgattgatggttatcttcgtgttgagggatattaggggtggtaagtgtgggctatgtctctttggttgtttgcgagggctgctccggccatacggtcattggcttattttgttattgggcaatctttagtcgagtgcccaacgtcttcaccatgtaaaagatgcaataaagttttctttgttgttggggggcctctaccatgcccccatcctattcctgtgccaccccctcgaccctactacatggggtagtcgtgacagtgagggggacatcgcttggctgctgctgattggctatgttgtggacttgcagatgctgttgaccccgctcctgactgggatggttttgttgtattcc

SEQ ID NO: 92082 - DNA, 414 bp, Zea Mays
tttagcaattaaactttgatggtgaatgatccacttaaattagatagagttaaatcttgttacacaagatttttggtggtatacttagtaatttagatcacactcagttaaactaagtggtaagttcagtttggtgttccactgaattatttttaaagtcttagtgagaattatcaagatttcaagttggacttattggggcgaggttaatctttcctttctttcccttgatttcctttatgtttttagagtgggtttgaactacaagttatcttaataaatttccaacaattctataaaaattacagtggcttattactggtgtataattctctgtcctaaaatttggggcttaacaagtgaatagtcttctctggacaaaattaccaaattttagggcagaaggggtgattt

SEQ ID NO: 92083 - DNA, 277 bp, Zea Mays
atccggcgtggcagctgacggtggcggcggaacggagccactctgacatttgtcatcctcctgtacaacaatgactcctccacatgtgcggtaccaatgccacatatcttctactgatcgtgaagactctataaactcaaagtcctcggcaaccaaacataaacattgcttgtccacaatgtttagtatgaggctacagcaaacttgatcgagaatttctgtggtgcattcggtgttcagggagataattgcatatttgggattccaaacattgcgc

SEQ ID NO: 92084 - DNA, 1672 bp, Zea Mays
cttgacatcccattgctgcagctcaaaatacccatttgccggcgtgtcccaagactactacctacaaaagcaagccctagtctttacaactgctactgtagctatctataccaattccctagtaccactgtcaatgccatgccctaacttctattcatatccagtaagaactccaaaagcaagtcaactcctattagagtaagtagtaagtagagtttagggaggttgaggagtggaagcttgctgtggcctaaaggctagtatcataaaggtgtgtaagttcaactcttgtagagcctccatcggatgccgagtatattgcgtatttgctcgtcccttccgatagaaaggatccgttttccgttcttgggatggatatcgatgacgaggacccgttaccgtatctacagcagggtagggatggctacgttataggattaaacagtcttcccataagcctactactaccgataccgatacctcaacgaatagagatcttgtctttcgctctcctccaaccaaaagtgccacattacaaccgcatttacttcactttacttctctgcatggggggtagacccttaagcggatattgagaaaaggagttattcggtaagttgctttcaaaggaaaaacagtggttttttttgttgggctgtggttagagttgtttgaggaaaccgagcaacctcgcgcttacccgagtaaattcatggcctaaacgaacgatatccactactggaaaccaaagagctgattaatgagactttttccattcaaggcctgcctatgaacctataccgctacaggaaacttcctgatttactagacttctacaagctacctcaaccagtcttgtccgctagaaaagtgccggaattcggagagcacttcaaggcatcgagcataaacaagatacgatggaacctcacctgccaactactttttacttattactttgtcgaaatgcaggcactcgggggaatacgtgagaaagctatactaatctttaaaagatacgaataattactccacttcccttcgaggatggttccaatactgcaatgggcaacccgtactagacctctctttcacttgtacctgtacttgtgttgcaacctaagcgaggaataaagacttgttctagttgccctggttggccctgcgccataagcccaaaagtgccggaagacagacccctcaaggatggaacaactaccttgacttgccttgactttccaacccgttactgcactttccaatcctacccagccgaaagcatattccgggttttcctcattgttcaatccaataacccttccaatacaggaagtacgatctatctataacgattcttggagggttcgaggtgtgctgcctttcatgattaatgatttcataaatcaattgaacttaacaggtaaataccgttttggtcccgttgtttattatcaaataaatattaaggagattccgcctttaatctatgatgtgattcgtatggaagcatcgaagggctatttatggttggatgaaaggaatctggatactcatagtcttataggagtgtataagtgtagagttcctatggacctacttgtattgaaggggttatctaatgttattttaacaacagttattaaagctcagcctaacatttctaaattcaaag

SEQ ID NO: 92085 - DNA, 349 bp, Zea Mays
cttgaaggtggtgtagtgactggtgcagtaaatagagtgtcaaatcatttgaggaaatcttgcaattcaataggcaagaagtggtgttgactatgtagggttgggagactgcactctttagaattgaatcatatagagtatagagtctattttgtttaatgcttgaagttggtattgagatataggtggacctagagtggaggtagatagtataccttgaagcttgataacttgtagttggtcttgaaatattggcaggcattggattgttaagagatattgtataggatgagaagttgtaaatggatatgtgttctagttctaagatatattatagtctaatttaaat

SEQ ID NO: 92086 - DNA, 377 bp, Zea Mays
acacaaaaaagctttcggcgcgaagtgacgaagtagacactgagacttgtgcagcaagaaagaaaaagaaaatacaacaatattcatgtatcatctgtaaatcgtgtatgtagactttatgggcaagtttgcaatttccacgaagttgttcgtcttctctataaataggcgaacagtaacctacataaattcacctctcgagggccttagctttgtgctgcttagcattcgaagaaccttcgatcttcctctcatagagaagtcgaaggtatgtttgtaattttgtttaacataaggaagaatgaaataaagatgctaaggcatatgaaatgagttttatatttcattgtgtatcgtcattttatccaatattgttt

SEQ ID NO: 92087 - DNA, 414 bp, Zea Mays
gagaacccctcactttttaagccccaaaatttgaggcaaagaattatacaccagtaagaagccactgtatgttttgcagaagttttagaaatttattaagatatcttgtaattcaaacccaccgcaaaagtataaaagaaataaagaagaagagaggaattagaaagattaatgagtattaccccaacatggcagttgagaatattgttaaaaatatccataagatatacagaggaaaatcagtacaacactaaacatgggttaaccatttagtaaccaactggtcctaagttgctaagtataccccaaaaatctccaatagtaagaataagccctaccttattaaattgatcatcccccatcaaatcttaattgtaaattacataccatgccatgcatctatcttactcattg

SEQ ID NO: 92088 - DNA, 420 bp, Zea Mays
gctctatttatacatgaaggggatgtccgcagtgaagtcaggtgttttattcgaaggatagatatattggcgccctgcaagccaacgtgacagagaactacattgttgacttgtgtccactggttttccgctaagagccgaggccgagggggtggccgtacgcccgaacccttagcggaggggtagcccataccatagttgttgtaacagcgccagagtatgggctaaagcctacttacgagatgtgtcagcgttcctatgtcgaatgacgtcaagattccacgttacgcttatcgaggttggagatctgctcaagcaaggcggaagtcttcccgaggcgtcgaacaagccctcccgtgacgtgtgccacaaccgacggagtggcctcccatgggattcgcggtggagtcggtggccgag

SEQ ID NO: 92089 - DNA, 334 bp, Zea Mays
cgatctggaaacatggatgcaagaaagagaattgatgtatgaattggttaagcagcaattagcacatgctcagcagcgaatgaagagccaggcagataaaaatcggtctgagcggagttttgaagttggtgatcgagtatatttgaagcttcaaccacatgttcaatcatcggtagctctgcgatctaaccagaaacttgcattcagatattatggaccctacactgttctccagaaagtgggacaggtcgcttacaagttggaccttccggacagctcaaaaatatattcagttgtccatgtttccttattgaagaaatatattcctcctcca

SEQ ID NO: 92090 - DNA, 368 bp, Zea Mays
gcctgcagggcgaagacgcggtctccgtcaatgaggtctttggacgttggttcgtctacgtcggggatggctgatgcgctcgttcgaggtgacccatgctttatttcctgcggggtcatggcctccgatccatatagtaggcgaaaaggagtgaatccagttgcccgacattcggtcgtgtttagtgcccagactgcttcaggtagctggtcggcccatttccccttcgtgtcgtcgagaagccttttcttgatggcagtgaaaatcttgccgttggcgcactcgacgacgccgttagattgcgggtggtatagcgaggcgaaggcgatcttggtgccgatggagaagaaaaagtccctgaagtcctg

SEQ ID NO: 92091 - DNA, 761 bp, Zea Mays
cctctatccttctctggctcattccaaactccccaatacttgtcatatttctctttcattctgaagcccattgaaactcgcaaaggatccacactgtcaatccatgattgaatcaacaagtggatctctccaatctcatgaaagaaggtgttactagtgacatgaaggctagaggagatgcgaatagtgatatcatagaaatgctctagaaattcagccatcttcttggcattgtccaaatcatcctcattagggtgatcatgtcctcctctcacctcagatagctccaaaacatagctaacgtcttcagccaacctcaagaataccttctcatacacaattgcagccttcaacattagatatgttgaattccatcttgttgggacatcaagcctcaaaaaggccttgctgtcaaccttctcttcctctgcaatttccttgaactttaccaaccttgaagttccatttttatgtaacgaacaacatccctaacacgctgcactgagaggtccacatctttcaagccatctcgcacaatgaggttcactatatgtgcagcacacctcatgtggagatacttgccatctgctattatttttttctgtaattgtcttctcaaataaccaatagcactatcattggcacttgcattatcaactgttacaatcataattctatccaaaccgcagtccaccaaacttttgatcaagcttttcccaatatcacccccttatgcccctttaccttgaaaaggctgatga

SEQ ID NO: 92092 - DNA, 893 bp, Zea Mays
tggaattggaagcgcctgccgcatcgccgccgcccggggagccgtaaacaagctcccggcgaagaggtttatggtcctttaccttcgttctcttcactcccgagttacggttatatattattagtaggatatatagtctaattaaataggagaaagaatccatcttagatcaaagtaaatttaaattatataatctgatacatgctctaagtcactaaatgttgtctgatcatctattcttcgttcgtgttcactttcgctcaacatcatgattagtatttctttatattgtttacatcataggatagaatgtttttgcttataatatatatatagtactttgaacctcccaataattgttttgtactcggatcaaccagtacgtgcatgatatgtgtatgcatacgtccgtatccatcgatcctcgttagactaaaccgaagagacaacatagcagcagctgttacacattcgacatttccagtgcagtacaaacgacacctttcatcatccaacagctctgagatcatgtatagtcagactaaaccctgatgctgcaaactgaggaattaatgaaccctggtgtttaagtttaactgtgacgatagttctctctgctgtttctgtatcacagatctcggtcgaaagctaaggtgacgatccgagtgctgatctgaagagcaccacgcctacagaggagtgcgatgatcatgaaccggtgacgacagatagttctttgctgctttggcattagatttgaaggccaatcgtgtgcagcagagttaggctgtccccgctgggccactgtgtctgtatgtgttacgtaaaaccagctgcaacagcgtacttgatccccacgctatatatcatccagtaggatggatggaacgcga

SEQ ID NO: 92093 - DNA, 312 bp, Zea Mays
ttggccaacgagctcaacattttatctaggagctaattggcatgtgtgacaaagtggcccaatgggtcatatatctatagataagtatcgatcaggtagagttagttaggaagtgtctattccttagagtctatagactacaaaatgtatatttattattttcaataaacagaagacagacgatcctaagcggcgtgcgtttctcatcccttcgatacatcgccacctctttataagggtcgatgtggtctctagcagattgcatcggggatatgcagtgctccaccttattttggtagatcttttattgag

SEQ ID NO: 92094 - DNA, 419 bp, Zea Mays
ggttgcaaatgactttgttaccacaagatatattgacatgcaaataatttcattgcatttgatcaatttgcaacataatgaagtcccaacaaaatagatccttggtaattacatcttattgcaacaaaaaaattcattgcaattaatgatgtcgcaactataaagataatgcaactgagccatacaacaactaatacaactgttgcatttacattgggtataaaatgttatgtaaaagaattatattttgcatatgtaacgttagaaccaaaatcgacaaccataatatttgtctcttgccccatatattaacgaattgcaacaacttttctagtggtagcaataacatcgttctcttgcaacgaaagtcatgactatcgcaatgcacaaaaatagtggcaaaaaggtgcatatattgc

SEQ ID NO: 92095 - DNA, 608 bp, Zea Mays
actacatttaatatgagggcactacgtctgaatatatacattagtccgtggagcttggactaatgttgcaaccggctccactctgcttcctcagaggccatcttctgctccttccaagcacggtggtaacagatttttctcacagttggttggctgctagaagttttcagtcatgtctcagatcaatactattcctatcaatattatttttgatggtcagaattgcccagagtgggcattttgtgtcaaaactgctttaaggggtcatgacctttttcatttcactaatgatcctcctttgcttcagagtgatcagagtaatgctgctgacgtcaaaacatggcagattaatgatgggaaggtcatggctgccatggtcaacagtaataagtaacctatgattatgagtctctccaagtgtaaaacatccaaggctatctagtcatgcttgaaggagcagtatattcacgacatcggtgctctcttgcacagtcttatgcaacagactcgtgttattgagcagcaagacatgtctattgataaatactactaagtttttggtcgtctgatgggatcattgacctctatggcgcctgcgtgtacaactg

SEQ ID NO: 92096 - DNA, 414 bp, Zea Mays
ccatatccccatgatgtggtcctgttgttcaccgttggcttccttgttgacattctcttctttttcttcatcttcgtcgtcttcatcatcgtcactagagtcgtccgggtcgtcgcctccgggagcaggggcttgggctgctggtgctggcggtactgaagatgacgatccagctgcgaaggctagtgattctgccaacggggtgggcgtaggcagaaactcctccgagctgtcctccagaataactccgttctccacacgaatgtgagggagatccacagggatttcctcgactaccactgagtagacacgaacttcccgtggcggagggatgtagttggtgttggtccgggtggtttggattgtacgaaccatctacaagagaaaatgtcagtttagttgaattttaaagag

SEQ ID NO: 92097 - DNA, 478 bp, Zea Mays
caatgcatcagttgctgcgccgttggcctttgtggctgtatcaatgacagggcgtataaagcatgtccattaacttcgcactagatgtagagattaggacgttgtagttgtaggagtgtgaaggtcattttgcttctttcatggtatgcgcctcgaatcctaaaacgacagtaaatttgggagggagggagtaagtcaaaactttgaccaaatttttatttagaaaaatatattagcatctatgacttcaaataaactcacgcaggcatatttcatgtataactactaactagtataatgccgtgcatatgacgatacatcaacagttttacgacctgagtgttcagtggctgagtgttcaagccagtgggatgaatcatccccataaaaaataaaattaaagttaaagttaaccctccccataaaaataatttaaaattgaagtggatatatggcccacatactagattttaaactg

SEQ ID NO: 92098 - DNA, 1407 bp, Zea Mays
gtgtggacggggctggcaagcgggaattgttgtcctcgccagttggggcgagtgtaggtgagggggagttgcgaaatctttttgagggtgaggagctgaggataatgctgtttaactacagggagatgggtatcatcccgaaggttgagccaatgtaaggtgtgatgccatcgctgtatgtatgtaactataatttgtatgatgaggctgtgtgccttcgctgatctggccgtgcccgtaggggacttgtgcacttgatttagcgcgtttatcgtgtcggttcggctgcacccgtagtcggttgttgcacggagggtccggccgcacccttaggtgacttttgcacggatagtcttttgaagaggacttcgattttgcgcacttgttgtgctagtccggctgcacccttggcgacttttgcacggatagccttttgatgaagacttcggttttgcgcacttgttgtgctagtccggctgtacccttaggcgacttttgcacgaatagtattttgatgaagacttcggttttgcgcacttgttgtgctagtctggctgcactcttaggcgacttttgcacggatagtcttttgaggaagacttcggttttgtgcacttgtagtgctaatccggctgcacccttaggcaacttttgcgcggagtgtcgcacgcgagggtaggcaatgctgcccctcgtggtgacttcgttgtggtcgaatgctgaagaccgtcgatgcggtcttttttgacgtaattttttgcgggggattttttgcgtgtatattacatggcttcgcctcattaaaaacctcacccctcgggaggaaaagagtgtgggccggaatgaaactgtttggtgaattacaagggcaagctggccctaaggagtcaaacaaaaaatttgcggaggttgtcaatattccatgaatgctctaagtcttcgccggatggtgttgttagcctgtacgcgctaggggatgcctttgtcttgacgatgaaggggccctcccattttggctccagcttgccccgtgactctgaccgagttgtccggacgagtacgaggtctccttcactgaattctctcgggacgactgtgtggtcgcgccatgcttttgtttgagcttggtatttgtttagggcctgtagggcgaagacactgtctccgtcgatgaggtccttcgaagtaggctcgtctacgtcagggacggctgaagtgattgtccgtggtgacccatgttttatttcttgcgaggtcatggcctccgacccatatagcaggcggaaaggggtgaacccagttgccctgcactcaatcgtgttcagcgcccagaccgcttcaggtaacaggtcagcccacttgcccttcttgtcgtcgaggagcatcttcttgacggctgtgaaaatt

SEQ ID NO: 92099 - DNA, 360 bp, Zea Mays
taattctgctcatgcgacttaagtaggcgtgatgcataagtaatgactttctcgttttgcatcagcacacaccctaagccttgcctcgaggcatcacagaagacgacgaaatcctgatgtatatccggtagtgtcaaaacgggtgcggttgtgagcttctcctttatgatctggaaacttccttcacatttcggggtccacacaaacttatggtctttcttgaggagttcgatcataggtcttgctatgctggagaatcccttgataaagcgacggtaatatcctgccattcccagaaagcttcgaacttcgctgacattggatggctgcctccattttgatactgcttctaccttggaa

SEQ ID NO: 92100 - DNA, 1027 bp, Zea Mays
gtgaaaatgatagaaccactcaattcatctaacatgtcatcaagtcgtggaatgggatggcgatatcgaacagttatagcattgatagcacgacaatcaacacacatgcgccaagagccatctttctttgggactaaaagaacgggaactgcacatggtgataaagattcatgaacataccctttgtccaaaagctcttttacctgtcgctggatttcctttgtttcttcgggattggtgcggtaggctggacgatttggaagcgaagcacctggtaccaaatcaatttgatgctcaattccacggagtggaggaagtccagctggtatctcatctggaaaaacatcttcgaagtcctgtaagagatcaagaacaacactaggcagcgatgaaggtaaatcgttagttgaaagtaggacctccttttgcaagagcacaaagaatggggctgtggtgtttctcacttctctcaaaatcactcttgctcacaaagagacactcagttggcgtggctgtttaggattggcatgaggctttatgtggctggatggtttagaactctctcccttacttgggttgggggtctcactcaattttcttttgtctgattcctctcttttcttgcgagccatatctgaagtatgtatctcctctgagataatggaacaagaaccaccttcttgtcattgtgaatgaaagtgtatttgttagaccgtccaaaatgcaccgagtccacatcaaattgccagggccgaccaagcagcaaatggcatgcttgcatggggacaatatcacaatccacctctccatgataatcaccaatggaaaatgacaaacgaatcatgggtgaaaccttaactgtcccagaattattcagccattgcatatggtacggatgtggatggcgacgtggctgcaaaccaagcttctcaacaagcaaagcactaataatattattgcagctcccaccatctatgatgaaatggcacacttggccttgcactttgcatcgggactgaaataaatt

SEQ ID NO: 92101 - DNA, 696 bp, Zea Mays
cgaccgctaacatgcataggtactacaggtaccttaactctttgtccacgatgaccgttctcctgaagggcgggaatcaaatgaacgtccttggggagagtcgggtcttccttctccttgctcccaacagtctcgcccgcattaatgtgtttgacatgatctgggaagagatcatctgtgcttcctggtctcctctcaaagggtgtcttcatgcaccctttatcatgaagatgatcgaagtggtcacccagactcacttcgaaaaacctgtcaaacactcccgctacgtaccctactgggttgattcctccaacccagctgctcgtacgaagcgggctccctcagggtctggaggccctgcctcctctgatgagccacctccccagcctcctcttcacccatcctcctctcacgccgtcgctgcctcgcgtccctctcctggccgcggatctcccatgccacgtggtcgtggtcgtggccgagggatgggtgcccgcttggtccatgggattgcggcatttttctctatgtgccagaacatttctgctgatgtacatgagctggcaaggcgtcagcaggagactgacgacaatctttgtcgtcaagcttccactatgggtatgccctttgccccttgctcgcctgacgtgcctctccatcctcctcccccggagatcaatgagtggcaccggcagg

SEQ ID NO: 92102 - DNA, 483 bp, Zea Mays
cacgggaggaccccaacccggcgtcgatcacatcaacacaaacatccatggcgccaccatctgccggttctgatagcagatcttctggaatcatgtcctcaagagtctgatcaaagttagctagagataattcttgcagtccaatgagggcaaacaaggctagagaaggaacaccgctactttccccactggcagtgtaatggcagctgtttttccgaatcagggggatttcatcttcttcttcaccgttatcatcagcaagacagacagtacacccattgggttcagcgttagacgggctacacccattgggatcagcttcagtgaattcaggcactggcacttcctcagcaacaggagcagaaggaccggcaccttgatccaagctggacacctgacgaaggcgtctcttcttctttttctccccctcagcaggaaaagaggcttggtcaactcggcgagaacgttttggacgaacattga

SEQ ID NO: 92103 - DNA, 598 bp, Zea Mays
tcaactcgtaatagctactggaatatttattagctccatgtattccagcagtagtagcaggatagccttttgaacatccaagttctcggggtctccaacttgtcatgttgtcgaactagtcctgtgatgtatgtctaagtctcaatgctacctcgtgaccttaagttattatgatgttaagatccttgtagtatgtgaccttaaatgttctaatgctgctgttcgtcctgaataagttcatcagatgactatattattattttcgttgttcatatgctttgtgtgctgtttctgtacctcgttttgtcgattagcttgagtttataacatatgactaaatgtctgccatctccacatatcctagcatggaccctaccaacaatgcgacatcgtcgcaggcgatgtcaaatccctcaaatgcccagcaatttcccccccaccccctttatggccaacgagcttcatgcaccagaatcctgtcgattgcaacatgatgggaaacattaattttcctagtcctgctaaaggtccaactacaatgtgggctcctattcagccagggaatactagttcccaatctaccatgattcctgcttcg

SEQ ID NO: 92104 - DNA, 326 bp, Zea Mays
gaaatgtgtcatcttagaaaatctatcaacaaccacaaacacactatcacgtcccttcctagtcctaggcaatcccagcacaaaatccatagaaatatcttcccaaggagcactaggaacgggtagaggcaaataccaaccgtgtggatttaaccgtgacttcgccttttgacatgtcgtgcaacgagcaaccaatctcgccacatctcttctcatcttgggccaaaagaaatgaccaacaagtatgtcctccattttctttgctgcaaaatgtcccattaagccacctccatgtgcttcttgtaacaacaacaaacgaacggagc

SEQ ID NO: 92105 - DNA, 414 bp, Zea Mays
gtccgtgacaagcgaccatgcgacgcggagcgggcgaccaagttcctactgagccaccccacgaggcggagtggacgagcaaccccgcgtgtcaacctaaccaggggtcgacccaatgttgttgacctgcatcagcgtgtcaagatgtttcatcaccaaaccatggctggaccttaggtatggtgtcgaaaagtccctatcgaaacaccgactatacatcatcacgtactgtctcaagcaagcctccgctgacgtatggggccagtcaacctcagtcataggggcctcagcgtcagagtctcaatagtgacccacatactcgaaaaggacacaacagatacaccataccgggtgtatgcctacgcacgtcggcgggtgacgtaggcctatgatgataggcgaagccgcaccgcg

SEQ ID NO: 92106 - DNA, 437 bp, Zea Mays
ttgtggtattcatcgatgacattctgatttattccaagaatgatggagaacacgaggaacatttgcaactagtattgcagagttgagagataaccaactctatgccaagtttagtaaatgtgagctctggttggatgaaataccattccttgggcatatcatctccaatggatgaatcacagtagatccagcaaaagtaaaagagatagtgggatggaagataacagagtttcttgggactcgtgggatattaccggcgtttcatcgagggatcctccaaaatagcaaagccaatgacctcgctgttagtgaaggggtaagaatttaagtgcactcaggcctaccaggacagtttcaatcagttgaggttgaagttgatgtcacccccattattagttatgccgagtctgcaaagggatttgatttatattgtgatg

SEQ ID NO: 92107 - DNA, 2570 bp, Zea Mays
ttgcactctctgcagcctccctctctctctaccccgcccatctccctccccaggccttcaaatccgcggccgcgccacccgctgcgctgctgccccggtccttgcattgctcgactcgaggcgccccagcgctggtcgcctccgtgccttccgcggtgttcctgggcgcggctcctaggctcgctcattttacttctgctgctcctgtgctgcctcttggggggcgttcctttacggcccggagcagcgcctagctgcttccgccattgatccggcaaccccagctctaggtttgctttgctctcgtgtgtggtagcgattctggtgttgggggggtgccaccaacagttacaggttgtcgccacgccgagggtgtcgtcctgcgttccttttttttatcttctctccgtgatctctctagctgcatccttgcccccccttcgctccttgctttcttctctgcgctgcctttggtgtgttgccagatagctcccgggacttcaccggttcgctaaccggcaccggcccatagtctgcggacaaacaggggccagttcggcctatttcatttcacaaaagggggcaaagattaggcggcggaatcctgttctttcccgattccttttggacatactgctcgagaggaagtgaaagcgcgcaactttggaggttccgaggagggaggaacacatcccttgcagctgcatgaggaggcaggcattgatacaatgagagatgacggttcaagcaagaacaaggtaagcgtgtttccagatcggctgctccatcttcttcgtacccacgtctctgtgcccgtctctgatcctgtttcggtcgtgattggtgcgcaaaaaaagctgtcctggtccaagacccttgttaggaagtggttcaacatcaaaacaaaggcgaaggacttccattcggattatgcagctgaggaaggtacattaacattcatctagcagcaccccaccacgtcttttctcactatctgattctgatctaacagctaagagtctgcacataatattcggcatggtttctgttatcaaacgtcttgttttaccacagtaggttgcagtaggatcagaatgcctgttcttttcatgtgcaaattggcctcgtacttcctgttctcttcagtcaacctttcccccctacggttgcagacgcaagcagaatgtgctagcgacctacaataaactaggattctctttttagtttttttgtatctgtgctaaaaattctctctgaaaatttcagtcggagtgcagtggaggaccagcagcttctctgatagagatgcatgtaaatccaagaaaagtaggacaggtacattttgctgccccctgacagtaactgtgatatcttcagtttttttatttttatttcgtgctaaactacaaacgccatgatctagctaactttatgtttcacggtgagtgtgactgagttaactttatgtttgcatacatagagaggttgcctaagaggaatgtggagcgagatggtagagtagggaacggatttgatggtgcctatattacaaacacacaggactacaggtaaaatggattgttccgtttataagacttcttgaccaacccactaatcattggtttaagggaactcctgtggcatgacagtccatatactcgtgtgcatagggtcttcgttggtacatggaacgtgggcggaaggtcaccatctagtcatttgaatctggaagactggcttcacacttctcctgctgctgatatatatgtgatagggtacaattctgtattttgctaaaccagattgcttctctcagaactaaaaactaagaactcaaatacaaaaaagggagacctaattcaggttgttgtgccaggtttcaggaaattgttcccttgaatgctggtaatgttctattgactgaagacaatggtccagcgaggaaatgggtctctcttgttagaaaaactctgaataatcttgatcagcaaggctctggtgtctataattaccacaccccctcaccagctccggatccaatcgtggagctcaatgttgacttcgagcgatcgtcaagaagacaaaggaactcgtcgtttttccatcggcgttcgttccaatccttcaaccgtagctcaaggatcgacatgatggatccacactcgttagtggaccgtcgattcagtgtctgcgacaggattagcttcgggagcaggccgagtgatgttgacactagcatgaggtgtggtgggtcgtctgatgatgagaacattgacgaggaatcacctagcggtatattcttcccaccgatgccatgtgcatatggtgctccactgtgcactggttctaggtaagtaactgaagataaatatctaatatttcctcgaagttaatttgctttctgagccagcagttccctgttatagattagtatttcactgaactttttccatcattgaattccgctgagctgaaattaatacttggaatgacaaatcaggtattgcttagttgccagcaagcaaatggttggaattttcctcatggtgtgggtgcgaagcgatataagg

SEQ ID NO: 92108 - DNA, 323 bp, Zea Mays
cacactcataacctacactaaacgcactcatcaaatgtactagctaaatttctccataaaaaccaacgctccagattgctccatttatctcatatctcttaatcacatctaacgtttactgtttcttggatcatctctcatcatcgatcacctacgacgatcaatggcccaattcccctccctcacccgtgtacatctcgcggcgcaatcaatgccacagcccgcaagccccgcctatcaaccccagtcgcttcttttctagagatagcaatagggaatcctcatcgggttttaattcctcatttccgtccacgtgacgaaaa

SEQ ID NO: 92109 - DNA, 772 bp, Zea Mays
atttaagggtcctagcgcatagctgctaaaagaagttacctagttctacaattgctacatatatttcatcgtgcattattcctcaaagagcagctggtaaaatcctttgaagtatgatatggcaatcatgtgttttcaagccttggaggttgcatccatcagcagtgatgcatgatgctaggttagaagcatacccatttggaaatttcacacttctcaaaaaatcataaaatgctaccttttgatttttatccattatatagggggcatgaggaaccacataggtacctccatcacacttcaagtgtaaatcttttcttatgcccatgtcctcaaaatcaagccttgcattaatactgtcctttgactttcctggaagagcaagaaatgtacctagcaagtactcacatatatttttttcaatgtgcattacatcaagattatgacgcaacttcaaacctgtccaatatggcaaatcccacaggcacgaccttctcttccaacattgaccaccatttgcatctcgcttcctcttattgctatttggatgcttccctggtttaacttccttcactctttccaattgttgcatcaactcagtggtactaaattgttgtggtttgtcacggttctcaatttggccatcataatccttctttttcctccatggatggtcatgtggtagccaacgtcgatgaccaatatagcatattttattccttattcttctggagcaatgatctttgtcacaatggacacaagcgtagtatcc

SEQ ID NO: 92110 - DNA, 379 bp, Zea Mays
cctccctgagctttctagaagggtctgatcatgtccagcccccagcatgcaaatggccatgttatagggatggtttgcagctactatgtcggtaaatgttgttgctttgataagaattggcaagcttcacatctctggactaactcggcggtatcactcttcgctgttggccaatataaaccagatctgaaaactttcccaactagagttctggacgcagcatgtactctgcactgtctgacatggatttcctctaacagttgcttcccaatagctgagtgaatgcacttcatgaggactcctgtcgcacctcttctgtatagtgtgtcccctatgagggtgtagtgggctgattgtcttgcaatgcgttccgctgctg

SEQ ID NO: 92111 - DNA, 479 bp, Zea Mays
cgcggcgccggcggcggtggctttgaccggccactgagacgcagaggcgatgggggactgtgggtggtggtggacttgtgatggtggcgggccccgttcttttgttttcttatgctgttgaatctggattccttggtaagttgtgtagtagtaaatatgtgcgctcacttaaaaaaatcctgtaaatttcttcactctggtttattttgtagtagtgcactagtactcctgtctcctactatctgttagcagttcattagtaacaaaaatgtgttaatctatacacatacacatataaggcgactgctcaatcgctttcacgaaagctacggctccagtctcagctcagctcgctttcatgacagttacatgtggtccggcgatcaaatatgggaaatgatgccttgttcttggaagcaaacaccatcaatgaaacatgggatgcctgccgctatgcatttgcgagatgtgatctgcct

SEQ ID NO: 92112 - DNA, 513 bp, Zea Mays
ggtgcgtgcaggggaggtgaggcacgacgttgaagtttttataggcaaggagagggaatcgcggacgtattcaatggccatcgaagctgagaaacggaagtcataaatggagatttaatggagaacaccggtaacagctacaacaggcgggagaaggggaaacgccattgcgcgttaaagtgggagaggagaagagacaggcggctgctcaactgatgcggctgggcgcggggagatggagggctgacgaggcggcgacatccatcagtcaagcggtggtggcattttttttgttgttgttctgatgcgagcgtctcttaatttgaggtagaagacgaaccttacaagtgggtcctacttgccatacagagaaggtaggggagggaagtgagaacggttggccggtctggctgtttggctaggaggccatgcgtgcaatgtagttagattttcagttttattattcttatttttaatttcgaatttcttttctttcctttttttaaataaaag

SEQ ID NO: 92113 - DNA, 370 bp, Zea Mays
ctctgtctaactacattggaaagtgcacttctatctgcttcgtgcttcccggcccgatcctgctccggaggcgggtttgggctttctgtttggggaggaaaggagagacacggaggcgggtttgggctcgatttcttttgaatcaccttttctccaagttcccttattgatggaaccagtatatcagactaacagtatatccctttatcgatggaaccagctgtgcactaggtacctactaggatggatgtggtctgcaccggtgcgtctaacaaagttgatgaagacacgaccaaacttgaatggcagacaacgagcagctccggtgaagggagtggggaagatagttgtagtgacgacaatccttgtc

SEQ ID NO: 92114 - DNA, 794 bp, Zea Mays
ctagcccaaagatgggctgtcagactaaaacaatctaaagattatatgatcggtggcattggatcacctttggagacaaattgtggctaatccagtaagaatttgtcttgggatactataacaaagatgaagatggtatattggactacaactttgctgcagggcattggttatgttgccatatgaatctgggagaaaatcgagctcaaagatgagctgtcgggccaactgaatgaagggcgccagggtacagtaactgaagtggatcagaccgccagcacggcaatctcaccgccggcgacctctccacacgtagattcatgccgccgctgtcgtgattcgtgcgcggtagggagtggataacaccagggagggataacccgtacgtggcgccatctcccaagcccagccggagtcttcaccggcggccaccgtgaccagtaaattttgccgcggtgtcacccatgcctcaatctccctcactgtatctctttctgacgtggtaggcatgcacttgcgatgctatccgtggccggaggtcgtctgtcgggtcgccgtggctataaatagcacggtggtccacggcgaggtgtttacctcttcaccagtgagctgatcgcaatccaaaattcgcgttgtctctgcccccttctcccaaattgagtctgcatggtgaagctatagtttcttacggccgtgtagcctcaatctccacccccaatttcacctagagccgccgcaacaccagttttcccctttcctctgtcaccggcaagcctaagtcctcctcgctc

SEQ ID NO: 92115 - DNA, 395 bp, Zea Mays
atggactcggcagaaaccttcgctgaacggttccactccttgactacgaagagcccaaatataaacacttaatctaacaatggcattaggggtcagctgatgaaggtaaaccccaaatttcttcaaaacatcagcaatcatcccattcaaaggaaatcttaatcctgctttaaagaagcttttgaacactactacctcattcttttccggcttcggagtagtttcttctccgccaaaacgaaccagctcctttttcgcttcgctgaagtagcccagcttcaccattttttgaaggtcagcttcagagatggtggactttccaaagtccaaatgactaggtttagttggtaccccgcagctgaactcttcctcagaaccaacttcttcaacatcag

SEQ ID NO: 92116 - DNA, 538 bp, Zea Mays
tgaacactaaggcccccttcggatattttagtttctgggcatagtgtctggcttctaagatttcttctttggataattttttccctgaagcatgtcgaataatgtaatcaacatcttcggtcggagcttcgggggcaggagattttgctttttctatcttattttgccccgctgccatgccagtacctgaagtttgttgctcagctttatcttcaggcgcggtagccttcgtcttaatgggcactgaaggcccagcttccgcaacttccttagtaggagcaggggtcaaggcttttgtggtctccttgacagcgtctagcacgctggccatcctcctcctcttgggagttgtggcaggagcctttgtcatcttcggccattctgcctctgccggtgggctcaaaagttttggcatcatcattgttttttccacttctagctctctggccgtatcattcttggcttcggctggcccgactgtaggcaccttcggcactacaatcgattcttcagcgctttgcacggtgggagcagcttc

SEQ ID NO: 92117 - DNA, 455 bp, Zea Mays
gcctctcgtaatccgggtattcgaagtttaacgtgtccatcacctgatttagccttcgttttggtcgggtgctgaaggcaacagtcattaattggtcttccttcttggtgtagttgccaaaactttcgttgcacattgtttcaatcatttctagccactctttgcatggcttcttgaattgcttctaaaatttaaatcggtaatggagccgaacaagttcgtactttttgccccctcctttttcttaggcattccccagccactagaggtcgaaaatattctatttgccaagtactcttgtactagatctctagtgctgatttcggctgctaccactctgaattctacttcggctagctagcatggggagctaagctgcatgtggcacaagggccttgtcatgccaaagcttaatttcaatggactcatgaccatggtcattagcttctcccttt

SEQ ID NO: 92118 - DNA, 412 bp, Zea Mays
tttcagtactgatttctataaatgtttactaatcgaaactgttagtaagtggtatggtatactgctataatatacagtgtttgataattattttctgcaagttatgtatgcaaaaattattttctgcaagttatgtatactacactgcacagatcattgcaacaggacaagtcattcgacccacatactggtcaacgccagcacacagtacacctgtttaaaccaacaaacattaacccttgcaatttattttgagaacatgaatcaattagacctcaatttttttcacatatcctacattgagttaaagattatttcaaacgggaacaaaggaaaccgagcgaaacttactatacaaacagtagcaacacaagggagcagaatcgtagactgtaagaatgacaagcagaac

SEQ ID NO: 92119 - DNA, 1111 bp, Zea Mays
gtatcttaactcatatgattcacatgtatgtggatttgcaacttaaaccctaagttttgggcctatttgcaaaaagccacatttgagctctaatgagttaagtctgaaattcagtggaattggctcaactttgaggccctatatcttccaaattatgaagattttgccctaggtcaccacatcaagtttgtagagctataaaaggggaaccactttgctatagagattaagccctggtactatgaaaagttttgagaaaattggacccaaagatgggctgtcagactgtcttaggtctgaatttaggctgatagtgtaattgggcaatctttggactttaattctactataatccagtcagagtttggctatggttgctattttaagtttgtagctgaatcattaggctacatctttgctacagaatgttggtctagttgccatgtgaaatcaggagaaaatttgtcctcaacttggtctgtcaggccgactgaatgaacttcgcgatggtacagtgatcgtattgggccgccagctcaaagacctcgccgctggtgatctcgcgctcaaatctgcatcggcgttgcgattcacgcccgaccaaactcggataagcgctcctcggtaagaaatatcacgctggagataaactccggccactgttctcaccgccgtcgtgtctcaccatggttagtcgcgttggcatcaccgatgttcgctgttatctggcctggctacatgcctcaacgtttcaccacgtcgtagtgaatcactgtaagccactggttcgtcgccggtgaggccgccacggtgaaggccacgaatcaccacaccagtgactcattccttctccgaccgccaccgtgcccaatccaaattcactggccaccgctcatgcctgctataaattgagcatgtcgtgagctccgtaggataattatgcatccaaagcaccagtaattgcctccaatcgttcaccagagaccgcgaattgctcatctcccccaattctgtttccgccgccgtggtagaaccctcaccgtggtcagcaaatcccaggtctgttcatcctccctgctgtcttgtttcaacatccttgggtcctcctgat

SEQ ID NO: 92120 - DNA, 855 bp, Zea Mays
ccggcccattcatcaagcttctcataatatgggtattcgaagttcagtgcatccattactcggttcagccttcgtttcggtcgagtaccgaaggcagcagtcattagctggtcctccttcttcgtagaattgccaaggatctcattgcacattgtctcgatcatttctagccactcattgcatggtttcttgaactgtttctcaaatttgaatccataagggagccgaacaagctcatacttttcccccttcctttttcttcggcatcccccaaccgctagaggttggaaacgttctattcgccaagtattcctgcactagatccctagtgctaatctcggcagctactactctaaattcaacttcggacagctggcatggggagccaagttgcatgtggcacaagggccttgtcattccgaagcttaatctcattggactcatgaccatagtcatcagtttctcccccttcttctcagaagctttgacatagaaccactcatttgtccacccagtcggccacttggtacggtagccaattaccgaggctttggtagcctttcgatacgcaaaattatagcaaccgaagttcttgtgtaggccatccgctctggccttcgtctggtagtgcaattcatgcaaccggcagaaagcttcggtgttagtgctcatgccttggtttcggagagcccatatgtaaacactgagtctgacgatggcatttggtgttagctgatgaagatatatctcaaaattctttaaaacttctcctatcatgtcatataaagggaaccaaagccctgccctaaagaagctcttgaaaacaacaacttcgtcctcttttggctctggaac

SEQ ID NO: 92121 - DNA, 606 bp, Zea Mays
atgatgtaaaccaattgaaagcggtactagataatgataaatgaaataatttcaccttgtgggcatctgttataccaatttcacttacctgcgctaagtactgtcctacatgctcgtatgtagtttttgaatcgtccccagaaaatttcacaaagttcgaaattctaaaacctcgaggatatggcacggtatcaaaaaattcaggatagggcttcctataggacctagtatgccctttaggctcaaaaccaaattccctgagagtctttgccacttgctctctaacaccctcatatctctcaccctcacatgttgtatgtgtgattcccgatgctgatagcagtgctccctgtccccattcttgtaatcatttggaacaaatccttgtgggctcctgttccctataggcggaataggtggtccatatgccatactctgataatatggttgttgtaggttaaagttcattactgaatccccacccctctcattaacagtttggtttacattattatgcgtagctgctccgttacaactaggcgcatatgaaagattttctacacgcttcccctgcaattctccttgaacctgttgaactatagatcg

SEQ ID NO: 92122 - DNA, 472 bp, Zea Mays
gcgaccctgaaggtgttatcgaatggataagtggagaggccgaagctttcaaagaaatattaagtgatcgcggggatgtctgcgtgttcttcggtgcaaggggaatttcagccatcctagagaaggcgggatgcgaccatatcaagaccctggcccaggccgaagctgccttctccgtgaatgatacaaaggatccctcagctgaagcgagtttaatgggcaggaaattttacaatgacatctgggtaaatggtggtcgagagatggctcacgagattatgaagaaaagtgagaaagacatccatgacgcccgagtacaagcaaaacaagctgaagaagctgcagagcgtgagagacgcatatgtattgtttcgcggtatctagcttcggcatttgtttttgtggcttcggactgattaattttttccactgtagctgaattatctccgccaccggaaccgttcgatcccct

SEQ ID NO: 92123 - DNA, 468 bp, Zea Mays
ctcctccaacgcgtggtcaatggcgtacattgtcatccctggagggtaaccagccccaagatagcttgatctaggacattgttgttggccatgctgagatgattcctattaaccaaggagggcacatcctcttcatcctcctcctcctcctccgaaacatacctactaactctagcgccaccgcaactctcaacgtcatcttcaagatcgacattcgccgcgtcatcaccaaggtctggagcagtgaagtcagcctccagctctaagtcggatgagcggcgaagctttctttttctcctcttcgtctcggtcgacatggctgaggagcttacccggcatgcccgcttgtgacgagcgctaccagggctacaaattcttttctccccatcgcacacacactcgataacagcatccgttgactcagctcgagtagacccagatgactctccaaccagtacattcagaact

SEQ ID NO: 92124 - DNA, 365 bp, Zea Mays
ttcattacacgttgattcaatggcctctagccattcgtcatttggttcaccaaactgacttatgtatcgctatgtatactttaaattcaccaaaccacccttcccctcccttgttcagatgcgctgcactcgtcaacctttgagatttcccactcattcacagggggcataccctgaaggctatgtgttcctagactagatctctagtaccaatgtaactgtacacgacattaaaagccaccaagcaagcttgagcttcttcgtcattagaaccgttggcctctttatacctaaacaagacacaatgggcctcgaataatctccttgatatcctccttcttctttaagtcatttttacgtaaaac

SEQ ID NO: 92125 - DNA, 691 bp, Zea Mays
gtcgccgtgattcgtactagacacgtagtagatatccacggggaggtaaaaagatctcacgggggcacggatttggtcgcggcagaagcttatcaccgtgcctgtagccgtgcgacgtggccggaccactggtgtcaccgtggaaactcctgggacctcggttatgccacgccgtggctcgttgctatgcggtagtaaccgtggcacatttaggattaaaatctttgagccgttgcaccggtgaacgccacgaccaagccaccagtgttctcccctctcttcggccgccagcgcgccatctcaaattcacgggccaccaccctcaggtcctataaattgagcgtgccatcagatccgctaggtagtcacgcacccaatacaccaacccgtgcctcagatcgtccaccagagcgccccaatttgagatttcgcccaaatcggtcaagaacactgtgtgtgtgagctcgctgcggtcagcccttcgcaggtccgatcacccgctccttgctcttgttttagcatccttgtgtgcttgtgatgcttcttgacccggccaattgagctaaaacacgtaggatcactgggaacgctttgggttgtccgttgatcgcgctgtcaccgtgggcagagagattaggggctagaaacttaaaattggttgaggggtaatggttattaggggtcgaattag

SEQ ID NO: 92126 - DNA, 371 bp, Zea Mays
tgaggtccaggtacatcttggtggttcttgggtggatgaagtaggctgagttgtgagcttcatcgagcaggacttctcgtgcctctccctttggcacacatagacggtttttgaaccaaaggactcctttctcatctgtcctgaagtccggaagttatttcttgcggactttttccataaggcctgttgtttcaatgttcaagtgttgagccttgcatatgaggtcttctagcatcggcttgacttctaggctgccgttgtctcccagacatgcattcagttgagctgattccttcttccaatcttccaagaagttggtccccttcatcctgaaaggttttcggctgagggcgtctgctactacgttggcc

SEQ ID NO: 92127 - DNA, 300 bp, Zea Mays
aacggtgcaatgactagacatcaaataacatctacacttggtgcatgcataaaacaggcataagcataacttctcgatgaaattgtaccttgtttcagcatccaccaacctccgacttaggtaggttaccacatgctcctttccttcggtctcttgcgtcaaaacaactccaataactttatcttcggctgcaatgtataatctaaacggtactcctacctgtggcgcttttaacataggagccaaagacaaatactttctaatgagatcaaacgcttcatgttgttctgccccccaggt

SEQ ID NO: 92128 - DNA, 650 bp, Zea Mays
gtcatctgcgattcaagctcttgttatgttcagagaaatgtatccaaggtatcgcgatcaagagataaaaaaatgtattaaaggagcatctaaatttattgagagcaaacaacaaaaggatggcacatggtatttaaaatcatcttgtatattgtatgatgttatccatttctttaatgcacatagacaagaactaatttactaattacgtaataggtttggcacttggggtgtatgttacacttatgggacattatttgcagtgcaaggattagttgttgctggaagaacttatgaaaacagttcttctattaggaaagcatgtaggtttctattgtcaaagcagctaatcacgggtggatggggtgagacatatccgtctaatggaactgcggtaattcttaatttcccttacctaactatgtgtcttcttggtcatttcatgtttgatatttcatagaatagcgtggtacacatatatttggtcttcgacaaaatatttaaatgttatcatgtgaattgttcccatctagccagtccatcaagtagtttagttcttaaagcattatatatcattagtgatggtcttcattttaagatttaccaggtctatgcagaggccagtagtcctcatgtagtgaatacagctt

SEQ ID NO: 92129 - DNA, 869 bp, Zea Mays
cagacgcgctagtaaccctctcgttatcgaggcgaagaccattgaccaactgcaccgtgcatgggtaactcccatcatgaccgcccgttgttcccaatactacaccagacgaaaagataggcggaagggacaggacaacacggtccacctactccactacgcaagatgataggccagtctacgccacaacctacgccagagcattcacccacacgctgacaagacggggcaaagacgagtctggccagaagagcccgtacgatgaccaagggaagacacctgcctacagccggagaagaccttggtccaccagcttttcccgccgctcagcgcttcatatttttagtattcttggacccacctgtcggaacccagcttccttgtatgttcttcccttagcttataaaaggaagggcacatgcgttgcaaggggacagaggcactagaacccagggaagctcactcgagttctcctaggcgaagctcacttaaactccctcggaggcatctccatcccaacctaggctttctcaagctctcagcaatataacccacaatggagtagcccaaaccactctaaattcttgtatgtttttgtgttcatccatcttactaggcaaaccctaggtagccccctattgttaggatcaggcgggtgcattccgcttcccggctagagtttacactctaacaggagctattaaggaaactaggatataccttggttgggacaacatttttctagctagtttcttctcctaaatgataagttatttgagatttatatcctcatgaccactcgaatgataattaattttagcatcaattttgggataaggttccaagtattttggttagccttgcacatc

SEQ ID NO: 92130 - DNA, 702 bp, Zea Mays
ctctgtcagaccgactgaaggagctacgcgatggtacagtaaccagatcagatcgccagctcagtaaactcaccgccagtgacccctgcgcgtggattcacgctgctacagtgattcgtgctcagtgcagttggataacacagagggagtaagaaatatcacgagtggatgaactccggccactgttcattccggccgctgtgtctgcttagctcacggtcacttcagatctcccctcgccggagttagacacctcgcagccttgcaccacatgcctcagcactttaaccacaccgccgtgactcgtgttagcccatccagtgatcgtcagtgaggttgccacggtaatggccaccaatcacgtgcgccagtgcacctcctcctctccgacctccatcgtgcgagttcaaattcaccggtaaccgctcaagagccctataaattgagcacaccctcggctccgttaggtattccagcatccaatccactcgctcgtgcctccaattactcaccagagcccacaaattgctcaattcccccaaatctgttttctgccaccgtgaacaagctctcaccatggacagtgcaatttaggtccggtcttgtttcagcactcttatataccactgatgctcctcgacccattcaattaaactagaacgtgctagatcgtcgggaacacccgtgctcacccgtggtttg

SEQ ID NO: 92131 - DNA, 336 bp, Zea Mays
gtaaggagtgttgctcaaacatggtaggtattcttctcttcgactaggaacaataacctcttggtagaaattaaaggacatgttaatcacaagttttcaaggattctagacgaagcagtcaccgcccaggcccttttccaatgcacacaagaccacgatgaatacttgcaagcctatgcccggagattcctttggcttcaggctcaagcaacaacagtaccaaatgagatagttactgaggccatgatgaagggggcttcctctaggaccactggcacaatacttcgctagaaaacccctcataccctagaaaaaattctccagaagatggatgaa

SEQ ID NO: 92132 - DNA, 440 bp, Zea Mays
agggaattggaggtgacaggtccaatcaggggcctgaaaagcgacaaaggttggtaatcccacctttcaatcaaaaccgttcttcacctcgtccaccctcctacaccttcaaacagcctgtctttatccgccctgccactgcccccacttcaacaagtcagccaagtgcccctagtgcttgtttccccgccctccctagttcctcaaccagctgcttcaattgtgggaagtctggacattttatcaaagactgcccatatccgatgcagaacaaatccaacaatcagccgaacttagggaattcaaatcaaggcaagggaaacatggcaaataatgcggcgggcaagaatataaagaagactgggcgaatatactacacacaagtggccactacaccggagggagagccggttatgatgggtacgtttcttgtggccaat

SEQ ID NO: 92133 - DNA, 362 bp, Zea Mays
gtgaaaaagtggtccaaagtggggttggtcggtttcaaaaatttcagacttggtgcagtttactaaaactgaatttggttcagatagctgaatctgaatttttgtatttttaccccactttgaagcactataactcttgggcccctgtaacttataccctgctcacttgtgttaaaaggcttggagtagtgaggtgtgtcctggccatgttcagaacccataactgaagataatggtgtgccatctgcttgtgttctgataaccaagataaactagttctgttgtgtaatatgctaaagaagatctgagttaaaggggggttcatttgccacagtttcatgacactcgaaataagtctaaaa

SEQ ID NO: 92134 - DNA, 324 bp, Zea Mays
caggatctattttgaggagcatggccttgatagggtttgtgtgattagatacaaaacaaaaaattttttgacacaacaagtgcagaaggaagctttagtcaatttaggggtcaagctatggggtctataagctgtgcaagtttaaattcatgggtaaaacactcaagggttagaaaataccaactcaagcttgaatattttttaagaggtttcacttactaaccacaaggttgtttggagtagggggtctttttatgggcaaaacaggcaacaaatttttttattggttagaggcaaaatggactgaatagctaccgttccttc

SEQ ID NO: 92135 - DNA, 297 bp, Zea Mays
ctcagactaggcaaaagagctatgctgataatagaagacgaccactggagtttgaggaaagtgatcatgtgtacctcaaggtgtcaccacttcgtggaatgaggagattcaaagtcaagagcaaattgtcccctcgctttattggaccgttcagaatctttaagcgagttagggagatggcataccaactcgagttacctgataatctatctgatgtgcataatgtattccacgtgtctcaacttaagaagtgtctccgtgtccctgaggaacagttaccaatggaggagctcagtg

SEQ ID NO: 92136 - DNA, 783 bp, Zea Mays
tatagagtttccaaaaccaagcaaatttcatgtgttgagattttcaagttttgaagagaaatttggagtaaattgcagatttccaacttgatacagttttggttcagctaaaaacagtttgctttacctatttctggacccctgtatgatttaatctggggggttttggcaaaaggttgctatagtaaacttgtagattaactataggagaacaacttttattaagtgttgaagctctaaatttatatggaattggtataaaaaggagtctaaagatgtagtgttcagtttggaaaatcagacttaaattcagtcctgctgatttttcagtctgaagcagatttgggatactccttaagggctgatccatgtagttctgggctgtgagtgctgtaccaaagtggaagaccatactttggtgtgcaagttggattaagggtaatgccactaaaaccagttggaactgacagtaacagtagttcaaagattcaatgtgctgaatctgaaattcagacttagtcttgtttcagcacacagacattgtgtgtttggctcaactttggagctctctagtgcttgatccttggagtattaagccatatctttataagaagagttgaagaacatatattagtgtgcaagtttgatgtagggaggtagctctgtccctataaaaaatgggagcaaaagaaagatgaatttggctctgcagtcgaactgaagaagttcagcgcagttagtgtagtctgaattttcagactcgaaatagtatctgcagagact

SEQ ID NO: 92137 - DNA, 534 bp, Zea Mays
gcaaaggggagtgggagacattgtcgtttccgtcgtcggtggtggcggcaaacgttgaaatccacggcgacggaagggagagagggttatcgccgatgccgtgacagagggaaggggaaaggtggcctattttgacgggagatggagttcttctatgccagagagacggagtcggtgagaccgtaagggcataaacggcacaacgaggctatgggcccacctgtcagatccgccaaacaatccgtgacctatttcgacgaacaacacagcttgagcgactctcttttcgaactaacacgagaagcgacaacgtagagtgacacgttttgccaaatttctctttgtttctcctacgtgtcatcagtgagagaagcctacgacagttgtgatattggcgccgtgggcttgatgggcagcgaggacttcttctccatcgaagttgcagcccaagtgccaatgccaaccatggttccagggcggaacatggaaactatatcaccgctggactccatgccaagctttgtgtgctcttcc

SEQ ID NO: 92138 - DNA, 472 bp, Zea Mays
gaggcaatgggcatgacaagaggatgggacggtgatcacacatgatgcagatagtagaagatgtaggatattgtggcccacacttgtggttcggacagcatagggacccaaagggccagcaaagtctgcaaattctatggcagaggcacggtatacatggtttagttcacatggatgcaaggtagacatggaatttagcaaagtggggaaccggatcatcatcacttcaagtaagacaatataagataagttgctgacctacaaagtcatggaagaagttcaagacacaagttcgaagaagtctggacgaagacacgtgaagaaatggagttgatttcacacttttcgtgtgcactggtttagtccaatgtatctcacagaggagcaccaaataaatagcatgcatgcaacaacaggagcaccaccagatatgtacggcgttggggagttgtagccggatgtgtggccagac

SEQ ID NO: 92139 - DNA, 418 bp, Zea Mays
ctcaaattgtctctttcgaaaatggagaaatcagatgaagactgaagattgaagttcagaaaattggaatggtaccagtgtgatacaactggtttttgggtactttaatttgtaatctatgttgtttaggtccaagaaccctataataactttgcagatccttgtttagtgaacaagctctgttaatggagactgacctattcttaaccagaataaggagaaaaggatgaatgaagaggggaagattagtcaagtgctgtagattcaaaagtgcagaaatatctatccctgatcttttcctcttgtcgtgtcttactttggaatagagtgaagatagagatgaggagatggcagggatgttcaaaactttgtccatcactgaaatatcacaaagtctgaaatatctgctacagtgaca

SEQ ID NO: 92140 - DNA, 635 bp, Zea Mays
gttttcatattaaaaatgaatttctaatatcatttctctattttaatcttctctggactgggcctcaattactggtaagttcaggggctaacccgcaagatctccaagacacagcgcgccactggtctggactgtgggttgatttccagagaggtgagggtctctttataaaaattgacccgcgaaggggtacggatgttttctggccgttggatcacttgccaagggcatggattagatcggatctcggccgaaccggtacccgcccagagccgcccgatctagatccgatggtaaggatttaatgagtcgagggtttaacgttcatcactggatcacaaatctacggctgaaatcgtcccggtcgaaacgttacaccatatctaatctctaccgatcatcctgagatcaaccgctcacgctggttcaaatctagaccgtccgataagatcagacggcgcactctgcttctccctaacccgagaactcgtcacggcggatcgacattcccccccacggcggcgcgctcaccggagagccacccaatccgtcgatccgatgaagctatcctacggtgatgtgcaaaaaatgaaattgcagctagcgtgagtgcgataggggatggctcactaggg

SEQ ID NO: 92141 - DNA, 505 bp, Zea Mays
tttctctactatctataatctgtctttgctcaaccctttcgtcccttccattcttccatacccatacagatgtcagaccttggaatgtcaactgcaagtgatgtcactaagtgcaaagaatacattgtgttagcaactcctccagctaagtctcatatggaacagttcaagaaggcgcatgcacaatttctgcaagcaacctctcaagtggtagctagactccaacaagttgatttagtagaatttatagcacatgagcagactaccggtaaccatatgacatcaaccacaacatcaccctcgatagttgacttagaaaagttgttacaggcacaagctccgataatacagaaagcatctcaactcacctcctcataccaacaagtgttggcaagtcgaaacgtcactagaaatgaaacagccaatcaacagacacaaaaggatgcacaccaacagacaagtgatcttggaacattttgttgttgtgcgtactatggaattcctt

SEQ ID NO: 92142 - DNA, 589 bp, Zea Mays
gtttgaaactgcttttcgagagcaccatgtgccccaagggatcatttagctcaaggaatatgaattccgggaactaactcaagacggaagatctgtcagtgagtacgtgcacaaattcatagagttggcccgctacgcgtcggatgacgtcagcaccgaagtcaagaagatggtccgctttttgaaggggctcagaccagaactcaagaccatcctagccagccaagacttcctcagtttctcgcacctctccaacaaagccatgcaagtggaaagggcaaaggaagaagaaaaaggccatctcaagaggaaattccaagtccttcgagcccaacagcaagaccggcaccagaaaactcgatcctttggatttccacccaagggaccaagcttcattagaccagctggacccactccgtcacggttcagtcagtagagtcagagctcctttcatgccccctcagttgcaagcaaccaaccaccagcgaatgtgtgttggcactgcggagatcccagtcacttcaagaacaactgtccccagctgaagccatcaggacctgcttactccaactcggtgaacggccccaag

SEQ ID NO: 92143 - DNA, 980 bp, Zea Mays
gatctttaccctgaagtggactgcgggttgaatgtaaaaaatggcaggggctcttatgcaaaactgctcggccgaaggggtatccatcactctcagccgtcggatcgatgatctatgatgctgattagactgtacaagatgtgaaccggtaactcctaccgatcgtgggatcaaggatcaacggatgtgattctaaataaacgaaatctaacctcacccacacatcgcccgatcgacaccccagatctaattgggcgaagggacatcaagatgtatctccaccgcccaaatccggatggacgaccaagagaccatctcccccccggtggtggaacacagccgcacacccccaactgtggcggcgacatcatcgaggagcatccaacggtcacgctggggcttgattcgaagcgtaactaggtgctaaacaatgcagaggacgtatagaatcgatcctagggacattaccgatggctgggaggcagagcgatgctgtccacgcggcacggcgggctcacggcgaaaccccatctcctgcgacgaatttacctcacctcgacagcaaaatatgtacggtgaggccgcggtcacctctagcatgttgagtcgaagctccctagatatcttgggttagctcgacggtggcaagcacgacgcccaccaacacccccatggtggcaaggattttctttgctgcctgctccagagaagataaccgggcttcgattgctaggccaagggcggtctcggccgattatatagggcgagggaggacttagacatgacaagcatcccaacggctccccctggatttactcaagcaaacacattagtctaaaagggtcaagttggagtacatcctccccctagacatgtgcatcatttgcataaggacttgtgaggtccgggggtgacttgtacaacttgagcaccaaaaataagcaagtaaagatagaaatgcttcatagaacatgatcaaa

SEQ ID NO: 92144 - DNA, 720 bp, Zea Mays
tataaatcgtgggccatcgggaaccccctcatccgtctggtgatcctcgtggggctagccgtatcgctgagcgcagagagggtcgaagctcatcaccgagtgaaaagggccgccgctgggggagaaatcgccaccgtgccacggatcacgtgggcggggtacgtaggcatcctatatccaggtaaaaagggcccctaacacctctgcttcgtcctccgtgcgatgtagtagcattcggttttgagctcgggaagcttgggctcagatccgcctttccaaccatggtgccgccgcggctgggcatgtgcgccaccgctctggtgatcgtcgtgtgggggagaatggttgtagccttttgatctctggccaatggccaagattagcatagggtatcgttttctcctcataagatctgagccgtagactgatagatccatggataaggttaagggtctatgtggaccgtcggattagcgctgaaggttcaggatttcaacattctcataccccttcacgcatttgttctggaccgtggatctttgatctcatggcgtgtttgtgtcctcaactgtgtggaattttaataaagagaccctagggattggataaattaacccgcaatccactctggtgggaccctgagactttagaaaaactatggattagcccctgcacttcctggaaattggcgcacagtccagagagtgataaaaatagata

SEQ ID NO: 92145 - DNA, 480 bp, Zea Mays
aaagaagaagaattcaggagaggggagacgaaggtccaaccaaggctctctctctctgcttaccttgttcgctgcaaagagtgttcttgacaacacactatatttataatcgttcgggggttttacaaagaaggcgtggatccacttttgacgatcatctagtacgagttctttcgcgaaaggcattacatctggtgttccctccggtcctaccatgcgtcgtgtccatcccgccaggactgctaatgaaactgtagtggtcgggcggtccttgtctccctcattgccatgggagctactcatcattgctcccaaagggatccagatctgagtccgagtccatggagagtgtgtcatagatgaggtcctcgccgccaccggccatctcacaaactctaggtcatctattgtggggaggtggctacaggccacgagggggtgattaccgtcggtgcatgtcatagtagtggtggaaagatg

SEQ ID NO: 92146 - DNA, 480 bp, Zea Mays
ttggaggattgtccagggatcggaggatatgtggtacaaaatcattaaagctaagtatatgacagggatcaacttctttaaatctaaaaccaagggggcttctcagttttggcaaggattacataaagttaaacatttgttccaatagagggtagtgaacattgtccgaaatggagaaggcactctgttttggaaggatacttggatgggagaggtacctctaagtatcagatatccaaatgaccaaatctatatgaaatttgcaaggataaggatgtccttgtagctgattgcttcgatggagataatggatggttggaatttaagagaccactttgtaataaggattttagcgaatgggtgattcttaaatctgaaatgcagaatcatggtatttcacatgggagagatacaatgatctggaccttagagaactctaatatgttctctactaggtcgctgtataggtttatgtctgat

SEQ ID NO: 92147 - DNA, 560 bp, Zea Mays
gtcgaatatgatcaaatacaggaataatattcctatccctcgttatatattctagtggacaaatgcatgatcatagtcctagttaggtacgatagaaaagttgtgatcctattataaacaccgcccttcctatatccatctagatcattttcttgttgtgaaaaccacaccaccttatttcatgtctttttagctgtctatggattggtccttatacttgatgtatactcggtcctatagagaacctagatcttagtatattgatccttgttagaccgttttcagccgttcacctatatggtcatccaaaacattgttttctactgttgtgcacagcagactacactggtcatagagtggagtttgaatatgaggatggggatgagtatgctgctagagatagtcttatcgacacgcccacaattaacatagttgccatggtgattcataaggagagtcgtggtggcgcaccaagagaagtcgttcaaggagaaaaataaatagaaattattgtttcgatgcatgaggaacaaaggaaggattttgatgtctcattaaat

SEQ ID NO: 92148 - DNA, 667 bp, Zea Mays
gtggctttacactgtatattaggagtgaagtttaaaataagagacgatagaatagctgctagagagagtatagactggagtggattaggagttcgcgcagaggggatcagtggtgctggacagtggagacgccggtgatctggatctctagcagccgccggcacagagacacatgtaggatttaggcagccttagggtttcggcggaggagaggagaggagaggcggaacttaatattcttgtggatgggccgaaaacattggtcaaaaatcctagcgccaatgaccataagttagaaaagtggacaactaatcacccttgtcattaactaatcggacggtcaagacgaccaggcttcctaatcgagttgtccgcccaatcggctgttaataggtgaccaacccgttagtcggatgacttgcaattaatcattggtttttgtagtttgttgctcataaccgtttaggctagcgcctctgaggcagtatgcagcaggtcgtgtaaaatagaggatttacattgtatattagaagtgaagtttaaaataagagatgatagaatagctgctagagagtatagactggagtgcacgagagaaggcgcatgagcttctcaccttctatttgttgtaatctaacattttggtattcagagccagcaattctgc

SEQ ID NO: 92149 - DNA, 782 bp, Zea Mays
tacacatgtacgacgaagaagggcagtaattaattcagaatcgtagatgaatcccctaaattctccacccgctcgggcggaagccttcttcactacccaaatccaactactacaatagatgtccaacacaatggccaatatgcaagcccaacaaaacagtaaccaacatcacccacaccaaccaccacctagaatcacagatgaatcccctaaattctccacccgctggggcagaagccttcttcgccgcccaaatccagctactacaatagatgtccaacacaatggccaatatgcaagcccaacaaaacagtaaccaacatcacccacaccaaccaccacccagagataaacattgtgagttcatgagctagaagcctcccacattctccagctccccagatccactataggcgtacgattggctaaaagccatggaaaagatgtttaatatcacgcaatgcactaatcaagaaaaggtcctttatgcatcaggtcacctcattggccctgctgtcgatcgatgggatgcttattaggcagcacatgctgccgctgacaccgtcacttgggctgaattctcgacaagcttaggaactatcatactcctaccagtctgatgaagattaagaaggagtttatttcactcaaacagggagggatggctgtgagtgagtacagagacatgttcatccagctgcctagatatgcacccgcagaagtcactgatgatgagatggagttattcctaggaggacttgttgggtcgttctagtatcagt

SEQ ID NO: 92150 - DNA, 312 bp, Zea Mays
ctcgatcggggagacaacccaatgtccgaacacctagctggacagaggtcccaacagatttagagcttgctgagtctagggtgttgcttgccgagatatgtgcactaaagaataggggcttgaccgctgaagttgttgttgtttactttgttttcaagaatattcagcctttgaaggatagagtctaccatgcttacctttatactggtgttaatgacccttctcggattaccaacaagcgtatctgaggaggacgtgctgagtcgggttgactcgatgctgaggggcaaagcttcgaatgctggtgctccc

SEQ ID NO: 92151 - DNA, 404 bp, Zea Mays
gtaaactgccaccgattggtgttaaagcagctagagcataggtctactgaaaatgacgagagagagagtcttggtcctgtactcacgtgtcctcccttcggcgaatggatcagatcgatgccaaagggagagagaggatcttgcatgcttgtaaacaaaggctgtcctaaacttcatgaaattaaaacgagtggccttcctttgggaaaataaagagagggaaaagaaataccaaaggtaaagacgacagagaaaagggaggggaatgtattatatgtaagcaaagactgtccaagatccagaagagcacatggctaacaataatctactaaacctttaaagcttcgtgccctctccccacactcgtacgtatggttgtttggtaacggagagatatattaaat

SEQ ID NO: 92152 - DNA, 444 bp, Zea Mays
aaacggaaccagctaagtagcgatcataagctgacttagatgaatactgcccattggccgttggcagccatctatgctgatctgaaattaggttgcaaatgaattctccgagtgacatcccatatacaaaagaagcccataagaacatcggccgacaaactaccagtaaggtccgacacccatctattattcagcaaagcctcgtacacagttctgatcttctgaattttcatggggatgcgactcaggagagctggagcaagctcacccacagattttccatgtaaccatctatcagtccaaaacaacgtattctggctatctcccacaaaagagcaaatagagactgagaaaagtgctgctgcatttggatgcacctgaaagtcaaattctgaccatgaccgttcaggctgggtctttttaagccacaactaacgcatattc

SEQ ID NO: 92153 - DNA, 366 bp, Zea Mays
gggatcctttgtcccctatgctttttatcattgtgatggacgtgcttggcaacttattcaggcatgcagaatctagagggctgctgcatagcttgggggctgcaaatgttaggtccaggctctccatgtatgcagatgatgtggttctttttgtcaagcctctggatgatgacctggtttgtaccaagttgatccttgactgctttggagaggcatctgggctggttgccaacatgaataaaagttgtgcaatccctatctgttgtgttgcgcctcttgtgcgtgaatgttgcaacaccctgcagtatgtggttgctaccttcccatgcacttatttgggcttaccgatctccaacaagaaactgc

SEQ ID NO: 92154 - DNA, 862 bp, Zea Mays
cagagccgtgtagcagcttagcctagtcctgtaccctaagcctacatgcttcaccaccctagaacagttgttctagtacctaggacttggcccctagaggcctaaaccttatcctaaccaaggaacaggttcctgaaatcctgctcggcaaggtcgagaagcataataaagaggattgaatgcaatcaggatgaggaccccgtaggtatgccactgagcgccattatggagccatgtgcagggatgccttttcaattcaggtcaccaggcgtgggggccacaggcatgatgccttctcaagtaaagcacatttatggccccaccaacaaggtcaccacctcacccaaggtgggcctgggggccactgtcggtacctcaagattggggtacccactacttctgggtcaaggcaaaccctctgggactaccctttgtcaccatgctaatgatggtccgacttagcctagtggttgggtctacccagtaaggccactagcctcgagtgaaggccagcacctataatcagcgctttggaacccgagcagagggtgtccaggtttgccacgtgtcttggagacgagggctctcgacacctgcgcccgggggctggaccccccaggaatggcctcgaccctcatggcgggccacccatacctctgtcctatgggggtccggtgctgccacatgctagccaacaccggaggagacatgacctcgcccgaacaccatccagacccctagccaagggcattctagagctatcgcgaggaagggcgaccctagtcactactccccacacaaggcgaggtctggtgctagcatgtgttttacaatgcgtgatgtaagctatcaggggaagcct

SEQ ID NO: 92155 - DNA, 620 bp, Zea Mays
tggagaaaactgattcgtccaggccctggcatgggatgaatcttcctgtaaagcagcaagtcggacagttctttgcattgtctgttttatctgtggtaggtaatgggaccaatactcttttttggtcagataaattgataaatccccatcattggtaatggtgaaatttttttattttggaaggacaggtggctagaagggaaatgcattgctgaactagcaccccatctaatcacaactattggcaaaagaaccataaacaagagaactgttgctgaggcactgaacaacaggagatggatatcagatataaaaggggccttaactgtccaagtcttacaagagtatcttatgatatgggaccaggtggaaggagttattttacagcctgaaaaccctgacactttcaggtggaaactaacacaatcaggggattatagcagcaagtcagcctatttggtcttcttcatgggatcaattcgttatgacccatggaaaaagatttggaaaagtagggcgcccctgcgctgcagattcttcatttggttggtgtttaaaaaatgatgttggactgcggacaatctggctaaaagagggctgccccatcccaatgcctatcc

SEQ ID NO: 92156 - DNA, 348 bp, Zea Mays
gccagcgccggccggcagacggcagaccatatgcgttttgtggttgcaactccaactgtacgcatagatcgatcgatgcaatctgttggttgtctgcttatcgtttcagagacgcacacgtactgttggcggtttgatgctgttcgtcccatcacggacacggtggacgcatacggatgctgcaataaaataatgactcgataattgacgctgtgttgcttctgtggctcatgcgttattgatgatggaagcatatactgacgccgacctgtgcaggcaacactgtcacgtctgtttgctactagtgtatgacctcatgaatgaatagttgtagctagtagtaccggc

SEQ ID NO: 92157 - DNA, 451 bp, Zea Mays
tgccccttcaatgcgtgcttaaatcacttgatgacgaggaccatttcctcatcattgtggccgggctcctcaacttgtgtcatcttgctcgagatcacctccttctcatttgttgctttgaaggaaataacttgcggatcaatggaggggatgttcccattagcatggtcattgacgtacttagcatctttaaccatcatttgattgctaacaaacttacccagtacctcctcatgcaccatctttgtgtatctaggattctcatgaatcaaagaaacgagagcaggatctaaaactataaatgaccttagcatgaattgaacgacttcatggtccgtccatctcttgctcccgtagttctgcacttggttcactagagacttgagcctgttgtacatttcttgtggcccttctcccttattcatggcaaacctcccaagttcaccctcga

SEQ ID NO: 92158 - DNA, 486 bp, Zea Mays
ccgccgaagcatgtcagaaggccttcagtactgtttgctccttcattggcacaagagatttaattcaagaacatatatcattcagagtatggccacttgtggaaagctaggaaatgccgaaggagaccatcactaactctagcgaaggtggtttggttcgactgaagtatacattcaggtttggggataagtttgatgaaccaaatgatgattggctgaagtgcattgaagctactagcgacgagttacttggggcgtattccaaaaccgaggacaatgccttgtccacagccttcgggggtcggaataagaaaaggttgaacagggtattcgatgctattggcttcgtataccctgactattgttacccactgcgagggcaaggggtaaaaagaaagattgcttcttctggaaaggttgccgcttcggccatcacatctgagccgaagggcaagaagatgaaggttctgactcaccggccgcgtt

SEQ ID NO: 92159 - DNA, 732 bp, Zea Mays
ccgggattcctcgccggaaacttccagccgccgtaaaccgcacttcaccgtggatgggagcccttgttgcatcactaccgataataggttcaccttaaagtttgtggtcgatcgtatttcctgtagaactatttgcatgggaaatgagtgcactagtggcgtggtctccgacgaactccgcagtcgcgggccggtgggtgccgtcaggggtggtcatgagattggtgatggctcagggaccgttgatccggtcttcaacggctgggattagttgccttgtgtcgcgttgaccggccaaatggtggtcatgaatgtgtgatcctacggtggaaaacaactttaggattcattaaacgcttaccgttagatcgggatcggatgggcatagttccataccgactcgtaaagtgcggggtctaatcgtggccctcggatttgatctgaacgaccctcatctgagcataccccttcgccatgccactttgcagaaaaccgcttataattttagagaaccaacccacagtccaccctatacagcactctgagtcataggaagaattactaagcggtccctgtgttttccagaaataggcgcccagtccagagaacagaaaaaccagagaaatgaatttaggaatagatttttagtattaaattaattacagaaacttgtttaatttgtagaaaatgcatatgaactccaaattgatccattctagttcctaatttttt

SEQ ID NO: 92160 - DNA, 443 bp, Zea Mays
gagaggtcggacaataatctgctaattcaatcttaccgcacctacttgtaacttgttacatgcttcattccttctaaatttgaagtttttaaacttgttattattctttcactctgactgcgtcccatctctcgcttctattcgagttgctaattcgactgcgctatctcattaacgcatcacctttcatgtttttttctgcctacgacttctctttgtttgttcggagagggcttatgttccttttcaacttttgttagacagaacttctattcatcaagaaaaaacggattttttaatagacaaactttgcatgactgttcttatatagatattaaagcaatgaatagttaaaggctagggcaatagattatagtcgacgcaggatacaggtgatcgctaccttactcacttttgaaacttggattcactcttctcatgtt

SEQ ID NO: 92161 - DNA, 311 bp, Zea Mays
gaccaggaaaagacttcatccaaaatgtttatgtcttgattcatctcgagatccgctttgactattatatccttccttgtcgaggttgatctcctcccctcttttggtcttggtgtctccatccgagctagggagatatagttaagatagcgggggtatatgggtaggacaacatcttgtttatcaataggttagcatagatggagtatgtaacctattggcaatgtatggctgagttgatctgaggcactaacttatgcccaaaacatgtttatagggtttaatctatttcaccagtattaactaaccta

SEQ ID NO: 92162 - DNA, 324 bp, Zea Mays
tcggttttagagatatgatctattttgtggatagggtcggttgtagagatatgatctattttgtggatagggtcggttttagagatatgatttgttttgtggatatggtcggttttagagataggacctgttttgtggatagggtcggttttagagataggatctgttttgtggatagggtcggttttagagataggatttgttttgtagatagggtcggttttgtaggatggaagcggatagacagaattaaactgaacccaaacaaatctaatccagcaaccaaactcaactagaacacgaactcagaaatgcaaactctaa

SEQ ID NO: 92163 - DNA, 506 bp, Zea Mays
atagagttcacctagcagcatcgctggccgaagaagagtaggtggatagcggcatcagggactcatgagctgacaaagtcctgaaccctctatcacctgcatccatcaccctgacatgaatgcgagtgatgtagtagcaagcctgaggaggctcgtacactcgccttatctcatacaggggtcggacataggttcccaacgcatgcagaacattctgtagcaggttagggaagtgccctgtctcgaacattgaggtataatgtttagtgacaggccataaccccacgtagtggtcctgttgttcttcattggcttcctcgttgatgttttcctcctcttcttcttcttcttcttcgtcctcattgtcatcactagagtcatctagttcgttgcctccgggagcaagggcttggactgctggtgctagtggtgctgaagctgacaatccggctgtgaaggctagtgattctgtcaacggggtgggcgtaggcagaaactcctctgag

SEQ ID NO: 92164 - DNA, 717 bp, Zea Mays
cttctgtcctcgagtaggctccaagtagctcatcactcgttgcctctatagcgtctagccaatcatcatttggctcgtcaaattgacttctataccggaaggtgtacttaagataaaccaagccaccctgactggagccagtggtagcttccttcagtatttcccattcatttgcaagaggccatactttgaaagcgatgtgctcttgaactaaatctctggtaccaatgtaggtacatatggtgttgaaagccattaggcacgcttgcacttcattcccaattgcgattgatggcctcctaataccgaaacatgaccatatggaatgttgaatgatgcccctcacatcctccctctgtttcagatcatttttcacgtaaaaccattgcttcatccaagagcccggccacttcttccgaaatgtaggcacaggataatttgcctcagagcagggcacgaagctgtaacagccaaagttgttatgatatttctcttttccggttgccttcgtctagtaagataactcgtgaatattgcagaagcacctagcatctggctctagtccctgactcctcatagcccatataaaaacccccactttgataagagcttcggggtaagttgatgaagatatatctcgaatgtcttcagaacctcaactaacatcttgtggagcggaaagcgaagcccagctttcatgaagctcttaaagaccac

SEQ ID NO: 92165 - DNA, 481 bp, Zea Mays
gttttcgtggtcagcattactctcaatcaataaggggcagatctgttgctagatttttctcattaatagagcaaaggtgtacaacacacattactctcaaacagctgtattctttctttttgctgtgcttctgcttcagtttgtttgcatcgtatcatgcatctctttgcagcatgcagtgcaaatctcaatatttgccaacagccatgcagtaaggcacatctccagtttcagctcctcaagcgggctgcggcagcagcaacagctgaccagcacgctgccaccggacgatgctcaacaccaggtttcggttgccacaggtacactcgtgtgggctgcagcccaagacagaatgctaataatgtacagccctgtgaactgaatcctgacgaaacgctagcaaacatagcgccaactcggaagcttagacaactacgggccagcatataaagatgatgctgggcacttgacgtaatctctg

SEQ ID NO: 92166 - DNA, 271 bp, Zea Mays
gaagtaccaacatgacaattctttagatgttctatcatgcaataatacttgagatgttcacatatcccaatccagacatcttactccacttcaagacattgctttgcaatttgcttcctgctcctattactgtttccatctttggcatatcagttcatactcatttcatgacaatatcataatctggtgttgataatgaagtatccacatagctctgttgaatatagtcactctgtccgtgtgaggagtgatgagaaaatgcaactggaac

SEQ ID NO: 92167 - DNA, 640 bp, Zea Mays
ccaacactaaaaatgaaaattaaaccttctgaacttgctaggcggtgcagacacagacaacagaacaacatttcatatatgctaaacacataccttctatagcgaggagggtgggcttcttcagtgggcgatctgcttggagttggcaaacagcagcagaaaatagggcttcttcataggctccgttgctacactaaaataaacaaacaacagtagaaagcaatggcaatgagttggcaaaatgaagaaaatcatctgtctagcgctaggaggcagaaaattcacataacttccgacgcagagcaggacgaccaatccgttctaggccctgtcatcgcctccgccacatcatcgcgccagaaaagtagcaaaactatgaactccaggaccacatactataattggctgattacctgaaaaccaaacaaaagtcacagattgtttacatcacaagtgtaatgccccaacattctcatatgaattaggcatgcataaaccggaaagggcgtccataaaaacacaaacattttttctctggtccgagcgatgttgttggaccaactaacataaacagctcctaaaatgtcctccaccgagtatcttgcctcgctgatgatctatcacacatcgcaacaatata

SEQ ID NO: 92168 - DNA, 298 bp, Zea Mays
gtttctgctacattacctggcctttcatcgcaacaacaggatttaccccttccctgcagaactcaaccctttcaaatatgttccaaggaaacgtcattgtttaaaagccagggcctagctatcatagttgaacatccatccagaaggaagtcataatatgtgtatgctactttggatgtcacttatgtccagtgtgtcaaactgttaagtgttatgtctctgttccagtcatggtgtgtttgatacagttggcttagttgtagttccagacattccagacaatcatgttcggtatcct

SEQ ID NO: 92169 - DNA, 276 bp, Zea Mays
gtgaataagcattgaagtccaagatcatagagttgacccactgataataagttgaagctcaaaggtgcaaccaagagaacatttgaaattgatagatcatttgaaattgccaccttgccaagtccttgaacttttccctttgaattgtccccaaatgtgattttgtcttgtccatcaacattctcatcaagtgaggtgaacattcgtgggttgcatgtcatatgttttgtgcacccactgccaataacccaatgactcccaccggtcttgtagttc

SEQ ID NO: 92170 - DNA, 564 bp, Zea Mays
cgcaggcatagcgtatgcttcagtataaatggaaccgtgtatcatgtaccaggaattatcgaagaaaatagaaataacaatccatcgccttcgtctctatccttctccatattctctcttcttccttggtgccgggtatctcattagctcgacgttcatctatggtcgacgctaacaaaagcacacaggagccatcgtgtccacccctcgcttgtcgctatcaacaaaggcagagggggcttgaaatgcgacggccaccgtaccaacgcactattcgcaaggacctcatcacacagccacacacgcgtgctgttgttctctcccagatactatttggtataccacaaggggaaaaaagagtcctttttgtgcgagcactggccgtttgaccctgccgtccgcacatcagaattaaatcgcactcgaagaccattacgcgggtttcttctcaccgtcgccactgaagatgtgagtggatacccgatacataaaaaccccattaaagtatagatatttgaatgttccttttagtatacatacgatctggatatcgcctagagagag

SEQ ID NO: 92171 - DNA, 311 bp, Zea Mays
gtagattgggaggaggaaatagagcagatggtaaaggtgttgagatgggaggatggagtaaggagagacaactaaaggagtatagaagagtgaatggtctatgcttcacttgtggagagaaatttgaacctggtcatcaagcaaggtgccagaaagggaatgcagtccagttacatgttctagttcctgaggatatggagaaggttttaactcctgaagtattggagcaaatagagcaagaggagaaacaggaagaagaggaactgaagctgtctctgaatgctattaatggggctgatgattctcaatgt

SEQ ID NO: 92172 - DNA, 304 bp, Zea Mays
atcgacttgtccaacactcaagatgttgctccgaagacgagggatgtggtacatgtcatggaatgccatgttgttgccatccttcgactcgaacaggatcgtgttgtgcccaacgatctccactagttatccatcgccaaaatgcacagagccgacaacgtcattgttgagctcaaagaagatgcccatgtcgctagtcatgtggttcgatgctccagtatcaaggtaccatttcatctccttgtggtcaccaccatcgttgttgtccaccacaaccttgccctcgttgaggaagatgtgtacg

SEQ ID NO: 92173 - DNA, 450 bp, Zea Mays
aagaagtgcatataaaacttcttttccaaatgatgtcatgggctaattgagatatgcaaaccttaaactcatcaacagaactcgcttcccctaatcaggttgaatctttaccaatattcttccaagtaattttattatcctagtcactaagtttagaaaaatcaggaattcaaaaattgtgtggatatggcatcaaatcaaaatgagcatgatagggcttcgagtaagcacaagttgaaagcttcatgtgtggcttatataattaagacagctaatgaactaatatatactctagtatatttaaatgagtttgattaggtctacatctatgactaagcaagaatgataaccatataaaagatggtgatagtcaaataataagcaagtgctccacatataaagaggaaggtgaaatcaaaatacaagggcttaagtcaatgatataactag

SEQ ID NO: 92174 - DNA, 380 bp, Zea Mays
aagtacatgaagtaggctggcacattcgtcaagccgaatgacataaccgtgaactcatatagtccatacttggtgatgaatgctgtcttcggtatatccgaaggtcggattctaagctgatggtagcctgacctcagatctatctttgagaacacactggctcctctcaactgatcgaataaatcttcaattctgggcagggggtacttattcttgatagtaaccttattcaaggatctatagtgaatgcacatcctcttttttccatccttcttctccataaataacactggggctgcccaaggcgaggtactcggtctgatgtagcctttatctgacaactcatcaatctgcttcttgagttccaccaactctggtct

SEQ ID NO: 92175 - DNA, 534 bp, Zea Mays
cctggaatgatgctgttctggcttcctccactcagacgtagaggaagatgcctgaacctcgtgtcatgcagttgttgccggtaggtgtggctgagggaccacaaagtctgtctggcagcatcactgaccgaagtagcgtaggtggatagttgtgtcagggaatcatgagcagacagagtcctaaatcccctatcccctgcatccatcaccctgatgtagatgcgagtgatgtagtagcaagcccggggaggctcgctcactcgccttgttctgtacagggcggacgtaggttcccaacacgtgcaacactttcttgcagcaagttggggaattaccccgtctcgaacattgatgtgtaatgttcgacgacaggcccaaaccccatgaagtagtcctactgggcgtagttggcttcttcgttgacatgttcctcttcattctcatcgtcgtcatcctcgtcatcattcccagagtcgtctgggtcgtcgcctccgggtgcaggagcttgaacagctggtgcaggcggtgctgatg

SEQ ID NO: 92176 - DNA, 931 bp, Zea Mays
ggaacaaaaaatcgcttatatcagagatctgcacccatttgagaataaggtatgttccatgtttcattcacttagtcattgttgccttaccaactgccatggtcttctgttattgttttcctgcagtcatgccatagttggttggaactgggaatatagtatgagtgtatagttacatgttcgtgcaagatagggaattcttggtgacagtcactgtaaaaaagattggagataggtggtggtatagtgcatgcaaaaaatgcacctacacaactgtggctcatggggattcctacaagtgcagcgatcaagtttgtgctaccattggcacgcccaaccaaaggttaggcggcatctcttcacttcaattgcctcattctacctttgcctcccaacagctctcactgttttgactcccactcacatctaatatgcagcggctacttttctatgcatcaccctgagtgaccatttccatttcctatacgcacagcctacccattttcattgtgctgactcagtatcgccatgtgttttaggtacaaactgcttctcactgcaggggatgagacgggtgacacagacttcatcctctttggtcggatggcgcaacacatcattaagaagtcgtgtgatatgctcattgccaacaatccgaccagctttattcctgatccaatcacagatctgctcgagaagacgtatatatggaatgtgagtttctctgaccacacaatcaatactggaaatatttgtttccaggtcaacacagtcgtggcagagataggtactgcaaagaactccatccaagcatcttcatcggggccaaaacagtcacaacctgtgctattgcaaggcgcacccagaggcattgaagacactcctagcaaagccctaacttggtcatgccttcgaccccgctcacaccaca

SEQ ID NO: 92177 - DNA, 631 bp, Zea Mays
cgaattcaccgcgcaagcttcttcctcacctccggccgccgcgcgtcctcctcaaaattcacggccaccgtcttactctccctataaattgagcccatgactagctctgtgaggtcgtcagctaactagccaccgctaatcagccacaatcatctaccagcgagcttgaatttccaatttcccccaacctcgttctccgccgccgtgaaacccaccctcaccgcggccagccgtccccaggtctgctcattcctttttcatccctgttctagcatgcttacgtattggtgatgctctccgacccttccaatcgaaccaaaccgcccctaatcgccaggaacacggctgtctggccgtagggttcacggttgtcgtggccagtgctccttgggtggtcttagatgaaattgggttggggaaaaggcttagggtcgatccaattcggtgtctgttgctcggagaactcagtcgttgccccgttcggccggtgtaagtgctcgccggagcgcggtcgtgcgtgaacggcgtcgaggatgtgtcaggtgaagaaatagaacatcaggggcatttctgcaaatcgtcagtgactctgttaaacagtgagagaacctgtttgcgattagtaaaaacc

SEQ ID NO: 92178 - DNA, 371 bp, Zea Mays
tgcaacttgattgttgttctcttccaaggctcaatagttttgagaggaatcaattttccttacagaacatgtcaaatttctccatgcaccatgccacgacaaaaaaacatttaggggtgaaatgaagaatagactgaatagtgcagttagagttgtgtcgatgttccactaattgatttcatgctatagctgatttagtgggttacaacagtgctgaaaatgttgggcagtttagtgctacagaacctttcatgtactgataatcgcccatgtttggtctgctgtcctgcaggagacaatgcactgcactattgatttctgaaccaaattatgctgtgacagtagtagttggtgttatcacgtgcattctc

SEQ ID NO: 92179 - DNA, 980 bp, Zea Mays
ctgcctaaaaatgggaaagtgtcatgtgattagttatagacaagtagcttgaacttgtaatccagacatagacaagaggactgcaagaaaaagaacaagcaaaacccagaagtatccccaaataattacatctgatagttcctagtaaaaacaataagtgagaagggaaataaaaccatcaaggcatgaaaagagcagagataagaaactatgaagtaaagagggtaaagttctctatcattcactgcaagaaataaatggatatcttgtccttcaccataacatgtggttttggttgatgcatatgtaagcatgtaaatacaaataaataacatgatggaaaggttagaagttgacattttagcctgattgccctagggtatattgtaaataactctaagcattggcaggaaggtagctaaaactaacatccatggtagcatagtttttctaagggacatatagcgtatggtttgtttggtgaagctacaaattcaacttgagcccaatagatgtgtacgcatgttagatactactggtgataccatacaattgctttgtcaagtaataaaaacataaagccaatagaatgtgcacagcagtgcagaataaaatgtcagaaagtgtacaaaagtgcttgccagctcaatctccgacagagataattaatacccagaaacaaattaaactgcaagtatgcactatcatgtagttctcagaaacaaattttagcagcacaagcagtggtgcattatattttgttgaaattggttttctctttgaaaataaagctctggtttactaatagaaaaaataccggcaccagagataggacatgcatagcctcagtagcctcaaatggcatccaaattgtagacagtgcatcagcgtctatggataagataaagctcatcaaccaatcagtgcaaaatttagatcaagagcacacgcaggatgatggctcagggcatggtcttaca

SEQ ID NO: 92180 - DNA, 379 bp, Zea Mays
gaattggtagaggtgctgtccggaagtttagtgggtgggcgaacagcagtagttctagcagtttctgagaatttttcgtgggtaattagtgataaacagtgagaatcaagtagggctttgtcatgcctttccaacgagtacttatgcgcccaattcggagttataaattaggagatatcgccgtttgaacccgggtatgtggctgtccaaagaaacagatttctgcaggtgggcgtacagcagtagtattagcagtttttggatatttttcgtggttaattagtgataaacagtatgataattatgtagagctttgtcatacctttctaacaagtacttatgcgctcaattcggaattataaattaggagttatcgctg

SEQ ID NO: 92181 - DNA, 391 bp, Zea Mays
gtgggtcaggattttcacctttttgctcttcggctcagctgggtgactagtgcggcaggttttctctttttcccttgccctcgtagcgggtagcgataatcagggtatacgaagccaatagcatcaaataccctgttcaatcttctcttgccccggcccccgaaagctgcggacaaagcattgtcttcagccttggagtatgacccaagtagctcatcactggtagcttcgatgcacttcagccaatcatcatttggctcatcaaacttctccctaaatctgaaagtatacttcaatcggactaggccaccctcactagaatcggtggtggtctccctcggcatatcccagctctctacaagaggccataccctgaaagctatatgctctt

SEQ ID NO: 92182 - DNA, 709 bp, Zea Mays
gacaaagacaaggggcctaagcttaacgacgatgagtgtgtctctcagatagaattgaaggagatgatgcgcgcgatgactgaagcttttaaaaaaataccaggactctgcctctacatcatatgagcagcttgatcgacaagttgctgaacttgttacacgcatggacatactggaggctcgtcccccaccaccaactctagccctagctcactctcctgtggacgacgacgacgatgacgatgatgtttatgcaccgctgcgacaacgcctcgcacgtaatcgacaaggtattggaggtaatggtagacatcgtcatcataatcctgaactagactatgatccatttgctaagattaagttctctattccaccattcataggtttttatgatgctaaagcttacttagattgggagatgacggtagaacaaaaatttaattcccatcttgttcctgagcagcatagggttagacaagccactagtgaatttagagattttgctatcatttggtggaatgaacttgttaacacacgtgctgcaccacaaacatgcaatgcgttaaaagaggagatgcgagctcactttgttcccccttcttatagacgtgatcttcgaaaaaaattgcaacgcttagatcagggagacatgtcggtacatgaatactaccaagagcttcagaaaggtatgctacgatgtggggtagtt

SEQ ID NO: 92183 - DNA, 398 bp, Zea Mays
atggatttcattattggattgcctcacacccagaaaggatatgatgctatattggtgattgtggatagattgactaaagtggctcacttcattcctgtaaagactacttataaaggttctcagctggcagaattatatatggctcggattgtgtgtttacacagagtaccgaagaagatcgtgtctgatcgaggttcacagtttacctcaaggttttggagaagctttcatgagaatatgaataccaagttgaattttagtactacttatcacccttagactgatggacaaattgaaaggactaatcaagttttggaagatatgttgagagcttgtgcccttcagcatggaggaagttgggataagagcctaccttatgctgagttctcttataataa

SEQ ID NO: 92184 - DNA, 390 bp, Zea Mays
gagatatttggacgttggttcgtcgacatcgggaactgctgatgtgcttgtccggggtgacccatgctttatttcttgcggcgtcatggcctcggatccatacaataggcgaaatggtgtaaatctggtcgcccgacattctgtcgtgtttagggcccagatcacttcaggtagttggtcggcccatttgccctttttgttgtcgagaagtcttttctcgatggcagtgaaaatcttgccgttggcacgctcgacgacgccgttggattgcgggtggtataccgaggcgaagacatgtttggtgccgatggagaaacagaaatccctgaagtcttggctgtcaaactgtttgccgttgtcgattgtgagttcggacaggactccgaatcg

SEQ ID NO: 92185 - DNA, 272 bp, Zea Mays
gtctagtgcaaatcatgcacaaaattgatctagtgatagcgtctacaagaactagattaagcactagaactattcactagaggggtgttaggctatccgcagtgaataaccctaataggtactctataaagatagagttcaatatctagtaaaaactatcgcagcggtgaactgtttcgtctactctaaacgtagggagagacctaggaaagtcatttccagagtgcatacacctcctactggaaatctctgtcgcccgtggccttccatcg

SEQ ID NO: 92186 - DNA, 642 bp, Zea Mays
gttgtttgttcaccctctggatgaggtgtgtgtgctccagctgagggagcatgtggagtgctagtgtcctcttgtgagtcaactgatgcagccaggtctaacgcttcttccgtcgatgccggttcttggactgtcaagctgatgagatggtgcatcttcttcttcttctgttgtaggctaatgagatggtgtagcttcttctgatgtaggctgtaatgtttgagttgaatctacggcctcatgtgtcgcttgttcaaaagacccaacatctactcctgtcatcgattgatctcctattatagcctatacttcaactggtggttgtaatgtttcacctatagctcttgttgtatgcacaggttgttcttctgttgtatgcactggtggaacctattctgctaccgtttctgctgctattactcctaacatgtctgctgctacatctactgctactgtctgtacttcaactgggactggcgactgatctacttcttgtcaaggtggcgtttgtgcctcccgcctaggtgacggcggtagcgctaaacaagtcttatatctgccttcgcaaagtcttaccctctgtcttttgtttcgtaaaggactcgtcgtcgatgttgcagggttaacaattgacttaataac

SEQ ID NO: 92187 - DNA, 690 bp, Zea Mays
gaagatggaagctcatatctttggagctaaggtgtagtgttgttagtagtcatcgtcatggagtttgatgtgggggagtcagcgtccacaggtcctctcctcattgctctccctatgtgttaggagtctatggtggtgtgttagtgggcagtgtagaggttgcactagctgtgtcatagaaaacatagttatggccactaggtagaaggtgatcaataccttgtaagatgtgtcagctaaggttgtggaggcaagaagcgttggcttccatggcagtgtcatgtccttattcatatagtgaatgcgatcgagggccacaactagagataagggttgcacctccaatttgggcacatattagttagaaagatagactcgaacatggtctccttaattgagttagcgaacatgtccaataagtctgtcttgcttcatgtaaattgggcgctaccatttcctatgaacctccaccaactacgtcattgtgatttatatgttttttaaagtgatccttttggacttgacttatcaggcttttagaaaataacctacaccaaatgacttatgtaaatttattgtttcaataagtaccaccaaattaaaggagcaaacattagttgttcatactctatagcaatcgttgtcactcctaccaacaattgaacacacaaagccgacttaacactcaac

SEQ ID NO: 92188 - DNA, 337 bp, Zea Mays
cttagacggtgtttatgtccactgaattaaaacaccacacatcaatttgcaacgtcgtttctcaaaataaaataaagaccatgaaaaatttagccaaattgcgtgagagaactgtctaaacataggttaaggttctaaggcacctttttcccaccatatagtttctaaagagtaggaatataaagaattcaaaataatagatcaacttttaaactaaaaatgatgtttccctcatgtcaagggcattgtattcgcgcgagaggttattagagtacaactagtggatgaagacgttattgggctagctaatgaccttttgtgataacaggtttcctat

SEQ ID NO: 92189 - DNA, 721 bp, Zea Mays
atctaacaccactgaggccattggatgttgggagagcgcggaatgctctaggaaatctacctcctttgcagcgaagacgatgtttaccgctccatcgaggggtcgagacaaaatcagccatcgacacatcgagagaatcgtcgcccgcagaaatgaccaagaatttagagctcatcctcgcgacatcgtccttctcctcatcatcatttgagttagtctcggcaccatgatccctatacatctgacgctaagccctgtgacgcctcttctcatctctgattcacttttctctcttttgctgctccacccgtgcatggcccgtctccttcttagccacactttttggcaaaggaatggggtcatcccccaacatcggataggacgactgagaagaataaaaagaaggattaggggatgcaaggtcggagtcagagagggatatgacgaactcacaaattccacaaagcctagctcgggatgcatcggagggcagccaggactcggaaaatgtatggaatgatgacagcaaagcctcgctcgtggaaatgcatagggtcggcgacgtttgccaacaacacctagatctcgcctcctgagagggaccccgtttggaggagtgatcctagggtttgtcttaggatcagcaggccacccaaggcgcctccaggcgacatagagtcgaagaggggttaagatcgggatgaagaaaggtacgttcctg

SEQ ID NO: 92190 - DNA, 433 bp, Zea Mays
cgaaggccgaggataaagcatcatcttcggctctgttatatgtcccaagtagctcgtcgctaatagcctcaatacttttcagtcaatcgtcatttggctcgtcaaaccggtccctgaatctgaaggtatactttaatcgaactaatccaccttcgacggacccggtagcagtatccttcggcatctcctagctatctacaagtggccacactctataggctatgtgtccttggattaagtctcttgtgccgatgaaagcacaaacattgctgaaagccttttggcatgcttcatcattatgttcgatcgtcaccttcggccttcgaaggctgaagcgagaccagatggggcgctggataatttccttaatatcctccctttgaatcagattattcttaacataaaaccattcctctatccaggccccgggcca

SEQ ID NO: 92191 - DNA, 525 bp, Zea Mays
ttcaacggtgttcatgggagggttggcggtgtcatgtgtttctctattggttcttgtggccaggccgggctcaggcgagacttctctcgaggccgaggtcgggtcagcgcatgggtacgcaaccatgcctagagtggttggtagagtaatcaaagtggtctcctgcgggattcgtggaagagttggtggcatttaatgcgcccctaccagggcagttggccgaggccgagctcgggccaggcagagtttcctcctgaggctgaggccatggccagtcattacatgtcctgcctggagttgttgaaacagtgtccggagcgagggaatagtgcctggtattcgcgcctgtgcgtcatcgtgggtggtgaaagtatatttgactacggtcctatcgccctttgttgactttggcgtcttcagcggggcaggtgttcgtacagtgtgcattaatgcgcacgtcttgtggttttgagaattttggccaaggtcgggttcgtggctagaccttcgcctgagatgccatcg

SEQ ID NO: 92192 - DNA, 309 bp, Zea Mays
gatagagaccgggtgaccttcaagaatctgggggtcttcagctttgatgggttgaacagggttggatggagcgggctcttggatccgcagggctctacgttggttatgggtgaccaagtaggcctccatcaacttctggacgtgctcatccttggcttgcttcagggcttccacagcaatgacttcacgactttccaaggcagctacacgggcttgagctgtggtgagatccacatggagttgacagttgagcttctctgcatcttctactcgggcaatcatctgacggtggtgccgagtcaagaaatc

SEQ ID NO: 92193 - DNA, 1079 bp, Zea Mays
ggtggtggctcgacgaaggaatatcaaccgaggcaatctgaagagcatcaccagggatcaactcaacatcaccagcagccatcaaaactctagcatccggtgcgctgatctctaaggcgacttcctcatttgaagcatgcgctgttactatgccatcagaatgtggtggagaagacccaacgtggacatccatggaggtatgagaaggggagcccgcattgcccatcggagccggatcaccatcggcaacaccctcgggggctgggttgcagcttgcgctacccacccgagccgaatcattaccggcaacaccctcaagggctaggcaaccactggcaccatccttgaggactgggttatccacaacagccacctctaaggttgaaggactctcagtcacctccatgggaattgaacaaccttgaccaacctcttggctccgaagaccgccttccaaggacgacgaggcatgagacactgccctggatacctctaatcccacatctggaatgtcagagcagacgtccatcatatcaccatcagttggctcggacaacagatcttcaggaacaacatccatgagagcctgatcaaaatttgctatggataattcttgcagaccaacaagagcagacagagctggagaaggaatatcactactccccccacttactctgtaacgtcgactgttcttccgaattagtgggatttcttcttcttcttattcgtcctcgtcaacaatacggacaataaacgacacagggtcacacccattgggttcaactctggcagggtcacccattgggatcaactgtagcagggtcacacccattgggatcagctctagcagggtcacacccattgggttcagcatcagcagggccacacccactgggatcagctccagtaaagagttccaccggtacttcttcaccagcaggagcagaagggtcagcatcctggtccaaacacgacactcaccgaagccgtctctttttcttcccctcggcaggtgcagttggatgaccggcctggtggaggcatttcaggcgagtaccatcaggcttttgagtattcac

SEQ ID NO: 92194 - DNA, 1299 bp, Zea Mays
gccatttagaccagaacccatggattggtacacatgtgaccaatagttatgtgtatttatttcctttccagttttatcggctagcatacttgccatggtaatgatagctaatggtacaccaccacatttctgtaagattttaccagccacttcagctaaattatgtggaggacatttgtcttcactgccaaaaattctttggcagaataactttgttgagtcactgagagaaagaggttccatttgataaacacttccagcttgttttgcaacatcaatattacgagttgtgataattattatacttccacattcattgtgcatcaaagaacattggattgtttcccacacagaagtattccatatgtcatcaatgacaatgaagtacctatatatataacaccaagagacaagtatatatcagcaaaactctaccacttgttttctttctgtggctattaaagtcaaataatgcagctaacaaaacgaaaactataattggcttttagacaacacagctgcctaggcaccagatctgcgcatagggggagataattgccctgtggtaaccaccaatagctgcagactgagtagtgagtagcaaatgattgcaaatgaagagggaaattaaaggagggcccatccttgctttcctttcagcagcgatgaggaggcgatggccacatacatacctcttgtgcagaaggaacttcctcagttcccagattagttgttcttcactccatgttccttgattgatgtccctgtatttgtctccatcaagctggtagagcatgtttttgaaaaccttgacgacatcaggattatgagacacataaacaaatgccccacagccaaattgccctttaatcttctcatacacaagattagcaagagtagtcttgcctaaccctccaaagccagcaatagacagtacaactggctgcttggatgcctccttgtcgccctccatgagccttctcacaaggtcactgctcttctcttcggcgccaacaagttctgtcgcctttctgtaaagagccgacagccgcaggttgtcgatgcttctgccaacaggcttggaaggaaccaaatcaaccttgtacctgtcacgccgttcactcacatcctttatgcggctcctgatctccttgatgtctatgccgatgctgtgttgaatcctgccccttgtcagcaggtggaggcttctatcaatgaatcccttgaaactatgtggcttgccatcgccaactcgcaccatgaatctgtcgatgctgtcctcgaggtcgtaggacagct

SEQ ID NO: 92195 - DNA, 493 bp, Zea Mays
gcggagtcaaaagatttcaagtgaaaggaaagcgattcgtcggcccctatcctatcattggcagaataggacccgcagcctaccaccttgaattgccagaatccatgtcagatatccacaatgtgttccatgtatcccagctccgcaaatgcctgaaagtgccagaaagtcacatcgaagaagaggcaattcagattcggaaggatctgcagtaccgagaaaagccagtgaagattcttgactcagccatccaaaatacctgaaactcagaagtgagactctataaagttcagtggagcagagaaggagaagaggaaactacctgggagagtgaggactctttgaggagggaatacccttaccttttctcaagcccagtctgaatctcgagggcgagattcttttaagtggggtaggtttgtaacatcccaattttcaccctaaggttagaaaccctaaaattcctaaaccccgcttgattatctcctaagac

SEQ ID NO: 92196 - DNA, 445 bp, Zea Mays
tcacaacattcatttctcttgacaacttgctactgccattttttgtctctgaagctttctttgactcacctttttccacaaagcttcgagctctgccaccttcgtaacatcccaaatggctagagaagggaaaggtgaagagctccctcttgtggccctgatgatgctatattagcaagggccgaagtacataaaggaatttgtggtactcatcaatcagctccaaaaatgaagtggcttttgagaagggtcaggttttattggcctgatatgattgtcgattgtttttaagtactacaaagggtgtcaagtatgtaaaaattggtgatatacagatggttcctgccgccaaattacatcccatcatcaagccttgaccctttagtggctggggtttagcgtttgtgggtgagattcatccatcatcatgtatggggcattggtt

SEQ ID NO: 92197 - DNA, 629 bp, Zea Mays
cttgtgccatagcacaacaatttatgtaagaaaccaaagcgatgacacttaaatatgaatgacaattttgaaaattaatccgtgcatcgaaaccttgtctgagtaatatatttcagtcaagcgagaacaatagactatttcgtttgttttgtatatgtaaaacttgtagcattctttcccaatcactaaccttgagcatgccaattgcgatggttgcgtaatatttctgagtcagtgcgatgtcacattccaagccacaagaagatatcactagtttaggaaccccactgcagtacccctttcacaagcatgatttatagggtaagagacatcttctatatatataatatacaaagcaggttaaactctattcacataccaagaacagacagaatagcataccaagtcaacagaaggttgctaactccgatgaaggtatactgctggcaaatccggtgagaccatcagaaaaggagtagaccatttaaaagtttcaaccacatctcgtgattctttcaaaaataacttctacatatagaacatatataagggcatcaagtagtagtcatcggctaagagggttcatcacgtccaggcctacccttttgagtaagcatacccttcccttt

SEQ ID NO: 92198 - DNA, 614 bp, Zea Mays
gtttgattctgtccatccgcttccatcctacaaaatcgatcctatatacaaaacagatcctatctctaaacccgaccctatccacaaaacagatcatatctctaaaaccgaccctatccacaaaacaaatcctatctctaaaactgactctatccacaaaacagatcctatctctaaaaccgaacatgtgctccatagccgccgctacggttcctgccgatttgtgcctttgaaaaccataactcgaggtaccttccataaaacgggcataacttttcgctcggtgctccgtttgagctcaattttttatagcagattcctgactccattcggcctatttggttcggtcaaaaaattcaaaaaaatcaggaagataattaaaaaaattgtttaagtgtttcagaaatttcagagatcctttgtgattttctctaggtcacaatacaactctatttcaagtgaaattttgtgtgcttccatcctttgtgtttttggatcagtggtaaaaaattcagaatatttcgagttcttttgctggtactcctttgcaaacgcgcctttgatttctactagtgctgaaaaatctgctctatttacagaactgacatttctac

SEQ ID NO: 92199 - DNA, 584 bp, Zea Mays
gtctttggctcaagggctgaaattcagaaatctgaatttcagaaatccctattgaacctccacttgagcagcttgtttggagtttttattaaactattttggccaagattccgtaatctttattgtagcttatttagtatatttcaatgtttataattggcctaagccatgattttatatttttcatggtcttttaccccttttctttatctctacttagatagcttgattagggttggtattagggtttcaacatttttccctttttgaaaatcttatttgtttggaacatgattctttagatatacactttgtagatattttattcttaagttaatttgatgcttcatgctcaatttggctcacatgaaatgttgattcttaggttagcactaagagaaaccctaggtgacactggggtgtcacaatcctggacaaagagttaaggtacctatagtacctatgcatgttggcagtgatccaaaactccccgctccatagaaatatgaataaattcagtttcttcccgtatgggcagcctaatgtcatggactttcatgttgctgccctgaatatttgcatca

SEQ ID NO: 92200 - DNA, 764 bp, Zea Mays
cacccattgggcttagctgcaacaggattacacccattgggggtcagcttcagcagggtcacacccattggggtcagtcggtgcatggtcacacccattgggctcaacttcagcagatacaccaccagtgggatcaactccagtaaagacctctgccggtacttcttcacaagcaggagcagaaggtccagcatcctggtccaaacatgacaatcgccgaagtcgtctctttttcttcttcttttcttcagcaagcacagccggacgactgacctggcgacgacgctttgggcgagtaccctcaggtttttgggcatccgttgttttgtcaagctctggtataactgcaacagccattgttttagtagggcccgagtcagatgattctccagccaactgtcaagcatagcattcatttctgcatcatctggactcgctggcatctcaaaatggacttgcctctcatcattgggaagatcacaaagagaagcaaccaagacctcaatatcttcgggagagggtcgcactctaagacccaggccactatcaccagcaggaggattggacacgaaactggaaaaggacttagaaggtggcagattccaagcagagtaggcaacaggagcaccaacatttgatactttgcctctcaagatcatgtctagccggctcaccaagtccttagcaggaattctcctattagtaacccgagtggagtcggtaacaccactgtacaagtaagccgggtatgctctgttcttcag

SEQ ID NO: 92201 - DNA, 362 bp, Zea Mays
ccactaaagctttccattgtttgaatgcagtaagagcatcatttttatgcttcagaaaataaacccaaactttgcgagagaaatcatcaataaaagtgatcatataatcacaacctccaatagaagaatgaggagcccgaccccaaatatcagaatgaatataatcaagaatacctttagtgcagtgagtagataaagagaaactgactctcttctgtttgccaaatacacaatgttcataaaattccaatttaccaatatcatttaaataacctctcttgtgcaagaaatgcataccttttcactcatatgtcccaagcgcatatgccaaagcttggtatttgaagtgttggatgcaatag

SEQ ID NO: 92202 - DNA, 532 bp, Zea Mays
cggggtaatatttgaggttaagaccgttagctaccccgctgaaaaacgatcaatactgcgcaagtgcacgtcgtgcaacacctacatggctgcctcgaaagtgtccctctaagagatagaataatgctctgagcagatgtgcaccctagaggttatcctccggtcagcgcaccacacaggtagcctcccagcgcccgggtaagcaccatgactatgctggttgactacacaatggtactcgattgactaggtgtgtcggtccatagcttggtgcgacaaggtgccgagtacgttgtgaaagtgacatccacaaacgacgtcacgagcgatgggtcaagcgatcaatccttctggctcctgctccttagaaaacatggtactgtggctcgagcttccactgtcgttgttgtctctgtcgagatctcctccattagctcctcctgcagccgaggcgccctggggtggtgcagggggcgcctctagtgggagtacagaggattgacgcctcgtagactccacctcctgctacggc

SEQ ID NO: 92203 - DNA, 1020 bp, Zea Mays
ccaaattcaagacagttgtaagttcaaatctcattatggcagcaaactaattttgaactcaaggtcactcgggcaacataatttggagggctgggtatctctcatttacaactgatgagctgggatcttagaatgcattggctacggcttcaaaagacaaccaaaccggtcatgggcatcttttcaaatacaagtgcatccctctgttcaagctttcttttcaatggcaattagttcagacttcagagataggcaatggaaagactacattgttctggacagataaatggatacatggtcaaagtattcatcaactaacacctcatttagctgagttgatctctgcaagggccaaaaaaggagtgtctatgatcctcaaacaggaataaagtggtgtgatgcccgtggtagacggtgcgtcgccgctggcgtgagcaatcacggtcggcgctaggccgagagacgcaagtatgtggttggtttctgtttctcactttctcttctttcttaatcctcaagtcaccttattacaatgtttaagtacttcccttagcaggccaatacggcctccaaactcacttacactgcccatacggcccacacgacacaacaaattcaaacgattgatttacttttcccgcgcaccttgcccgcgcccacgcatcctcacgcctccacctcagtactgacaagtgggtgggtgcaagacataaaaggaccacttatagtagcaattttggcagaatacctaatgttgtgggacgtccttgcagattggactctacaaccagaagtggaggacaaacatatttggcagctctctatttcaggaatatattctgtcaaatcagcttatgagggattatttattgcatcaacacaattaggccatgggagaggatatggaaaagttgggcaccagggaagtgcaaattcttcatgtggcttgtggcacttgacaggtgttggactgcaaaccggcttgctaaaagaggtttgccccacccacatagatgcttg

SEQ ID NO: 92204 - DNA, 343 bp, Zea Mays
tttccatattatactcttaatagattagtataagtatagagatagagatatagatatagatacatacgtacttcttttcccccgtggaagcaacgtgcaagtgacagcaaacaaatcacacatgagatgcattttatctatatctaaaaggcagatttgaagatggaagctttgggagtacaatgcgcgaggccatttctgttctgttctgtccatgatcaaacagacaaagacatcagcgaattaactgcaccgagatccaatgaaccgaagaacacaaggtcaaatcagtcctcaaaaccatctgcggagcactcgcgcgccagatccatcgtctagccgg

SEQ ID NO: 92205 - DNA, 734 bp, Zea Mays
gtttcttcaggtgatttaaattatatctcggtggagcccacattacaagagcaaatagtcagggcacagattgaagacaagggtgttcaggtaattaaggatatgatcaagcagaaggcagaaaaatacaaatgcttccgtcaggacagcaagggaattctatggtttggagaccgactggttgttcccaagaaccctgagctcagaaagaagatattggatgaggctcacctttcaaaattctccatgcacccgggcaacaataagatgtatcatgatctcagatccttatactggtggaccagaatgaagagagaaattgccaagtatgtatctgagtgtgacacctgccagagaatcaaggccagtcatttgaaggcagcagcccctttgcaaccccttcccataccatcttggaaatgggaggacatttgcatggatttcatcgtgggattgcccaataccttccggcaccatgattctatttgggttattgtggatagattgaccaagaccgctcatttcctgccagtgcacaccacccacaagacagagaaatatgcagaaatatatgttgatcagatagtgcgtttgcatggtattccaaagaccattgtatctgacaggggagcactgtttgtggcacgcttttgggagcagctacaagaatcacttgggacccatgcaatacgaagctcagcatgccatcctcaaacagatggccagacagaaag

SEQ ID NO: 92206 - DNA, 697 bp, Zea Mays
gtctgctcttgagtcttgcagacatgacaagtctcgcattgaggaagaaaacacataccttcgaccagtcttgagacgggtgttgtgcagtgagccctagttgggcatgatggtcagttagttcaagaggggaactagcggatcgggattaggccttgctgctcatgatggaagtgtcacttgctttgataaggttggtgagtgcagtggcttgaaaccatcagtcacccacaaccttgtcaagcttactccacctaaatctaccacccatattgagagagatggagtgcatgtggagcatgtgagatttccacctcagaaacaagtgtggtgtccaaaacctaaccatctcaggaaccacttgacaccctgccagataccactagtgccccccctccaaaagatcctcagtcacccaaaaagcctaaatcccacaaacagactccacctaacagagaggtgagatttcattgtgattacagtcagatagagggtcatttggctgatgtttgctttaggaggaagagagatgagcgatggcattctgagtcgagcaaacggacccatctcatggtgttcatgatttttctgctcagagacgtcctgcaaggcctagaggtgctttgcctcttattgctaggcctcaagcagtgagaccacaaggtggtcgtgcccggcggggtgttagtcgtgtgtg

SEQ ID NO: 92207 - DNA, 507 bp, Zea Mays
cgacctgtgtggtttgccacaatcgactctttgagcctatggtcatttcttttttgggtcggctacaataattgtgatcgtacactgaaagcgacaatgatggaagtaaaaaccttcctaaagcctgcttaagctgattacttaatctagaatgatgcaggctacgtgcatggccaagaaggaactgccaggccagaggagcaccgttattacccacgctgttaaccaaatctagggccagatagacaataatccatctaaaggaacatcacagatccgatctactgtaggtatcatattgataaacctacaagcatccgcccttgagaactattgaccacacacacgaacatggatcaggaccttcaaaggagtctaactagagtaaacaacgagaccaagcatgtaaggcagggtgccagatacgtattcgactcccaagttgtcacgtgcacatgtgtagctagcatgtcatggaatgtagcaattggtaaagggatatgcatg

SEQ ID NO: 92208 - DNA, 444 bp, Zea Mays
atggaccttgggtcattgctggggatttcagcttaatttataaaacctcagacaagaacaacaatagtttcaacagagctatgatggggcgttttaggtgcttttttaatgatcttgcccataaaaatgttcctctccatggtcggcgatttgcttggtcaaatcaacaagtggagcctattcttgtcaggttggacagggtgttatgctcggttgactgggagttacttttccctaatgtgttgctgcaaagctctgcttcccatgactctgatcattgccccttaattctgggtcttcgggacaataaatcagggagtcgacgttttcattttgaggttttttggactaaattggagggatttcaagatactgtgcacgatgcttgggaatctgttggaactgcgaactgtcctttcctaactcttcaccgtaacttgaaga

SEQ ID NO: 92209 - DNA, 370 bp, Zea Mays
attcctgttgtgcgataaattttgaaaggcaaagaacatgagtagtgtgtcgatcaagttaaccgataggttctgtaaacacgcttgtgatgcttttatgtgcatgataagatcgatgccttgtcgtcgtagtctcaggaaattttctgaaatgtgctagtgctctactgatggggttaaatgaacttgagatgtattacaatagctgtgtgtcgcgcaggttatccaaaaatggcgaaaggtggtgtatgttggtaattgggaaatagtcacgtcataagccaactcgtgttaagcagaagtcgattgcgttaagtgattgttatatacatgttgtgtctcggatttcgataataataggctagtcgac

SEQ ID NO: 92210 - DNA, 531 bp, Zea Mays
gtcctctcgtatgatgtcctgaagtcgccagtcaagattgtttactctagaagacctgcgacacagtgcacctccgctgcactcacccttgagacgcaggagggtgcaattgattttggggttgttgatgcccatgtcctaccagtagctttggtggatgatgcgacgcagctgagaggtttgtcctcctcctccctaggacccacttccatggagttggtcgatctccccgttgccataggtaaggataggttcattcaatctattgcttgctggtccaacaagttgttatctatgccgctcctatccaagcgcaaacaaaaccacaggaagttgatcaagtatcctccatgtcgaaaccgctggattatgggtgctggtgttgaattcagttcggatgtgctctctacaaggtctaagaggaaggctctaagatcccttgagcttattggggagaatgaggggttacatgatcaagccctacaggagtatgcaaggcttttcgctaaacccctgtctgattctcatgtg

SEQ ID NO: 92211 - DNA, 340 bp, Zea Mays
cttgggtgtgcgcgtggtgcgaggcgagtgctgagggctgcgagtgtgcgagtaagggaagaggagggcgagtgggtactgggcagctagaaaaaggccgaggtggagacggggtgcttttcattcctctcattggtgaaacattaagatgcacataacctccaacttcaaaggttaattctcttcttttattgtcaacgtagcttttctgccttgactgtgctattttaagattctctctaacaatatgcacttgcttttctgtttcttgaagaatttctggaccaaacacttgactttctcccgtttgattccaatatagtggtgttctgcatttcct

SEQ ID NO: 92212 - DNA, 747 bp, Zea Mays
tcacttgagagtttagaaggagatgcaccctggacggttcacgaggatgctaaaattcatttttaccgaacttgacacctttgagtttctctggtttccaacgggcggacggtccgctcttgaggtcggacagtccgagcttgctcccggacgttgttcttatctccttcgaatagtccgtagtagaaatgtgagttttgcatagttcttgtccgaggcttatcgaggtgtcccagaatattcctcaccacagggtcattacagcgtggccctgagccacagtagagtaaagcatgggccccacggacggttctcgaggccttcgcccgtattctggatccttggctttgtcggggctttgactctgctgttgagggagaagtcgagccttcgggacacgtggcgagagtactgcaagccccctcttctcgtgtggcccttcgctcagccttctccgatggtcgtggtcgaggactccgacgctgggacaggatgaagtcctccatcgctgctgaccctatgctcatacatggttagtcgtatccggataagtctaatcaaggtcaggttcgcccgctccaacaataatatagtattatatatagggaatggggccccattaaattatgtggcctaggaatactgccccttagcctcgcccttagggctagcactggtttacacgcgtggtatgacatgtttggttctgttgcccgatcagaggggttcgacatagggttgttctgt

SEQ ID NO: 92213 - DNA, 744 bp, Zea Mays
ctgaaggcctagcttcggtttcagcctgaattgttgcagcttcgacttcagcctgcttagtattagcttcgggttgcgccttggaagctttggcaactttccttgtaggagcaggactcaaggtttttgttgtttctaacacaacatccagcacatttgccatccttctcctcttaggagttacagcagaacccatttgtaccttcggtactgttgcctctgttggagggctcaaaatctctggcatcttcattatttcttcaatttttggctcttcagccttatcaaccttcgtttcaaccagcttgactgtaagcacttttggcattacagccggcttttcagtgccctgcgtagtcgggacaatttcttttatttcggtagcagaagaggtccctacgccaaactcaggcaccacggccggttcaatgtaacgcggctggtgggtaagaaccttcacctttttgcccttcggcacaggctcaactggggtggccgaagcaacagttttcctctttttcccttgaccccgcagcgggtagcggtaatcggggtatacgaaaccgatggcgtcaaaaactttgttcaaccttttctttccccgacctccgaaggctatagacaaagcattatcttccgccttggaatatgctccaagaagttcatcacttgtagcttcgatacacttcagccagtcgtcgtttggctcatcaaacttctccctgaatctaaaggtatacttca

SEQ ID NO: 92214 - DNA, 749 bp, Zea Mays
gcgaagacaggcttggtgccgatggaactccagaattccctaaagtcttggctatcgaactgtttgtcgttgtcgactataagttcggatgggactctgaagtggcagacaatgttttgctagaagaatttttgggcagtctttgctgttatcgtggagactgccctggcctcaatccactttgtgaagtattcaacgtcgatgaaggtgaacttgaggttcccttgagctgtaggcagtggtccaacgatgtccagcccccagcgttgaagtggccatgtgtgtgcgatgagcttggtgaattgcaaagggttgcctgagcgaggagagaacttctggcatgcttcgcatgacctggttactcggttggcggtgcaaattatcgggggccagcaaaacccctgacgaatcaccttggctgcgagggcccttggtcctgagtgtgagtcgcaggttccactatggacttcacagaggatttctatgccttcggtttcggttatgcatttcagcataggctggttgattccctttttgtacagctaaccctcgactatcacgaagtccttgctcctgtgctttagtcgtttgtcctcattgcgattggttggatggtagtggccttgcaggtatagtgtccttggggcccgccagtcttcgaccatgaagaggttgacgattcggtggccctcggcgtcctgagttatatgcaaaccttcaggcttgtggatggctggcatgccaatgac

SEQ ID NO: 92215 - DNA, 331 bp, Zea Mays
ttcggcaactgagggaaacgcgggggatcagaagaaacgacgaatgatggctgtaatgaaggctatccacaagaccccaccccagtctcagcggaaaaaatgttgcctctgctaatgtcgccgatgatgaagctggtgagcttgcgcctaaagctgaaaacagcagaggccatctcggaaccacaatgtcagagattcacagaattatagctgatatggttcctgagaaggacatggctgaagtgaccactgatagggcttcgcccttaaaaatgaaagagttggaagggacttattcggaggacatagagttggacataggacacctgcc

SEQ ID NO: 92216 - DNA, 332 bp, Zea Mays
gacatgagtatgtatgtcatttaaccaataacatggtgagtattttttgtgcaacttaatgagaaggtatgaaaacagtgtttttggaacaccatttgaggaggttcggaaaatttaagaaattggctctagtttcagtttttttgaagatagagttcgtgaagctagacctatttgatagaagaaggtaaactaaattttaaaattttgaagtgaggcgggctccaacggagccccggtggctctccctcgcctctaactatgcccctttggcctcctctcgcgggtgagacaaccaaaccctctagagaggaggagctctaattctcgct

SEQ ID NO: 92217 - DNA, 664 bp, Zea Mays
cctcgttaaggccgacaacatcaatttgcaccaccttgtcggcgagagcctccttgttgttcgttgctttgagagcgatgagttgtggtttgttgtagtgggggctcccgtttgcagcgtcgtcgatgtaccttgcttccttggccatcatttgttgactcacgaacttaccaagcacttccttgggcatcacttgccggtaccttgggttctcacagattaagtttacaaggttagaatctaaaacagtgaataaccttagcatgagtaggatgacatcatgatccgtccatctcgtgcttccatagttacacacttggtttaccaagatcttgagcctgttgtatgtctcttgtggatcttctgctctcttcatggcaaacctccccagttcaccttcgatgacctccatcttggtgatcatggtcatgttattaccttcatgagagatcttcaatgtatcccaaatttctttggcattgtctaaacaacttactttgttatactcatcccttcataaagaagctaataggatagtagtagcttgtgcatttttatgaattgattcttgggcatcaatagcattattattttcaccatcgctatctagcaattgcattccattttctacgacatcccaaatgctagggtggaaacagaaaag

SEQ ID NO: 92218 - DNA, 621 bp, Zea Mays
ggccagggtgtcgaagcttgccgaggggacctcttccaccgctgagctggaataccctgctcctgctggtgccaagggagaatcaactgaagtgccgaaagcaatgggataggagaaagccgagccagccgaagcgccctgctgaagccaaggagaaaacggtcgaagaaccagaactggaggagtcgacagggctgccaaaaatcctgagcccgccaccagagccggagttgccgaaggtatccaaagttcctgcaataagtcccaagaggaggaggatggctagcgtgctggacgctgtcttggagtcgacaagggcaccaactccttcctctgcaaaggaggccgccgaagctgctacaactcgtgttgaagtcgaagctgggccctcagtgcccatcgaaacagggcctgttgaaactattgaacaagatactgaacaaggaccttcggatgccactctgatcttggaaaaagaaggcgcatccaaaaaggttaaatctcctactcccgaagcgtttactgaggagccaaactttatcaaacgacacacttcgggtaaacagttgtcggaagagcagattgccgaagctaagcactatgccagggaattaaagtacc

SEQ ID NO: 92219 - DNA, 348 bp, Zea Mays
aaaatggcatcccctctcgctgggtcttgagatgaaacgactcagcgttgccatgcacctcttgagcctttgtactttttctatgacagtggtggctccatcctcaaaatggcttcaatcttctctaggttagcctcgattcctcaatggctaacaagaaacccgagcacctttctggcaggtaccccgaatacacacttccccagattaagctaacagcagtagcgcctcaagttgttgaagacttgttggagaacttcaatgaagtcacctaggtttactgttttgatcaccacatcatcaacataggcttccacacacttgccctagtgattagctaagtatgtc

SEQ ID NO: 92220 - DNA, 398 bp, Zea Mays
cagaagtaccaagtatttatgcatcagttgacaccaaacgctatagttcgtcttactgttttcatttgggccattcgaagtcaagggagccacatcgaggatggtgcattttgttgagttcatgatttacattatcagacgaaggctagagccatgaataactttcacaacaacttcggctgctataacttcgtgtatcacaaagacataattggcccggttctcgcgtaccagatgaagtggcacgaggattggaagaaagaatggttctacgtggaagtagactctgaacatagtgaggattttaagagtgtgcttatgagtcctttgaggagtagctttggtctgaagaggccaaagtgtgaatttaatgaagcagctaaaacatgttacaaaac

SEQ ID NO: 92221 - DNA, 366 bp, Zea Mays
tcttctattctgggcaaagggtacttgttcttgattgtgacttcattcagagctcgataatcgatacacatccttttggtgccatctttcttctccacgaataggacaggggcggcccaaggcgaggtgcttggccggatgtaacctttctctgacagctcaacaatctgcttcttaagctcaaccaactctagtccagataatatgtaagctctcttaaagataggggtggtgccaggaagaagctctatggcaaactcaactttccgctctggtggcatacctggtaaatcctttggaaacacatctggaaactcagacacaatcttgatcctctcaattgggtctgcttcactgctatcgaca

SEQ ID NO: 92222 - DNA, 507 bp, Zea Mays
cggggatcacggacggtggcccaataagagaaagaaagaaaggctgagacacgatgagatgctagtggcagtgacaagttagaagggaaataaaccaccaatagagggtcagagtgtgggttgctgagaaaattcctaggtgggggagcaccacccgagaaaggaacagaacccaggcagggcagcaagcgagagaaggcaagggttgccttgccagacgagactgggtgcctgctgatcttcgaagggttggagtactacgcgccgagaagatatcggaagtcggaacgacgcgaaatattctagactcgacaagcatctccgattgtcctcgactggtccgaccacactattacttacgaccgtaccaatcaccagatcacatcctccgacccgggtgatacccgctcattgtcactcactcccattgttggatcagtgcgactgacgaaggtattgatttatggaggaagtgggctcaacatcctctactctgctacacttgac

SEQ ID NO: 92223 - DNA, 790 bp, Zea Mays
cttctgaattctgatcgatcgatactcctcgatcccttttgctttctcggctgtccgtcttctcgagatcgaggccagatcgtactcctccgtcgacaaaaacagaaccggggtggcgtgtccaattttctcacgggaaagagaaagctgcgtgcccagttcagccccactgttcacgtcgccagttttgtttcttccattccattcccgtagtccgagcctcgcgtggcttcttttggcgtcattttttattttcaagcgttaaacgcgccatgtccagtacggcagtaccccgttgaacactgatctagagtctgatgtcactgagcgtgggcggcaggcacagcagagcgccgcttttgctctgctcgatcgatcaacaaacagctcaactcactacttctctcctctcctctcctcagcatgcctactcgtcgtcgtaggatcggagtagtgccaaaagggtccatgatgattggcattgttggcctggcatcatttcccttggatcgcaagtcgccggctgtcacggcagagcatggcaagctccatgctgatcccggtcatgatgctgtttcgtgccaggagcagacagtacgtgcttagctttctttgcttcccttctccgctttggcgatacggtgatgctctacttgctactgagcttagcgcggtgctcatgtagcgctgtatagcagcatggataatggaactttgctcacatttttaaccttctatccagaaaaaaatatttacatttatacttattgatgtctcacactcatctttg

SEQ ID NO: 92224 - DNA, 517 bp, Zea Mays
cccgggtcttcaaatgccgcttgtccccaagcggacagataagctttgtatctacctgcttcgtcatctagaactgtgtgcgggacaattgctggtgaataagctttgtgatgggttccccagttggccaagatggcggaagaccctgcaaccatactgaagaacattcatacgggatcacaatcctcttgtttgtccattccacgtgcgtaagactacactgactgttggccacttgcactggaatggagtgaggcggcttttggatgcagagatgttcattgacagacgtgtgagatgaacccgagtccatgagttttaatggatcttgatgctgcatacaacaagacaatctcatggcagtccctgtatttgttccctcccaagcaaccggtgacagagataatgctctcataaactgcctagtctgttctagcactgtctcgacaccatcctccaaggtgagcaactcccaagcttcatcaattgcatggagcggcatggtgctggcactttt

SEQ ID NO: 92225 - DNA, 370 bp, Zea Mays
gatttgtccgaatctaaggattgaaataagagggatagccttccccgctagcctagtagtaatgggaactcaagggttagatttcatcctagggatgaattggctacacagaaatcaagccactgtcagttgtgacaagaggacagttaagttggtgtccccatccggaaaggaggtagtaaccaagatatacttacctgaactagaagaaggagcctgtcaccatttatcagtagatgacaaggagtccaatccgattgaaacaattaggattgtgtcagaattccccgatgtattcccttaatagttaccaggcatgccacctgaaaggaaagttgaatttgccatagagcttatcctaggcaccgcc

SEQ ID NO: 92226 - DNA, 282 bp, Zea Mays
cggatagcaccgcttttacaagtgtttctcttccagctttggacagcagcttccctttccagccagctaacctgttattaattttttcaataaggggttgtaggtcgatcctcttcacattcttgtaatgaagggggagtccaaggtacttcccggggaggctagagaatttgcccggaaacacctccttaagagccggccatgatgaatccgggtaccgaattgggaaaatttctgttttgtcatagttgatctttagtcctgaacatccctcgaacgctt

SEQ ID NO: 92227 - DNA, 387 bp, Zea Mays
atagaagaaactagtacacggaagggataaaattgtgataaaatttaataaaagatattttctgcatttagttaacgtagacagggagacaaatctaatttttaaggtttaaaagaggcaaagatgtgttggatgaaaacaatatcaggtatataatttagaccgaattcgatttggtgaacaatcgcaggaccagataaatttctaccagttattaatatccaatcatttggatttgttcaggcaggatataaacagatcgaaataaaacgacatttgggttatgcatattattttcttgactttgaaatagtaaaccgaatcggctaacaattattacggattcggttagttcgggttcagtttatttaaacagcctgcccctag

SEQ ID NO: 92228 - DNA, 505 bp, Zea Mays
acaaacagattatttttatatcttgtaccatagtgctgatcctcctcttttttgtagggattaatcttgagcaatgctttaagggcacaaaaagaatgctgaagacgaaagctgccaaataggccttgggaaccttcggtcggaggttatcagattgaggaatgaagccattgaaaaggacaaaattctgctttccttggtagacaacgtaaaggttagcgaagctaatcttgctgcacattccaaagctcatagagccgaaattgaaaacttaaagaaaaagcttgccgagaagaatgaggattttgaagtggctaaagcaaaacaagaaataagtgaatggactagcgcaagattgcaaaagaatgtagatgagcttcgggaagcgaaggagaggtattatgagaagtccttggattgtgctaagaagttgaaagatagttttgctaaggtgggtgcatactcatctgagcaaaaatttattagaggcgatcccgaaggaatc

SEQ ID NO: 92229 - DNA, 537 bp, Zea Mays
aaatcgacgtgtctcttgtctcttattttacttttcatttgcacttttattcttatggttgaaatatgtctttctgtgaagtgtaggatcttatgagacaagggcttctattccgctgtggtctactctacacaactggattatgctgcatacaacacttcgagtacaataagaaaaagttctttagagtttaaatttatatattcgcctattcaccctccttctatgcgacatccaggtccttagtatcgcccaaaggtactttcactaagagcattaaatgcatcaccatatgtcatataaaatgcatcggggacggtccacctctgatcctggatggtccatgcttggtgctaaatttcattttatcgaacttggcaccttcaggttaatcagtcttaggcaaacaacccgtgaattatagctggacggttcgtgcatggtgtcaaatggtacttaattctgctctaaacggtctgcagttcatttcttcaattcgatatagttcctgtccaaatatgagttttggtgtctcga

SEQ ID NO: 92230 - DNA, 1113 bp, Zea Mays
ttgtagttgcaacactatgaacgaagtggcaggcacattacaaaaatggtttcctactgtgattttcacaggtaacattttcttgctaatcctaggttctcttttgttctggtcaatcatctcagttcacttagcggttctcttttagttttttttcagtgaccttataactaatcatgaggtttagaagatcttagaataaagtccagttctgttatcttgattagtcatttgtaaaagtggcaaataccctgaagtagtaaatgctacaaatatatgtctctgacacctgatatgtaatcgtttttcctttgtagtactcctgacccagacaatgtgttgatagtgaagacacctgaaggtgttttctctacgaaattttttgtccaaaatggtgagaaacagacagctgcaagactcgccaggaaggaaaattaccaggagaaagtgcttcctcctatagtttctgactgtctagtcgcaaagtgcctgacctatgaaatgttgaaatacaaggtaggtttcttgcatctgcttattgctcttaattgtcttcattcctaattttttagaacagatgttgcttattgtcctggatgaaatttgaattcttttttaaacatttacttttactgattatttcttagcacatcagttgtatattacattttttccaatctctttgattgttcaactacttggcttgtatattacattctttctaatctcttttgttaactgcttgtatttggaacaattgattctctagcatttgtatcaatcattttacatgtatcacacatgctttcttaccattaacattgatgcaattattgctagtttctagttatcttgtgattaacttgtttcagtttaaataccatttattgtgtcctatggatctttgtcttggtctcatttttggttcctgctgctaagtctctagggctttttttactaaatcctaaccactaaaaaaaactcggtcggggagggaaagaccgccctctagggcttttgtactaaatactaaccactatatctcaatttttcagaaagaaccaggagaggctattgcccaccggattatgggacctcgacaccactcccagg

SEQ ID NO: 92231 - DNA, 632 bp, Zea Mays
ctggttggcctagaacattgcactcttctgcccgatctaaggaaatactcgggtgtggtacctcttggacgaaaactctaggtgggacctgagtccgactagatcctagttttgacaacgcatctgctaccgcgttgcgatctctctccacatgatgaaattccagcccttcaaatttgtcctccagttttcggacggctgtgcaatacttgcccatggaatcattcgagcgatcccactctttatttatctgacttatgaccaccagcaaatctccatataccatcagtctcttgatgcccagtgatatggcaatgttcagtccatgaatcaaagctttatactccgctgcattattggacactgagaatagcaattgaagagcatatttgagttgttcacctctaggtgcaatgaagaggattcctgcgcctgccccctgcagtttcaatgagccatcgaaatacatccgccatacttctgcagtctccgggttatctggcacttgttgctcgatccactctgatacgaagtcaactagtgcttgagtcttgaatgcagtgcgaggtcgaaactcaatgtcgtgagctcccagctcgcagggccacttagctattcttccgatggcttct

SEQ ID NO: 92232 - DNA, 452 bp, Zea Mays
gttggcaccgacatgtggtccccttggccggccacacaacatgtccccgtcactcgcaggtggggtccccacaccatccctttctcaccacgtagcaccatcactcattgacatgtggggccacattgtcagaactacccccttcaccatagcaaactccacgtcaaacgcgacttcggttgtgctctgagctcccattttccggtgggattcacccagggacggttctccctccccctcccttcgaagttggcagtataaaagccaagttcgccttctcatgactgccatatccattcagcccgtgcatgcgcaaacataaggaaggcaccgccgcgtgagcagagagaggtcagggagtgggagaaagtggctgccgcggttgattcaagcatatggcaatgttgagtcctcggaatcgggccagtaaccctcgccatgcagtgcacaat

SEQ ID NO: 92233 - DNA, 540 bp, Zea Mays
ctcattttgattgatgcttctctgttcaaaaaagttgaggccccctggatttttgcagaagaaaaaaaattcccatgctcaaaataaacaacacagcatctctgcccactctttcaccccaaccaaaaaagtcagagctcccatggctttccgtgccacgagatgctttctggtttaaaacaccatcgctgatacgtacttgccggcgttagcaagctggttcatgtcatggccttcttccaattaccttcttagacactagcatgcagcagtagaccattttagttagtatgatgagcagatagatctgctagattcgttcaatgtcagtctacctgcattgctcgccagtagtatagcaggaaagagagcatgtatgccaggtcttgaattgggagctgctggtacagcttccatgcgcgtgagttctgaaagtttcagccatgaagtagcacccccgtgaactcgaggtgtcttagcagtgggatctgcaaaacaagacattttgagccgcaacgtaatatgtacaatggctagctc

SEQ ID NO: 92234 - DNA, 445 bp, Zea Mays
gcctcttgaacaagttcatgtccaaagaattatcttcctctagtcttatcccaatatagaggagtcctgcacttcctgccatatagagcctcgaacggtgacatcttcagactggcctggtaattgttagcatatgagaactcagcataaggtagactcttgtcccactactaccatgctgaagggcataagctctcaacatgtcttccaatacttgattagtcctttcagtctgaggtaggccgaactaaaattcaacttcgtatccatattctcatgaaaacttttccaaaatctggaggtaaactatgatcctctatccaaaacgatcttctttggtactccatgtaaacacacaatccaagtcatgtataactctgctagctgagaacctttataagtagtctttacaggaatgaagtgagccactttggtcagtttttcc

SEQ ID NO: 92235 - DNA, 747 bp, Zea Mays
aactgaatggcgggagtggtatattactcactgtagcttcacggttttcaataattacagaaagcacatcaacaagctctcccagattatgaggaggaatatttgttgccattccaacctgaaaattttaaacattagaaagaaactgatcgttgtacataagtaaataccagattagtggccctgttcacttagcttacaagccactgtcactacagcttttgctgcttttaaaacctgccaaggactgttcattgtgttgtcgcagccacagcggctgccagctctcccaaacagccccagtatcacttcgtaataaactaattaaataaataagagctcataccgcaatcccagaagaaccattcaacaacaaagatgggacacgggatggcagtagagatggctccttctgtgagttatcaaagtttggcacaaagtcaacctgtcaataacaagcagcagcacaaaaaggatgagaaaaaggaacagcctcgcactcgtgagtaaagaaaatgacatcagagaagtgagtaaaaagatgtactgtgttcagctccagatcagtcaagaacatggcttctgctaacgactgcaacacaagaaaaatgtcattcaacagtaaagcataagtagttgacagataagaagtgtaaataacattttgatatgttgagattcatttatttgaagtggttaaaaggctagtcccaacaccaaatgacacttagaagtagtccgtcctta

SEQ ID NO: 92236 - DNA, 1402 bp, Zea Mays
gtttagcttgctgtatgcatgtatatggttgatcgcagcagatcggagcttgctatatgctctacttgttgctgtcactggaactgtatggtggtaaccggacatcgctgtttttggcttggtctatatgtgtagatcagataatagatattgtgacctgcagttcatcacattaaggatttagcttctgaatatgtttagcactgtcaatttctcaatgacctgacctcctgcagtgactgtgcttactatttgactgaatgcgttattgatgatctgtacatccgaagccctatgatagcatatctgttgatgatgtgtcacaactcacaactgtaatacccatccacacttttcttcgtgtggatttgttcaacctgtttgagaactttgcatgggaaggaacatgacgataaagtgtgtgacggaatcaggagtttagtttggagctgagcattgcttatcagaaattgctatttcagataggtctagctgtgggaatcagagaggttgtgtcctggggtgtgcggcactgcaaatgagatttcatcacgttacggatatctgggctatcctagttcttctgtttagctctggaatcacttcaacaccatcaatgacctgagcttcctggagtgactgtgctcatgtgccatcaatagcttttaacttgtgtatatttaaagtattatgatgtccatttttcatgtgaagctagcatattttggtggtacatggcatatgtaatagcttttcacaattttatctgcatgggctttgttgtccccatctgagaactatatgtggcttatagctgtgagcagaaatgcagtaaaacatgtgatgggtttgttgacactattcttgcacgtcgatttgaatgatgtggcagtttttgaagctgttgagattagtgtcataggttggaaattgatcatggtcgcatatgtgcaagtggatggaatgatgagattatcatggtagtttattattattatttttctcgagcgcgcaggaggactgcacatcattatatcaagaagaagaaaaaaggtccaatccaaaatagacctatacaaaatccaccaaccataggtggtaacctagaatgctaaagggctatttcaaaggtgactagacaaaacgaccaggcctaaactcctcctgagttaaggccacagacttttcaggcctgcagccccagctaagcaccacaacttggcataccccctgatgtcttgagtaaccctagagatgtccagggaagtcctgtcaaagacacaggtgtttctgtgtttccacaaccaccaggccactaggatcactgctgaattgaaacctttcttttgtgcctttagtgctgtcatttctgacctatgccaccaggctagaaaaccagatt

SEQ ID NO: 92237 - DNA, 592 bp, Zea Mays
aggaagtaatcaggcttcacggggtacctaagtccattgtttctgatcgagactccaaatttgtatccaaattctgggagagtcttcacagtgcattgggcaccaagctttctcttagtgttacttttcatcctcagactgatggttagttggagcgaatgatccaaaccttggtagatatgttgtgtgcttgtgttctatcttggaagggtagctgggaagatcatcttgcattggcagagtttgcttataacaacagctaccaggctagcatcaagatggcaccatttgaggctttgtatggcaggcggtgtatctcccctctgtgctaggagaccttgggagagagatccctggttggtcttgattgggttcagcagacttctgaaaaggttcgggaaattcgtcagaatattttggccgctcagagccgtcagaagagttatgctgatgtgaggaggcgggatttgaaatttgcagtgggtgaccaagtccttctcagggtatcacccactaaaggagttgttcggttcggtgtctccggaaagcttagcccgagatatattggaccgttcactatcttggcctgggt

SEQ ID NO: 92238 - DNA, 480 bp, Zea Mays
gctgtatccaaattcgatgttgtgaaatcgtagtgttgattgcatctatgacttggtttgagcttcattacatgttgattcatgcttgatgtcaggtggtgtagtttccttagacaattagtcgaggtagaagtacttgtgttaattaaggccaataatggacccatgttttgaatggtgttgctatatggggtaccttggatgttttgttggagtggtcgaatccgaggacgaattctttttaaggggggtagagtgtaatatcccaaataaaagttgccaaaggttgatcttcggtgcgtggatgtgggaaaaagggttgtgggccgttggatgctaagtcagagtcatctatggcgttgtttcgtttctcccgcaaagaaaccctagcggtggccctttccccttttgcccttcttggccgcccctttctcccccccacacacttggccgccccttcccctctccccttggctggcc

SEQ ID NO: 92239 - DNA, 1495 bp, Zea Mays
ttcgttttgctacttgcgaacatgcatcctagttaagcaaaaatgttgtagaacagcaaagcatatgaaagaaataccggctgctgactggtttcttgaaatttcggttcagatacaggtgttgagtccacaactctatgatttttttcttttcttgttgagccagttaagttgaccagtggaatgtcatcccttcgttttgctacttgcgaacatgcatcctagttgttataagaaaaaatgttgtagaacagcaaagcatatgccagaaataccatgtttacctgaaacatcaatcaccagttattatttactgattcgtcgcaagccttgttcttacatatgcagtgaatgccctcaatgtgttctacacaaccatgaattcgccgccgcagctgacgaactgggtgtcccaaaatggggatccctgtgggcagtcgtggctgggggtcacctgctcgggttccagagtgacagcaatgtgagctagctgaaaccttcagacgggttggttgttttcgcgtaacggcgaccgatccttctcggctgattttccttttttcttgtcctgaataacgctcgacagaaagttatctgggatgaggcttaacggcaccttgggctacaacatgaaccagctcactgcactagttcagctgtaagtgagacctcacatgctcttaaatctcgatgctcggatgtttgcagacaacatgccattgttcggttttaatttaagtttggtgttctgcagggatatgagcaataataatcttggaggcagtgacattccttataatcttcctccgaatctccagagcttgtgagtcatgtagtcatgtttgtatgtgtacctaatcattcgtatttacgttttaaaaaatatttttgaggtcttacttacctggtatgcagaaatcttgcagtaaataacttcactgggactgtaccttactccatctcccagatggttgcacttagggatttgtaagttgcctatttgggattacctttctttgagcactttgacaagatttggacaaattatatctttcactctccttgctgtagaaatcttgatcataatcagctctcgaacatcaacgatatgtttagtcagctcacaaatttaacaacgttgtgagtgatttccctttctttctaactgcttatgcatgttactgttttcatcgctccacaaaccacagtggtaaacatgaactaactgttcaatttccagggatctatcatacaacacattctctggtgatatcccacatagctttaactccttgacaagtttgaaaacactgtgagtactccacatgttctgtttaacttcgtcaattggaaaacacatcacatggttacttacaaatccaatctcccctcttgccagttaccttcagaacaacaaatttaacggcacaatagatgttctcactgatcttcctcttactgacttgtaagttgacatgcttaccacctactccag

SEQ ID NO: 92240 - DNA, 278 bp, Zea Mays
ccggtatccgaaagacttagagtccaacgaatgccagcctggctgcaagggatgaggttccaaggtcatcctcaccctacagtggggcacccggtgctcctcgaacagctgcaccgcgtactggggaggcgtcgtataaccggctccctgaagtacctcccacaagatgcggggaaaaccctctcgtgcaagtccatccgtgtgggattgtgcgttccctacttccgaggatccgtgagaagtcatgtgtgtacgggtaagcgtaagcgaaaaagaaa

SEQ ID NO: 92241 - DNA, 555 bp, Zea Mays
acaatggcaaacagtttgacagccaggacttcagggatttttgcttctccattggcaccaagctagccttcgcctcagtatatcacccacaatccaacggcgtcgtggagcgcgccaacaacaagattttcactgccatcaagaaaatgcttctcgacgacaagaagggtaaatgggccaacctgctacctgaagcagtctgggcgctgaacatgaccgaatgtcgggcgactggattcactccctttcgcctgctatacggatcggaggccatgaccccgcaggaaatcaaacatgggtcaccgcggacaagcgcttcagccgtccccgacgtcgacgaaccaacctccaaagacctcatcgacggagaccgtgtctcgcccctgcaggctctcaacaaataccaagctcaaacgaaggcctggcgcgaccgcgccgtcatcccaagagaattcgacgaaggggacctcgtactcgtccggacaactcggacagagtcacggggcaagctagagccaaagtgggagggtcctttcatcgtcaagacgaaggcgt

SEQ ID NO: 92242 - DNA, 533 bp, Zea Mays
ctaaaatcaaagaagggaacaaggagacgtatcgacgcatggagacgatgcgaagtggtgatcacgaacatggatggtaccgtgaagagtgtgatggccaagtagagtgacgtccaaaagtggcgaccagaggtggaggcgaaggtgtcaaagttcacagaggcgttgaagaaagacaatacaaagcaaggtagagaaggcagatcagaagcaatcgaggagtttgaacctcaatgaattgtcgagcgaatacggtgtatcggcttccacccatctttaagcttcccctcttgaggcgatacatgagcaacaacgcaaccccacgatcaattcttgccggaggccaggtgctggggtgaatgctgcctagacacctccttcattcggaggtatgatgtccagccactagtttattcatatgcagctgcaatcacaattgggctaggggttgttgggcaggaactcgatgggaattgatcctagggttctagaaccatggtactgaacatgagtttccaaacctttgatgggtc

SEQ ID NO: 92243 - DNA, 446 bp, Zea Mays
gttcccgacgactaggcatggtatagtttaattggcagggtcaacgagtatcacaagcatgatatagtgctaaaacatgaaccaggaaggcgagggcagacctagagatggctgaccacgaaggggtgactcacggtggcgcggagagtggatttggggaaaaggaaattagggcgctacggtggacgatcggaggcgagggctggtgctttggctttgtaacaacctagcggagctaacggtgcactcaatatatagtgtccgagagcggtggctccgaattttgaaggggaaagctggcaaccggagagaagggtgagtcaccaggagcgctaacatggcatttacaggacaaggacttacggttgtcactggctgacctgcacagcttgcgacgacgtggtgaaacgaccgagagcatggcgcaaccgcgagaaacagtggca

SEQ ID NO: 92244 - DNA, 1022 bp, Zea Mays
aacacccagaagaaaagggagatgcagaaactgtggcatctatggtcattgggcagaagactgtaaaagaccaaaaagagataagaaggatcacaaatagcaggaggcaaatgttgcagttggagatgtggagaatgcagcactactcttcgctgaggtgcaagactcattaggtggaacttctcaggaaatacacctgtctaaagaaaaagtagtgcctgcagtctgttcagatgaagtctggctattagacactggagctagtaaccacatgacaggcacgaagtctacacttactcaacttgatgacactgtcagtgggttagtgaagtttggtgatgggtctactgtcaaaatctgtggactaggttcggtggtgatgaaaaccagagaaggtgaccacaaggtactcactagtgtgtactacattacacaattgaaaaagcaacataattagtcttggacaactagaggaagcaggctgtgacatcagactatttgctggtagactgaaagtatttgatccagagtataacctgttggtcagtgcacctcgcactgggaacagaatgtacacagtacagttgagtgtgatacctccagtttgcttgttgtcaaagctagatgatgcaacttggctatggcattcaagatttggtcacctgaattttaaagctctaagaaatttgggagtgaaaggaatggtagaagggatgccagttgtggacagacttgagcaagtttgtgatgcatgtactttgggaaagcagcacagagcaccttttccaaagacatcgctttatagggcaaagaggggtctagaattgtttcatgctgatctatgtggccagattagaccacagacagtaggtggaaacctctatttcctattagtagttgatgatttcagcaggtttatgtggattgaactcctgaagacaaaaggtgaagctttgtcatgtctgatcaagatcaagcagagagcagaagtagagctagaaagcaagttgaaagccttgagg

SEQ ID NO: 92245 - DNA, 398 bp, Zea Mays
ttcgatgccatctagatggggctaagagcagaggaggaaatgcccatgatgcccttgccttttgtgtagagaggccactagttggcgacatatgattttaatttcatcgctctctaggtatggcctataaataccaaagaaattcccatggatgatgatgaatgaatgaccattattctagaattcattttatcatattgcattgcacatcacattaccttcactcatgttttcttctcacctttcccccttttccgtgggacacccttgacctttttgtgctaatccttagaaagggtaagaggtagagcaaagcacccatatttggcaccgttcatggataccccattgtaccacccaacaaccaatccatggctcggaggaccataaccatgaac

SEQ ID NO: 92246 - DNA, 380 bp, Zea Mays
caaatttgaaccgataaggcagtcgcacaagttcattcttttcctttgtcccctttagcttcggcatattccattcactcatcgttagaaacaccttataggccagatattcttgggctagatctctggtgctgatctgctcggctaccaccctgaattctgtcacaccttgttggcacggtgaccccgacgtcatacggcataggggcctagtcaacccgaagcttaagcttagcgggctcagtactagcgtctttagcttctccgtcttcttctcattggccttaacatagaaccactaatttttccaaccggttggccacttggtgcgatagctaaccaccggagtcttcatatctttgcggtaagcgaagttgtag

SEQ ID NO: 92247 - DNA, 528 bp, Zea Mays
ataacccacaatttttctctgacttccaactggacaaagaaggaaagattttgagcattttttggtcccatgctagctagcaggcggattacatcgactttggtgatgcagttacctttgatacaactcataagacaaatctatatgataaacccctgggaatgtttgttggttgtaaccaccatctgcagtgcaccgtatttggtttcacgttgttgggagacaaaactgtagacacattcgagtgggttttcaatgcattcaaaacgtgcatggggcctgaaggaccacgagtaatactgacatgtatgattaataagcttctcaattattacgttttactatcattggattgaatgcaaacatagttgttaatgtgttgcataatgttgtgtaaattatgattacatatcaagacccagcaatgccagttgcactaggcagggtatttccaaacacaatccatcgtttgtgtttgtggcatgttcagaacaggtatatgccgtatttaaacgagttgtacgctag

SEQ ID NO: 92248 - DNA, 390 bp, Zea Mays
tttgaatgcctatgaattgaagtgggcccgtccctggaaacatggcactaacatagtggttgcataatatgtggaggtaaagaactactcgaaagagctaacaagtaacaaatttctagttgttttgtcctcttcatggcactaatatagtggttgcatcttgtatagaactcttatcctatattttgctgatagaacgctgccagaggctttggatacaatctgcaagaaactagggcttaggtatcgcagccatgttctttgtagcctgtcatgatacatgctcacaaatcttatcagaatcagaacccaagtacgtcacttacggattcgcagtagagttaatggcatttcgttttgtatagaaactaaagtttgttggttttactg

SEQ ID NO: 92249 - DNA, 782 bp, Zea Mays
gtaagaaggtgggtagcagaaggatttgttagtgcacatggtagaagaaatctggacgatgaaggcgaatgctattttaatgaacttatcaacagaagcttaatacaaccggtagattttcagtatgatggtagagtatatgcatgccgggttcatgatatgattcttgatctgattacatgcaaggctgttgaagaaaatttcataactgttgttactaatagaaaacaaatgttgccctcacatggcaaggtccaccgactgtcacttgagtaccatggtcttgaaaccttaagaacaaatcccatttttactactcatgttcggtccctgaacatatttagatactctgaagaaatgcttcctctttcaggcttgcactccctaagagtgcttgatctagatggcaatgagaatttggaaagctgttaccttgaagatatagggaagttatatcagttgcgatacctacggattaaggcaagtaatattacacttctggaaaggatagaagagcttcagtgtttggtaatactggatcttctgaattgccctaatctaggtgaattgcctagaagtattgttcaacttcggaacttgaaatggttaactgttcatcgagcgaacttgccagatggagttgggaacatgcaagcgctagagtttctttcacttgtagttgtggactacactacctcaacaaacttattggaagagctgggcagcttgaccaaattgagaactcttaggttggattggcgcatcaaccccctgcacaggga

SEQ ID NO: 92250 - DNA, 567 bp, Zea Mays
cttcataaacaaaaagtgaaacaaataaggctagggagaagaaaaatgtgtacaacatgtctatggtataaaaatacataattgtatcccctagttccgaagacccgttgtatagtaagaagggcattctcgtaactttgcacaaaaatatataccagcgtgactctataaataggggaacaatatcactgctacatggataatcattttgtaatcttgtgcctgtaatagattcttccaatagagatttcgaaggtataacaactacgaagctttatcgttgtcatactcttgtataggatgaaggtattctttatatcttggaaaaaggaatatgttatatataagtaattgctaagtgaatgttactatacctgcacttatctttgatgtgttatgcatatgctaaagtgtaaggcttcatatacttcttttgcccttctcctcgatgaaaccataattaggaagaaggatataactctgacatgttgcattgttatgtttctgtcatgaatcttgacaggtctccaatatttgacacccaccttcggtgaacctatcaacaac

SEQ ID NO: 92251 - DNA, 427 bp, Zea Mays
gtgccctaaagcctattaaatatccctataggtaccttgctccctttgggaggttttcaatccttaaattagccatttcatcaaaaacctagaacgtcgcacgccacgtgctcaatgaaatgcccaaaccagccaaaaatgcaccaatcaatcccaaattttccaggcaccttcacgatacctccagtaacatattcgcaaaatctcacgccaatctgatatcccaggcttcaattttacacaaattcccctttatagccattaattccgagtcgagtgcccaaattccattttcttcccctaaaatcaaaccaagtgcacacttcactcatatttacccatataaacctattcgtgaagtatcggctcaattccaagtcatttcatgcctcaattccaatttcagacctcctatggcactattcct

SEQ ID NO: 92252 - DNA, 383 bp, Zea Mays
ggagaagttttatgtcgacagtattgttaatggagttgtaaggatcttatttggttttggtaattgtatgacaactgaggcgaactaacatgtgtttatgttgatatatttaggtgattagaccaaaataacgttggtgcgagctacttatgccacactggtgaagtgaattagttatgttgattgatatgcccaacaagtaggaacaagcggaacggagcatccgccagacacaccctaaagtgatatagctctgtaaagttggattcaattgcaagctgcaaagatccatgacatccaatcccttgttgtccaggccaatacgcaccggaacaggagtttactggcactggacacgggagctagcctactgctactatgcg

SEQ ID NO: 92253 - DNA, 343 bp, Zea Mays
ataaaatgacgtcatgatccttagagaaatagtatgagaatgatcagaaatgagagatttaggcaagatcaacatctgatacttgagaacgggttatagcagataaccagataacggggcagattcaataggggatctcgagattcggatgataaagccaacatgattcacaagaaaaaggattaccagatccaagcaaaaggagaggtaggcaaacaggatcagctaggatgatcaacagaaatgctatgaagttttaggggcaaagatttatggaaagaaacatggccttgatagggtttgcgcatctagacaccaacaacaatttttttgacacaacaag

SEQ ID NO: 92254 - DNA, 590 bp, Zea Mays
ccggcgatccagggcggtctaacctaattgaatgggtcgagtagcttcaggaggacttaaggatgctagaacaaacgaccagagcgcttgaactaacctggagcaagctggccacggcgagggcaaaccgagcagagttcttgagtgatttgggggaagtaagaaattggagctctctggtgaacgattggatgcaagacttggtggcttggtgcgtgattaccctatgaagcttgcagtgcgttcaatttataatgggcaagagcggtggccggtgaattagacaacgacgcgcggcgactggagaagacaggtgttactggcgcgagactcagtggcatctaccgtggcgacctcaccagcgacgagccagtgctaccgagcggtttctagtgactcaccgcgacggagtaaagcatcgaggcacgtagcccggctggataacggcgaacgccattgatgccagcgcgactaactacgacgagacacgatggcggtgagaacagtggttggagtttatccccagcgtgatactttacaccgaggagtgtttatctgagtttggtcgggcgtgaatcgcgtcgccggtg

SEQ ID NO: 92255 - DNA, 855 bp, Zea Mays
aggtggctatttatataggccataaaggctactactactattaataaggatgttgtagaagcacccgaaaaattagttaggtatgagaagacgactagaatgagcatgcatgcatcatgattgttgcattataattgtctcttgtgcatcaacatgcttctctcacctttattcccataaaaaaagaaattgtgaataatgtgatgtactactattttgtgagctataagaagtgtcttgtcctgtgttgttatgatagtcttgactaggttgtgttatatgcttctcttgtctggctatctagaaaatgttttaattgttcaacccttttaacaaaaattgttgtctgtcctgctcatgaaaagaccccctccaaacaaccttgagtttagcaagtgaaacctcttaattttttttcttatgttggtgttttctaacccttgtgtgttttaccctgaagttgcacctacacaacttgtagacccccattgcttaaccgctagccaaaccgaaacttccttgtgcacgtggttacgtcaaaaaaattgttgtttggtgtctagttgcgcaatccctatcaaggccatgtttctttccataaatccttgcccctaaaacttcatagcatttctgttgatcatcctagctgatcatgtttgcctacctctcccttgtccgaatctggtaatcattttccttgtgaatcatgttgtggctttatcatccgaatctctggatcccttaatgattctgccctgaatgttgatcttgcctaaatctctcatttctggtcattctcatacccccttctctgaggatcatgacactaattttatcaacttatctctaaacagc

SEQ ID NO: 92256 - DNA, 396 bp, Zea Mays
cttcaatatatctatgactttttgacctagtttcatgatgactcacgactttgagccccttcgtgcttagttgctcgctcgtcatgtctgcatctctctgatggatgttcttgctagtgtgaagtgtctataatgaggagactcgtctgtttgctatcggcatgtttgtagtctttgccagtctcgtctgctactccatcgacgatgtcatattcagttgtgcctccttttgtgatcatgatgagcatgtggaagcctactgtttcatggagaaggctcaagctcgtcgttcttgatagggtactagtggtgctggtactggaggatcttaggggagtttggctacgactatggaggccaattgctcatgctgcttcattgccttgcaccctctac

SEQ ID NO: 92257 - DNA, 442 bp, Zea Mays
gttgatttctaataacttgaggggctcttatgtgaatgaacacgaccgaaggggtacgggattatcctggtcgcgggatcaacagcggacggctacaattagatcttacataggatgaagcgttacacaataatgaccaccggatcagagaatgacggcacagatttcatctacccacaactatgctgatccgcccgatgccaaacccatggcccatatttagcgttgtctggagtcatccgcatccctcagatcccgatcgtgcggtttcccaggatccagcccgcctgagacctaagatctaatctcaaccctaggtttgagatcccacggtcgaggcgcatcctcaaccaagacgacgtgggatggcggcaccgccggccaatcacggtggcaacctcaccgtcgtacacccactagacacaatagagacccaatcgac

SEQ ID NO: 92258 - DNA, 479 bp, Zea Mays
ataccatctttcttctccacaaataacactagggctgcccaaggcgaggtacatggtctgaagtagcctttctctaacaattcaacaatctgcttcttaagttccaccaattctggtccggacactcgataggctctcttggaaatagggcagcaccaggtataatctctatggcaaattcaactttcctttcagggggcatgcctggcagctcctcgagaaacacatctgagaattctgatactacactgatagcttctgatggcttgacttcctcaatatgggcggtgacttggtgacagcttcctttccttggtccagacaagaccaattccactaacgcttcctctcctgataaggacactaacttcaccgttctcttgtcacagctaagacttgcttgatatttggttagccaattcattcttaggatgacatctatagtcgcatcctggttacccataactattagatcagcg

SEQ ID NO: 92259 - DNA, 580 bp, Zea Mays
gtgcgaccatcgtcgtcgtgccgccgtctagctaggttgtcacacgccttaagtcatctcaccactcgtctcaagccgtgaagactcggcagtgaccatcgtagaccatgaaccagtgaactccacgttagcaaactctggtgactcttccgccttcccaccgcgagtgattttctgttcaaattcgtcctactcgcggccgcgcaatataaattgatacctcagcctgttccgctagattgttacgaagtcagaacaccaaccctcgcccttgattagccaccatagccagagaatttcgttctttccctaaatctgttgtctgcgccaccatgagacgccgcgtcgtggcctgccacctccaggtctgccctcgccctccttgtccgtgtttcaacgcccatgcatgcttgtgatgcttgtcggctcggccaattaagctataccacgctagatcattaggaacgtgtcgggaaagtctcaaattcgtgggtgttcgtggaccgagctctagaatggcgttcaggttccattggtgatccctagtggagcgccaagggtagaattaggtatagaccga

SEQ ID NO: 92260 - DNA, 385 bp, Zea Mays
gtttagtgtgattcctagaactgaagcttttatgtttagagaccactttggaagtctattagtggcaaatttataccattctagacttggagtattataataaagtgcaagaccacatgttggtgtataaatttaattaagggtcatgtcactaatgctgtataaaactggtggaaaaacctagcccaaaggtcctatcctcaaatctgaaatttcagacttagtgcagttcagattttagaaatgtgtataattggtctaacattggggcccttttgtggatgattagtggagtattgggccatatttgctatagagaaattgtagattacctatcagggcacaagtttgcttaagggagactggtttggttctacacaaaaat

SEQ ID NO: 92261 - DNA, 589 bp, Zea Mays
agcccggagttccacatcgctttgaaacttcacgactgtgtcttgtaatctacagtgtttaatctgaggaatggtggtcgatatcgcccatagttttggttggcttcaaacttagtttgtgtcttgcagaatttttgaagcatttcgttcttgagttcttcccttcccttctcatgtggacttatggagaacaatcgatttcttgtttcgctggtgctattgggatttgttggtgggtgaaatttactcttagggtcacttcttatgcctagatggttctctttgtggttgtgatcctctctgatcttgttttgagttcgtcctagaaaaccccaacaaaaccccactcttctcgtgtttttgaatctgcgttgtgttttttgtgttgctcaggttggtacttcaacagtagacatcattctccccacgcaaactttctacaaagttcgagatctttcttggcagtttttattgcctggcactaccaccactatgctcggcactgtcggacctcaggcaggcactaccgctcccacttgtgtatttgactctgaaattttatagggagtagccctggtttgcttctagg

SEQ ID NO: 92262 - DNA, 656 bp, Zea Mays
aatttcatcatgtggaaagggatcgcaacgtggcagtagacgcgttgtcgaaactaggatccagtcgaactcaggtcccacctagagttttcgtccaggaggtgccacgcccgagcatttcctcagatcaagcagaagaatgcaatgttttaagccagccagagtcagactctaatgactggagggagcctatcatcaggtatataaagaatgaagaggaaccggatgataaagtcgcagcggaatgcactgtactgaagaggtgcaacatgagtcctcatgaagtgcattccttcggttactgggaagcaactgctagatgagattcatgccggacagtgcgggatacacgtagcatccagaactctggttgggaaggtcttcaggtctggtttctactggccgacagcaaagagtgatgcagccgagttagtccagagatgtgaagcttgccaattcttatcaaagcagcagcatttgccagcacaacaactgcagaccatacccgtaacatggccatttgcctgctggggattggacatgattgggcccttcaagaaagctcagggaggctacactcatgtgttggtcaccattgacaaattcactaaatggatacaatacaaacccatcacttctctaacttcagccaaggc

SEQ ID NO: 92263 - DNA, 714 bp, Zea Mays
ccgcaacatcactgcaaacactctagcagtgctagaagccatggttgcacacaatgtgaggactctcatctactctagcaagtgtgcaacctatggagagcctgacaagatgcccatcgctgaaggaactccctaggtcagcagttcagttctgatttctgaaaccattagttcctttctaaaatcaagttgaacgcctctctagctagcattaacaaaaaatgaggttaaagtttacaaacttctccttctcgagttctgagcataaactatatatgtcgtgcagttcccgatcaacccatgtggtaaggccaagaaaatggcggaggacatcattctggacttctcaaagttgaagaaatcggacatgatggccatcatgattctcaggttggattggattgaacacacaccacgaaaccagaactaccccttttccagaccatcgtaatagagtttagttctgttctgtaatagagtttagttcactattaaagttcagttctggaatttgaattcagtaatagagttctcagccaccaggttacatgtgcctccttcaaaaaggcttctattattagagttcagttctggtacctggtatctggtactgcttcagttctggtggctggttttgtttcagtttgtttctgtttagtgatgaatcatacaaatgttccaagggttgcatttgttatatttcacaaatggaca

SEQ ID NO: 92264 - DNA, 303 bp, Zea Mays
ttcggtcagaggttattagactgaggaatgaagctgcagagaaagataaaattctgctttccttagtagacagagtcaaggctagcgaagccaatcttgtcgcgcagtccgaagcccataaagccgaaattgaaaacttgaagaaaaaacttgccgagaagaatgaagattttgaagtggctaaagaaaaacagaaaataagcgagtggactagcgtgagattgcaaaagaatgtagatgagcttcgggaatcgaaggagagatattacgaaaaaaccttggattgtgccaagaagctaaaag

SEQ ID NO: 92265 - DNA, 383 bp, Zea Mays
caagtagcggcgtaaaaaccgttggggctcaggctagagtcccgttccatgcacttgaaaacttgccttgcccttccctagtagtacactacagtactggagtctctgaaactaatgatgcaactgaagggatgccatgccccctgggtttctgtccgtcctccaggaagggtcggggtccgatctgcagcagcagactagtcactagtgtggtggtttcctaggattccaacatgcaaaatggttctggtcggagtgaaaatggttcggtgtctgtcagttccttcgaggtagtatagtagacagtggtctgcttccacacaaatggtggtgttgagcctttgagatggctccatctatcacggtaggcagctggatttcgt

SEQ ID NO: 92266 - DNA, 531 bp, Zea Mays
tcgagtcacgctgtgctagaaactaggtatccaccagcacatgtctaaagcgtcgaatcctggtggcagtgtctctatgaaggtcaaatagcctccgatactcagccaggggttgtaccttggtctcatcatgctctcggaaacgaggtgaagaaacaggtggagtagtgaagggagtgggagtgggggaagcaggcgtggtggaagctattggtgtagcgagggtagttgtaggtactagagtagataaggctggagtggtagtggtggctggagcagagggctgtagtgaggggtcaagtctagctggagtggagcgtaaccaaaatgactaatgtctgacaatgtaagcaatttgatcagagccaatatgcatttgtcctccctgctctactctctcagccgatgctgctgcaaccgctactcgaatagctttatcaagtttgcacttcttcttgcctccctatcgctcaaggtagattgcattgcccttgtcctggcgaaaagggtgaggaaggatccggatcatcc

SEQ ID NO: 92267 - DNA, 284 bp, Zea Mays
cttgagcataacatcatgtgcattagcatatcatgtgcttgttacacttagaatgcattcactaggcaaaaatttcaaacaagttgtgttgatgtgacatgtcataagtgaaacactaggatacagtacttaaccctaaactgggcttagaagaataaacaaagcctaaataagaggaagcctcaaaacttattagtaatgatcataaaatgtcatcattaatggacttaagtggtatccaaaccctagaaatacgaaaaaccctaaatagacccctagaaaac

SEQ ID NO: 92268 - DNA, 660 bp, Zea Mays
acaccgcatgtcactcatcaaataggctatattgtcacaagcttttgaagaaaactccctatgaattgctcattggtagaaagccaaacatctcatattttagagtatttggttgcaaatgctatattttgagaaagggaagccggctctctaaatttgagaagaaatgtgatgagggttttctacttggatattcatcaaatagtaaggcttatagagttttcaacaagactcatggtattattgaagaagcatatgatgttgagtttgatgaaactaatgggtctcaagatgaaagtgataatcttgatgatgttggtggaactcaattgaaaaatgctatgaaaacaatggtcattggtgaaataaagtcaaaggaagatgatgatgaaaatagtgtggttgtcattccatcctcttcaaccctaaatgaagaaaatcaccaaagccaacaaaatgatgaaattatggatactcatgatcaagatacttcaagtcattcggttcctcctcatgcttcaactagaaattatcaaacggtatcaagaattcatcattctattgtgaaggatcacccggttgatcaaattgtgggtgacattagtaagggtgttcaaactcgctctcgcatagcttcattttgtgaacatttctcttttg

SEQ ID NO: 92269 - DNA, 1003 bp, Zea Mays
cgaccacaaagttgtccaagaactcatgtaacatcctattcattgcttccataaaagcagcaggggcattagttaagccaaaagacatgactatgaactcgtaatgcccatacctggtgcaaaaggttgtcttctcaatatcctcctcacgaatcctcaattgatgataactagagttcaaatcaattttggataacacctgggcacccctcaactgttcaaagagaacctcaatatggggtagcagatatttattcttgattgtcacttgattcaaagcacgataatccacacataacctcttgcttttatccttcttctcaacaaacaatactggggaagtccatggcgacctgctaggcctaatgaaacccttagccaacagatcatccaattgccgcttcaattcaacctgctcctttggagccatccgatacggggccttgtgaataggttgcgtacccggaatcaatttgatttcaaaagctacatcgcgctctggaggaatgcctggaagatctgctggaaacacgtcagcaaagtcacacaccacacggatgtcctgcacccgcaaggcagcctcaccctccaccaccgtaccatggagaaaaagattcccgacttccttgaccgacgatccggaagcaattgcgacaacaaggataacgtgaactttggagaacttcccaagagcaccacctccctacccaacagcgcctgcaataacactgtcttccaaaacaggatataactgcgcgatactgagataaccaatccataaccaaaataacatcaaatgcccccagggaaatcacaacaagattagctgaaaagacctcattggcaagaatgacggaacaaccctgacaaactaaacagctactaatgaagccattagcagaactaaccataattgggtgacccaacctctgcaccgaaagaccagcccgcgacacaaaattctccgaaacaaacgaatagctagcgtcagagtcaaaacgag

SEQ ID NO: 92270 - DNA, 690 bp, Zea Mays
ctatctgtaagatcgtcttttgacattacagataggccgagttcaagcttcggatatcccatattcttcatcatttctcggcagacagagatctctttattgtttggtaggcaatagagaaaatcgtcctcttcattaccgctatacactaaggatcctagcggatacttcaaatccttggtgtattgccttgcttcggcaatttgctcctccgacaattgtttccccgaagcatgtcgcacaataaactccaactcttgggcaggtgcttcgggggcaggagacttgggcctctcaggggcaccttctctctccaaaattagtggtgcagcctccgaaggtcttgcttcagcaagaactgagggtccaacctcggaaatatcttgcgccataccagtttcatcagatttctttaaaatttcgccttctatactaggcgcttcaacagaagtaggagttgatacttttacggattccatgatagcgtctagcacgctggccattctcctcttccttggagttgtcatagggattcttgatgccttcggcaattccgccttgcgcggtggactcagagccttcggctgttctaccgccttcttcagttttggctcttcagctggcccggttttagcttcgataggcacagagtgacttggttcaggaatagaagcagacctttcaattagc

SEQ ID NO: 92271 - DNA, 483 bp, Zea Mays
tgtttttgctcgcgcactcggtgactcactggcatttttgaggtaatgcccgagtgatgcttgtgatctccacatttctgagttatggtctcgcactttgcgcccgacttatcggtccaacccatatttctgcagacatatccccttgagttctgaaccctagttcttgctttttcctccgccacttctttgttttctgagcccttgagtccacccgctttgcttgagagatcgtgatggatcccaagagttagagacagagtgttgttgttccaattatcctgccaatcgatcctaacagccaacttccatttatcggcaaccacatgttcgttgtctccaaggctgaccttttgcacctcatcgaaactagtgttctttcgccaaaagagttgtgttcctggcgaatctggcatggggttaccgttctgatagaggacacccacaaagctgtcgtcttcataccctttctcacctgtggac

SEQ ID NO: 92272 - DNA, 861 bp, Zea Mays
cagataccagcagaccctaaggcgctatcacgacaaagcagtgcggcatcgatccttcgcagtgggagatttggtcctccgccgagtgttggcgggagaaggatgacacaaattatcaccaccatgggaaggaccattcatcgttgaagaggctacctggccaggatcctaccggctcactaaaatggatggcaccgaagtgggaaattcatggaatattgagcacctcagaaaattctatccatagcgatgcctcaaagctctcgggaatgagttgtactttgtaagcagaaggtttcattatcaataaatcttccatgttccaaggcatacaagttcttgatcaacaactgacctaggtcgggctcaacttgaaattggcgcggcactcttacacaacttagggtgatcactataccctactaacagagcaatcggctaagtcagaaacgccttaagttagtgcaacatgctcacgcttacacgccatagggtgatcactatgccctactaacagagcaatcggcttaagtcgaaaacgccttaagtcggtgtgacatgctcacgcttacacgacttgaggtgatcactataccctactaaaggagcaatcggctaagtcagaaatgccttaagtcggtgcaacatgctcacgcttacacaacttagggtgatcactataccctactaacggagcaatcggctaagtcggaaacgccttaagtcggtgcaacatgctcatgcttacatgacttagggtgatcactataccctactaacggagcaatcggcttaagtcagaaacaccttaagtcaatgcgacatgctcacgcttacacaacttagggtgatcactatacc

SEQ ID NO: 92273 - DNA, 287 bp, Zea Mays
aaaaaatgcactcccaactgtggttaaaagagggagtacatgacactagttatggtaaactatcaacgaaagactgaacccccaacagaaaactcctggacaaacattactgtaaatttcaaaggcaatgatcgaagtatatggctgcctgaactctttcaccaaactgggaacacttcaaacttgggctaaaaccaatgttacctgacgagttcacagaaatataatgattaaaactatgtcaggttatgatgttagtcatatttttagctgtggtgtcagtaaaa

SEQ ID NO: 92274 - DNA, 577 bp, Zea Mays
gtccatcctgagcatatacttgcatatagtgacataccttaactaagcatttcttccccttgtagcacgtaaacacattcttcccagcaccagcagtaattgtctttaatttattctgagccatgatttttagttgatcaattctagattttagctcatttgcttctttgcatgtgttttgtggtgtaatttttaggatgctgacgttgtgcaaatctcttatattccaaagtttattggggcatcatacatttccagaagatgaagtagctttcaccgttacattaaacattcttttaccatgtatgtggagtactttgactttccaaattttccaacttatttgttattcctttgacttatttattggccttaagttatccaaggttttgaattatctcctagaagtatcacattacaatactatataattgttgtgcactaatattttgccaaatattctgaatgtcgttgcaacgcacgggcacgtacctatgtgaataagaattttgataccgaattgttgaatgtcatggagctgcccctcacacgtcgcgtgcgccctcgggaatttgga

SEQ ID NO: 92275 - DNA, 432 bp, Zea Mays
tcagccccctctttgccaatctgtcagcagtccagcacctgttatgggccaccagccagaggaagaaacgacattttgatggagcccaagttttccagaccctcttgtagtggccaaatgtacaggatcccaggaagagacccttgtaagctgctttcgccgaatactttccatctggggctacactaaagatatgtctgtcttcaatgtaagggtgcagctcaatttcggagagacagacccagagctttaagtaatctgccaaaaccccaacagtaagaccacctctaatgtcagatatccatcttctgtttaacaaggcctcctgaactgttctactttttgttatcttctttgggattatagagtatagtctaggggcaatggtcgagatgctcttaccctgcagccaattatcagaccagaaaaggg

SEQ ID NO: 92276 - DNA, 715 bp, Zea Mays
tgctcgcgcttactcgacttagggtggccactataccctactaacggagcaatcggcttaagttggcaatgacttaagacggtgcaacatgctcgcacttactcgacttagggtgaccactataccctgctaacgaagcaatcgacttaagtcggcgatgacttaagacggttcaacatgctcgcgcttactggatttagggtgaccactataccctactaacggagcaatcggcttaagtcggcaatgacttaagacggtgcaacatgctcgcgcttactcgacttagggtgaccactataccctactaacggatcaatcggcttaagtcagcaatgacttaagatagtgcaacatgctcgcgcttactcgacttagggtgaccactataccctactaacggagcaatcggcttaagtcggcaatgacttaagacagtgcaacatgctcgtactcactcgacttagggtaaccactataccctactaacggagcaatcgacttaagtcggcaacgacttaaagcggtgtgacatgctcacgtctactcatcttagggcaaccactacgccttaccagccaagcgattgacataagtcgggaaaaaactcaaaaaccaacacgccgcattcacttccgcaatcgttcaagataattgttacatcctgacaatagaaacaaatgttatagttgtcagcgccaggggcacattttag

SEQ ID NO: 92277 - DNA, 677 bp, Zea Mays
tttctcctaaccttgatatgaacctgcttaaagctgccatgcatccagtaagcctctgcactttcttttgtgatcgtggtgcttccatcctcatgatagcttcgattttttctgggttagcttcgattccttggtggctgacaatgaacccgagcaacttcccggctggcactccaaagacacatttttccggattgagcttccaccggtacctcctcaggctgttgaagaccagctgcagatcctcaatgaagttttctgagcttcatgttttaatcaccacatcatcgacataggcttctacccgcttgccccagtgatcggctaagcatgtttgaatggctctctggtaagtcgctccagcgttcttgaggccaaacgacatggaggtatagcagaaagctccaaacggggtaatgaatgcaattttttcctcgtcttcttttgccaggctgatttgatggtatccagagtagcaatccaggaatgacaacatagagcatccggcggtcgaatctaccacctgatctattctaggaagtccgaagggatccttcggacagtgtttgttgagatctgtatagtcgacgcacatgcgccaatccactttattcttttttagtacaagaatgggatttgctaaccactctggatgtagtacttctctaatgaaacca

SEQ ID NO: 92278 - DNA, 364 bp, Zea Mays
tgtcgaggcctcagcttcggttagcatctagcgcggcgggtaatcatgcactgtaggctagcgggggaaattccggccatggcgcgccgccgtgcggggcgccgtcgtcgccagcaagggtcagggtcgggcggatctgcgtgcatcattggattaggcaggaacgactacgattagaacttgtatactgattcgggtttgggggttgtgagccgtctgatttagatcggacagatgacaagtgacgctagagtattgaatctggagcgtagagatttgatcgtgcggtggttgacgcgtaccgtttcgatccactccagatctaatctggaacacccatgtccgatctgacggccgagatcca

SEQ ID NO: 92279 - DNA, 392 bp, Zea Mays
gttctgaaaacctttgagatttaccttcatcaacttactcccgaagccatcattaaagtggggatctttatatgggccatgaggagccaaggactagaaccagatgcaagatgcttctgcaacatccatgagctgtcttatgagacgaaggctaccggaaaggagcagtaccataacaactttggttgttacagctttttgtctcgctctgaggtgagctatctagttcccacattttggaagagatggccgggcccctggatgcagtaatggttttatgtgaagaatgatttgagtcaaagggaggatgttaaagggattattcaatgccctatatggtctcgcttcgacattaggaggccagccactgcccttgggaatgatatacaaac

SEQ ID NO: 92280 - DNA, 335 bp, Zea Mays
cctgagcccttgcttccttagcacatgccagcaaacaagactgtacggcccagtcaagtgctaagtcctgatcagcaagctgatcctgcagttgacggatgtcccttcttagttcattgattctatctccgtcggcgacccaagcatcggtcctgtgttgcagcgctgcttgaagtcgactcactcgggcttcaagatctcctatggggtcattacttccactgctgctgctttcatgtcgaggggccagttgatgctggggtactccaattggtcccgttgacttgcgtgtcgttagccttgtgcgtggcggcatctttctaagggggaaaatg

SEQ ID NO: 92281 - DNA, 590 bp, Zea Mays
agttaaacaaataatagttgagaaggattttttagctaagatctgctttattattgataataataatatgacgtcggtatattttacatatgggtacatgagtatggatagtatccatctatacctgtatctgtctacccaacaggtagagattcttgaccattaacatacccgcggatagagaaaccatctcatactcgtctacatatcgggtaaaattcatcggtttttgggtttcaggtatccattgtcatctctatctctaggagaccccgtatctcatctcctatcacatctcctattttaaaccttactctgtaaacagtgtcatctatagtttttgctttcctatattttatactaccccctgagacaattttaggagaggtggcaagcctcactctcattcggtcggggggacaataggtacctaccgcttagacgcttaggctgtctctagcacactcctatcatattctcttttaaatattactatgtaaatagtgtcatttaagtttcgcgttccctattttacactacctactggagacaatcttagtggaggggtggcaggtcccccttccctatat

SEQ ID NO: 92282 - DNA, 666 bp, Zea Mays
gtaactttcaaattctaaggtttttgccctaggtcaccacatcaaacttgtagaccttacaaaggagaacaactttgcttaagagtgtaagcatagttgttaagaagaaatgggagataattaagtctaaagtctggctgtcaggctaactgaactctgaactttagacttacagtgtaacagagccatcttggacttggattcaaccttgatctagtgctcaactgagttcaatccctataatcgaaatgtagctgggttatagctctgcaactttgctacagagagttgagtaagttactagagaaagtttagagaaatttggacctaaaaacgctctgtcaggttgtctgatgaccctcgccatggtacagtaagcccccaaactgaagaagatcctgattcatccccccgctcgtcgccggtgattcttcgccgagattgatgacggatcgccacggttcgtgcaccgtgggcagcagataagctcgggcaggtaaatatctagcgcccggattgagttgagcctcgtggcagctaagcccgccgtacttccctccctagctcatcggtcaattggataacctcaccgccatcaagctgtcgccgttgtgcgccatgtgcttaagcactggtcctcatcgtggtgactcactaggtgcatgt

SEQ ID NO: 92283 - DNA, 292 bp, Zea Mays
ttctgtcctgagctagaccacaaaatggctgctctgtagtttctgagctgcagtactcaagctgattaaactaaacccaccctatcgcggcagccctacatgtaccaggtttcttactgctttccaaaaaaacaaattcagtcaaatttgataactgccgagcaacatgcatgcacaactcaataaggacaatatatacgattatacgtgcaacattgctggactcgaataaggacaataaagtgtgtctccagtacaaatagaaaccaccttctcctcgaggaggccatag

SEQ ID NO: 92284 - DNA, 446 bp, Zea Mays
cttgagttagacaaggtcaactttacttatgtaagacccttgggtggtatacttggtaaattgggtcaaactttagctaaggtaagtggtaggcttatttttggggttccactgaattctttctaagccttagtgagaattgataagtactcaagtttgacttattggagtgagatttatttcttcttcccttttcttttattctctttaatgttttggagtgggtatgaactacaagttgcttaaataaaattccagaaattttgtaaaaattacagtggcttgatactggtgtatatttctttgccgtaaattttgggggtcaaaaggtgaatagttttctctggacaaaattatcaaattttagggcagaaggggtgctttgaactacaactattatttaacagtgagtaattctctaaaacttatttttgctggcttttagg

SEQ ID NO: 92285 - DNA, 438 bp, Zea Mays
atccaattgagagatgtttaaagactataaaaagaaatgtagaaataaatgcaaattcgaggcttccattgctgaggcatacatactggaagatgtgtcaaacttcacaacaacttactatgatgacaaacagccgagcgtgcataatccaccccctcgttacaatgatggcaacaacaatttttgaggacaactcggaagtgcaaatggttcgaccaccaagaccctaagacatgaagaatcgtgccatatcatgctgtatgtattgaccaaccttaaagatgtgacgccatacatggagcaatttcttcttgaattctggtgtcgatcaagggacccaactccacaagaatattgacgcgtcacgatgcccgatcttcatgacataggatcaatcttcagataactagcttcgaagaagccaagataacttgctgc

SEQ ID NO: 92286 - DNA, 868 bp, Zea Mays
aagaagggaaggtgtttttttgccaaaggctcaaaacggtacgtacgtagatttcatgcatcacaaagagatatattatattaatatatatacaaatacttgatgtttgtttcgtacacatggaggcaaccatacacaagcattacattttcgagcatacaacaattcaatattcctttagtattttttcagcagcttcatgtaatagtgtgtcgacgacttcgtcaacgacttcattagcaatcttcattatatccaaggcttctttcataatccgggtcgacttcagggttgtacggctccggtggtggtgaaagcccagctgcaacaaagaatatgttgctgaactttgaagctagaaacgaacgacgaagcaaaactttaatagaagtacctataatcatggctcgtcagcagcttcttcagtttgctttgcctcttctcgagcgtcgtgacattctttttcgttctttctaatggcttcatcagccatctcacggccgcccttcatccaaacattagaatagaacttcccgcccagcaaagaggcttcggccgaagggtctttcgtgtcgtcagctgagaacatagcttctacctgggctacggccttaacatgttcacaaccggttttctccaaattggctgcaacccctcgagcaccggcgaaagcatagaaatccctgcgatcgtcgagtatttcatcgaaagcttcagcttcttcaccaatccactggataactccttcgggatcaccacgaataaacaattgttccgaagagtatgctcctaccttagcaaagctatctctcaatttcttcgcgcattctatagatgtttcgtagcatctctccttggcatcccgaag

SEQ ID NO: 92287 - DNA, 431 bp, Zea Mays
aaaatatgctcaaatataagggtggagataagggggatagggttccccagtgacctaatagtaatagacacccctgggatagatgtcatcctagggatgaattggttaatgaaatatgaagcgaatgttagttgtgacaagaggaccgtaacaatgaagtccccgtccggagaagaggtagtggctgagctaagagtgcctaaaacggcagagggagattgtcaccagatttcagttgagagtaaggaggccaatccgcttgaggctatcagggttgtgtcggactttccagatgtgtttcccgaagaattaatgggtatgccacccgagagaaaggttgaatttgccatagagcttatccctggtactgcccccatttccaaaagagcctatcgagtgtctggaccagagttggtagaactcaagaagca

SEQ ID NO: 92288 - DNA, 885 bp, Zea Mays
ctcgtgctaattatgtatggccaaatgtgactaggacttagagcatgtccaataaattctaataatcctaatttcaaatcttaattgtcctaccaatctaccttcctagcgcttatgttcttgcattctggccacctcatcatatttggaagtagaaacttctccatccaagtttcaatttgtagtagtagtggagctcttggcccgttgccatcttctcctctggtttcggtccctcaccactctcctcttcggatgccctagtggacacactagttaccgacgcgtcacacaccacgtgattggttaccctgctcgccatattcatatcagccgcatgcgttaaccgtgtgtgagccagtgattggttacttgcgggagcacgaggctggcctgtacgcgctgctgcaacctaggcatctttttacctgctcgcttgcatgcgtagggaaatggaaatctggcatcgctagccatctaggccaccgcgagaccgctccaatagagcatgcaaaccaatcacgtggacaatgaccatccatggcgtgaaacagagagagaaatccacacctacggcctaccctccctcttgccatgtgattttagttccggtctcctcatcccttcacgaacgcgactgataattaacccatcaaacatctgctgcaacaggtggctagagaagaccgtgtttggcgaggttgggtgcgacagtggctgtgcttgttgtcgttgctctgcgccgcctcgctccgctaatcggccgccactggtggctacgtatggggaggatctaggccggtgtggtctttgcatggaggcagctgatgcgttgtcgccatcgcgtgtgctggtgggactccagcgtgaagtagcaagcgagga

SEQ ID NO: 92289 - DNA, 907 bp, Zea Mays
tgttgaccagtagaacccctctataaaagcattcccaaccaacgttaatgaggttgcatgaacaccatatttctcacatgaatcttcctcaacagatgcctaccactggatgtatcaatgcatctcatgaaggttcccactgccccacgccaagtctttgtcgatcagagcgtggttggcagactgcctagcaaggcgctcgacaacagctcttttgtctggctcttcttcattcttgatatatttgatgatgggtgctttccagtttgttggatattcttctacaagcagtatctcatgctctatcaccttgcactcttctctcgagtcttgcggagtactaggatgatgtatctcctgtacaaaaacatctggaggaacctgagctctggtggaacaaagctttgatagtggatcgatcgctataatgcaatctctatccacatgatgaaacttcaggacttagaacttatcttcaatctaacggattgcagcacaatacttgctcatgacctccatggaataatcccaatctttgttgatctaacttatcgctaatagagaatccccatataccatcacccgcttgtccctgcaagttctcgttcttgtcaaaacccttcttactcgatgcctccaagatcatgccattatctccctccacttgaccattgaccctcgggtgagctactgaagcgtacttgagggaggatacacttctgctcacagaaatcaaagaactatgcccttgtaaagttgaaccctaggtctgtgataatgttattaggtatcccaaacctaaatataatttcttgaaggaactctattacctttgttgttgttagcaatgcgatcagcttgtattcgatccacttcgtgaacttgtcgatggccaccaacatgtgtg

SEQ ID NO: 92290 - DNA, 327 bp, Zea Mays
caagaaagcatcaagatggcaccctttgaagctttatatggacgacggtgttgtactccattaaattggtctgaaccaggagaaagatggtttttcaggcctgatatggttaaagaaatggaagaaaaagttcaatgaattatacagaatttgaaagaagcacaagctcgacaaaagacttatgcagacaaacgacgccaacccttgtactttcaagttaaagactatgtgtatctaaaagtatcaccaatgaagggtgtatctcgttttggggtaaaaaggaaacttgcacctcgatacattggtccattcctcattcttgaacaa

SEQ ID NO: 92291 - DNA, 675 bp, Zea Mays
cctgctatgatctgcaccacgaatcgggtcacaaggtcgtgcgaagcctgccaaaagttttctccacgctcgggaagcccttcgcagttcacaaagctaatcgcccacatgtggctccttcagcgctggggcctagacattgtcgggccactacccacggcctaaggaaacctcaagttcaccttcgccgccgtcaaatatttcaccaagtggatcgaggcaagagcagtatcaatgataacatcgaagactgccaagaaattcttctagcaaaacattgtttgccgattcggagtcccgtccaagctcacagttgataatggcaagcaatttgatagccaagatttcagggacttctgcttctccattggcaccaagcttgccttcgcctcagtatatcacccacaatccaacggcgtcgtggagcgcgccaacggcaagatcttcacggcgatcaagaaaatgctcctcgacgacaagaagggtaaatgggccgacctactacctaaagcagtctgggcgctgaacacgaccgagtgtcgggcaaccggatttactccctttcgtttgctgtacggtttggaggccatgaccccgcaggaaatcaagcatgggtccccaaagacaagcgcttcggcctcacccgatgtagacgagctaacctccaaagacctc

SEQ ID NO: 92292 - DNA, 380 bp, Zea Mays
gcactagtgagatagaaggtgggacagagagaccgctagatatagcctgtccacatgacgagacggccggtgtttccctaccgttgtaagataacagtgaagcgtataggataagaatgggatcgagtgtatgcgtattctttaatctaataccgggcccctcaccttgttctgataaaatctgtactagagcataaataatagggtggagaggttggcctaggtgtatgtgccatgcatgcacagggccacaggcacgctggttcattgatgctcactcttgatcctgagcaacgcagccctagctagctagctggtctgtctctctgatgcagacatagcgcatctacactagctaactagcaaaacctagccttcta

SEQ ID NO: 92293 - DNA, 797 bp, Zea Mays
cgctgagatgcgtaataccctacgttgtgtgtgctgctgagatggaattgctcttgagtttgaggttacggagtggatgaaaactatgctctagctatgcctataagaggatccaaccgttttgtaggggtccctaaccctccctatatatccgatgtgactagggtaacacggttgagcaggtcactattgccacgcatacatccgtgaagccgactctgactaacacacaaacgtgtgattctctgttagattatctttgcctctgcatacgcgagagttggttacgaagccttcatgtccacgtcttcgagtttcatatcatcttctagtcaggtttagctgattagcctatgaggctcatctgcccaacctattgaggtcctttaacgtcccacacactgaatttggtcacctcatgataggacatctaatatacccattatgccttagacaacatcttgtgctattgcctctggtactcgtcaatctttcacttgatcaacttgattagactcttattcgaggcctcggcctccaattggcctgagcataatacaatggcgactaaatcaaagcaatccccatatcttctttaaacttcttgaactcttccaagataaatacaaacctctgatctatcttgatcgtttgtggtatcccaaatctatacatgatttgctccttttcaaacttgaccacatccttggtcatgatattcttcatcaggatagcttccacccacttagtgaaatagctagtgactaccaatatccatttgtgtcccttgctggtgg

SEQ ID NO: 92294 - DNA, 804 bp, Zea Mays
gcagggtatagtggtcaccccgagttaagtaagcgcgagcatgttgcaccgtcttaagtcgttgccgacttaagccgattgctccgttagcggggcatagtggtcaccccgagttaagtaagcgcgagcatgttgcaccgtcttaagtctttgccgacttaagccgattgctccgttagcggggcatagtagtcaccccaagttaagtaagcgtgagcatgttgcaccgtcttaagtcgttgccgacttaagccgattgctctgttagcggggcatagtggtcaccccgagttaagtaagcgcgagcatgttgcaccgtcttaagttgttgccgacttaagccgattgctccgttagcggggcatagtggtcaccccgagttaagtaagcgcgagcatgttgcaccgtcttaagtcgttgccgacttaagctggttgctccgttagcggggcatagtggtcaccccgagttaagtaagaatgccggtcaatcatgagcaaactgagtattcttgaagccttttttattgatgacatatttcccatttaacagagtacattatcgtcccgatagctttttgaaatacagctaggggtaaaacttcctgaggtgttctatattccaggagttcccaatttctgttctgtccatttgagtaaggcgatatgatcccggccgagtgacttctgctactataaatggtccttcccataagggcgataacttgtgtcgtccctcccccgttagaattcggcggaggacgagatctcccactgaaaaggatcgtcgctgcacgaccttgtc

SEQ ID NO: 92295 - DNA, 526 bp, Zea Mays
atggaaagtcctcattatggacgatcccagatatacttttgctcttctaggaaattagatggaaaataagcatttgttaggaaggcaggacaaactttgctttggctaatgatggggatcaagaatttcaaaattctgctctttatcatagacatcccttagatcatatataatgaagaagaaaggagtgattcctcgagtagatttatgtttttccaaatgaataaatataatatgaggcagagggtcacacatacaatggcacacaccacacttcaagaggaagagatcttcgattcacattcttttcataatcaacaatggttcctagcgctagtttgcaaaaatatcttgattcttctgttcaaacaagaggagaggagtacgcgtcccatgccaactacataatgcctaatgaccaaataagacatatgactatgaaatacaccaccccaacagggaaaggcgtgaagcataaaagatgctgatctacaagttcgatagtaatcaaaaagtaatccatcaa

SEQ ID NO: 92296 - DNA, 437 bp, Zea Mays
aaaaaacgcacacgacttggagtagttgccatatagcttgctaaacacggggttgtcataaaacacatcatggagtgtcgtagattggcgtaaaatgcaccaagtcttgtaaattggcgtaaaaacacaacaataggtgattgtaggtaattgtagtgtaaatcatagcaaggtgtcgtaaaatttcatttgagagatgtataaatcacaactatcatacagacacttgtttagtacacatcgtaccaaaatataatcctaaccatctattggaggatgatgcattctatctaaactaacataaagtattctatgtagtgcatacaaaattgcatttcatcccatcaattgatttttccacattattggtatatgagttgagtttcttttctctctcatgtttcagcatgcaaaaagagcaaaaaaacacatcggag

SEQ ID NO: 92297 - DNA, 751 bp, Zea Mays
aggttttttaaagctgcaattgccttttatgaaggggctaatcttgaaccagagaaccaaaaatatctcagcacctagtactatttcttgtccaaagaacatggcttccattagagtggatagggtcatgctttgatgctctactcattaatcctttcttttttccactattaaacaatagggatgctgttgaggagggaatgaagtcgcaagccaaacctaaccagtcttccaccgcagccaggagtcttttcggcccaaatttgatgtgatgatgacgtgacaaatgattgagtgttttgcaccagaatccaaaacagttgcaacacaatttgtattttagggaaagtgttaaactgtaatttgacaaattgtgatgttttgccacgtttgatgatgtaggtctggggcttcacgaccagtaggttaagcgcataggacagatgcactgtttggtgctggtttagcatatctactaatagcgaaatatctctgcaccatgagctctcgaacctggccactacacgtcgttccaaaatcaggacctttggatggatcttaagcttgatctcaaccgtcatttcttttgccttccgcgccgtcattccacaggtcgcgagcgctcgcgtttttccttgagcgtcgttcttgctaatgctagctctccatttttttatttttatatttaaattaattttgtttgtaaaaatattgtatgaactttaaaatttgtagaaatatggtcctcgtc

SEQ ID NO: 92298 - DNA, 735 bp, Zea Mays
gccaaatcttggcaaatttgacatcaaggaggacattgtgacttcttctggcgatgggggacaatcaggtattctcaaaacccctcctgctgcttcgaaaaaagagattgagaatgctcgtcgtcctttctgtcacaaatgcgggatggagggtcatcatgctagagattgtttcaagtctctgtggtgcgatatttgtcgcaaagaaactcatgtgcctgctcgatgtgtccttcccaaacaaaacaagccttgcatgcctattgttggtatggcagctgacgggttagggctttactcttcccattttgcgaaacccctatctagaaaaccaaaaaggagcttcatcggtttggtgaaggttgttgaggggctgatttctgctaaagaccttgagaaggattttggttttcattttccgtggggcaaaacttggaaagcaaccaagtgccatgtcgggttcttgatgcaattcccttctcaagagaaacttgatgagatgattaatttctctgaacttaaaatgaaaatgtccggggcaaaaaattctgtctcttattggagctcacaggctaaacctaaatccaagcttcattctgtgtggattgtggctgaaaatgtccctgaggaacttcaaaactatcaagctatttgtgagctgggatcaacaattggggctgttgaagaggtggatatcttatctttagactctaaagatattgtgagattcaaggt

SEQ ID NO: 92299 - DNA, 573 bp, Zea Mays
cgactgctcatcttgaaatggcatttcaactaacttttccaacgaaacaccctgcaagccatgtccatccaacgagtagccatgtccagggtagcaaccttcgatgccataacgtcaacgacatgactcaagcaatacaaagaacagttgaagggtgcacaaatctcgaagctgctcgactctagatcgatgagagactcctcaacgaacacaggcccttcatcaaagatgggctggtcatcgaagatgtcgccattcccgtcgtagtgcgcctcgtcgtggctcgtccaaggaactgcgccgccaccaaatcggacccaaacaaatccaactaagccatcatacactgttgatttgcaaatagcacatccatgttatccagtatgcgctgctagtttccctcctccttctcaaaagccttctccatggcatccaacagaatttaggtttatgcagatggtttgggaggcgtcatggtgaacgtcactgaaaaacaatcgaataccagatgagggaaccaccaaaatagaaggactcgcacgcaccttgcaaaactagagcagcacagtttcg

SEQ ID NO: 92300 - DNA, 690 bp, Zea Mays
ctttggagtgtggcagtgtgcgtatgatctcccgtatttcgacaaaatcctccattattcgcatggaaccttgcttttgcatttctgccaatatgcctgcgcctgctagggcatcggccatagctgagtagcgtagatggcattgggtgatttcgtcgccacatgtattatggagaagaaaagtgcattattcacccgaggggacgggggggttctcgttttattagtgtaatactcatggtcctagtgattttcttcttcagaccctttgcatgatcctcaacctgaagagtcaagcatgctgtgtatatatgtattgtattgtcgaatactctgcttgtgcaatactatctgttgccacgaaaaggtgtttagtgttactccaattgtggagtctattctgtagattgtagtatagcacatatataaactaaaaaaaaacatagagcattcaattctgaagggcaggccggcatgatacgtagtcttggtttatcccttctccagagcatttaaggattggtgtgctagtctagtcaattaggtttctgtttcttctttagtcattgtccacattaaatccattgaaccagaatcatctatcctgtcagttagctttccattgcgtgtgcaaatttaagtatcagtattaggttatgtggagggcctaaaatgacaaaaaggaaatca

SEQ ID NO: 92301 - DNA, 836 bp, Zea Mays
agaaaccctaattggaaccctggaaaaccctaaatcaaaccttaggggcttatgtgcaaaattagcccacttttgggctaaaatgcaaaaaccaagccaaataggtttcttaagtcctttggttcacaaatatgtgaatttgcaagttaaaccctaagttttgggcctatttgcaagaatcacctcttaagcactataaagcctaagtctgaaatcagtgttgtgagcacaactttgagcccttgtaactttcaaattaatgaaaatatgctctaggttaccacaccaaacttgcagaccaaacaaaggataacaactttgcttaaggttgtgggcatagttgttgaggaatatttggagataaccccacttaaaatcagactgtcaggctggctgataactgaaacttggtttgacagtagggtgggtcaatctttgaacccggatttaaacaagatccagtgcaagtttgggtatgattcccgtagcaaagttgtagctggaacatggggctataactttggtacagaaatcttgctccgtcactacacaaaattgggagtaaatagccctgcaaatcgcgctgtcaggtgcattggactgaattttccccatggtacagtacacagatgtggatgccagctcgggcagctcaacgccggtggtccgcgtgaccggagttgggttgggcgatgggattcgtgtcgcggggaaatggattttgctgaccttggaaagatctccttgtcgatgggtatgaactactgtagccccgctgtcttcaccttttgcgccggcgacgtggcttcgtggccctcgccggagttgccgttctg

SEQ ID NO: 92302 - DNA, 605 bp, Zea Mays
gtttttctgggtttgctgagtgcttcaggcactcggcaaagcacccgattccagtagtgataatacagttgatagctgatgtgatactgcattatgttagtggcagacaatttttttaagtgccataacaaattttttagtacaattccttataatctacggtgccatatatatatatattgtccatcacttcaaactttacaaaactcacccaactaaataaactccacgcccataacatcaactaaattcaccaaataaattggacacatatttaacacaacataaactaatagttcggatcgctggataactctattttctttaattactcaaattcaatggacaatattatttagaacatcacaaccctccctcactacctcgtggctccaatgtccctgccatccctttctctcactcgtgtcgtcgccaccgtcaacccctctcctcttcccttagcatcatagtgttagcacgaactatctagtccataacaaagcacgcgactgtcgcgacagatagggtcagacgctggctgggtgcacgacaactcaacacgagtgccggacgtgtggccaagggacgtgtagagatgaaaacgg

SEQ ID NO: 92303 - DNA, 506 bp, Zea Mays
caccgcaatttcgattgtacgtctttcccccgtccctcggctgcattttgatttggatccgttgatgggtgcgtcgctgttgcttaccctttcgtgcatttttgtgatgtgatttggatcctctgatgggctcatcactactacttaccctttcggtgctcctgtgcgagcaatgcttatcccaagtgaatcgctgcatttttgtactatagaagatgatacaagcaaatcattagtgaacagtgatacattattcttacttactatgtaaaggtctaagacctcgagttgaaacactttgtgcaggacctgaaggctggcatccagatctccaggaaccaggcctgtctctaccttacatgcatttagcatgcttgttatattttgacagaaatcatgtagataagtatctgtagttacttgtacatgagttatgttaggatgcctgccttattgagtatttagtgtgtcaatccacttattatatggtatatattcatctgcaa

SEQ ID NO: 92304 - DNA, 314 bp, Zea Mays
caagattgtatatgacagatagtgaaatagttccgagtatcttttgtgtaaaggtctgttattcaagtaactaagagcttgcactacaacattatctaattacactactacatgagctctttcggctcttataaattccacctgcattacatctacttttcaccaagcatagggttgcgaacaaacatatgttccccagtacaagtgttaactcaaccccatctaagaactgcaaacataggcttcaatcagtgtccaattgattttcaatcccatctaagaacaccaaatgaaggttttgaccagcattcaat

SEQ ID NO: 92305 - DNA, 593 bp, Zea Mays
gggaggtagtgctggaggggcttccttcttccgctcagtctggcacccttggctcttggtcttctttcggattttctttgtgggggtgagcttctttagcttcttatcgtaatccatcttcagggttcggtaggcttcacgagtgttggcctcttcaccttctgctatttcgagactctcttggagggacgccttctcctttttaagttccttgacctgttgctctatgctttccacccgggagtttaggtgggtgcagtgggaggaaaggtcatcatagtggttatcgagagtgtggagatatccggccatatagacgatggtggggtcctcctcagtaggatctcttcctgacagggcctgaagtcttttcctccaggtagggctattttttgttgctaggtgggaagtaacgaaggggggtttcaaaacctctctgctgtagttttggcatagctgtcagagggcttttcgggcaacattttggcatgtgtctgggaagcagtgtccggtgaaggtgacttggaaagggggtggtttgggtagcttcgactttctcccaggtagactgccatagagcacttctcagttcc

SEQ ID NO: 92306 - DNA, 412 bp, Zea Mays
gcagcatatcaggggggcccttcatcttcgtcttcttccgccaccttgaatcgaggaaatgccacataacaatgtgagcacaggatggccggaggcagactcgacaagccttcatcatccttgggcgccacatagaaccaaaagtcccaccagttaccccacttgttcctagcacaggggactatctccacaacctcagccgaagtcttcccaatcatcgacgtgaaggtgcacgatccaaattgtgctatcttatcccctatcttcctcttctgccaatacaggcaataatttctagcgaagacctccacagacggctgcccgtcgtaggaagagactgcccagacgtacttcgcaagcgccaccactgcgttcggcgtcaactggtggacttgcacctcaaaccttcaac

SEQ ID NO: 92307 - DNA, 374 bp, Zea Mays
cgaagcggtatcttgccacgcgtgccatccaatcaactaacgatggttcggattagatccgactctcatccaaccagtgagtaaccgaggtcgcacgattcatatcccacggtttagattagtggcgttatacaatcggtatgaaacgtagaccgtaggatcaatatctcacggactgcattagatctagcatctcaatacatgagatccctcggatcccgaatcgatggcgcataatttaagtggtcgtgatccaatctcatccactcgatacggaatcgacgacaggcagttatctaaacgaatgggtacacaatgtcgtaatgacatctattgatcaacaaatggatgacacatgccaccccacactcatc

SEQ ID NO: 92308 - DNA, 437 bp, Zea Mays
gtggatggcgaaggagatggaaggtatggacactgagtctgacagggagggacgcaatcatagacaatctgggggtggacatcaggagcatggcgagcgggagtaccgtactgatggtcaaccaggagggagtggagagtatcaggatccatagggaggtaggggagatcagatcgttgatccacaaggaggggcagggagtatcggcctgttgatttgcctaagatgatgtttcccaagtttcagggagctgaacccagtatctagtttgacaaatgtttggagtacttcggtatttaccaggtgcctgaattcatgtggccgtcgtctgcttcactacacatggagggtaatgcagcacggtggatgcaggtgcacaaaaggagacaaggtttgggaaattgggctcaattcaccagagcagtgcaggagaagtt

SEQ ID NO: 92309 - DNA, 310 bp, Zea Mays
tgtcttgttatgtgcttcaaggggagatgtttttgtcagggggtttgaggttctaggagcattttgctagttgtatattcaactttcatgttgcttttatgctttgatttggctttcactactggctaggtgttgagcccttttttgcctcttcttgaggactagccattttctcacttggtcttgttgtgtcattgcacattttttgggtaccaagctttgctcattctagatgcctattctggcttttgtttggctttttgtctggcttttcgtcatttgagtgagcttctcttcttccttcttctac

SEQ ID NO: 92310 - DNA, 458 bp, Zea Mays
gacatcgttgctggccttgctgcgacgattcctgtgaaccaaggagggcacatcctcttcatcctcctcttcctccaaaacatacctactaactctagtgccaccgcaactctcaacgtcatcttcaagatcgacattcgccacgtcattaccaaggtctggagaagtggagtcagcctccagttctaagccggatgagcgccaaagctttccttttctcctcttcgtctcggtggacatggccaaggagcctacccagcgtgtccgcttgcgacgagcgctaccagggctgcaaattcttttctgtccatcgcacacacgcccgataacagcatccgcagactcaactcgagcagacctagatgactctccaactagtacattcagaactgtgttcacctcagcatcattagcaatagactgcgtctagaagtgggtctgtctctcctctttaggaa

SEQ ID NO: 92311 - DNA, 882 bp, Zea Mays
ctaaaccagaacagggtcgttcactattgcgcagagtcactgacaccaacaaaaaggcccctgcgtttctatcaatttgcaaccggaagtccccgacggcgctcgcgcaccgccgcgctccggcgagcatctacaccggcctattggggctatggctgggttctccgagcggcggacatgaaattggggtcagcctgaccatttcccctaacttaattgcactattggtgaactatcaagctctgcccgcgtgaaccgaatgggtggcggacagatgagtgcgttcccgacgactagagggcttctagttcaatttagtggttcggtgagtatcacggagctgggagggtactcaaacgaagtagcagaggaccggagctgacctgtggaggactgaccacggcgagcttgattcacggcggcggaaaatagatttgggggaaatccagaattcgcgagttctagcgaaggacggctagcgattagtggtggctgaatgcgtgaggatgtggtgaagctcacggcggggtcaatttatagagccccgaggcggtggcgctttaatttaagcggctagcggaggtggccggagataaggaagaagacgtcgcggtgaaatcgtggctaatggcgtggcaagctccccgtcgacgatgggatggcctagaggagtcacgacggcatggtgtaaagacagagccacgcggcggacgccggtgatggctcaacggcgttgaaatccttatccccgagcggagagcaagggaaggaaagcactacagctggccggagtggtttacagctcaccggcggcaagggttcataccggctgtgcatatccgatgaccaccgagcacgaattatgacgagccgcgatcaacg

SEQ ID NO: 92312 - DNA, 399 bp, Zea Mays
tatgttgatgatattgttatgaagttaacgtaacgcgagtgggtcgacacggatttaataacgtgtgcgaccgcacggaacatcgtaaacgacgaacgtggacgacacgcggatcagcatgtaaccacgtgcaaaacacatgcgcgacacgagaggatcactaacaaatatcgtgtttattataaacgagtgataattcagaacctgcgagttgacattaatcacgctacgcatacacctagaaattacttaaccccacaaatagactccatctattctaccagctagaacacaaacacctagcatccttgcattttactctaattcttacgtcacacaaatgaaaagccacctaaattacactatgcgtatatcttagacaatttaatttcttttgac

SEQ ID NO: 92313 - DNA, 437 bp, Zea Mays
gatactccaactccttttaccagttagccaaatctgaaaaggaaaatttaattctctcgtttttacgtatttcttcgggaatccctatattatataatctaccataataatcaacaatctataggttgaaatacatgctataggttcgtgttaccacatatgtctttactttacgtgatcagtgtacagtttacatatgtcgggaagaaatcgtgagagtagacactcttagttctaaactacaaacttaggtgcgtgtccttgccctttgtggatatgaccgacctaagatataatcatgtggtttatattatttttgaaggaaagttgtttatatggattacatgtgttgcatatgtatcaaatattgttgcttctgcttttgattaatgttctcaaggggatgacgtaaaatcaatgctagccactctttcttt

SEQ ID NO: 92314 - DNA, 477 bp, Zea Mays
ggaatgaggatacgggatacctgaagacaactactacttttgtcagtgctgcatctcctgatcagcagcatctaataagaaaaggacagacagaattagcaatactaatctggagtcccaccggaccacaaaagcaaccacttgtttgcgcatgtcaagtaggccagggcaagcagattgtttgttgcaggtgacctaatccagcggaaatgtcttctgatggcgactgcaggagatggtgccagaccacaattcatgtgtcatgagtaattcagctcaggacatgccaacagagacagtggcctccagcgaggggcatccaacccaataaaacaacgttcaagttcctaatccgagacacacatcggtaaaagtagggggtgttgaagatctatccagttacagtgctcacgtatgcgtaaagcaagcccaagtgctaacattcaagacaaagcaaggccagtgccctctgtacat

SEQ ID NO: 92315 - DNA, 738 bp, Zea Mays
cgctcccgagcgacggacaccaaatcggacctaccccgagcatttcccctaacttaattgtgcaaatggtgatctattctcttctgttcacgagaacagcggagactacggacatttgatcgtgttcccgacgattaacgaggttctagcctaattggatgggtcagcgatcatccagagcaagtgagaatgccgaaacaagaacgcagatggcgagaagggacctgatttgggctggccacgacgaggtgttcttcgcggtggcagagacttgatttgggggaagtttgaaattccaaagctcgggtgaacgattacgagtgggagtgggtgctaaggcttcacgatgacatagcgcagctgccccggccatcaatttatagagggcatcgacggtggccgagaatttgaagaaggatgcgcggcggtcggagataagaaaggaccctggcgccgtgggttcgtgtcctcagtcgtggcgagctcaccggcgatgatttaacgactgtaaagagtcacggtgacgcgacagaggtgctcggatacgtggcgtaaggccgagcgacggcgatccccggcgggcttatctgctcaagccgcacggcagaggggaagtactgggggggtcaccggagtgctgtccagcgcatggctttaccgagcggtcttatctggtcaccggcgacgtgaatcgcaacggcggcggtgtgaatcttgacgcggaggagtcgccggcgg

SEQ ID NO: 92316 - DNA, 310 bp, Zea Mays
aacagaactcgcttgtccccaagcgagggcatcaggaaacctgtttttgaccacataaaaatcttcccaagttgctgaagaaacaggcaaacctgaccatttaatcatcacttgaggtactgcatgattacccctccgaaccaaccttctgtccacaatttcctcaggccaaatccctggaccagacaaatctgccaccttgggaagctcagcaaaatctggagtatgtttagggtgaaatgcctttaactgggatacatgaaaaatagggtgtatctgtgcattttctggcaactccaatcgataagcc

SEQ ID NO: 92317 - DNA, 1174 bp, Zea Mays
atgatttatcactactagaaacataagaaaacttcatggaattaccttaaatgcaaggcattgaatttcatggaactaccgtaaacacaaagcatcaaatttcatataataattgattgtctattatacaaggatgcattttcctcatattatgcatgattttcttttgcaaacatttgtgtggtgagcacgcatgcttgtatgtaattagtgctttcctaaacggtttcaggcagtcgttcaaacctgtccaaacggtgaacggaggaacaccaagttatttagggccggcagtcccctaaatggttgacccgtctaaacggtcaaccatcggtctaaatggccaaaacggaacatgtcctggatagagctaaacggcgtttagcccgtttatcaggctgttttcttgattgggccaaaatgtgccaggctaggtcgtaactagggcaatgtatgccccgacccagctgtagccacccatctccaaaactctaggtcacaaagtcaccatcatccaggtctgggagttctgacggccacccagctcatccacggcgtcgccccgctgctccaccatggcgccgcccccctgctccttcctccacgcccaaccctgctccaccacgatgccctcgcagtgtttccaggcctgcgcatgctcagcctctgacaacgcgctcaccgacgtgttcctcaacgtgtctacgctcatcatgctcaagatgctctagctgttgtggaaccgactgtccggtgccatccccgagggcacattcgagcccatgtgcagcctccgcaagctgcacctcacctccaacaggttctccagcaccgtcccagagtcgatcaccttgtcacgactgctggagctatcgctcgccaacaaccgcttcaagggcctgctgccggacttctccctgccggagctcaggttcgtcgatgtctccaacctctccaaacccatttcagtagggctcagccgcttcaatgaaagcatgtttgcaggtagcagaacgatcgattcatccatcgatttatcaatttatgaaccattgctttgtttgtaagaaactaagaactatgatatgtttgtggtgctttgtttgtactttgtaagaactatatgtggctatgtttgtggatgatctctaatgtgtcattttattgctatttc

SEQ ID NO: 92318 - DNA, 349 bp, Zea Mays
gggaatggcattctataagctgctcaagagggtggacatattacagtggactctaggggcacatgaagcattcgaggcactcaagaagttcctgacaactctagttctcaaactacccaactgagcgacttcagatcagctagctgaagagctactaatgtacatctcgtgcatgactcacatggtgagcaccatgttggtagtcaagcgacgagaggaaggacacatacaagctactcaatatccagtctacttcatcagtgaagtactagggccatctaagattaggtatcctcaagtccagaagttgttgtatgtcatcctcctcaccgcacacaagctataccac

SEQ ID NO: 92319 - DNA, 568 bp, Zea Mays
gacgcattggccaaggctgccgccagaggcgagtccctgctctccgatgtgttctaccatgttatcgacacaccagccgtctgcagccccgaagggctccaaataaccaatgacagtgagggccaccgcatagtcaaccttattatgaccgaagactggcgggcaccaataaccctgtttctacaggggtactaccatccaaccgacatcaacgaggccaagcgcctcaaacatcgaagccgggacttcgcgctgattgaaggccagctttacaagaagggggtcagtcagccaatgctcaaatgtgtcaccgagaccgaaggcgtccaaatcctgcgcgaagtccacagcggtacttgcggctctcacgcagggccaagggccctagccgcaaaggtgatccgtcaaggtttctactggctcgctatgatctgtgctgcaaatcgggtcacaaggtcctgcgaagcctgccagaagttttctcctcgatcaggcagcccttcgcaattcacaaaactaatcgcccacacatggcctctccagcgctggggcctggacattgtcgggc

SEQ ID NO: 92320 - DNA, 528 bp, Zea Mays
cagtaaacaattccgaccgtcgtaccaagctcaccacggtggaatccgataagcacgccggtgaccgccgtcttccgactttgtgccgcgtgtccaggcattttcacagcatcgccatgaccttctcttgctctctgttgattaccggagtgactgccacggcgtaggacacgaattcgttgcgccagtaactcttcccctctccagccgccagcacttcctagccaaattgtgcgccaccgctgttgcgctctataaattgaagcctcctagagctccgtagggtagtcaggcatccagccaccaagtattgtcctcagttgatcaccagtgagcgccaatttctaatttcccccaaatcgattcatcacaccgcgaagaacacctcgacgtggccagccacttctaggtatgttcatgatctctgctctcccgtttcaacatccttaggttctcctaatgctcctcaacccgtttaattgagctagactgccctagatcgccgggaacactcctgctcatccgttc

SEQ ID NO: 92321 - DNA, 381 bp, Zea Mays
ggaaaccgtacgagtgggttagctaaaaagtattatctgaaaaactgcgaggtaggaccatggagcagcaagatggaactatcacaagagcgcagctgaggggggtagtttctctttataacttgtcgtgcatgtgtgcagaccaatagtccgggttcatgggggcggaccccaccgggttgtcatacatgtatgcgttatctagtcataagaaaaggaaacagactcgaccccttagtcttgctctatggatagaacttacagagatacttggtctcggggtaaggtgctcctccagtcgtaggtagatggttccccttgggtcggtgcactcccgttaccttgaagggtccttcccagctgggggagagttgcggaacc

SEQ ID NO: 92322 - DNA, 373 bp, Zea Mays
tgacagttgccttcggcgctcgcggcaagaggaggttgaatagagtatttgatgttattgggttcgtttacccggactaccgctatcccgcccagaagaaagggaggaaaaggaaagccgctacctcgacatctactggtgtgtcgaagtcaaagaaaatctaagttttaacacgtagacccaggcgcatcgagacgaccgatttgccgaagttaagtgaaagggtggaaacaacccccctagccatagagactattcctgctgtgtctattgaagttatcgcagacccgggcagagagccggagctagaaaaggtagcagaaaaagtaccagatcaaccgaagatgatggtgacagcactgctgaagctgtc

SEQ ID NO: 92323 - DNA, 566 bp, Zea Mays
tttggggaatgcatcgatagatgtttatgcgaaaatgtattggttttatgcatgtgattggtgattgtgatagtcgatacgattgaggagtatgattggtcctgttggagtcacttgtgttgttgttgtcttgcgcgtaatgtggggacacgtatgtgtgtgcgtgtcgtggtgtattatagtagtggttgcgtaagatatttgattgaggtgtgcgggtatatgctgtaatatggttatactcgcgacaaggaaagaagtatatattgtgtaacacgacgtttaggttgttattgtataatcgtgtgaaggatgctcatgatggtcatgtgacaaagggtggtgtagtggtgaagcgagagataagtttagtatttttaaacggttagttgatagcatctatcgatgtcgtcatgatttttgttatatggcggatcgatgcttcgctttatcaatcattacattccatgcctattggataaataaatgtcttgttgatcgattagaggtctcatatgagcattatcacaacccaataattattagaagcaagtagcgttcataag

SEQ ID NO: 92324 - DNA, 369 bp, Zea Mays
ctttagaataggaaggctatctcatacaaggaaattccctatgtcgagtaaaatagacaggatctggtttccccaagtctgaatttgaaattaatttgggaggagaaactttcgatgatgaaattggataacaaccagtcataatctatgatgaatgacagtcgcatccaaggcctgattgaccacatcgccaagatacaatggtggaggcggcctagctagaggcccaatctacggtctaaccactgatgaagatgcggaatgacccactcataaggatgcagaacaacccattaatcaattggaaaactttcgttagaagactaggcatgctacggtcgacagcatccgacccaaacaacatcgccc

SEQ ID NO: 92325 - DNA, 713 bp, Zea Mays
attaattttgtattaaaaatcaatttctataattaattcactaatttctttgatttctgtactacgtgccaattaaacagaaacacaggggccactgcgcaagaatttccagactaagtacacagtggcactggactgcgggttggtttccgataagctcaggggctattttgcataactacatggctggatcggtatgatgttctctcgaccgcgcgatcacacgcggacggtgcggattatatcactctctccacgaaccggtacgtagcctagtcccttggatccgaactcgacggtattgattttaattgactgagaccctgccggatccgcccgatcatgatccaaaggcttggatcgaccgcactaagcgacacgcggcaatagatcagagttgtccatcaatggatcgacggcccacacgtgcccccaatctgacctctacttgatctatggtgcagatttgatctaaccaatcggctacatgttctgatcccagccgtcagtgtcggatcaaacggacagaaggccatcgtcttcctccaagtcgcggcgcggaggaatcacagccccaactgcggcactagccggtgagcaccaaccaaaccccttcccagcaatcgacagctttctgaagacccgacgatgctccccgccccggcgcaaaacccctcgcgcggcgttaacgcgaattaggcagcgacggcgga

SEQ ID NO: 92326 - DNA, 359 bp, Zea Mays
gattaattcggtcggtggcaaagtgcaagcagataaaatatgctcaaatataagggtggaaataagggggatagggttccccagcgatctaatagtaatagacacccctggggtagatgtcatcctagggatgaattggttaatgaagtatgaagcaaatgttagctgtgacaagaggaacgtaacattgaagtccccgcccggagaggaggtagtggccgagctaaggatgcctaaaacagcgaaaggagattgtcaccagatttcggttgatagcaaggaggccaacccgcttgaggctatcagggttgtgtcggactttccagatgtgtttcccgaagaattaacgggcatgccac

SEQ ID NO: 92327 - DNA, 643 bp, Zea Mays
tttgtggcggcctcaaccgtagtgcctgccgatgataatttgtttggttctatgtctgattattttgagtccgatggtgaatctaggagtttgtttccttggacggaggagtcctcggatgaaggcttggattattttgttgcgttggatgtggctgcggcggtgacttcgccgtgtatggagggtgccggggatcttcctagtgtgggtgtcgggtgtaggcggcgaagggtggtgggaaaacatagtgtgggtgaattttcgcggagtggcaggtgccgtcgtatggggatggagcgtggccgtctccgtgtaaaccgggttgataaatgagaattgttgtccttgctggctggggcgagcataggcgagggggatcttcagaagctttttgagggtgaggaattgaggataatgctgtttaattacagggagatgggtatcattctgaaggttgagccgatgtaataggcgatgccctcgccgtgtgtatgtaataggcgatgccctcgccgtgtgtatgtaattgtaatttgtatggtgatgtggcatgttggccgtattcgtatgcttgtgttggtccatctgcatccgtgggcgactctgtgcggagtgtctttgtaatgacagacttcgattaacg

SEQ ID NO: 92328 - DNA, 668 bp, Zea Mays
cgaatcccaagctcgatcccagagtgagccacctcgtcgccatggtcggtggagaaaagattatgcagggggagaaagaatgtcaccactgttgccccgtgttctaggcactgttcgggcttcagaagaaggtttgggtgacgagggagcttgtggtgtggcttcggggcacctcaattcaatgggggagcctgggactcaggggaatttttgctggatttcgtccctggtcccaagagcgtgcctctccgtggtcgcgaacctctacgttggagacttcggtaagaacactttcaccaatctcgcctttgtctttgctccatttagcctctttcgtttagtgaaggagccgccataggaaccgaccacgccaccggcgtgtgctcgggtagaagtgaggaggaaggagaaagtgcgtgctgcgttgatctcttgaccaacgaccgcgattagacgagaggtatcgtttcggccagggcaatctagtgcgttcgttggcgatcgtgcggacctggggcgatcgcaagtgtttaaagtctgagtcgtagatctctgggcgtgcggtattaatggcgtaccgattcgggatgtgggcgatctactctgggcccttggttcttgatcaagtgtctccagatgcatgataccctcttcgaccgcttattttg

SEQ ID NO: 92329 - DNA, 398 bp, Zea Mays
gttggatacaaactcagagaatggcctaagtggtggcaggttccatgcagaataggccacaggagcaccagcatttgaaaccctgcccctcaggatcatgtccagttgactcagcagatcttcagtgggaattcttccgtttgtgattcgggtagaatcgttgacactgctatacaagtaagctgggtaggttctgtcctttaagggttgaatgttcttgaatacgaagtcagcaactacagcatcagcagttagacccccatccttcagcgagcagatctcggcaagcagcactttggcttctattatctccgaaggggttggagattctatccagctaggtgtgcaaacatctgactgcctccctgaccgaggagggagagatttgcagtggttct

SEQ ID NO: 92330 - DNA, 397 bp, Zea Mays
catggacaccaggagacgtgagtacgcgacaatggtcaaacctctagaaagagcatcaaaagaaataacaagccagcaattgacacatcatacaccaaggtaaatattgtgtccattccaatgccagacacacaattataaagataagagtaaagtaacaaaatatttaaacgattaaaaaatacagcacaacctcgcctcgtagagtgcgcacagcatgtcactactcaccacactgcatgcgtattctaggcagcacttcaccacattgtcatcctccttagcggatgcagtatcgctccagcaagcaacaacatcacaaatgaggtcaaattctggagacagcagatcgggtcacccggagaagtaccatcaggatgtgcaaagtcaaatgggg

SEQ ID NO: 92331 - DNA, 395 bp, Zea Mays
atatcttcatcagctcacccccgaagctttgattaaaatcagagttttcatctgggcaatgaggagccaacagtttgaaccggacgttgactgcttctgcaatatatatgaattatcttaccagacgaaggcgatggggaaggagcaatatcataacaattttggttgctactccttcgtataccgctctgatgcgagatgccttgtcctcacgtttcggaagaaatggtcaagatcttggatgaggcaatggttttatgttaagaatgatttggttgagagggaggatgtaaaagatataattcagtgtccaatacaatcacgcttcggcatccaaaggccctcgattgtgaatagtgataaggctcaaccctgcgtggtagccttcaacactg

SEQ ID NO: 92332 - DNA, 500 bp, Zea Mays
gaaggttccttcgcctaagggctcaggcaccaaccgtgtaggatgacattgtcataaaggcaatgatcaaggggcttcattcatacctagcaactcagtacgttgcaaggaaacctcctcactccttggagaagttgatgtagaaaatggatgaatacataaaggcagacaatgatttctgccaaagaagggaggaagtgcaaaggtatgcagaatttgccaggggcttcggaggaagattccatcctagacatgtctgaagcatacataacccaactcaaaatgaagaaaaaattgcctagtctcataggcaatcaagtccacatcaacaagatctagtgttggcacagttataagccaaaagagagaggagtgttgctgggagatagagctagcaagatcttgagcaggtagcgttactctaccagagtgctgttaggagttgtaaacaatcgcggctcagctataaccttcatcaacatagtggaagacttggtcta

SEQ ID NO: 92333 - DNA, 404 bp, Zea Mays
gtcaggagagagaaattgtcattgtttatcgaacgacgaatattttccacccttttcaatcaaatgaacctaagagcttccttgcaaactgggcatgggaacttaccgtgaacacaccaggcacaaaatagcccatacgccgttaagtcatgcatggagtactggtaccaaacatgcattttgaagtttgtcttcgtagctcggtcatacgtccataccccttcctcccaagcacgtaccaattcatcaatcaaaggctccatgtacacgcccattttattccctaggtgtccgagaattatcaacgacacgaatatgttctgcctttaaaagcacacacccaggggggagattgattgggaaaataaactcaggccaacatgtgtaaggggcagcgctcattc

SEQ ID NO: 92334 - DNA, 529 bp, Zea Mays
caaagctataatcagtgactaatatgcacacaacaataaagacagttgttttttctagtgagaaatcgagtactgtttttacacagctatagcgtctgtgaatttgacagaaaagcaaggtgaaaagcccactacgcggtaggtcgacattccttcttctttccaagcttctggtggtatctatacctttcgagaccaagccctgctacaattcattgctggaagagactgctagattgattttgaatagttcgcttcagggttgtagataatgctctatcaaagagcaccagcgtacgtgctcgaaagcgttagtcaactagctacttgtccttggttttatctagtgtgccccttcattcaatctctaactcaatgtctacccacatacctttcctttctgaatcagagctttgcttacacatctaattctacatttgacccatttgacagatattttctaaggctaaaatcacacagttcttatcccggcatcttacttactatttttaaaacgactactctttcc

SEQ ID NO: 92335 - DNA, 837 bp, Zea Mays
atctatggctccacccccattaggatcatatccatatccttcacctatgtactcttcacatagtggttacccaccatctggatatccaacatataatcaaagtgcttacccatcaatgggtggctatcctggtgctagtttgcatgctactcaacatcatggtacgtgtgtatttattatttttttcttcctagagaccaagttaagaaggataactaatcacatgattaagtgtgtcaattcctagtatttgaattggtgttttacatattaacattgttagattaaggtatcaaatattatactatataagtcttgatcatgcattcacttttgtttaagtatagtgtgacatatacatatataacttgataccataatgttgcatgttcataggtaatggatataacatgggggcaacgctcattggtggagcagcagccgccgccgccgctacctatggtgtacatcacttaacccatggccatcaccctcacaatcaccacttaggacattttggcaagtttaaacatcattataatggacactatggcaagttaaagcatggaaaatttgggaaacacattgggttaggaggaaaacatggccttctagggtggaagcatcaccgtcatgggttctttggaggaaaatacaagaggtggaagtagttaaaatatagggaagggtatgcaattggatcctgcaagtatgataactaacatatgtaaaataaaaatggttggttcgtgttaatgctatacatgcatgtaatgtttttataaattacttgttgtatgtgtcattatcaatctataataagaatacatactttgt

SEQ ID NO: 92336 - DNA, 373 bp, Zea Mays
tgcgcagatgagaaacttcaaatcaggatatatgtatgtaactgaagacttgtaccttcgttataggatcaaaaagcaagcatgtcatcagagttgcttgatatttcctgtacaagcaacaaaaagtaccctcagatagtcagacaatgttaaggtgtgagaaaagctgtactgttgtacgagtaaaagtttacctttgttggagaacatcattctcaggcaaaagtactggccattgtgaagtaagtaactttggatcagcatggcagatatcctaaaagaggtgggaacaggatagtgagatggttacttcagcagtatgagcatgttgaaatatttgatgttgcattcgatatttgatatcccacatggc

SEQ ID NO: 92337 - DNA, 663 bp, Zea Mays
cctctagaattgatgcagcaattggcgagtgcgatgtctgttcaacagatgaacactccacagatgcaaataattccagtagctcaaccgccggcttccaccgattgtacgaccgtcccaagctctgtcgcatcaacgggaaataaggtccgctatccagttgatgacatcacaaggcctatggcgtgcacactagttataagatatggtattaacaatcatcgtacgaagaaagtagccacatgccttgcgatcccaggacgcaagttccatggaagcgacattccagaagattattgcagggtagaagtgacgacggtcgtccaaggatacgaggaaaacatgctagacatccctgggcctgaaggtatcgagacacttggacaagctatcaagaatttcatcctttggcctcgaagggatgtcgaattggttgatccacaacggcagtcgtcgtcgcaggcccaaccgtctccgcctcctcaaactgctgttcctattgtacatccatcatcacctcctcaaagttcacatgctgctcctcatcctctttctgacccaccgtctccgccacaagcatcaccattcagggctccaccttctcctcatcctcatggtgacccactgtctacgccaccagcaagggatccaccttctccacag

SEQ ID NO: 92338 - DNA, 475 bp, Zea Mays
gtcggagttcatatactagtagtttatgctacgttgatcgaagtgtctcgggtgcacaccataatatggttgtatgcgagacaggggaaaataaagtgtgctcgacataaatgtttggtcattgtaggtagaaattgtctcggcttaagtagagatgtgatgacatgtcgtaagtagtcatcacttcctctataattataagtcgagtctatacgcgttaggcgttccttaaattgtgcttcacaaataagtgtatgattgtgtttatgacttgaatagatgttttcaagtgaactaataagttcccaaagcaattatgtgtaaggtgtttatagtgacgctttatcccgaaaggtgttaagtctgcgcataaataagagataagtgtacattgtgtagtgtggatcgaaagtcgtgaagaaatgtcgcttagctatgtgttaatcttgttactctgcgactcggtataaattgc

SEQ ID NO: 92339 - DNA, 663 bp, Zea Mays
tgccagagaaaaccttccattttacattactataaaaagtaatgatacagactcgatattacataacaggatacattacccattatacaaaagttcaacctattatacaacagtacaccctacaatacactactctacttctattacaccattattcctgctttccattactcttggcggcctcatcgtcaggtgtgggagtccagacgtcatccaacctcaaagaaggagggggctcaaaaaggtctaactccccacccagcgcgcgtcccgcaacgtgagatggtccggcttccgcctcagcagggtgtgcaggcacactagggtgtaattgtgagtatagtatatggacttcctcatgcaacgtattgcagtaaacctgcaggttatcgacagttgagctaagttctttaattcgggcctgagcccttgcttccttagcacacattagcaaacgagactgtacggcccagtcaagtgctaagtctcgatcagcaagctgatcctgcagatgtcggatgtcccttctcagttcattgattctatctccgtcggtgacccaagcatcggtcctatgttgcagcgctgcttgaagtcgactcactcgggcttcaagatctccgatggggtcattacttccactactgctgctttcgtgtcggg

SEQ ID NO: 92340 - DNA, 492 bp, Zea Mays
gataattttgctcatgaggcctgagtgctcttgacgcgtaggcaatgactcggttgtattgcatcaaaacacaacccagtccagtgccagaggcatcacagtacacatcaaatggcttgctgttgtcgggttgtgctaacaccggtgttgtggtcagatgttgcctcaatgtgtggaaagcatcttcgcacttctgaccccaaacaaacttggctcctttcttcaacaattcagtcatgggcttcgcaattcgagaaaaatccggaatgaatcttcgataataaccagctaatcccaaaaaacttcgaatctgacggacagttgttggtggcttccagttcatcacctcttgtaccttatcaggatcaactgctatgcctgcctgagagatagtgtgacccaagaatttgatttcttttagccaaaaatcacatttcgataatttggcataaagacggtgctctcgtagacgttgaagcactacatgcaaat

SEQ ID NO: 92341 - DNA, 434 bp, Zea Mays
gctacaacgacaacaactaggagggaagtgaaggttcgtgtctcatggaagcgtcactaaaatgccccttatgcatcgacagtgacaacgagccaccggtaaagcgcccaagattagtatagataggagcaaggtgctttttctagatcttttgtaaggctggtgcgtaagaacaaacacttgatctactgatcttctacttgtaaataatggaattgtattgaaattgttgttgttggtcatctagttgtgctcgacaaggtttactccatccagctcatgtgtctttgctctttgtttgagagccaatgaaaaaaccctaatccaatcagtttttcatattttgtcacgttaggtgatcgatttgtttccttttatcggcaacttttactaccaacaccgtgtccgagttgtgttccaatttccaaaacgac

SEQ ID NO: 92342 - DNA, 467 bp, Zea Mays
aaattaaaagaccttctagggggaagcacgtttgaaaaaagacggatggaaacagaggaaacaagcccaggaacgatgacgaaacaacaataaacatggactcgcgccatgtgcttgacgaaccatcgcaggaaagggtccatccttcactacataaacctccgagcaatccatgcgggttactctagggctgaaggactgcatctagcacatgcgctcacgtgcactcgagaaacaaatggactcgcgcccgatgcatgacaaaccatcacaagaaagggtctgcccccttcccaacctagctaaatcatgccattgaaactgactatgtctaacctctctccaatcgtcccctatatatctcttcatatctgtactttctaatattttttactacctctgctaaaagattcacctcctatgtatagttctctccaaccattccctatatacagttctcactgtac

SEQ ID NO: 92343 - DNA, 439 bp, Zea Mays
gatatcacatcggacctaccccgagtgcttcccctaacctaattgcacaaatggtgagctatcaagctctgtccgcgtgaaccgatgggtggcggacagttgatcgcgttcccggtgtttggggagcccatagttcaaattggtggttcagcaagcatcgtaggcatgcgagaaagcttaaacgagagagagagcgatgagctaacctggaaagggctggccgcggtgaggtcgagtttcgggtggcggagaacgaaattgggggaatgagcaattctccggctatgggggctaatcggaggcgggagtgggggctatagcttcggtatgacctagcgcagctggccgagggctcaatttataggcggagcgagcggtggtcgcgaattttggacgagacacacggcggtcggaagtgaggaagaacggtggtgcagtg

SEQ ID NO: 92344 - DNA, 333 bp, Zea Mays
acatcggctcacccacccaccgtgttgcacggtgctttagttctgcattttgcggctcgccctcatctagttgcccccatcaaaactctaacgcctaaccatagtagggtcattggctcgtgcctaggcctgggtatactacacttggacatgcttccccacctaggccaacgcttgttgcacaaactcggccaccactaccacctggtgcactgactcgaccaccgcttgcattgtcttgaggtttaccattgcctgcatcttttggtccatcaccaacccattgcatgcatagacaaattctcagtcttcaccagtatcgagttatagtct

SEQ ID NO: 92345 - DNA, 428 bp, Zea Mays
gtaaaaaaagtgaggtgcagacggtccatcggccccggtcggacggtccgtcgaccccacacagtaatacctcaagctctgcccttcttaacttttatacctgtggacggttctgcacctaggcacggatggtccacaacctaggaaaatgtatggtctgtgacctaggcacggatggtatgaaatacaatacctagaacacacaagtccctgtgcagatttaatcaagtcaattgtggactgtttttgtcccttagttggatggtccgcacaacacaccagggacataaccaaatcgaggctcttctggccaatactaccgaacaacccgactgctaagcccagctggtccgcggtacaaaacctacaaaccacacaaaaatgctttaaatctgcccaattttctgttagccttgtgaacagtctag

SEQ ID NO: 92346 - DNA, 404 bp, Zea Mays
atttccaataggggacatcctccacaacaaagaagccatcggaaggatagccaagtgggcgtgcgacttgggagctcatgacatagagtttcgacctcgcacgacaatcaagactcaagcgccggtcgacttcatatttgagtggactgaacatcaggtcccagacaacccagaggctaccgaagtatggagaatgtactttgacggctcgctgaagctacagggagcaggtgcagggatcctcttcattgcccctagaggtgaacaactcaagtacgcactccaattattgtttccagcatcaaataatgcagtagagtatgaagcactgatccacgggttgaacatcgctgtatcactcggtatcaaaaaattgatggtatatggagattctctagtggtca

SEQ ID NO: 92347 - DNA, 454 bp, Zea Mays
gaagactgaagatcttcaacgagagagaagggcaagtttcatccacaagtgacagaactgagatcgttagcggttgatgcctactcaaaccaagaacaataccaaaactacaaaggataggttgttataataacattccttttaataaagtggggagggaatctggcacgcagaggtgtccacgtctgtaaaccaagaacacttttatataaagctgcatgttaatgtgcttggctatgatgcatgactaatcacatctagaagacatgtggttttggcaccgcgaataccccgccattatttatgaagataatgcatcatgtgttgcataaatggaaaatgagctatattgagagcattatgactaacatatttgtcctaagtatttctatcctcacaaactctagaatgaagatgaggtgaaaatcttgcaagtctaagtcttatgataatc

SEQ ID NO: 92348 - DNA, 841 bp, Zea Mays
cgagaagtggtgtactgggcacgtaacaagtaggcggagcagggtgtggctccaatttatagtgaccattcaagtgtttcacgaatttggggaggggataagcttgcggtcggagcgaaggtgagtcactagagttcgctcaacgtgacatttactagggtagagtcctggggtggtaactaaccatttcgcacgataccatgcgacgtggtaacatggtcagtaacgtgtcgtatccagggtaatggcgacggccgcacggccacatcgccgggcaagtgggtacggcaaagctgcctctatccactctccttcgcatctttttaccccccccccccccccgcgactatccactcaccacacaacacgaattgtagcaccagtgcagatcacggcgcggagatcaccggcagcgaaattcactgaatctggcgatcttgttcagtccactgttcaccactgaacaccaccccgagctgcctgacagaccaagtttgggagcaatttactccaaaaattgtacagcaccaggccaagcttagtataacaagtttgttcactaatattagggcttcaattttgccatagtgaccctggtcttaactccactgaatcaatcacaaactatcttcaaagttgatcaaatgtcactgaacttccaattttcagaactgaagttgtctgatagcccgactttaggtccatttctctccaatttccatatagttccaaggtttagccatttaatcaaatttagactataatagtagctctacaaatttgttgtagtgaccaatggcaaaatctccatggattaagagatacagggtcccaaagttag

SEQ ID NO: 92349 - DNA, 421 bp, Zea Mays
tgcgaatagtgcagtctacaatgtagaacaatgaaaaacagtgtttttgagtaaactttagattgacggctgcagacagagtttaaatatgtcgttgcacgggctaaattcgataggtaatgcatagctaaattcggtaggtaatgcatgggcaaaccagctgcatcggagttgtgttgcacagagcagtgttaacctcaaaactcgataggagatcctttccttttagagtttagggtttatggtgttcctgatgcctcgtaagcctactactcacatgacactgaatttatcgctgtcaaagagtaaccacagctactggtgtctcactacttgaggccttagcattcctcaagagctctctctatatatggttcaacacatacgtacttgatgacatatttatttgcatagtgtgccc

SEQ ID NO: 92350 - DNA, 651 bp, Zea Mays
gaaaacattcatggaggcaagaacattagcaaagattcaggtagtatatctttttgtttgcatattgtttgacaaaatagagtgaatgcttacctctatgttacttgttaggttctggggaccaattaccttaacacagtattagaagctgttgacccaaggtaaaagtgcatcaagtcttgtgcaacatttgcatctttagctgcttgaatgattgctccttctgcagcaatttaccagaatttttaggcggaacttgcacttgtccaacaggaggatgcttactccaagataaaggaccctggactgacccagaaatgattcgtgcttctaaggtaaggtatgtttcttttataggtcatttgaaattttctgggatgctgaaataaaaataataattgttggagtgaatctatttgtgatttttaggaagcattcggtaaaggtcagaagtctttcaatgaattggctgccacaattgcctgtgaaagctttacaggttgtcaggtattagggtatatactgttattattgttctttgcactttagctttaacagttaagcctttatcagcatagacctattcctatagcgtggttgtaatattggtgtgtggtcagcagccgttgatatgagtgtattaagcctttt

SEQ ID NO: 92351 - DNA, 514 bp, Zea Mays
ctcatgtagtcatttccaaaagcacgacgtaaattgggttcctcgatccgatacgatcttctttggtactccatgcataaaacaattcttgacatgtataactctgctaactgggctcctaagtaagtggtcttcacaggtataaagtgtgccactttagtcaacctgtccactataacccatattgaatcatagccatcccgagtacggggtagtccaactatgaaatccatactgatttcttctcatttccattctggtactttgagaggttgtagtaatcctgctggtctttgatgttcggatttaactcgttgacacacgtcacatagtgcaacatgagtagccacatctcttttcaaaccgtaccaccaataattttcctttagatcccagtacatcttagtacttccagggtgaataagctgagtcatgggcttctcttaagataagttagcataggtgctcgatttctggtacacaaattctctttttaaaccataatgtgccttga

SEQ ID NO: 92352 - DNA, 891 bp, Zea Mays
aattctctatgataagatgggggaacaaatctatcgcgcatagctaccttaagatctttccaagtcgtaggtgctctaccatccccaactagaccagtccaccaaacaatagcaaaatctttaaattcactagtggcttgtctaacttgatgtcgttcaggtacaaggtgggcagcaaatttctgttctatcatcatctcctaatcaagatatccctcagcatcataatgacccaaaaaaagatggtatagaaaatttaatcttagcataagggtcgtcaggagcacgattgttattaccttgctggcggtgtggcataccttctgtgttttgatgaagacgacgacgtaggtgcaaatctctggtggccgcttcatcataattaccttcttcatcaaacaccgcatcatcgggaagacgtggacgaggaggtggtggtggcggtgcttgttgttgcgtctccaacatagcaagtatgtcgatgatctgggacaatcgtcgatctagcctctcgtaagtcttgccaaggttcatgtcaatgaaggcgtcatgcactgacttgtggaccatctcccccatttgctccttcaggagcttgttgtttgcctccagatcttggcggctaacacattcatcaaagtctgtagggatccttgcttcttcttcgtcgcctgccatcgaaacacaaaaaacaggaaacaaacggtgacagttatccctaataatttcactacatgctcctctcaggtggaacataggaacacactctaatgtatcttaccaagctcttacaagtgtctgacgaaatacaagcaaaggatggtacaatcggaggctggttcgtgatacttaccaagaggtagtgaaaccacgattgcaaggtcaaatctg

SEQ ID NO: 92353 - DNA, 439 bp, Zea Mays
gccatcacgccaaaactagttgtttgagtttgagttgacaaatccgacctagccgggtattcaaaccgactagccgttggcccagaagttggtctggtcgggtttgtggttggggctaaaattttgagtggagttttacttactctctcttactcttgggtttatctgaagcaccattttgcatgcctcgatcttggtgaaacatccctcttgatagtgtggcaatactcaactcacaaaaaataaaaggatctgaaccaccatttgagtttttcttcaattcaatcttggttgccatttttactattgttattttgagggtcttcattacttcaacttcttgagcttgtccatcttgagcatgtgagttgtgtcgaaggtttcaagtcactttgaatattcgattgatcttctacattgacaaccatcacttgattag

SEQ ID NO: 92354 - DNA, 304 bp, Zea Mays
tcattatgatgctgaggcatatcttgattgggagatgacagtagagcaaaaatttgcctcccatcttgtgcctgaacaccatcaggttagacaagccactagtgagttcaatgattttgctatcatttggtggactggtttagtgggtgatggtagagaaccaactacttgggatgacctaaaggatgctatgcgtgatagatttgttccccccatcttatcatagagaattgcataagaaactgatgcgtttagatcaaggggataagtctgttcaggattattatggtgagcttcaaaaggg

SEQ ID NO: 92355 - DNA, 271 bp, Zea Mays
ttccggatgaatggtgatagaatgttggatggtttgttttgggccttaattttttgcttgctcactgatggatcatgatggaatcttggatggtttgtttctgatcctgtgttgctttgatatgctgatatgttgtggtggtctggtgatgaagtttttggctccgcttgtgatttaaattgttgcctgatgatcagttgatgctcttcaatctgtagtagttcagttttcctgtataaaatgctgcattggatagttggtcatgatctat

SEQ ID NO: 92356 - DNA, 498 bp, Zea Mays
atataatcgagagcttcggaagatgcttcgggaataggaatggcagttttttcagacagaatttgttttgcagcttctttttccgtttcttcttttccgatttccaaggatttctccttagcgagctctgaaggcccagctttggtctcggcctggctcttggcagcttcggcttcggatagttttgcctcaatttgtgtttttgaagcttcgggagtctttttcggagtagagcttgaagtttttatcatttccaacacatatagtacgttgaccatcctcttcctcttgggagtcgttgtaagatccttttctgcctttggcattgtcacctctgccgaagggcttataacttctaatgtctttattttctcgacctctatctcttcaatgttatcggccttcagctcatctaatttggccaatgatgccttcggcattgcagtcggctcttcagtcttctgcgtaagcgcaggttctttggcttcggtagccgaa

SEQ ID NO: 92357 - DNA, 298 bp, Zea Mays
gggactatactgcccagtcaagagctaagtcccgatcagcaagctgatcccgcaggtgacggatgtctcttcttagttcatttattctatctccgtccgcaacccaagcgttggtcctatgttgcagctctgcttgaagtcgacttactcgggcttcaagatctcctattgggtcattactcccgctgctactgttctcatgtcgaggggccagttgatgtcggggcacaccgattggtccagttgacttgcgcgtcgttagccttgtgcgtggcggcatctttctaagggggaaaat

SEQ ID NO: 92358 - DNA, 764 bp, Zea Mays
ggatgtggtcgcaagggttctggggaagagttgtgccatccactttgttcaagagcgcgctaggcgtagagagcgcacgaggtcctttgatctctgggcctggtgctctgatccttgtgaaatccctaaggaagtttggcttacagttactgaacctgatagggagccccctccggtttccaccccactgccgcttgctggtgttagctatgatgttccatcagatctgaaaaaaggccatgtttacactcttcggaaccacattgaaatagtggaagatctctcattcttgcgcgggagggacagcaggggggaccttcgaaccgtaagcctcgcagagagtttgaatggagctatggtgtaccagattccattggcgagaaaagggagtatccgggtgaacgtcgtggaagggatttggttcgccgcgactgggatcaagatgatgatgatgtgtatcagcatggtagaagacatggtcctcgtcgtcatcgtagcctttctggttgggttcgttcgtcgcgttgtcggggtgggactgatgactgcatcagctcgaatggaaaatacagaacttccactcccttcagacgtaatgagatggggatgtcacaatcaaagcgttgggtacctaaattaagagctaaagctgtttcttttgctgacccactgatatctgctgtttggccttttgagggggctgagggggctgcaggtgctgataggctcctgctgaacagtggcaataaagatggcaatctgga

SEQ ID NO: 92359 - DNA, 449 bp, Zea Mays
ctcaaattgatcatctggatccttcaacttttcaagcggttcattgcatgttcactctaggtccaatcatggacttgaatttacactttgaatgaatcacttgaaaaattgaaggacctagatgattacttcgaaagttcatggacccagatgggagcatggggaaagtttagggatccacagttcatttcaccataaatatgttttggtggacgagcaattttgagaaatgaaaatattaatatggatggttatcttctgttagggtcctgattcccgattccaggtgcataaataacaggataaatgataagtcctcagctagtataggttgcctccaagttatcattaccagtattatgccaaccatgtagcactatctaaaattttgattgtgtggctggtattatcaaccagaatgtttggtaacgtactaatggttagtgctg

SEQ ID NO: 92360 - DNA, 912 bp, Zea Mays
cttttcttatgcataagcacactaactcttttctcttttcactcctaataaaaatgtaacacattttcatgtgatcagatcaaactggccgataaaaagtcttgatactgtgtgcttaataacattttcaaatggcaaattaatcttttagcaattggcttaatacgaacaaaaacttatgaacttttaggagatttcaaggaaattcttttgaaggcccaatcccaaaaagtctgtccaatctaaccaaattgacaaccttgtaagtacttctttcgttgttgtccctgttcctttgatagttgacaaggtcaaacttgtcatgggaactgatttgttagagatcttgatgtgcagacggatcggtgatgttgtgaatgggagctcttcattgtcctttatcagtaacttgacatctttggatgtcctgtatgcgacatactttcgctgtaaaggtactgtttcatatcttggcagtgtagatggtactgacattggttatctttctacaggatattaagaaattgcaggatatctgatactcttgcaacagtaaatttttctaatctagctggattgaccttattgtaagtatttcattatatgccattctacaaatatctgttgctattgcttttctttcaaaaaaatcaataggagcatcttttcaagtaatatttatgtctcatggcacagggacttgagctttaacaatctcacaggccaaattccacagtccatactgaacttggacaaccttggattcttgtaagggattctttgaagagataatcttcataatacaactgaactcttacgctgacacttgtatgttttgtttgtgatgaacattaacaaattcaggtttctcggaaataacagcctttctggaagcctgcctgatattaaaag

SEQ ID NO: 92361 - DNA, 363 bp, Zea Mays
acgagggtgtagccctcattggcctccttcatgaaattcataagaaggtagaggaaaccataatgttgactttcccctacctagcgcgccaaatatcggagagtaaactccagctgtgtggtagaatacacccgcctaatcctaggaacacaagactgccttgggtttgcctgatgagatggatgaacacaaaaaacacaaagatttagagtggtttggaacactagagcgtaataccctactccattatgagttgtattgatgagagcttgagaaagcctagatctggatggagatgcctccgagggagttcgagtgagtatgtccttagggattctagtcctaagggagcttgagtccgtc

SEQ ID NO: 92362 - DNA, 469 bp, Zea Mays
tttgattttcctaggcctgcatacttagcttcaactgccagcgctgtgctgacagccctgctgtaggagagatcaagacaggtggccatctttcgctgtagctggtcattgaggcctctcataaaacaattcctctttttcaggtcagtgttgacctggtcaatggcatactgggacaaatgattgaatttgttgagatactgtgtaacaccttgcttgagtttcatgaattcttcttgcttcatatggagcactccttctggaatgtagtgctcacgaaatgccaatttaaatctgtcccatgtgacctgatgtccggcaggctgaatggccacataatttccccaccaggtgctggcagggcctcttaactgctgagccgcaaataatggtttctgggtctccgtgcatcggatgagtccaaacttctgctcaatgacccgaacccattcgtcagcttcgagaggat

SEQ ID NO: 92363 - DNA, 468 bp, Zea Mays
ttctgtttgtcctcctgaagaacaaaaaacaaaaatggttttgtagcattcacttggaaacataaaaaagtgcatcattatcaggcgtttttttgtgacagcaaaggttacactaaattcaccccaattttacgaatttctgcttgtaaaggccccccttgtttacagctctgcttatcatcattgtgtttgtctatctcagcaagccaccctttattccaggtaatattggtagaagctgctccacttgaaactgcttgcaattctattttgcaaaacctttccaaggcctcttaccgtttgccattctgaaggatctactggtaggattattttcaagctatttggcacggaacgcacaatgcctaggaaccttcgtgatgatgtatgaccattttcttattttagcaagacacattgcagatgcagccttgttttgccctgcattctatgcctttcttaagatta

SEQ ID NO: 92364 - DNA, 377 bp, Zea Mays
gggatccttgcttcttcgtcgtcgcctgccattgaaacacaaaaacaggaaacaaacggcgacggttatccctaataatttcactacacgctcctctcaggtggaacacatgaacacgctctaatgtatcttaccaagctcttacaagtgtctgacaaaatacaagtaaatgatggtacaatcggaggctggttcgtgatacttaccaagaggtagtgaaacagcgattgcaaggtcaaatctgtattgatcaaaagatttagaatgtggagctataggacaggcacaatatgtatgtgaatgtggaacaaaatcgagtgcagatgagcgaagttcgataaatatccaaagcacaattcacaattgctggctaagag

SEQ ID NO: 92365 - DNA, 583 bp, Zea Mays
tatgaacccataggcaggaccaggaacctttgagtcgattatttcaaaatcaactcaaaaattgggggcttgtgggcgacagatatcccctgggtccactagaaggtgaaaacccttgcgtagggccacaaaccagtcgccctgcaaagtcatctcatcgtgggccgggaaaagactacaatggaagtgggccgaaccaagaaggcgttgggctcgcacttggatctcccacggactaagtgtaatcttgagggagccatccgtctttcctgcgcccgacaccctcaaacgccagagaaatatcaggaagaagccatcgggttttccttaagataagcaaagtctgttcgctatttactaggagataagtcggaagagtgtgatcagcgtgtacgtagggagtgccccacgatcgtgtatattaggccaagggggaaccccatcattttcatctcattagcatctttccattcaagaaacaccacttgtaaacacaccgcacttacaaagccacccctggaagtagggtattacgcctctcaaagcgacccaaacatgtagaaaatcgcccgactctccctct

SEQ ID NO: 92366 - DNA, 625 bp, Zea Mays
atcaaacccaaatcaaattattacaactcaagataaccaacgtggaataattgattccatactgtcgcctaaaataacttgggccataggttggataatctgcaaaataatcttgatatagcctcacgtgtccttcctctctattacgtcgaaccgtttgacggccatgaacagaaccgcgacgtctcgattcttcatcaaactgatcttcatcaatgatcaaatgcgcgacattgaaaaagaattcttcttcgtcatctgaggatgatgaatccaacacccgcttaacaagtctgctttgtccactcatcaattattctttttctaattgccctacttttttctgtcggcgtcgcacacaacaaataatgaatctgccctagtttttctagcggtggtggtcgtttctccgatcacatggacaaagtagcactaatttgggccatggcgtagatcagctaatttgacgcctttttcctggtggcgtagcatcaactcatttgggccatagccttgacgtgacatattttaaatattgggctattagtttattagggagctgttgtgtgtgtagatacttttagcctatgaaaaaattatagtatccctcaaaactggtttttcg

SEQ ID NO: 92367 - DNA, 402 bp, Zea Mays
cttgccggaggccagggggatacagtcatttttgtgccactcaccccagtcaccttcagcattcatgaagatgattcctagaggtcgggcgaagtcatgacctccctaggctcagcacatgtctttgccaactcctcaacaaaacccattgaggccctcgaaaccctgtatgcctttatcgtacctttgagcagccttccgtctacctaggtcgccacctttttctttccccggtcatccccggcatgagcatagccctcctcaggatataggccatatcgaaggccattcaattcaaacacacggttcaacctaacatttgaaccctgtatctcccaagctcctagcttctcgtcagttttgtcttcactgagtactttctagtaattctcactgcctccg

SEQ ID NO: 92368 - DNA, 473 bp, Zea Mays
aaattacaaataagcatgtgcaaagttgaacaacatcatttaattaatggttaataaatggcatacttctggtttgagataatctaatctacattaagactaagattattagataggatatgtgatgttcatagggtggaacttaaaatggaagatggtgataggaaggcatgtaactttagcctaaaagtatcttagctggttcaggggtagaccaagaggggggtaaagtgggccatggtccccctcaattttttataacatggtatatatgatgttaatttatgcttatgcaaataagaatttaagttttgtgtgggatgaaacaatcttgtcttgggactttttggcatcccgtccttccgactcccctcctctcgcttcagtcctcgcatctatccgtccgatcccattcttcctaacgccgctcgagccagtctgccctaatgccccactcccgacatcaccattcg

SEQ ID NO: 92369 - DNA, 813 bp, Zea Mays
ctggattgtgcctcaatttctagagaagacaggggcctcttggtaagttatcctcgactcagtgaacaatcctagtggactgcgggttgattcagttgtttctcggggtctcttacgcaaaaagcccaggccgaaggggtatcaaggtattctggctgcacgatcctggatgagtggcacggattaaatcaagcgtcgtctgaaccggtacgcagcgcggtccgtccgaccaacggtctacgacatagattcaattaccccgaactcagccatatctgcccgatcagagccaacagctcagacttaaataactgcgatggaatcctagacacacgattcagatcggatggatctgtgtaactggccgaaccggtactctgggttctaatcccgaccggcgcttctagatccagcggtccgtcctcatcttcttccgccgcccaaagccagccggcgtcagagtcctgccgcggcggcgccctcatcggaaaaacttagacccggtgttcgagcgaccaattccccccattaacgagtcttatacgtggcggaaagtatagcaaaaccacatggggtttactcaccagcgatcggcgcttcgaggtaccccaatcgtggagatcggcggtccggtggaggaggaagaagtccgttgaggaattctggcaccccgactagccacaccaacacaaacgtcccaccgactcacttcggctcccccgacgaccctcctcgatccacccttgaagttgcgccagcagtgtgggtcagaatcgacgtcgacggcaactctggcagcgtgttggcttcgat

SEQ ID NO: 92370 - DNA, 537 bp, Zea Mays
tgctctatgtgggggttacgttagcgtgaaccatgtttttagcatgatggatcatgagtatgagaagcatagggccaagccaaagagggggagaaaaacaccgactgtggtccccgctcagtcgcatatgtcgattgagactgtcggtttgttcggaggaggtagaagcgggggctgcctctaaggccttcactacgaatcttgccacgatgagtgagctgccctgatcattggacaatgaggagttcaggttgcagaggacttcactgaataagtcaccaggggtaagttaggaaaggattcgattccaatgagggttagctcgggtagcgcgaaacattgggtggtgagagatgcgaccgtggcgtgcggctacgaggatgtggcgctagcctgcatggcgagggagttgcttgtcttcccttcctcgcataacatccctgatgtcattgctgcagcaatggacccgaaggtgaagctcttgcaccggtgtatagggtagtaaacctggccagctggtcaaagaaaagaaaggtg

SEQ ID NO: 92371 - DNA, 568 bp, Zea Mays
tttatgaacctgatgaataaaatattcatggaatacctcgaccagtttgttgtggcattcatcgatgacatactggtatactcttagagtgaagaagcacatgaaaatcatctgagattagttctacacaagcttcgtgacaatcagttgtatgcgaatttttcgaagtgtgatttttggctaaaggaagtcactttcctaggtcatattatcaccgatggaggaatcaaggtagaccccggtaaaataagtgaaatactaaattggaaacaacccacagatgtgtccaagatcaggagttttcttggattagcaggatactacagaagattcattgaaggcttctccaaaatagtgaaaccccttacttcactgttggagaaaggtaaagagtttaagtgggattaagcatgtcagaaatgttttgaggaattaaaggaaaggctaaccactgcaccagtgttgattatgcttgatattcacaaaggatttgacatgtattgcgatgcatcacatctaggacttggatgtgtgttaatgcaagaaggaaaagtaattgcctatgcct

SEQ ID NO: 92372 - DNA, 302 bp, Zea Mays
ttctccacaacaaagaagccatcggaaggatagccaagtgggcctgcgagctgggagctcacgacatcgagcttcggcctcgcactgcaataaagactcaagcactagttgatttcgtatcagagtggaccgagaaacaagtgccagataacccgaagactgtagaagtatggcagatgtatttcgatggctcgttgaagctgcagggggcaggcgcagggatcctctttattgcacctagaggtgaacaactcaaatatgctcttcagttgttattctcagcatccaataatgcagtagaa

SEQ ID NO: 92373 - DNA, 415 bp, Zea Mays
cagggcaggaaaagacaaaaagattcgggcaggaagggggtgaaggatcctcttaaggatctgagaagtggtcaaggttggtaattcgtctttttaacccaaattgctcttttcctcgtccacccgcttatcctttcaagcaaccaaatttcttccgtcccacttctgcccctgctcaaaacaatcatccgagtgcccctggtactcgtttccccgccttacccagttcatctaacagctgcttcaactgtgggaagtctggacatttcatcaaggattgtccctatccaaagaaaaataaatccaactttcaaaaggcttctggaagcacatctcaaggtaagagaaatgtgacaagcactcagacaggcaaagatcaatggaaaattggacgagtctactatactcaagtggc

SEQ ID NO: 92374 - DNA, 1359 bp, Zea Mays
gtgatgaggaaagatccacatctcaacaagcagactctgagatctacactacaacatccagcaaaatgacgtttagctttggaaaactaggtcattttaatgttcatttttttttgcagaaatcagtttatttgagacgtttattttgcatagagttgtcatgtcttctttgatgagtaatataaaatctgacagcaaattccgagcctataatatccagtgcatatcattcttatatatacaaaaaaaactctagcacaaaattaagaactgggatactctttttttggcttccaagtgagttaaacataatttaagcacttatcaatcaagacaatagttttatgcagaatatacatattgtactgttgttggcaatatagagaaactactttatactattgttggctatatagaggaaatactgaagacatgcttggatgttatatgctaaactttaacaagtactaaaggttagcacactttggagctaaagttctattagatgctaaaatttagcacttcacttgtagcaccttttaacactcatatttcaatctaagtgttaaaaatgtagtgctaaattttaacaccaagaaccacataggcccttagttggagcgttattataaattgtagtataaaaatatagaaaccaaattttatccctccacttaatgaattgaagaaaagcttatatttgaactttggaaaatggagtatcaaattttactataaattatagtataaaaatatagagaccaatttttatccctccaagcttatatttcaactttgaaaatgatggaatatcaaattttacactaaatagcctactttattaagtgcactctaattcctccgaaatgaagggtccaacggccctttacacatgcatcaacattcaggagccttaacttatgagaataatttttaggtattaatgctatatctccagcacctcccatatccattacctatctcactcatatttcaaactccactgagtatatgcatatgcataatctactaaaaatagaatacaatgatggccaatatggtctaaaatttgaggcaccaatcaaggccgtgttcagttgcatgtgcattagagaagattgaagaaaattaaattcttttctattcaattttgactagcctcaaattctcttcaatccactcctaaccaccctaagagcttgtttgatttgagggtaattccaaaaagaattcgagtttaaaaactagtcctaatagaaatgcagaactcgcccattctaccgtttcaatctgtaaacactgtaatctacataataggtgcttatataatccataagctaggcctaaacccataatcta

SEQ ID NO: 92375 - DNA, 632 bp, Zea Mays
tttaaattgcgaaaatcaatgcatactctaagcttacctgactccttctccaccggcacaatattggagacccactctgcgtatctgcaagttctgataaaatcagcttctagcagccggtggatttcgtccttgatgcgtgggagaagatctggacgaaatgttctagctctctgcttgaaaggtctgaaaccagatttaataggcagtcgatgctctacgatctctcggcttaatccaggcatctcagtgtaattccaagcaaagcaatctgaatattccttcaatagaccgatcatctcttctctaggatcggtctccagggtcttgtttataaaagtcggccttggagttttaccatctcctatcttaatctcctccaaaggatcggccgatgtaaacccctgtcctagtttatcaagatctctgaattcctctatcatgttccccacagaggaattagatgatctttgtgtgacggcggacttttcggtctcggggatcggatcatccgtaatactgtcttttcgctgcgatagatgttcggtcttaaagtccgaacctttttgtgaaagaccagaccacccggccttggaagccgaactgtccgtgagcaaagactcatgaacttt

SEQ ID NO: 92376 - DNA, 340 bp, Zea Mays
ctggtaccgaagcaaataccaccacagagaaagcaataagtcgtgaataccaacttttcaaaaataaaacttgcttagaaaccagtattggaatcgtcaggactagaacgctagacctaggacgaaaggccttaggaatagtggggaaaacaggtggctaaataagtaggccctatgggccagttttagaatttcaaggatgccctaaaagcaccattctgattcggtgaggagacgttcttttcagcacgcatgcattataaaacacaaaaggattagaaattagaggagtaaaaatttgatctaacccgcttccttttaacaatccaggctctttcat

SEQ ID NO: 92377 - DNA, 434 bp, Zea Mays
tgttatcgagcgaccgattatttgtggtgtcttttagttggatagtatggtcggtaccggtcgcctttagagacatgatgtattttgattggttcagctagttgttttaactatttgaagtctaaaaaataaaaaagattaaaaccctaggattcagacgataattggaggtgcgtgtttagtccattcacactccttattctttattctgctcgtcttcctttatatcgtagactttaatttcagtatgaattctatgtagagtacgaactttcaaacctttatggacatcatcaaggaaaaatgtgcacaacttctcgacacccctacttgtactggggaggtcctcttcgatgaccttttttcctgtatatttgtcaggatgatgtttctgcctgccccattctctcactcaacctctagttccataccca

SEQ ID NO: 92378 - DNA, 885 bp, Zea Mays
ccaccatctgccggttctgataacagatcttctagaaccatgtcttcaagagtttgatcaaatttcgccagagataattcttacagaccaatgagggcagacaaggcaggagaaggaacaccactactttccccactagctatgtaacgccggctgttcttccgaatcagagggatttcgtcctcttcttcatcatcctcatcaacaacacggacaacacacccattggggtcagcgtcagacgggtcacacccattgggatcagctttagtaaattcaggcacgagcacttcttcagcaacatgagcagaaggaccggcaccctgatctaagctagacacctgatgaagacgtctctttttctttctatccccctcagcaggaaaagaggcttgatcggctcggcgagaatgttttggacgaacattgacagacttcttagcgtccaaaactttgtcagcctcattgatgggtaccaccaccaatgtttcagcaggagcggcatcagaagaatcctcagctaacatatcaagcatggcacttatctctgcatcactgggatccaaaggcacctcaaagtgaacctccgttcatcatctggaatttcttcaagcgaagcaaccaaagcactaactccttcggcagagggtcacactctaaggcccaaactgccatcaccagcaggaggatttgacacaaaatgggtaaaggccttggaaggaggcaggttccaggccgagtatgcaacaggggcgccaacatttgataccttgcctctgagtatcatttcgagccggctcaccaagtccacagcaggaattcttctgttggttactcgggttgagtcagctaggcctcggtacagataggccgggtatgccatat

SEQ ID NO: 92379 - DNA, 639 bp, Zea Mays
cgaaaactatgtgtaaggcgtatctccctgttctgcatacacataatcgtacggtccaagatagggcaccagacggtccgtcttcactctagacagttcgaagtgtggcaccaaatggtctaagactaggtcgaggagtccaggattatatacggattgtccgaccgcatacgccgccgcctgggtggcctatgtgtagattgatgtgggaccgaacggttcggcgaaggatgcaagacggttcgtgaggtggccgaacgatctgagataaggcctggacagtccgattgtggttagagtcgatcctatgctaggcccgagtggcgatggttgtgatgatgtagcgaacaacagattttagtgtggtaggttcaaccatgacttcgtgtgatgggaaactagaaacaacagattttttctattgtacgtgtgagtttcttaagtgtttcctttattccccgtatgcgttgtcgtaatttgatacccttgtaaatctatgtactatttaagagaccggatgtcattagattaactcacattggggttttgtgatgaaggtaggagaaatgttatctcgatctccccttgttggacaaccctgtggtgtcggtctaccttgaagtgcgcctgatatttttc

SEQ ID NO: 92380 - DNA, 346 bp, Zea Mays
attctgatactacattgatagcctctgatggtttaatctcctcaatatgggtggtgacttggtgacaacttccttttcttggtccagacaagaccaactccactaacacttcttctcctgataacgacactaacttcactgttctcttatcacagctaagactggcttgatacttggttagccaattcatccctaggatgacatctatagttgtatcatggttacccataactattagatcagcgaggaactctatcccccttatttgaacttttgcactagggcaaaatctatccatttgggttcttccaccaactgaactaaccctcatacgtggatacatggg

SEQ ID NO: 92381 - DNA, 310 bp, Zea Mays
gagaggaacggcggaaggcaaaataaagttctcaaaggtcatgccgatcaacaccagaggcgcatgcgatccgaacgaaccgctcccagcagaagacggagcgataccagatcccctgcattaccaatcccaatcccagtgagctccgactcaactcaaatccgacgatccctcgtctcaccccccagacaagaaaacactgtagatgtgaagggaatttagccaacgacggcgataagatgagataaccacccttgtgtcttcacagcggcgagaagctcgaacccccagactgaaagggagaaaaaag

SEQ ID NO: 92382 - DNA, 367 bp, Zea Mays
ttggagatgcgccgcgggaggaagactgagtatctcgagatccctctcaaagatagtatcaagggatggcgcttggagtggttcatagttgagaattacaggaattctctcccctcccggtcgggaagacagccggatgttcgcaccccaagctggaccgagtctcccacagatcaggaggtagctgaggcaggtgcgttgctagctgaggttggactgtatcgaggcttagccgactcgactcgggttaccaacagaagaattccctctgcagacttggtgagccgacttgagatgatccttagaggcaaagtgtcaaatgttggtgctccagtggcatactcggcctggaacctgcctcctccca

SEQ ID NO: 92383 - DNA, 524 bp, Zea Mays
gtgagttactcaaacttgttagttggtgcaaaaaaaagaaaagattagaccctactcctataaacatgtttaacctaaattggtaccttaagaacaactcgatcattcacaactacctaacctacctgatatattgctttatctacctatcccaccctaaaagcacatgtaaaccccgttggacccatcttataattctcgaccatctacctgtctaaaccgtctaaatcctagtggagacaccaagatcgaagatgatcgacctcatcaaatcgaggaaggataagattcaagccagatcttcaaaaggaatcaagatccacaatcttggatagaacctttcctcaccctaccctttcttaaccaaacctatctatgctctaaagacatcttctaccctacataataaagtggacatacatatatatacccatgctctcctaatcactcactaatgaaaaaagagagactcttgatttttgaactaattagaaactaaaatctaaattttaaatcactcttcc

SEQ ID NO: 92384 - DNA, 676 bp, Zea Mays
gtgagaccacttcgtctgaattattggtcctctaacatcgacatggttgactcttcggtaatggtcccttttgacatttatttttgaagtccaaactggaccctccagtaatcatatggataacacctctgaagggggattaacaaaatcattctcttgttttggggtggggaggtggttgccgagcttgttgatttgcttgaggaggtggaggggtgggagtggtagcctttcttgatattggagttgtgggtgttgtggagctctttggttgtaattttgatgctgctagggatggtattggtggtcgtttttgtagtgagggtgatggcattggtgggggtgataagtgtgagctatggctcattggttgttagtggggatggccctggccatgtgctctttggtttctttagttttggggcaatccctggttggatgctctgagtcttcatcgtggaaggcgcactagaatttcctgggctgctagcgacctctccctcggcctctatctcgtagaacgttgtcgcgacggccttgctacgagtggtagcgttgagggggacatcgccctactgctactgattagctatgttgtggacctggggctgcgactgactgtgctcttggcgaggggcattcctactgtgggccctggttccatgacttgctggac

SEQ ID NO: 92385 - DNA, 386 bp, Zea Mays
attgtgttgcaatgctttggacgatgtcagtgtggcacgccagaaaatgtacttaatgtgagccatgacaaacaagcaaatctagctaagagcatggaggattgaagtgtaggctcgggaaaaagatttgaaggcagagcgtggagggaatgggctagaaagcaataaatgttgtgttcccgttagtgaccagggcacccttatatacacgttccttactcactaattgatggggccaattctctcccttctttccaatggatgttgtattcaataagtgcccattttcaacaacgaactgaaaggaaagtgtttttcagatctttgatccaaagctctcaatcaagtttcatggtttaagcttgttatagaaaatgaactaatca

SEQ ID NO: 92386 - DNA, 411 bp, Zea Mays
gaatttgtgtgaccgtcgttggtgtaggccactccggaatggcagcaatcttgctgctatcctcaatgccctgcggagtaaccacataaccaagaaacgagacacgttgcgtgcaaaatgtgcacttttccatgttaccaaacaagcgagcagcacgcaaagcatcaaaaacagcacacaaatgttctaaatgctcctctatagacttgctgtaaataaggatatcatcgaaataaacaacaacaaacaaacctatgaaggcccgtagaacttcgttcattaaacgcataaaggtgttgggagcattagtcaatccaaatggcataaccaaccattcatataaaccaaatttcgttttaaaagtcgttttccattcatcaccgagtttcattctaatctgatggtaaccgc

SEQ ID NO: 92387 - DNA, 409 bp, Zea Mays
gccgagtaggggtggacgagggggatgaagtggccgtacttggagaagtgtggtccacaaaggtgaggatgacagacttgcctttggcagtccatcgttgaagtccggcgcgatgtcggtccaaaccagttttggaactggaaggagaagcaggaggccgcctgacagcatgtggtcggttttgtagcgctggcatgtgaggtaccccttgacgaattcctgcactgcagcacgaaggttaggggcgtagaagtcacggcagaggcgatgaagagttcgctagatgccctcgtggtcatcattgtggatgtcgtgcactatctcctggagaagggcggaggacgacatgatgtacagcttggagtcgaacgtgaccatgccgtccaccatgccccatggcgtcacatgg

SEQ ID NO: 92388 - DNA, 559 bp, Zea Mays
agtagaatgcatcaagaattaatggtggacattagctctcactctatccagccacctaaatcattgccaattctcatgtggtaagggacaagaaaagtggacatggcatctaaatgcttcgttgtccattggagtagagggcatcaggaactgattgtggacattagacctcgatttgccggagttttgaaattgttgatctacttcaagtcttcaggaaaggaaagttttataatatttctccggaaatcttatcaatcttgttgactttcttttatttcagaatgatcgagatacatgtagagagtgtactagctcgtattttgtttggatcatacatttttctagaatgaggtatcaacgtgaatcgaacctcattcgacgacactttggttgacgtgtctaccatatctctactataattaagtgggagtttcttgtgcgttgtacctaaacatgctttgctcctccatgcaccgcgcgaccgcccatgtgtggcccaggaatattcacaaacacccacatgtgttgcccctccatgttgctctagaaaatattc

SEQ ID NO: 92389 - DNA, 596 bp, Zea Mays
gaaaaaatcaactccaaaattcggggcattacatgtccaaatgaggagagattttggggagttcttctcatatacacattttgtggaggatgtctgcctttctgtgagattttgagctgtgcttcagggggagatgtttttgtcgggggagctgttgagcttttcagagcttttgctagttgtgttgagcctttgcctctttcttgaggaactagctttggtttcagcatttttctgttccttatgctctgatttggctttgattgttgactagtggtgttgagccccttttatgcctcttcttgatgactagccttttttgcttggtcgtgttgagtcgttgcccatttctttagggaccaagctttgctcactctggatgacatgttcttgtcttttatctggcttttggtcatttaagtgagtttcctttcttccttgttgttctaatttgtgtgtctgaatagtggtgttgacaatgcactcatcaaggggcagattgcgaacacaaggttgacttgtcccttgtggtctgggttgatgatgagtgattgtcaacatgtgtagtgctttggtgtgagttagtggactaacca

SEQ ID NO: 92390 - DNA, 1704 bp, Zea Mays
gtttttaacattgattttatatgtagtaaaataactgaaaagataagaaaacggtgctgataattgacttaaatgaagcccaatttgaattcatgcggacttacttgttatctagcagaatgcagtctgatttccataattcttgcagcatacatcttttagaatttgtctcaatcaccgcatctgaataagtggttgaatggtatgttccaaactcaacagatgttatcttcattgcagtaagcttttggcccaatggcaaccagaaagctctatcagacactataaggatcttttggtcgatttgggtattagatctaaggattgtctcgatgacagataatgacggatgagactcctgtaattgcttctcagctttcagtcgagcttcaccaatgcagcgttgaagatgtcttaacctctcaggaataatttcaaaggttccagtcaaattgcctacatacagataggcggcatgcagaccaaagaaacataggtaatatgcaacctgttttaatgcatacagtacaataagctccatcttatcttcatatttacagcagctatacaggccttctgaaccttcccctgttatcagttcaagaagcttttgctttgaaatgcttaaaccttgcccatcggagaaagaatgccttaagtatgcactttcttgcaaagcagatgtataacttacatggatgtcattgataaggccttggataatatctgagaggttgacaggatgaatttctatgagtttgttaactttaggtctggttgaaattgaagctgcttgttttgaagaggggatgtctaaggtagaaatatcctcagcttttctcactttattagtgccatttctcacattcaagtagaagcttagcccattggactgtgacgttgactcaaacaaggatgattccttttctgaactcaatttatccatgtgggtatgacctctaacaacattttctagcatgttcttttgagttgcttccaaattagctgatggatcatgagatataggcccaggaacataaacctcattctgcttgtcctcatgttgaggctttgcacttctcggaaaatcctccagaaaaccaatgtcaagcgctggcatctgctggccacttatttgtagttcagaatttaaactgcaaggctttacctcctcaaccatgctctcataagtagagcaactctcccggttgcatggcccttctgataaaagatgccaatccaaataaatcccatctgctgcagatagaggaagtggttttagggagcaaagtacttcttctatagggggaagcatagatcgcattgctttatcatcatgtaaaataggtgtaggtagtgatttgaatgtatcatcaactagagccaattcagagctaaccactgattcatagaaatgttttgcttgatcaaagtcgtctttgaatatttcctcagatgtattcatctcagctttctctgactgaataagaacaagtgacttaaaggcatccttggaaggaaagtcgatgatctttacttcctcaaagagaatgaagcaaggaaaatgtgaacaggtcccatcaggtttgagagggtataatgctgactttttatccagtaaaataccatcattgatccttacaaaatccattactgctacatcatttgctgtaattggtttatctgcttgatactccacaagtg

SEQ ID NO: 92391 - DNA, 614 bp, Zea Mays
aacaactagtggatgaagacgttattgggctagctaatgaccttttgtgataccaggtttcctataatcgcctctattaaaggcatacctagatggtgtttatgtccactcaagtaaaacaccgcacatcattatgccacatcgtttctaaaaataaaataaagacaataggaaatttaaccaaattgtgtaagagatctgtccaaacataggttaaggttgtaagacaccttttttccaccatacagttgctaaaaagttggaatataaagaattcaaaacaatagatcatgtttgaaacaaaaaatagtgtttctatgatattaagggtattgtattcgcacaagagggtattagagtacaactattggatgaagacgctagtgggctagctaatgatcttttgtgataacaggtttcctataatcccctctattcaaggaatacttaaacagtgtttatgtccactcaagtaaaacgccacacatcaatttgccacatcgtttctcaaaataaaataaagaccatggaaaatttagccaaatcgagtaagagaacagtccaaacataggttaaggttgtaaggcacctttttccaccatatagatgataaa

SEQ ID NO: 92392 - DNA, 525 bp, Zea Mays
aatttccttcctatgtccttttctgttgagaaagcataccttggtttaccgacaccaaggaataagtagcaaagatcactaataactgtattttaaaaaggggggaaagggtcaaaatctggaagcgcagtgagtaactgtccatgccgtagacaggggacaatgaagacgaaaatgtggctgcaatataaaacgaccaatgtatcccaaattctaaggtgcgaatggcatgaagcaatcgactaatcttggagaggaaaaatggatctggtagaagcatgaaacattgggggaaaaggaatacaaaccttgcaattgacgaatcttgcgaaggaaaatggatctagtaaaagcatgaaacgttggggaaaaaagaatacaaaccttttcctaacctgatgaatatgttggacgacggaactagctgtagatgaagaatacggaggatgtaaggacaaagaagagcgtgctagaaatggagagagtgaggaggaagatgggcgaagccagcgacgcaggcaacag

SEQ ID NO: 92393 - DNA, 569 bp, Zea Mays
cggggaggcaaagactggacgaccgagtcatgcgctgctatctcgaacaaggaggtttagcgtactcgaagtgctagatactcgatgataactcagatgaagggcacctgaattctggataagctagaaggtgtgtcgcattaaaaggaggattcaggtagagtcatagtcatcacgacttgggacaacccacttgtcatctatataaggatgagggagtgcccctatcatctcatctctcagttcatcacatctcagcttagctcaaatcattctcattagatctcagctcgtcaccacatcatagctcattagccctttcacagcaaccacagcaccactagatcgactagaaaactcactctccaccgtccatagctcacctataactcatgaacaccagtgatactcaaatacgcaacctcgataggaagtagggtgttacacattctagctagcggcttgaacctgtataaacccttgtgtgatccgacgtgtatccgcacgtaccatcgagtcgcaatcaatgacggcgtcctgttcaaaagcatcacgtggagaaccctgtg

SEQ ID NO: 92394 - DNA, 513 bp, Zea Mays
ggctctccgccgtacactgtggctagtgcattacccgcaaaagctccggtatgtcctccctccatacgttcccttcggtaccagcattgtgaagagcctcgtgcgtgcatgattgggtgaccgggcattagggcgcgcatctcaggtgatggcgtcaccgtggtgagtatgccgctacggtggctgggcgtcggtgatagggaagaaagcatgtggaccatgggattcgatttgagcggctgcgattagaagttgggaatcgactagttctaaccgttgatctccgctcagtcggccaggattctgaaaacatgtcgcgttggtgggtctagatccggaccgtagatctcagatcgtagggtcagcagtgcgtaccgcttcattccacggccgatctattctgatccgtggatgtatgatccaacggcccaaatccctccgtaccccttcggccgtagtattttgctaaagagcccctctggatttaggatactaacccgcggtccagtccag

SEQ ID NO: 92395 - DNA, 384 bp, Zea Mays
cgcatctttgctatagcaggcctagcttttacagtttaagcatttactatgtacttcaatcttgccatgaaaataaaaagtatattctcatccttgttgagggctattacacctcatgtacagttctgtgattaaactatatcactagggtctcatgtcctatgcatgttctcttttgtgagaccttgccacatgtctgcctgagtcacttagtgatcctccatgactcacctttctatattattttgggatgggcgtacttgatctgaatcaaaatgagactcttagagtatataggggcatagagcacacaactagcttagctaggccatgccttcaaaaactgtgcatgaaactctagaagacagacatcttcaaaacttc

SEQ ID NO: 92396 - DNA, 400 bp, Zea Mays
acaactcagatcaacagtgcactctattactgatcctggaacatcagaacatcctggctccatagttttgggaaacaacgagccaacagaaagggtacaagaaatttccaccaattatattgaatctggaaaatcatatgaccgcaagaccacaattgtcgactcttacttctctgcaaaaattgcaaatggccttgtgaatgatcaagatcccaagaccatggcggaatgtaaaaagcgctcggattttatccaatggaaggaagcaattcaagctgagttagccttgcttactaaaagaaaggtattaacatctgcaatacctacacctccaaaagtcttccctgtgggatttaaatgggttttcgttgagaagaagaatgaaaacaatgaagtggtg

SEQ ID NO: 92397 - DNA, 290 bp, Zea Mays
gtagatgtggtcgggttagagagatatgggggtgggaagtcgactatgtcagagatgtccaaaccgagacaaaaatggtgccaagtcgtgtcaaacgtcttagggtaggtgtcaactttttccagggcattctagggttaatttggtgccactttgtcaattgggtcgaagtgttttgaagtttgaatgagggtgcacatgtgtgatctttggccaaaggttagttttagacttaggcaatttttgatttttcttttgtgcttaaacctttggtgaaccttttggggctt

SEQ ID NO: 92398 - DNA, 419 bp, Zea Mays
gtgatatggtacttaacaggatgggcgcgtgtaacatctgggccgagttttggacttttggtagtgtacaagtacaacacatccttgttatcttttgtgcgcagtcgaaccttggaggccgggctcaacgtatgggccgagttttgtgatttgtcttgccccattaagaaatgttttggatcccgagcgtggccacgcggaaagtccgtgtgacggtatgggccgcccgttttgtctaagactgactctagatgtgtctgacggtgactgatgatgtggtcgtgacgcaagatcttcgtttcttttgttctcacctatttttaggccggcagctagctgccaccgcgcccctccttggcaagctgctcgctgtcgtcgatcgcgtgccaaaggcatgcgcctttctggtctgatcctga

SEQ ID NO: 92399 - DNA, 595 bp, Zea Mays
aaatctggacagagctgttgtgttagcactatttaaccttgttaagtgtctagtcaccttatgatgacaataccaaagttgtggaacactttctaagctttccagaaagttctagtttgatatttttggactaataattgaagagttatgattaaaacgagtaactgttgtgttgctgtccaaaaatctgcaagtgcgcaattaattgtttagttcaccctttgactaaaaatgcttagttagcacttaacggacctatacttgtaatgtctaaacttaagttaacatgtgttgcatgattaatgtgcttgcttgctgtagttggttgtggataggagttccgtagttattgatgcctacatcctctattaaacttgtgcttaggatgcttttgtatgaccactagaagaactaatgaaaagtcgtatcaaattaaataaatgcttgtacccgtgatgttgtgtttgtagtggctatgtatatgatagtgtttgtcggtttcttagtagtgttaaattcgtaggtcaataacgtatggctaattagtacctacgtatgatcgttggcgataccgtgtcttgcgccttatatctag

SEQ ID NO: 92400 - DNA, 535 bp, Zea Mays
caaagactgcccctgaaacgaaccaaatcattctcatcaatggtgaactcccagggtttaccatcaccaaccctctttcgagcttcctgcaatagacgatcctgctgctgagccgcacgcactccctctatgagggaggattgaataagcatccgagtctcctcactagtggtgccgacatagcacaaagcgatccccaaacggtccagatcagcgatcaaaggcaaggccacttttggaaccccggacctgctaagggcatcagccaccacatttaccttcacagggtgataatgaatggacaaatcataatctttaatcaattcgatccatcgacgctgcctcaaattcagctccttctgagtgaaaatgtacttgagacttttatgatcggtgtaaatgtcacaagactcgccatagagataatgcctccacgattttagagaaaagaccaccgcggccaaatcaagatcatgagttggataattcccttcatgcttcctcaactgccttgagccataagcgatcactctgc

SEQ ID NO: 92401 - DNA, 480 bp, Zea Mays
taaagactccagaacacgttgtttttcgattggactgactttggtcataactttttgtgtgaaaacggtatccattgacatcatacccagaatatttcctgaccctataagcaaagccattggctacttgtctcaactcgacactcatagacggatctatttggccctacaagtattcgcaagttaaaagtcgctaaattgaattcataaacggatctttttgacaaactttggtcgtaccttatgtttgaaccaggaaatgaaatcgggcaatccatttcccgcaccctttctaagaagggtatcatattcctatggagttgggtcccctgatcgacgctaaaattcatgaaaaaaattgttctatgtatggcatcacctcttcaaggttggtcaatacatataacatgatgtggcgccactcttcatgtctcagggttttggtggttgaaccacttgcgcttccgagttggcctcgaa

SEQ ID NO: 92402 - DNA, 616 bp, Zea Mays
accctcataggaggcgcactgtacagaagaggtgcgacaggagtcctcatgaagtgcatttcctcggttactaggaaacaactattagatgagattcacgccggacagtgtggaatacacgcagcatacaaaactctggttggagaagtcttcaagtctagtttctattggccaacagcaaagattgatgcaaccgagttagtccagagatgtgaagcttgccaattcttgtcaaaacaacaacatttaccaacacagcagctgcagaccatacctataacatggccatttgcgtgctggggattggacatgattggacccttcaagaaagctcagggaggctatgctcacgtgctggtcgtcatcgataaattcaccaaatggatagaatacaaaccccttgcttctctaacctcagccaaggcagtggagttcattcaatacataatattcaggtttgggataccgaatagcattataactgacctaggatccaatttcactagttctgaattcttcgatttctgcgaacaacgaagtatccagatcaagtatgcatcagtagcacacccaagagctaatggtcaggtggaaagagctaatggaatgatactag

SEQ ID NO: 92403 - DNA, 336 bp, Zea Mays
agcacatcccctaccaccagacattgaaccccgtctggcacaggagtcggaggattccctatgctgctgcaagccactgcatcaagcaggtcacaaggctagctactgcgggcctctatcaatcagaacccaaggctggctcaattccctagggaatccgagcgcctcaagggtcccaatctatcatgtacccgccgccgttgatgatgggtcttgttgccaggatcgtcattgattgcagcatgttgagtatgtggagggttgtcaccacatcttctccgtgaagggggggtatcaggtttgtcctgaccgtcacctccatccggctgctgtgga

SEQ ID NO: 92404 - DNA, 1089 bp, Zea Mays
taataaataagagcttgtaatgtaatgtgggttgtgtaacagaattgtataataatgaagtgtggtttttcttcagatgccaatgcgcattcgtggacaggttgaagcaggcacttttcagggatgggataccccagttccatcgcccgtgcctccaacattggctgatgctactgcggccctagtggatgccactgctgataatacttgatttctttgggaagtgatggtgaataagaataaccagcaagggggtctatggaaaaattatcaaccccgagatacaacttatatggaatctctgagacccgacctcctatctttgtcaaagcagaagaacctttggaagctgatgagtggctctgtgtgaaggagcagaagtttggtttggtttgttgcacagaaactcaaaagcccttgttcgtcgcccagcaactacgtggcccagcgagcatgtggtgggcgaactttgtggcagtacatccccaggaccatctagttacctaggatgagttcaagcaagcattcagagaatactacattcctgatggtattctccagatgaaattggaagaatttgttcggctcaagcaagacaacaattatgtgatgtagtatcttgctaagtataatcacctgtcccaatacacaattgatcaagtgaatattaatctgaaaaagtataattgttttatgaggggattaagtgatcgactatagaggaaaatggttgtgtgcctagatcttaccttcagtcgtgctgtcagcacgacaatttcaggtgaagacaaaaactagggacatgataagatggagagtccttgacgagaaggtggcgaaggatcctctaggggaccggagaagcgatcaattctgatcattcgacccttcaatagtaattgttctttctctcacccacctgcttatccactcaaatatcccgtatttatccgaccagctgctacatccactaaaactactcagccggtgcccttggcactcgccttccatccttacccaattaagccaatacctgctttaattgtgggaactctgaccattttatcaaggattgcccctactctaaac

SEQ ID NO: 92405 - DNA, 436 bp, Zea Mays
gcttggcggcgccgccgtgcgtagctgttcggtggggttgtagctagggcaaggagtcgtggccgttggattgcaagcgaacggatgcgattcgatcatggagataccgattcgggtatgcataggatcattgctgtggccgttgatcgtgaaatctagggccatcgttggatctcgcgaacataaaatctagaccgtaggtgctggatccgaccgctgcagtcgcataccgattgggatgaacgaaaccctaatctgggcggtctatttttaatctgacggctcataacacccgataccccttcggccttcaacttttgctaaagagaccctgtgattaaaagaaatcaacccgcactccaagcgccagtgatctgtgccttgggaaaattttggttttgcccctgcgtttcctagtattcgaggccccgtccag

SEQ ID NO: 92406 - DNA, 424 bp, Zea Mays
tatgaaaaaccggacagacaacacctcactcatcttcaatctcgagagaggccatcgcttgtaactagagagagagagagagagagagctcgaacagttccacaaaaaacagaaaccgcaggacatagggtattacgcctctgagcagcccaaacctgcatactcgcttgtgtctctgacatgctctacacataccatcgagttgccaattgatgtcgatgtcctccccaaaagcgttacgtggtactccgcgtagcgtgttgctggtacccgaaactgacagctggcgcgccaggtagggggtgcaacattgatttccgataacttcatgatcgacatctacaacaccgtctacaactttgtcgtgggagaggttttccacttcagatccctctcctatgtggcatacaaggaaggaactctc

SEQ ID NO: 92407 - DNA, 471 bp, Zea Mays
caatgacaccgcaagagttaaagcacgggtccccccgaacaaacaaatcagccgtccccgacgtcaacgaaccgacctccaaagatctcatcgacggggaccgcgtcctcaccccgcaggccctaaacaagtatcaggtctagaccaaggcatggcgtgacaacgctgtcgtcccaaaagaattcaacgaaggggacctagtactcatgaggaccaccaggacagagtcccggggcaagctagagccgaagtgggaagggtcatacatagtcaagacaaaggcatccctaagtgcctacagattaacaacttcatccgttgaagacttagaacactcatggaacatcgacaatctccgaattttttttatttaacattcaaggcccaagcgcctttgtaattcttcaaacaatgtcattcaggcccgcactcttttcctcccagggggtgaggtttttaacgaggcggagc

SEQ ID NO: 92408 - DNA, 616 bp, Zea Mays
cggaaagggtgagatctgccaccatagacccagccctgtatcaccgattggtggccagtggggtgtcgggatcgttcattggagtgtggggattgttggtgtgaagtattacgctcagtcgtccgcccaaacgcccgggattcctcgccatcgctgcatctccgccgtgcgtcgcaggtggcttcgttcggtcctcaattccggtgagtaaacctcataccacttacgcccgtccgctgcgatggtgtagcacccgacagaatcaagaatagtgcactaaatcactgggtccatgactccggcgatggcactcgccgcgggttagtgtgcgccgccgtggcccctccgtcggagttgagggaagggtcctgcaccgttggatcattgatggacgatgtagattagattctgcgtacccttttgccaggttcgatctggtccgttgatctggatcgggcggtagatcgacgaccagcgatggatctggatctcataaaaccgtaaccgtcgatctcagatcctgcgatcctggatacgtatcggttcgcgagaataataatttaatctggtgcgcacatcttggatcggacggtctcgtttagatcttaccccttcg

SEQ ID NO: 92409 - DNA, 583 bp, Zea Mays
aacttatctatgtttcattgtatttcgatttaatttcccagattattcaagcactatagagcttgatatagttgttatggccacttggtaatataaataaatatatgatgccacacaacacaagcaaataaaatatagagctaaacaaaattgtttacgaaggttgcgcataatgtgactttagggcttgaacgacccaccacaatccacgcgagtacaagctctatcgtatctggcgtcaatgcgtgtgtggccagctaggctacgacaacgcaacaagcctctatgacaagcgcaacaggcgcagttgtggctcggtaattggggtacgcgacaagtccacacaatgtgcgcaacagacgcaattgtggctcggtgataacgacagacgaacagtgcctacagggcatgcgaaaaatacgtgactcggcgatgtcggtccaactcaacaggagttgtccgattaaacgagagtgctacatagcaatcacatgacgcagccaggttcatacggcacaaatactgcgtcgtgttggcagggcgcagccaatgctcagctaatgccataactcaactgattaac

SEQ ID NO: 92410 - DNA, 568 bp, Zea Mays
catggagtcttaacttggttctagttgcttgcgataaaaaatcagaggattatacaaaagttggtttgtagattgttcacaggcggtcacatctctcactaagattcataacattggagtagtacttcacggtttgagccatatttcatacctttgtttgttttttgcttgaaaagtgtaccatctgttcttctaaccgctacaaacttacttccgctgaagatctcccattttggattatttattgatttctatggtctaaatgcctttccaatccgaaaaaatcaaataaataccaaaggtggtcaaaaaatagtgaaacttggcatggagtcttaacttggttctagttgcttgcgataaaaaaatcagaggattatacaaaagttggtttgtagattgttcacaggcggtcacatctctcactaagatccataacattggagtagtacttcacggtttgagccatatttcatacctttgcttgttttttgcttgaaaagtgtaccatctgttcttctaaccgctacaaacttacttcctctgaagatctccaatttcggattat

SEQ ID NO: 92411 - DNA, 764 bp, Zea Mays
aagttatctacaacttttctatatggatttcctacagaaaacatgatttagtttatcaaacatacagcacggggaaatcactgcgtgcagtccaaaacagcaattaataaatttcagctcctatacaattcaagaattgccgcgttctagatacttgaattatcctaacactttgacaattgttagagttaaaataaccaagtgagaactaacaagtagacttactaatttttatacaagttatttcgcgctctagaactaccatacacaattaatcaacgcattcaccacaatcatcaaatccggcatatatgtatatcgaagcgcttttcacccactagttcgcattttagcttagataccacatgagcactactaatttctacccgtgtcatttagtgcactaaaattaccacatacattcaacaaacacattcaccacgtaaataacatcgccacacatgaccttgacttaaccacagaggaagcgatgactactttggcatgtcaccacctctctacagtccaatcaatattaactacatcgatcgaacctcatattgtgcaactcttataatttactatctcaaatacaaccatagcacggcatgcacttgagactcttattcaagttaacgcaatcactactacaacgcacatcgacacacatgtttgataacacatctttctaaattaatctatctcatcttccaaacaccaattatatgtcacgtaatttacatttttcacctaatttaacctac

SEQ ID NO: 92412 - DNA, 710 bp, Zea Mays
gaaatttgttgtctccatcaagagatctcaactccttgttagagaaatcttgttttatagtttcctgaaccccaattatatctattttttcatgagatatatacccccttagttgattgattctctctttgttccccatacctctaatgttccagctaagaaacctcatttatgatttttgaaggttttgacggtctccctttcctcttacctttttgggttacaggtaccacaggtccatcctgggccccctcccattcacaattcctatcagagtttgtaattgcctccatggcatattcctgaatctcctcttccgtctgaggagcattcctattgttaatcttttctacgtgtgctttatagttggcttctgcaatagctgccctcaacttctcctcctctttaaaagcatctatttgatcatcatagttatctaactctatactgatgtctttcaaaaccgaggctaaagtttcattatgctcctgattcaaaatagtaaatgtgttagaggatgagataccttgagtgatgtctttctctagagctctcatcgtggctttctccaagattggaattccatccctaggaatcctcgagctggctctggtagctcccatagggcctttcgttgtcgttttcttcctacctcttttgttgacaaccacatcccacttacttccttcctcttcatcagcaggtatttc

SEQ ID NO: 92413 - DNA, 370 bp, Zea Mays
tttttatctatctatttaaacaatgtttccctgctgtgtttatgtcccaattaatagttgatcattagggtaaaattaatgttattggaaccctatttgagataaatagaagatagtagactttaataaaagttggagcacctaagtttatgggcttaaaaccatgtaatgatttaactgacttagacctgattagtggataatgaatcattttgtatagtcatctaccctagacctagggaacaccagattgccaatccttttctactgtgaacttgtgatctctctgctgcatatgcttggtttactgcttttgtttgttatttcccaagtgcatagaatgaatgattactttacgtagacaacgggc

SEQ ID NO: 92414 - DNA, 366 bp, Zea Mays
ctgaagacctcgaaggcctgaagattgagccacactaggaagtgcatagggagaacgcgcgtgcgaagactcgggtgctaccttcgctcggacaggctagggcgaagaccatcaaggactgagaagaccatgcattgtaatctaccacattgtgataggggggcgtgtatagtcggcccatgttacaggatcccaaccgcaggccaccagcaggcagggctagtaatgggttagcccatgtttgtaattgattacgctgtaatgacccgccataacccccaagggggaatattttggggatattgtaggtaactgagggtgtaatcgtctttggcgaggcagggtcgacccttggttacttgtaaa

SEQ ID NO: 92415 - DNA, 274 bp, Zea Mays
gttggtggctgatccatacagctatgggtgaaggtttatgtaccaaagtggaagaccacatgttggggtatatgtttggttaaggttcatacccctgaaactatttggaactggtagaaacagtggtccaaaaatgtagtgtttaattatggattttcagacttagtgaaaaaccgaagtctgaatttgtgtgtttaatgccaactttgggctttgatggtttggaatccatatggttatagctaaaggtcattgtaccaaacttgtggagcaa

SEQ ID NO: 92416 - DNA, 311 bp, Zea Mays
ctaactctaaggcaacaagtatggcttgagttaataaaagattatgattttgatattcaataccatatgggaaaagcgaatgtagtggcagatgtgttaagccgtaaaggtcaggtgaacagtattactgcctatttggtcccgcaagaattatgctgtgaaatgtaacaactaaatcttggtatggttaataatatggaagcaacagttatggaagtggaatctatatttgagcaagaaattcgtaaagggcaagaatcagatgagaagattatggaaattaaaacacagattggtttgggtaaagcccc

SEQ ID NO: 92417 - DNA, 835 bp, Zea Mays
gttggagctagtgctgacccggacggtggttacgatgctggatctgctggagctggagctggcatagagacaaccacgaccgaagtggcgacaacaaacgctggaggcactagtggctgagcactgactggtccgacgacgtaggtagagaaatccagggtgaccgacctgagtggagagatggctagaccaaaggagtgtagctgggtcctgattgaatggctagcacaactgcagcctgaagagcaggagatggagcagactatacttgaggaataggaacaccagtgtgttgaaggatatgagtcatgaacgcccggtgctctgccctgactgtcaagggctactgctggagggtgtcctagcggttctaaatagtctagaacatagacaacatccgctcggacatctgttgctggatggctgcctgacgagcctgctctactgccagatgagcgtgctgctgagcgagagactgaagtatggcggccaaagtagggtcaatcgctggaggagcagcactggagccaccagcctcatgatcatgggaacgaggtggcacaggaggtggtggcagaatccccagatcctcatcatctgaagaggtgtcagtagtggcaccctgatcctcaaactgacggatggcctcatcgtcatctctgaagtctggtgccaatggatctactaaagccggaactgtgtcctcaggggctgggtggtagaatctgaactgaagtctggaggcatcaagggtgacctagaactaagagggactgatcagctgcgcgaatatgtgacagaggtagtgcgcatagggcagctgacaccgagttcg

SEQ ID NO: 92418 - DNA, 298 bp, Zea Mays
caaataactagtttatagtgcgcgcctatgcgcgcgtggtgaaccgtttatgtatgcttgacagagagtaaataaggacataagagcaaagacaaagcaaaccaaggttcagtgattgaaagagttggacattgttcagaggtgattaatgtagcggttacattagctacatagtcaaccgacaggttcgtacgaatttatacattacatcattagcaggattcaacggctggggatcagcactgcgaaggtttcagcagtttggttacttgtacacaaaaacattcatgctccaaaa

SEQ ID NO: 92419 - DNA, 986 bp, Zea Mays
cggggaccccgccaacttccgcaccaaacgaatgcaatttaaggtggtggacttcccaggatgctacaacgccatcctcatgaggtcatgctacgccaagttcatggccatacccaactacacatacttgaagatgaagatgccagggccgcgtggagtcatcatggccactacgtcgttcaaggtagcatacacctatgaataggcagctccgagctagcctcgacactcactggaccctagaggagtgtccttctaggcaccgccagcacggccgtaatcggccctgacgccatcaggctcattgagcaaggaagaggtctcgagacgactccgagcgctgtcgatgtccctaagcgcgcaaaggtcgatgggtagagcagcacaaacacagaatgtgtgggctcccagcaaaaaagtatgacaaggaactaccccatctaagcgaggcacaactgtgtattttcacccaaaatcaatgaattttggaatgcgcgtccacactattgtccacacagaaacaaatgttttcatatacacaagaaacaccacaaagaggttcgatacataaatcctaagggtagggacatcgtctaaacaggggcaggtgggccacaaagcggaaggctctagggtcaggggcgatcaggagggacctgacgtcgacccagctcgcggtcgactgagcatgggggtggacctgctcttcgttgacatccagctcctcatcgcttcggtcggcagcatagccatcaacaattacaacgacgtcaatatcatcaaaatgagagaccattttcctaagggtgatgtcgccccctcggcaaccgcacgctccacatggctgggcagctcccacaagcaatcaccagagacgtctcgatcaacggtggaggagagagataggcacacatcgtgctgcctaccatacggagctcttggagttcgacgcagcttttcgagggtagggcgtccgcctggcgtct

SEQ ID NO: 92420 - DNA, 379 bp, Zea Mays
gaggaaaatgtccacaagctgtaggatcggttaccaaaggtgtagattagatcgaagtataacggttgggccatctaatcaaggccttagatcctcgaatggaggtccggaattagatcaaggtgtgggagatttcgtgtcgtggatcgtagatccaagggcccatcatgcgtacctattcataatacacctagatctaatcgtggccgtatacggtggatcggacagccgtagtaaccccataccccttccgtcgagaacaatatgctaaagagccccaatctttttacatatttaaccactcgtcctcagtcgttgtaagaccattacatctatgtccttcattttatggttttaaccccgagctcctaggaatttg

SEQ ID NO: 92421 - DNA, 403 bp, Zea Mays
cacaaaagagttctgccacaactccaaagaggagaaggatggcaaatgtactagatgtattagaaacaacaaagaccttgaactctaatccttcaaggaaaattgccgaagcttcgaaagcgcaaaccgaagctgaaacaaagcaggcagaagttgaagctgcagtaattcaagctgaaaccgaagttgggccttcagagccttctgagacagagcctgtcgtagttgaagaaaaggcgagagaacaagttgcgcctgaaaaggttgaagctcctgctttcgacgcttcaaaagaaagcattgattacatcattcgccatgcttcggggaagagactttctcaagcagaaaagctggaagcactatactatgcccaaaaattaaaatacccgaagggggcatt

SEQ ID NO: 92422 - DNA, 314 bp, Zea Mays
gtggtttacaagagattaggacatttatggtggcaaataaggtacttgacaaaattactatagcatacaggaaattgttccatggaaataatagacgaaaattttaagaaaatatgtataaaccgattgaatttttttgatgtttgtattatcgtctcttattttagtttcgttcaaaactgttcttatatgtgtctttcttggtgtgcaactatcagactcgtcttctttgtccagtatacatttgacaaagacctaaactaacactcgacaaacagtcgtttatcggcaaagatctctttttcaggtaaatt

SEQ ID NO: 92423 - DNA, 371 bp, Zea Mays
gccgaaagacggaggaatgtatgtgaagttggagtaaactaatcctcgccggcgccgcggcggcaactttttttttccatcgtcgacttgctagctccttgctcccatccaaatgtgtgcgtgcagtgcagcctagctagctagctagtccaggtttacttaggtctcaacgtttcagaacaacaataatggaagaagaatctgctgctcaagctgggagacggaagagacgcgcctagtatcgcagagatctggtttcgatatgctgacgatatgatgaaagatacatatcctactagctatagagataacgggccgctcggtccggacccgttgaagcacagctcactaaaacacggcacgattagacc

SEQ ID NO: 92424 - DNA, 476 bp, Zea Mays
cgcggaagtcccatttgctgtcgcgagcatgaaaacacttgtccaacgccgagaggagggcgcgtgtttgatgatctagcgcctgggtgacggtgatgttggtgccgatggatggagaagactccatggaacgaggatccgaggaccgatgaatctgataccacttgttagcaaccctcaccgatagaacatgaatcactgaaccagacaaagcataactcaagcaacaagtgctggatagatggagtttgggaaggaaacaacaagtagggaaatcacagctagaaggaagatgctataatgttctagatgatccgggtacaagagagagttggggaaagaagaacagcgctagacaaagtaggaagatgaatagtaaaaggttctgatattttctccccttccttcgtgctgaccttcactgcacctttgtagtatttttccttagctacttgggccggcatggaccgttagac

SEQ ID NO: 92425 - DNA, 559 bp, Zea Mays
ggctctgcgagcccgagaggtgatgttcacctcttaaaaggacaatttaccaacttttttgctatggaaatcatcatactaaagtcgtggagtatttggaaggccagaaacaagtggttgtttgagcatactctctagttgtgggcgactgtctcgcctcattcaggattaaaatgaagaggcttactcttaaagtccacgagcactttttggaacacaatatttatctagaatctagaaccccgccaccagttccttaaccgtgctcccatcattataatataacatcttgcacatacctctatttcgctttttaatataatctttcagtagatgaaccctcgttcgcttatgttccataggaaatgactatactattacgaaactgagcgcactgatcattcttggacacacaaatagaagggacaggaaaattactgaatcaatcacgttagactgtacgaacagcagaacttgaaattactgaattactagtacaaatatcaaatatgcaatgcctctacctcatttgtttggtgctagtgctagctgttctcga

SEQ ID NO: 92426 - DNA, 283 bp, Zea Mays
cctggtacagctcacgttgccgctcttttcaaacctccgttcataaatgattctcggcgctcccctgcagtcttcaccccaacgacgaagttcctttatgagttgatgaggcgcactctgctaccgaggatgggatacaaagaggctaccacacatattcagctttggctccttggtgctttggtttcccactctgtgttcgacgtcgtcgatttcctgatctgtgaaattgaggacacaatgttgaatggacttcgagctcggtgttagctgtcatattcac

SEQ ID NO: 92427 - DNA, 514 bp, Zea Mays
aaatttgatacttcatagttcataattttgatatatgtcaattattgttgtggtactaattattgaataattttagttttagatcgcagggttgtgataggatcaattctcgatgagttagacgatacaaaatctaccttgaccaatgaggtttgttgaaacaatgacattgtttaacaagttgtaaacctttcgtacttgacaaatgaggtttgttgacattttgtaggaggagaacctgctgatgatgaggacaatgggaaggacagtgacatcgacgactacatggagatggatatttgaaactctatggatctgtgatggctattactagctctctgattttttgatggctatagttttgtagactctagccacttgttttgttgatggcctttcttttgtaaaatattggagtgttggtggttttggtaccatgctattgatgccttcatggccttgttgttcatactagtaaggtttgagtcccttggaacaattttaatagtaagac

SEQ ID NO: 92428 - DNA, 617 bp, Zea Mays
aactttatcagtatgcccagataactgatggggtatgattggatattgaactggagtggagatccaacgacgtggaattctacaataccattctaggtaacaattccttgcatgggtagcatctcaagtccttgtttcctggcgcttaacaacagagatgagcctgttctcccattccttaataatgtagttatcatggtaagtaggccaatgctgatcagctttaccctgcactgtaacaggttcgtcaatgttgattagctttaccctgcattgtaacacgttcaacaacctcatggctcgttcggtacaatgcgtttcagttccaacctgaacgattccaaggcaagtattcagtgaattcggttggttcgctcaaacctggtgaccaatgcatccggttagtttcaatcctgttcgtttcaggtaggaaacagatcaatttgagacattctctcctctgtcatttcaaaaaatcacagttttctaagaagttttccaagaagttgtattccttcgtatatgctgaaaaattaaaataagttttccgttcatacatatatttgatctcaactttctatgagaaggataaagacatagccatctcatatgaatcg

SEQ ID NO: 92429 - DNA, 485 bp, Zea Mays
gcacaatctaacatatataggattcccatctaaatggcgttgggacgacaaaacaagaacctgtaaaccgtgacatggaagggaaggaaaaattggtcatatatactatgtacatccatctacaggggaaagatactatttaaggatgctattaatgatcgtcaaatgtactaagagctacgaagacttaaggacatataacaatatgttacacccaacattcaaagaagcatgtaaagcacatggcctttttaatgatgataatgagtggtataatgcttttgatgaggttgccagatgggccacctcagagcaactgcgacatctattcgttaccatgcttatttattgcgaagttggagatgagcctacattttttgaaaaagtatggcaattactagcagatgatatccaatacaatatgagaaaaacattgaaccttccctcttaccagatgcccataaatgaaattagggaccatttac

SEQ ID NO: 92430 - DNA, 484 bp, Zea Mays
tctgataacaaatacaggaatttgttggcgaataactagcggtagtttggttccttacctgactgtcccatgttccgatattgttggcactggagttgagcgatacgagtctggatcattttgggtagagtggccgctgagcgatatgactatgagtcatgagcttcgagattgatttcaacgtgtgccctgctagcctgatgcactctcctaacttattatgtactcctaactcatttttgataattccctataccaaacacgttttcttttagtatggtattatcaacctaattatgatatacaatacgcagcaaaatagtttctatggcacaatacaacaaatttcttttataaccatgtggttattatcaattaaatccgtgtattacaagtccaactaactaacaacttacaaacttaaataatgtatcacatattattgttttgtgattgtgctgttgagtcggtgtatttataataa

SEQ ID NO: 92431 - DNA, 513 bp, Zea Mays
agcgttttacctcgggtgaggccacatgtactcgtgtggcccgaggggtccataggtcatgagtgggaagcagaccggtgcccacaatgtgactcagtgccaggcgtggttaatgcagtcagtcatttatggcgggtcaatccagggccgagagtgggattcactcgagtggttcccttctgacacgctcatcctcccttgtcaggcttcgccatgtccggcctaggctcggtgccacggggttcgatcgagggcgggtccttatagggttggcgcacctgcctcttccgactgactaatgggccctagtgatcagaggctcttccctcagcacgctcactgaccggcgggtcctagggaccagcgatcatttccccgaaaacttcactcacaatcttaccgtaacgaacatcactcccatccctaacagcaaagcctaaccctgatccgctggttcccattctgaattggctgaccatcatgcctaactagggctcaccagtagacaccaag

SEQ ID NO: 92432 - DNA, 557 bp, Zea Mays
ggcgaagaggactctagatatgttgggatacagtttgtgacaaaggagataagcgaggagacagaactcacaccttgtaatgggatagctctctcttgtcgtgtatataagaccgagagggaccccctacaatttcatcttaccttagcccacctactcacacctctcagcctgtaatcctcatatcaataccaaaaccaccacaagaagtaggatatcacgcaactctacacagctcgaacctatataagtctgcgagccatcccagcgtgctgtgtcacgaaccatcgagtcgcaatcaacgacgtcgtcctacccaaaagcatcacaagggtaactccgtggtgcgcggtcggaccacaaacactgacagacgtgtagcgtggtttcgtcctagagaatttggagtttaggtggtcaacaatttcctcgagtcgggtgcaagaattctagcagttggagttttttggagcggggactagacgagttctcgggttggagaagacgcccatccctcgaggggaagttgtggtcttcaaggcattttttgttgcggg

SEQ ID NO: 92433 - DNA, 463 bp, Zea Mays
tccacggataaaccctaggcagccccctcgttcttaggattaggcgtgcgcatttcaccatccggttggagtttatcttctgacacacacacacatccatttcaatgtaaatatataataaaacgtccctagacatgatagtaccgattctagcacaataaccggtactaaagatttgactttagtactttttcatggctagaaccgttactaaaggtcccttcttcaggatcggtttgtcaaaaaccggtcctaaagaagggatctttattaaccgttctagccaggaaccgatattaaagtgctatcatatattagtataccaagagacattacaccaacgacctcacgcaccgtttagtccaaacccactcaacccaataagccgctactatgcgtgtcgaatcatgatttattatttgcaagtttcctgagaagcacggtagatgtgtgtaatccgttc

SEQ ID NO: 92434 - DNA, 607 bp, Zea Mays
gaatggattaacatgagaacaaaagactctaatatagaatccacaaacttcaaaattcacaatttttgtaccttcaggctgttgtatgcaaggctatccgcgagatcatctttcgtcatggcacagaggccagcttcgagcttcggaaaccccatacttctggccatttcccgacagatggataattctttgttgtctgggaggcaatacaagaaatcatcttcatctgtaccattaaacactaaggcccctttcgggtacttcagttctcgggcatagtgtttagcttcaaaaatttcttctttggataatatttttcccgaagcatgtcgaataatataaccaaggtcttcggagggtgcttcaggagtagaagtggcagctttttcaggcaaaatctgttccataggttcttcctccgcttccttttctccaatttccgagggtttctccttggcaggctctgaaggcccagcttcggcgcttacctggctcattgtagctttggcttcagtcatttttgtttcggtttcaatttgcactttcgaagccttggcaattttccctggagtagagcttgaagcctttactgtctccagcacatcta

SEQ ID NO: 92435 - DNA, 757 bp, Zea Mays
ggcacgcagctcgccagggccttccttgtccaagcggccattgctgtggaattgcaaggttgataggatacgataggataggatatgcgccggccggcctgtttcttatgatgacttgatgctcaaacgacgactcccgatgatgaacaagagatgcaatgcaggggggttttatacaggagtgctggtggtggtggaggttcaaagccgactcggactttttccagatcagtagacagacgtgacttgtgtctttgggcatagtgacactgacctgtctacgtgcaaattcatcatgggtctccgtgtgcgttttagctagaatatactctgttactccgtacgtactatgttgttgttcccgtcaacatcattaaattaatcaaactcggtaataaaaggctcctatattgtatgcctctgtcatctatcagtggaggtttcatccgttaatcatccctccgtcccacacacagagtgccactcccacttttctatatctatagcactcactatatataatccactaatagtttcaactttacggaactgacctaaccaaatcgctcttacactcataacatccactaaatctaccaaacaaataacactcagacttaacacaccatcaaaactaatggttcggattactggataaccccatcaacctctcgcaaatccaatgaacaatattatttggatcatccattactcctcatcccgctccttctctctccctcacgaccccatcgcctcc

SEQ ID NO: 92436 - DNA, 376 bp, Zea Mays
tgttgagctgtttctgcctcttcttgagggatagtcattgttgcctggttgtgttaagtcgttgcccatgtatttagggaccaaactttgcacatttcaaatgactctgttttggattttgttgagcttttagtcatttcagtcagttctttcttcttcctttattccttttcatttgctctattgtgtttgtgtggtggtgttgataatgctctcatcaagagggagattgtaaacgcaaggtttacatgttcccttgtggttcaggtttgttatgagtgattgtcattggagtagcgtcttggattgagtcatgtggactaatcgaggcataagtttgtgcagcatgtctcctggcttgtaatgtgcatgtgcg

SEQ ID NO: 92437 - DNA, 623 bp, Zea Mays
cagactcgctggcgtcgtgcttattggccatctatagccatgactggagaactactagacgcttcggcatgacgtggtggtgagtgcttccaagcctccggcaaagaacaacggtgaccaggctccaattttaagctgactccgccactgtatctaacccctgtgttcttgttctagcagtgaagacgcgtgtagatctatctagtgctctcgaattgacaagttaaacacagtaagaatgtaagatcctatagaatttacaggctcgagttggctcacgagcttgaaactattttttaaccctagttcatacatcatcctctcattgatcgccttcgctggcccacgcccatcctctcacttttcgctggattagccagctgagaatgcactggtcgcgcatacaccacttcagttcggggagctaggtagaggtcgatccaacgcaggtatattcctatttagtttgtggaacaaaatcgtctgtcatcatcttgcccttcggcattttatttggtaagaaacgagatggattcttcgtttttttctgcagctacacacgatgttaagatgactggtgttgatagatgacactccgtacagtaagaaaagctccacaaaac

SEQ ID NO: 92438 - DNA, 283 bp, Zea Mays
atgtaccaagacctaaagaaaagattttggtggcatggtgtgaaaagggagatcgcagaatatgttgccatatgcgacatctgtcagagaattaaggtggagcatcaaagtcccgcaggtttgttgcagccgttgcagattccccaatggaagtgggatgagatttggatggactttatagtcaatttgcctcgcactcgagctcgttatgactccatctaggtagtagtggaccgcttaacaaaggtggctcatttcataccagtcaagaccagctacagta

SEQ ID NO: 92439 - DNA, 317 bp, Zea Mays
atcacatctgttatttgtttgatcattgaataacttcaactaacacttatgattcttagtgtcgcatatactatcaatcaatatctctcttaatgtgcactaagttaaaaggagaattcatgatacatctatgcaatttgtgatccatttgatatatgctgacaatgacttagaaaaggaacactagttgtagaactctctctggtgcaaaatatttccatatattgtcttgagtttaggtcttaagcgactaagactaaggacaaagcacaatgaagagagcgtctctatgtgaaggtacaaaagggtaaaacaac

SEQ ID NO: 92440 - DNA, 638 bp, Zea Mays
atttatacaagtttctagaattatttttgtattaaaattcaatttctaatattaattatctggttttctctgttgtctggactgggcgccaatagcagagaaacccaggggctaactcgcaattcctcccaagactcagtctaacccttaagtggacggcggcttattttgaggaaaactgaggggttcgtttagaaaatatccgggcgaaagggtatctagggtttctgaccgttggatcatcaatctgcgcccccgattagatcggcgcggccgtgaaacggtacgcgacgagaaccgttggatgcaaatacgacggggaggattttattattctggatttgattctatccgtccgatctagatcaacggatcaggccgaatgctacggaagggtatgcaatcatctaatctcagcccttgaattctagatctctagcccacggttcttcttctctccgccaaatccacacgacggctgagcactgctcacccacggtggagcatcgccggcgaacgcgcaatccgacgcccggacgcccctaacctaaaattggccggtgctaaacctagacggggtgatggcgagcacggaagggagattcttacccgcgattgaaggagtagcgagctcgtcc

SEQ ID NO: 92441 - DNA, 1247 bp, Zea Mays
aaggaggaatcaccgtcaccatcaagggggtcactgtcgctcagcggagtgggaataacaatagcttttttcgaggcatcgataggggtgaccatcaggctgatcttgtaggacaaacaacgcttttctcctgccgcaggccctggctccgagatgatgagagtcatgtcacgatgtagattccttgggtctagacaccacgccttcaacatgaaggatgataggttattcttcaatgctgttgcagggtgcagctcagaaataatgcacgaatctcgcagcagataatctgctgtagatcgagaccatgcatgggccggaatgcccctgatctccacattaatcaagggcaggagcaatgtcgcagccgcatttgcacaacgcgtccacctcttaaacacaagatcaaactatggtccactaaaaatacttccatcattgaatacccttgaagttgttctctcatccggcaagaacaagatgaaatcctcgggcatttcctggtgaatggacattgcacccacatcgatgttaaaacttcgagcaacttcattgatgatctctgcccctaggacctctggcctagtaccaactattgtgacaaacagtgccttctgcaatgttgcgtcctcatgtgccatctccaccgagaattccagcacacagaaaggagagaatagaggcctgacttgttgatcatatttctgctccaccattgtaatctcctccaaagctgtcagagcaacgacatcgtcggaagatacataagttggtgataaatgttgcattgccgccccctgacgtcgcttcacccgacgtctcttcctctttctgcgatgaactggtggagcagcctccccgaagcccaacgccaacaacacgggtgaatgatattcgtccccggtggccgactcaacggagagattcgcttccacaccgattccttgagcttggacatctggaaatcgcgtccttgagagccagagccttgcatccttgttaagcgctgccacaccggaacacgggaactttgacgcgcacggtgcgacctcgctgtcttcttcgtattcttctggtacgagcacgcagaagcctggtggtcgagaccgtggcacaccaaacagcgtgtgggtcgtctacaggcagcaacgaagtgggagggagacagatacttgaagcatctacctcggagatcctttcgggaccatcgaagaggatcagatgcaacacgtctagctcttctatgc

SEQ ID NO: 92442 - DNA, 1158 bp, Zea Mays
agtttgcatataaaattacatactactttttgtttgaaccacaagggtgtcataaaaacatgcaacaacattacaaactagtaccaaatataagggatgtagtaactagagattcaaaatcgtaactcatatgtactatcactttactaagggctggggaaaataacagatatgtagaaagtacttatcagtaaaacatttgttggcagcaacaagtgttatgcatgaaacacaagatcaagtgttgaacattacaaatgtttgtgggtcaaggcaatgttgaggcacacctctgattaggcagctaatcatagtgaaaggtaaatgaacatgtcatgaattgtactgaataattaatgaaatccgtgtattcatgaagtaatcgggttgtcattcctcttacatttattggtcaagactacactggtttgatatggtaccattggtcataaacaccacaaatacaagttgttcacttaataaatatctgcttcattggattcatcttgactgggcaaaagcagtacagcggcatggcttatgttaggatacgaggttgcaaaccttgcttgcattggcaactaagagtgaactcgaaattatgagggggcgtctgcatcgactacaaatcgtaaaccgaaacaagggtacaaagtttgttgcagcaggtacctaaatgggaggatgaacaatgtaacaaggtgagagcttaaactacaagtgcggatctggtaaagtcgtaagggttggggaaaataaactaggattgttcaactaaaccattggtggtgtaaatcattgttcaatgatttattcatatgacggggtacaacatggtatacctcaacacgggcggatctcgcccggtacacggggaatcgaagaaaaaaacgagtgctgttcgaaatgattcgtaaaataagtatggatttgacgaggttcaacaaggtattaccttaagaaggggagatctcggccgcaccacgccgaatcgaagcgtctctgtgtggatctgatggagccgtccaaggtcggatacggaaggcaacgaatcgaaagcggcgtacctcgtgcgacgcggatttgaccccgctttgtcttcggtcgcgaacggaactgcgtggagacgaagtcgagttcgtcttctgcgcaactgag

SEQ ID NO: 92443 - DNA, 328 bp, Zea Mays
tggaatgaatctccgataataaccagccaatcccagaaaacttcgaatctgacggacagttgttggcggcttccagttcatcacctcttgcaccttatccggatcaacagttatgcctgcttgagagatagtgtgacccaagaatttgatttcctttagccagaaatcacattttgacagtttggcataaagacgatgctctcgcagacgttgaagcactacatgcaaatgaccagcatgctcttcttcgttctttgagtacaccaagatatcatcgatgaaaaccaccacgaacttgtccagttcaggcatgaagacaaaattcatc

SEQ ID NO: 92444 - DNA, 336 bp, Zea Mays
ttcctctttcttgttttcgctggcgactgctatcactgagcaatcggtacgagtcattgtctgactcatactggtgccacatgctcacacatacagaaaacagtgttttcaaaagcctaccaatggagcaattggtatgaatcatcatccgactcataatgatgtcacatgcttatgcatacaaaaaggggtgccttctaaaccctatcgatggggcaatcagtgcaagtcctgcatcgacctatactagttctacacgctcacacataaaacaagagggtgttttccaaaccctacaaacagatcaatcaacttaagtcagagaccaacttaaac

SEQ ID NO: 92445 - DNA, 348 bp, Zea Mays
cttacctctaagaatcatctcaatccggttcaccaagtctacagagggaattcttctgttggtaacccgagtcgagtcagctaggcctcggtacagataagccgggtatgccctgtctttcaacggctgaatattcttgaagacaaaatcagcaaccacagcctcagcagtcagacccctctccttcagcagtccaacttcagctagcaaagcccctacctcagccacctcttgatcactgggggattcagtccaactcggagtacgaacatccggctgtcttcccgactgtgaagggagagaattgccatggttctcaacaataaaccattccaagcgtcatccctt

SEQ ID NO: 92446 - DNA, 799 bp, Zea Mays
gctatgtgatcgtgataggggcatggaggaggtcatcgccgctatgctcgaggacgatgcatatggtgcgggcgtgcggcgtgggagtagcgcggagtagaccattgattggtagtgcagagggtcgaggaggtgtcgatcgtcgatggtacagatgtggatggcatggaggaggtcatcgccgctatgctcgaggatgatgcatatggtgcgggcgtgcggcgtgtgagtagcgcggagtagaccattgattagtagtgcagagggtcgaggaggtgtcgatcgtcgatggtacagatgtggatggcatggaggaggcgagttcgcctcgtgagtcatgattgcaaagtgtgtccgtgctagtcgagtgcggcacgtatgagggagggatgggatgaaagttggggttatagtgaaatagggtgcaacgctttaggcctctaataggctatgatgctatgtattgggcctaatactgagttgcggggtcaggccgcatgatgtgcctagcagtggcccatgcttggctctacgcgttgggtcgaattggtccaagtttgtgaaacatcgtgccatgtcatgctcgcaccatgctaaaacgacggggcttcatgttaggtcaacagactgcatatgcgtgtgtagtgacaatgtaggaactacgagcgcggatggatcatccttcacacctttgtcctgatctagctatagatctagggatctcgacctcatagcctgtccaaaccttctttaccagagtcctctacccacttaattgcgcattaatgtttgatactag

SEQ ID NO: 92447 - DNA, 436 bp, Zea Mays
tcaggcacacaccctcattttccatcctataaagttgaaagcatagcagtttaacagattgcgcaggggaatgtcgaaaggtaaggaggcataagagtttttgtagattgtatggagaaaggccagggacggaacataggagtttagcagattgtatgggaacctaaagagtttaacagatttacacaggatcggcttttctacattctagttctcaacagcatatttttggctgaatatagcagtcagcatttcaagcttcttctggcatgaaatacacagtagcatataataagaaacatgtagctacctcatggcagaaccatgctttttttttccgtgactagtttattttatcatgtacagatgcaatcatacccgtgatgttgagaataagctttttagtacatgaatacatggatataataaatatgtt

SEQ ID NO: 92448 - DNA, 429 bp, Zea Mays
gcactcgttgttacctattaaataggttgtgcctatcggaccgggtcacgacactattaaatggaggcgcctttcggtctggacatcgacactattgggtcgagtctgccgtgccgggtcgcgacactatttaatatatcgtgcctgccgggtcgagctgaggcactattaaattggttgtgccttgggacggcctaacaagcatggctcttttgatcatttaagttcggtaccttctccctcatcgtccctgatctcacgagcgtagataaaaagcgagagaaaacttcatcttgtctcaccccacaccacatacctcactaactgtcatcttcacctctctccttgtcacatcgttgtccggcatctctacggcaaaatactaggtgcaccgggaggcgcaactgaattcatgcgatctaaccccca

SEQ ID NO: 92449 - DNA, 394 bp, Zea Mays
cgacactaagagccggccaaatgctttataagtattttccttgcacataccttctagatgtcatggtttgaaggtctaacgtctccgctacttctggtcgtccccggatcgtctaggtattcgtcctcggactgtccacatgtggttcggaccgcccagcctaaggtctcggatcatccggcgcacgctggacaaacgatcatgatcgggtatccgatattgcttacacctggtgcctccgatcttattagtctttctcctgtacgaagccttctaagtgaccactcctcatgatagatttgacgtgtgaggattaccaatgataatgttcttgcctttgtctttatcagccacatccagccaaaccaagactttcttatccaccagcagatcg

SEQ ID NO: 92450 - DNA, 431 bp, Zea Mays
gcccccgccgaagctataactgccgaagctaagacggtcgaagatacaaatctagaaggcactttttctgatattgataagatgatcttgaacatggccacggaagaagttgccacagctgccgaaaagatcctggccccagtgcccgggaaagagaatgaggttgccgaagagacttcagaggaaggggattttaattttcaagacatacttggcaaaaagttgtctaaagctgagaaggaagaattgagggattacacaatatcatgcggctataaaccaggagcattgatcttcggtggtgttgccgaagagagtttaggatgcctctgggaccggattggggcgaaggttgtcagcactttgtcgaagagtgttggctttccgaagcttgaggccgacctcagtagataccgacggcaacatatcgc

SEQ ID NO: 92451 - DNA, 537 bp, Zea Mays
gacagtccatcggagaggactcacatccgtgtggtgattggtgaactctggaagactcgcgtcacaaggagtgggagaaggtaagatgtcttaccacgtctgttcgatgtgaatcctgtggttaacacatgctaggatgacgtggagcaacgggaggcgagatatgctcccgcgcttaatatataataatgccttatacgttattgcttatacttatactatatgatgggtcgagttatatggctagttctatgatctatagtttgatgtgtgatattgtttttatagttttcgatgtgtttttgaaagtcgcctagagggtggtaaataggcgaaacttgaaatttatcactttgaacgcaaacccaaaccctagttagccgttagaatgagaaacaattcaatcgaagtgagggagagtagttcttcttgcaagtatttctcttatgattgtggaattacttcgggagcaatacaattgatttgggatcaagcgagaacttgaagagggaagggagaaataaatctcaatcacaa

SEQ ID NO: 92452 - DNA, 315 bp, Zea Mays
ctggggcaataagatttgtgttccgagggcaagctagcatggactcactctgaatggtaagtcgctgggactcgaacgatgagcttgagacagtgggtttatactggtttaggcttgctccctagtcaagtgtagtgttgatcgtagtattgctgggaggtgtattacaactagtgttctcgagtgaaaaaggaggactggccctctcgtaactcaagggtaggattttacagtggggacttgtgtattctactggagggagctcagcatgttgcccttgtgtggcgtagtcctcctgacgtcgtctgtagggtc

SEQ ID NO: 92453 - DNA, 729 bp, Zea Mays
gtcacatagtcataagtatatgaaatgtgaataaatacatacacagagaaatatggcacagaaaacaagagatgagacgatcgacaggtcaaacgacgtgaaaacgacgtttgaacgataaaaagtgccataggaggtttggaattcgaattgaggcatgaaatgacgtggaattgagccgatacttcacgaataggtttatataggcgaatatgagtgaagtgtgtgtttggtttgaatttaggcgaagaaaatgagatttgggcactcggctcggaaacgatcgctcgaaacggggaattgggtgaaattaaagcctggaatatcggatgggcgtgaaatttggcgaatatgttactggaggtgttgtgaaagtgcctgaaaaatttgggttcaattgaagcatttttggctggtttgggcatttcaccgaacacgtggggggcggagttttagggtttcggggaaatggctatttgagatgggaaaaccctcccgaaggagctaggaacctgcaaggatatttaagagacacatgggaacacattccaccacttggattcactagaattgacaggaaattgatttgggcacataagggtggaggtgagctcactgggctgaacagagagaagagagaggagtgaagacatggctgctcaccagagggagaagggacgagcgcagtggctggaggtcgccggagcacggccggagacggtggacgcc

SEQ ID NO: 92454 - DNA, 339 bp, Zea Mays
atcgatgttctaggaatgttctaagtctttgtcggatgatgtcgccaacctataagcactgggggatgcctttgtcttgattatgtatgggccttcccactttggctctagcttgccccgggactctgtccgggtggttcttacgagtacgaggtccccttcgttgaattctcttagggcgactatgttgtcacgctaggccttggtctgaacctgatatttatcgagggcctgcagggcgaggacacggtctccgtcgatgagatctttggaagttggttcgtcgacatcgaggatggctgatttgtttgttcggggggacccatgctttaactcttg

SEQ ID NO: 92455 - DNA, 705 bp, Zea Mays
gcttaaagtaaactagtttctcatggttatgggatgggagtttatgtaatgttattaagaaagtactgaagaagtctcttttatgtcaagtggtaagtaaaaatgtttagtataatgcgagacttgagtaggtttttagggtcgcaagaatggagtcttgtggacatagaccgcttgagttgattaaggaccatccattgttgacattggtttgagcaactttattgtgataccacatatcctcttatggggaggatgagctgattaccttagttgctccactcttacggacatgatcctagacatgtggtcttgtgtgacttggtagaggatgctagggttgtcccctgtggacctaggtaggcctccacatgagctaagcgtggattcgtatgttcggaactctttggaaaaagttgacaaaagtaccccttgttcacagtggatgagtcgtatggtccctttgttgtgtgggtaaagcgaaagggaaataggcctaaaaaccatttccacacttgttttggtaattgaaaaccatcacaaccaatcgagctaactaatttgctaagttacaaattcaagtactaagaaaatacttcaaggaagatcaaccatcaaaacagcatattacagaccgtccgaggctctagtatggactgtccgggataacgtagatcatcccggacaggaactttttgaaaatac

SEQ ID NO: 92456 - DNA, 310 bp, Zea Mays
cgaagaggtatgcgcggatgacgaccgtccgatcaaaaatggacagccacgattagatgcacggtggatataaccctgattcccgagtcaccgtcggatccgagatcgacgcgaggaggtcgtcgacccaggatagcgtgtgggccgttcgattgggatctacgacccagatcttattaacgcgaaccggtatcctgattctaatctgaaccgtacattcacaaatcagtggccaggtcgcaccctcctcttcccggttgaacaccggcgacaaccagtgaagccgcggtggcgcgccatggctgggaga

SEQ ID NO: 92457 - DNA, 918 bp, Zea Mays
ttagaaacttcaaccttcattctcttccaccagaagttttgcttcaaatccctgtacattttggtttctccagggtggacggtgtcaggcattttatgagcttctctcaagatatccatcttcacctctgatttctatggcatacaaaggcggcccctgaaacgaaccaaatcattctcatcaatggcgacctcacggggtttaccatcgccgaccctctttcgagcttcccacaacaaacgatcctgctgctgagccacacacactctctccaaaagggaggattgaatgagcatccaagtctcctctctagcggtgccgacatagcacaatgcaacccccatacgatccagatcggcaatcaaaggcatggctacttttggaataccggtcctgctaagggcatcagccaccacatttgccttccccgagtgatattgaatggatagatcataatcctttatcaactcaagccaccgacactgcctcaaattcagctctttctgagtgaaaatatacttgagactcttatgatcggtgtaaatgtcgcaagattcgccatagagataatgcctccacaattttagggcaaagagaaccgtggccaattcgaggtcatgagtaggataatgcccctcatgcttcttcaactcccacgagccataagcaatcactctgccttcctgcatcaacacacaaccaagacaaatatgagaagcatcggtaaaaactgtgaaacgcttaccactctcaagcaaggctaagataggagcattcaccaacttgttcttcaatgcctgataactgacctcacaattgttggaccagatgaaaagaacacccttctccaagagtctagtcaatggcttagtgatgctagaaaaatttggcacgaaatgcggataatatccggcaagc

SEQ ID NO: 92458 - DNA, 417 bp, Zea Mays
gatttcttccttgtagtatgcccgttgtatctcatgcagtgctcaagtggatttgacctcgggttggcaagttacgaggaggtgaagttgtgtctgtccgagctgtccacatcgagacaaaagccatgtcaagtcgggtcaaacgacttagggttgggttcaaacttttccagggtgttctaggggtctttaggcgccattttgtcaattgggccataaggttttgaggttgggaacaaggtgaacatgattgatctttgaaagagggtcggttttgaacttgagaaaaacctgatttttcttttatgtccttctctttggtgacctttttggggtttttatgaattctttttagggtcattctcttactaacttttgtagggtattaagtgtactacaatttttataattatccca

SEQ ID NO: 92459 - DNA, 436 bp, Zea Mays
taggcagatgaaaggtaaaactgcaacaattgaggctagagccgaggccgaacccacagtgctagttgggacgaagctttccacagccgagcaaggggccgaagaagtacctccaaatactgatatagcttttgagataaatatggccaaagaagccgaatcccttgctcccgaagcaccttccgaatatcctgattatatcattcgacacgcttcgggaaaacaattatctgaggaagaaattttgaagctaaacattatacccgagaactgaagtacccgaaaggggccctagtgtttaatggtacggatgaagatgacttcttgtattgcctcccagacaacaaagaattatccgtctgccgggagatggccagaagtatgggttttccgaagctcgaagttggcctctgtgccatgacgaaggacgatcttg

SEQ ID NO: 92460 - DNA, 397 bp, Zea Mays
  misc_feature (114)..(114): n is a, c, g, or t
ggattttgatgttggcagtggtaatgataatgccgaagatcgaccgtggaggtcgagtcatgtggtctttagaaaatcaaccatgaagaaaggtcatgttgaggctatgaaggngtagatattttcatgatgtatctatagttagaattggtggtgagaacactgttcctcttcctgagaaagatgaggtagtggtttttcgaagcttcatgaaagttgggctacggttacccttgcacaagatgttgattgaagtgttaaaaagtttgaaatctttcttcatcaacttactcccgacgcattgattaaggttgggatcttcatttgggcaataaggagccaaggactggaaccagatgctgattgcttttgcaatattcatgagttgtgctacgag

SEQ ID NO: 92461 - DNA, 445 bp, Zea Mays
tcaaaactggcaccgttacccgacctaccatgttaaccatttctgccaaaaattcttcttttaagttatcttgcgcaggaccataaacacaaacaagcacccatttaaagccatcattcttatttcgcaaatcaaatttaacatagaagtcgccttcatctataactcctatatcgaaaaccgagagatctatgcccatcagtattcctcctgatcgccctctaggttccttacagtgccagatgaaatccctcctcgcacataaattttttaggaaagtgaccgaaaattctttctttaccgtttccgataaagcaatgaagttaaggtcaaaatccttggtcatgtccgctacaaaacgatgtttcttagggtcatgaaacccattatagttccagaaaatacctttcatcttttcttcttattttttgtgacttctttttac

SEQ ID NO: 92462 - DNA, 664 bp, Zea Mays
gcaatgttgacttttccttcgctagctctgctggcttagcccttgaagctttagcctcagtgtgagtaggaaaaatgcgtgcagcggttacttcccctgaagcttcgataaaaggagttggcatctttgaagattttaaaatagcatccaaaatgcttgccatcctcctttccttaggagtcattgttgtggttgcagcagtggttagcttcggcaactcagttgtggttgggggactcatcaatcttgaatgctcttctgcttttgagctctttttatgagactgctttactagattggcactagcttcaaccgtcgcagcaggaatcatctccgaagccaaagggatagctttggtctgttcagcaatctctatcctctttgtatcggatattgcagctgacctttttatagaatgtggcctcggcctgtgagttaaaaatttaagtttgttctatttaggcgtggtggaagaggaggaggctgccattttccttttcaacccttgttttcgggcaggaaagcagtaatcaggataaaaaaatccaataacatcaaaaactctattcaacctcctctttccgcgagcgccgaaggcagtggtcatagcttcatcctctgccttcgaataagctcgcaacagctcgtcactggtggcctcaac

SEQ ID NO: 92463 - DNA, 391 bp, Zea Mays
cctccaactaatccaaaaagactaaccattgagtcaagtcaggaagttttttccattgacatctccagacgaactcgatctagcagctcagcacatcaagatgataatccacataatcagaagcagactggtccacaactagcaccagttcatcgtttccgcagaaaggcactagcttgtcgtgtaaaaagaaatcatcctcctactccatccacactgtccgatgatgatttcatggatgctccatctttgaagcgccaattcatatcagcctctccttccccttcagaaaaaacagtgcaaagaagattaaagtcccttccccccaagctccgagtgtgaaaagcagtccaaagtttgagataaatgtcaagtctaaacagaagactcc

SEQ ID NO: 92464 - DNA, 437 bp, Zea Mays
cgagattaggccacgtcatcttaaataacggcagccgtctgatggaaatccaacgcttcatacgaatcttgaatagtaagtggagaacatcccggaaacatccagattcggacaaaaggaaatggttttccttgcttcctccgcccgtgtagctgggcaacacagtattgaagcaaaacaaattcctttcccaaaacctcctttcccccaccccttcgcacaggcgacggacgactcggctaccgccgctgccgctacgccagcttcccagcgacttctgtatcaaggagcattcaggtatgcctatccttcgcctcctcgagatgtagcaagcatcttccctcccctttgctttctcaaacacatcggagccacaacgcaagcacacatacaggcattttttttcccgagcggcatgcatcctccgtctgccgtcg

SEQ ID NO: 92465 - DNA, 473 bp, Zea Mays
gccagagtaagatctactgccagagtgacccgtgagggagacgaaactgaagtgactgagacggtgccaatatcaaaagtaatgagacgctcagatctggttgtgcaagagggagcttctgccgaaggggcccccaatgtcaaagctgaatagatggaggctaaggtcgggagtgatgacgaaagtgaagaggacaatagcatgctgagcccaaccaaacctagtcacattgaatttggaagatccaccgtaacagcagaggacttggttgtgatgaagaagctaggctactttggagaaaatgaagatggattgattcgctttgctggggaagaagtaattatagagccaaaggacgatgaggttgttgtgttcaaaagattcttcatggcggggcttcggttccccctgtacgatatgataggggaagttttgaagagatttgagatatatctccaccagctgaccccaaa

SEQ ID NO: 92466 - DNA, 425 bp, Zea Mays
actcctttccgccgtcatggtctggggatgacaccatcaactcgctgctgggtgcccaagagaaagggcaaaactgtttcatttgcagaccctgttgtttctgctgtctggccgcaggtaggtggcctggagcttgctgttggtgttggaagcacgccagggtctgttggcggtgtcaaccaggaaacctcacatgaccctgatgcctccaagtgcaaggtaaccaattctgtggatcttaataatgttttcgcctcaattctaaatagcttagacagtgttctggccctgaacaattctattccagccaaggccccagctgtccaaccgactgagtttttaggcccccaactggtaaacgacaatcaagctgtagatcaaaacttgccagctgctgtcctcgacagtttagacaatgttctgac

SEQ ID NO: 92467 - DNA, 515 bp, Zea Mays
gagaaggccaacatgttccgaacttttggagcattgggcatatccataaataaagaatttgcaaagaatgatatccgccgcctagcatcaagattagtaggaacatccatagcagactccttcacagttaacagaagatgaagcctctttatctgaacaagcataaagtttatgtcattgcagtaacagaaagaaaatatataagcatcatatcagaatcccctatacataaagaatggggacaaatatcagaccttttcagtccatgcaattgattcatccacagggaacttaatagctttagcaaacaactggtcttgctgatctagcggtgtaattccttcatgttttctactatttgcaccatgtgcagattccaacagtctggaagaaaaataaaaaatatatataacacaaactactgcaacatttatactagaaacaaaaagtaacaagataaatcaccaaattgtatgtagaaacaaaattgaacttcagtccagctttagtttttt

SEQ ID NO: 92468 - DNA, 851 bp, Zea Mays
gggagttcgattgtgtggacagaggggtcttcggatgaagacttagactattttgcagcattggatgtggctgcagcggagacttctctgcgtgtgacgggtgaggatattccttgtgcgagtgctgggcgtaggcgtcgaagggcggtggcgaagcggagagtgagtgagttgtcacaaagtgatagacgtcatggtgaggtggagggtggtcgtcttcgagtggacgggactaccaaacgggaattgttgtcttcgccggctggggcgagtgtaggtgagggagagctgtgaaatctttttgagggtgaggaattgaggataatgttgttcaactacagggagatgggtatcatcccgaaggttgagccgttgtaatgtgtgatgccctcgctgtgtgtgtaactatgatttgtatgatgaggttgcgtgccttcgttgatccggccgcgcccgtaggcggcttgtgtccgggtgcttttggggaaatcttcgattttgcgcatttgttgagttagaccggctgcacccgtaggcgtattttgcgcggagtcttttggagaagacctcgattttgcgcacttgtgctattccggctgcacccgtgggcgacttttgctcggataatcttttggataagacttggatttcgtgcacttattgtgctgttccggctgcacccgtaggcgacttttgcgtggatagtcttttggaaaagacttcgatttttcgcacttattgtgctattccggctgcacccgtgggcgacttttgcgcggatagtcttttggaaaagacttcgatttttcgcacttattgtgctattccggctgcactcgtaggcgactttt

SEQ ID NO: 92469 - DNA, 478 bp, Zea Mays
tcgtcctcatgttttcatcgaattagaatgttgtgagtcaacagttccaactcctagaaagttagatatgaactactataacctaagcaaaaacttggccagtggtcacaatagcacacaaaaaaacaagttaaaagtctcctcttaaacaaatgaatatgcgaaatcgaattcaatgaagcaaaacgagtatacagagaaacttatggctctaccatcgaacgctgatcaaacaccatgtcaccgtcaccacagatctaaatcaaacgaacgaccacaacagctaggcgagtaagagggggaatgagactgtgagagtactcacagcttcttatcgtcatcgatcttgagcttcttctggcacctaatggtcgggtttgcgatgttgaactacacacaaaaacaagtcaagagccataaaaatcagaacccagacagctgcaaatctaagcacgacacatgcatatttccacatggc

SEQ ID NO: 92470 - DNA, 421 bp, Zea Mays
atcgcaatgagagggagatcgggtttgtcgagcaggccgacgttgtcgttggaaataaaccctaagatattgaaaaataagtaatgtccaactattcagggtttatttatggtggctttggccatcgaaaattgtacctctactgacatgtatgagtactttgtaaaaagatacttatcagacttaaaagtgtttgaatttttgtggaccaaagtgtgcacttgttttgaaaagggtagagtaataatactactagattggtaatcaaatatatatttaaattttacagtacatccgtacgccggttagaacgaaggtctagtttagaagccacaaaaccgaagggtatatcggaggggctaaaattatttaatttttgaataagagggtctattatcccatctggttttgtggctctcaa

SEQ ID NO: 92471 - DNA, 354 bp, Zea Mays
aattgtcctcttatcacagctgataattgcttggtacttatctagccaattcatccctaggatgacatcttttccctgagtacccattactatgaggttagtgggaaactctatcccccttatttccacacttacattcaagcaaaaactatcggctcaaactttaccaccgaatgaatcaatttgaatgggtgttgacatggtagttattggaagattatgtgcttctacctatgatgcagtaataaatgaatgtgttgcttcagtatcaaataatacttctgcaatatgggaatcgactggaaacatacctactatcatgcctggtgtttcctggacgacttcagcttccaa

SEQ ID NO: 92472 - DNA, 436 bp, Zea Mays
ttcgaagctaagactaggaaggagccttcccacttcacttgtaatttgcccgctgtgtctgggtttgctacccttcggagcacaagatggcctggtgatatgctgagtttcactttcttgtctctccatcttattgttttggcttgataccttcttctgttttcaattgcttcaagcctcgacacttctattgcatccttcaaaaaaatttcatcatcctgatcttgagtcgaagttgtgactcttgctaaacccaacttaacttcttctagggtaactgcttcatccctgaagagaagactaaacggtgtaaaaccagtggatcttgatatagtcatattgtgattccacacaactttgattagctcttttgtccacttccccttgggtaatccaactaaatactttatgattcccagcaaaattattatgtttg

SEQ ID NO: 92473 - DNA, 824 bp, Zea Mays
attttgcgcacttgttgtgctagtccggctgcacccttaggcgacttttgcgcggagtgtcgcacgcgagggtagccagcgctgcccctcgcggtgacttcgttgtggtcgaatgccgaagaccgtcgatgcggtctttttcgacgttgtaatttttgcaggggattttttgcgtgtatattacatggctccgcctcattaaaaacctcacccccgggaggaaaagagtgcgggccggaataaagctgttttgcgaattacaagggcgagctggccctgaggagtgaaacaaaaaatttgcggagattgtcaatgttccaagaatgctctaagtcctcgtcggatggcgttgttagcctatacgcgctgggggacgccttcgacttgacgatgaaagggccctcccactttggctctagcttgccctgggactcagtccgagctgtccggacgagtacgaggtctccttcgctgaattccctcgggatgactgtgtggtcgcgccatgctttcctttgagcttggtatttgtttagggcctgtagggcgaacacgcggtctccgtcgatgaggtccttcaaagtaggctcgtctacgtcggggacggctgaagtgactatccgtggtgacccatgttttatttcttgcggggtcatggcctccgatccatatagaaggcggaaaggggtgaacccagtcgccctgcactcagtcgtgttcagcgcccagaccgcttcaggtaacaggtcggcccacttgcctttcttgtcgtcgaggagcattttcttgacggctgtgaaaattttaccattggcacgttccac

SEQ ID NO: 92474 - DNA, 885 bp, Zea Mays
gacgagtggtggggaagtgatgactgggacttgatcgcctccttgtccaactgcagcaagctgttctacctgtcccttgactccaacagcttccgaggcgtgctcccgccttccatcgtcaacctctccagcacgatgcagaagcttcatctatcacacaacggattccacggagcgattcctacggatatccggaagctttcgagcctcaccatactcactctcaggggtaacttgctgacgggcagcatcccgccatcgatcggggagcttcacagcctaggagttctagacttgtccgagaacaacatctccgggggaatccctcctgcgctggggaacctgacaaacctctccatactttatctgttcaagaacagcctgcagggacccatacccacgagcctggggaagctgcagaacatcggtagcctggtcctgtcgctcaaccagcttaccggctcgataccagcggaggtcgtcagcctctcctctctgaccagctacctcggtctctcgtacaactccctcactggtcagatcccatcagaggtcgggaaactgacgaacctagtgctgctggatctgtcagtaaaccagctatccggcgacgttcctgcagctctaggcaagtgcgtggagctagcgcagcttcagctgaacgacaatcttcttcaaggcgccatcccgcagtccttgagtggactgcaaggaatgcaagagctggacgtcgcgaggaacaacttatctggccctgttccgaagttctttgccgactggccgagcctgaactacctgaacctgtcgtacaacaggttcgaaggctccgttccggtaacgggcgtcttcggtaacgcgagcgcgttctccgtggctggtaataac

SEQ ID NO: 92475 - DNA, 337 bp, Zea Mays
tagccttatcacgctgtgccttcagaacggcgcagttgtcttctgaagctttgaaagccagtcgagcagcttctagctcctgtgcaacgagtttctttgaagcacggagatctctaatggttgaatccttggttgataacaactgtccaagccgctgaacttcatcttgggatacttgcagctcgtgacgatgatggtccaggtccgacatagtgaagcagtggttcctttccaaaatagtcaagcagttgctagcatcacggtataacctgtctagattatcacgggagactgcgagtgctcgtctctcctcctatgaacaagaagcaacattcag

SEQ ID NO: 92476 - DNA, 592 bp, Zea Mays
ccatgggtcgctctttgctctcatgttgcgaacaagctttaggtggcacattgattcccataagtaagaactccatagagaggcagtaactatctgagtccttgaccccttacgtacaatagggagtacttgtctaaaatctcccccaaacacaatagtcttcccaccgaagggcagaccagggcgtcccatgatatcacgcatgctgttgtccaacacttcaattgattgtctcttagccattgatgcctcgtcccaaataatgagcgacgctttctgtagcaactttgatgtcccactttgtttcatgaaggtacatatagcaccatcatcaatagtgagttgtatcttgaagcgtgaatgggcagttctcccaccaggcattatggaagctgcaaccccagatgtagctgttgcaactgcaatcttgtcctaactacgtagcaccgcaagcaatgccttatacaaataagtctttccagtcccaccaggcccatccacaaagaacacaccgccattactggtgtcaacaacagataagatcttttcatacgcagacttctgctcctcatttagtgtttcttgcaaagca

SEQ ID NO: 92477 - DNA, 490 bp, Zea Mays
agaaagcgcgctcgtccagtttctgcaagataaccgagacgtattcgcatggcaacctacggatatgccgagagtcccgagagagctggccgagcacaaactgaatgtctatccccaggcgaggtcgatccgacaaaagttgcgtcgtttcacgcccgacaagagagaagccatccgtgctgagctagctcgcctagtcacggcaggattcattagagaagtactgcatcctaagtggttagcaaatcctgttcttgtactcaaaaagaataaagtggattggcgcatgtgcgtcgactatacggatctcaacaaacattgtacgaaggatcccttcggacttcctaggatagaccaggtggtagactcgaccgccgggtgttctgtgttgtccttcttggattgctattctgggtatcatcagatcagcctggcaaaggaagatgaggaaaaaacagcattcatcaccccgtttggagctttctgctat

SEQ ID NO: 92478 - DNA, 391 bp, Zea Mays
aaataatccgctgaagtagagaggccattcactcgtatacctgcatgtaccgaaaagtacaagatgttgcacatcctaataagtaataactaatataaagatgatggttgttatcagttaccacagtagctcacaacaaaagtaacttagtaaactacagagagtctagcaatcaagaaatgtggtagagaagttagtgattactaaaacagtaaagtggcatgagaatcaagttaacatcaattaaaaaggactatctccctccaccactccatatgtatcatggagtaaatcaatgttgtgatggcacatgacacatttcaggttggatggcctaataaataagcaacactatgagtaaacaaacaccttgactgcagtaatgacatcc

SEQ ID NO: 92479 - DNA, 550 bp, Zea Mays
ataggactagccgtagaccacagccctgacctaaaaagctttccttaaaagaaaagacctcttaacctctgaaagaacctcctctcctttccctggtattaacaccccttcttctcttgctaccaaatggaatgcacctttgtccttaaggcatcctattgctcggaggtggaaggattccctcaccttcggagttgtgcgcttcgcatggggatccgcaagaagccggagtatgtctagatggaataccgctagaacgggattgagaaatgctctatggcagtttactttggagaaagtcgaagctacccaaatcaccctccctttcagatcaccgctactggccaccgcttcctagatacctgccagaatgctgcccaaaaagccctccgccagctatgccaaaactacagcagggaggtctttgagacaccccttcgctactttccacctagcaacaaaaatactcctgcttggaggaaaagactacaggccttatcaaggagagatcctaatgaagatgacccaaccatagtctacatggtcggat

SEQ ID NO: 92480 - DNA, 458 bp, Zea Mays
cgtgtttcaaatagatggacaattttttgagcttatatcatggaggcaatgtggaagaagatccctatggaaatgccaagttcattgacatgcgacatgtgcccgtgctattcattggtagaccatccttgagtgatgtgtttacaaaggctaaacaaaagctaggttaccatgaagatgatgatattgcggttgacggagtgcttaacattagtcatccaccaaatgtaataagacgagtcatcccaattgattctcaactagattgggagaattatgttacttcggctatgaagacccagttgcaactcatagaggttgtggtgcaactggttgtagtagattgtccccctgaatactatgatcgtgatgtggatgacgtgccaactgtgcctgatactcaatctggccccaatttaatcccattaagtcagccaggagatgacctgcaaacagat

SEQ ID NO: 92481 - DNA, 760 bp, Zea Mays
ggggaatccccgggcttttagcacatcgagaaggtaagcccaatttagggaatcgaaagctttggatatatcaagcttaacaaacagagccgactggctgtttttatgaagtttcctgatcaccctttgaacatataggaagttatcgtgaattgatcatttctgaatgaaggcgttctgagcagtagatacgatctcgttcattcgcggtgcaagcctgtttgccagaatttttgttatgattttcatgaagctattgataagactgataggtctaaatttgtctattgtgtcagagacctctcttttgggaagaagaatgatgtttgcctcattaactaggtgcaagctcctgcattttaggtgataaaagtcgttaattgctttggaaaggtcgtctttaaccacgtcgaagcagcatctatagaacagcccaatgaagccatccggtcctggcgccttttcgggattgcaaccccataaccaccttctgatctcattatcctctatcacattgtctaactcggatagatcaaatggcaaacagcccaaattatcccaacgaacagccctctgtctcactccacttgttccaagcactgcattaaagtgatgatgagcctcatgcattttatctcgttggctggtcaagattgaatcaccatgaactagagatctgatattattttttcgtcttctattgttggccatcaaatggaagaatttgttattagcgacccccagacgcatccaggtgagc

SEQ ID NO: 92482 - DNA, 452 bp, Zea Mays
gatctcagatccttatactggtggaccagaatgaagagggagattgccaagtacatatccgagtgtgacacctgccagaggatcaaagccagtcatttgaaggtagcaggccctttgcaatcccttcccataccgtcttggaaatgggagaacatttgcatggactttatcgtgggattgcctaatacctcccgacaccatgattccatttgggtcattgtggacagattgaccaagtcagctcatttcttgccagtacacaccacccacaggacggagaagtatgcggagatctacattgaccagatagttcgtttgcatggaataccaaggactatagtatcagacagaggagcaccatttgtggcacgattttgggagcaattgcaagaatcacttgggacccatgtaatacgaagctcagcataccatcctcaaacagatggccagac

SEQ ID NO: 92483 - DNA, 309 bp, Zea Mays
cgtggcgctatttgactagttggttaggtctacggatccaaacaccgacagttggtgcgccaggtaggggcagtcatgtgctaacactcagttcccatcaagacttcagatggctggctttcaccaccccttgaggcttagcactttgatcaggtttaggagcctagagttcatgtctctcaggatcgagtacgacatggtgctcctccccctggtccactagctaacacttaggaatgtctaggcgtctgttcccgtccttcttatcgcaggaggcaaagacagagcaatcgtaatcgcgccactcat

SEQ ID NO: 92484 - DNA, 312 bp, Zea Mays
catatcagcttcagacacaattgatttcccaaaatccagatggctgggcttcgatggcataatgatgtcataatcaatttctccttcattaccatcaccctcttcaatatctacctgctcggtttcagcagcgggtgattctttgtcagcagcgccttcagtcacaatcaatcccgaccgcctcataacttcggagatcggagcagtttcagcagcttcggcttcctctccgtcgcgagtaactctagctgttgagcgtaccctggccatttgatgttgaattttttgcgttttgacaaagttaaatttttt

SEQ ID NO: 92485 - DNA, 346 bp, Zea Mays
gcaccatcaagacatggaggcaaacgaggcaggaagcgagggagaggagggtcccaaggaattagagccagctcccggtccaaatgcagctccatccggagtacccccttcacctgcatccagtgttgcctctaccactcagggttgacaggttagtttgacatattaggaggacaggaacacacacgagcttagtttttaccaatttttggactaggcttatgggtggatcccctaaattgttgtaacctgggaaaaactttatggataatgaaatgaatgcaagcctgttatcctcgtttggttcaatatgatgttatgtcatttttctctgcgtgatataaag

SEQ ID NO: 92486 - DNA, 666 bp, Zea Mays
cggggtacttctgccgcatcagctcctcaagttcccaagtagcctcacgctcagattgattggtccacaagaccttaacatacttaattgatctccttctcatgacacgctccgaggactccaagatacacattgggtttcactccaaagtaagatctttgtgcacagcaatcggttccaacttgatttgatggtttagatcccgcaaaaacttcctgaacatagaggcatggaataccgggtgcacccctgccatggattctggcaattacaagcgataagctaggctgccaacccgggccaagatagggaacagtccaatgtatctcgggctaagcttctcaggaacaccaaaccgaactacttctctagtaggtgataccctgagaaggacttgatcacccactgcaaattccaagtcccgcctcctcacatcagcataactcctctgacggctgtgagcggccaaaatgttctaacgaatctcccgaactttcttagatgtctgctgaacccaatgaggaccgaccaaagatctctctcccaaagtctcccagcacaatggggagatacaccgcctgccatactaggcctcatatggtgccatcttgatgctaacctgatagctgttgttataagcgaactcaaccaaggcgagattgtaac

SEQ ID NO: 92487 - DNA, 542 bp, Zea Mays
ccactattgtgcatcaagctcgccggtgtcaacgtcataccgaacgtcgcctcgtccgaaggccaccacccctatcggagcaccaccgttcatcatcgttcgagcttcgcctttgggtaagctttccccaatgagtttcttcctattctctccatttaaagtttgcgtgccattcccattttgagttctggccatgagctttgcctcatcgtgtgtcacatcgctcgtacgaccctccaacttgcctttgtgaatgggcacatgatgtgccacggcgttgcagcagccctagctattccttgtgtgccgccacgttgccattccggatggtgccgtatcaacaaccacctcctcgtagccccggttaacttaccctgcccacatcaccgcacgatgcgccacactctgaccactgtgttgttccgacgaatcaccactggcacaatttaatgcacttaaaaaatatttttataagctccaaatactttatttgagtccattggtctccaaaacatgtctaggactataatttgaggagtctt

SEQ ID NO: 92488 - DNA, 278 bp, Zea Mays
gtttttgttcatctttgtgaagcttatcttggtattctaccacactttggattgtagaaatatttgtaccattgtcggcctgggatggccggtgggcagcaccagctcgtgggcggcgcgagtctggagatgcgccgagggagaaaaacagagtatctcgatatcccactcaaggacagcatcaagggatggcgcttggaatggttcatcgttgagaatcatggaaaatccctccccctcggtcagggagacaacctgatgttcgtgcttcgagttgg

SEQ ID NO: 92489 - DNA, 447 bp, Zea Mays
atcggtgcactcaacaccttgcatacactaataattgtagttatcacctttcatacactagtattttgttcttgttagcacaattaatctctagcaaatctctaagtgcaaggataattggatttctgcaataacacaaaggagggttcacaattcatccattcatgactttggtcttctcctcgttcattatcagtggatggttgggaggaggtggaacccaccgttgaagcgctcatgtggccatatctttttcacaagtggttaaaaagtaggtatcttgggtcaaagttgttgtgactatcaacccactaaaaggaaaaacacatctaattgttctaaacaagttgataccatgaacttatcactaatttaataacacattttaaggaatattgaaacaaaatatttacaaacaattacttacattaaaatgatcacatgtgt

SEQ ID NO: 92490 - DNA, 442 bp, Zea Mays
ttacactagagcccctttggcatgctccatatgattctacctgatgaattttttgtctgtcaatacgttttggcctttttttggcagtgagtgattatgaatggtttatatcatttatgtggtatgaatgttacagagtatatgtgcttgtttagttcgctgcctaacttgccacaatttgtctaacttttccagtataagattaattcttcaatttagtcgactaaccttagacaagttgtagtgtagttagccgagaaccaaacatgccctatatggaggctatcggttttgtatgccggcttataacattttctctcattggctgttgtattgggtgttgttagatgtgaatatttcacactttggtctaattgtcacaaacttgagtttgaaaacctagatttgtttacttggagttggagtaaatcacattgcttcc

SEQ ID NO: 92491 - DNA, 421 bp, Zea Mays
ccagagcccgtcgtgattggagccgaccgcttcgtacctgtgctaatcccctcgtatctataaaaatcgagccacccccttccattcccatcgcatccgaccaacgagcgcatccgggagagagaaccacgccaccgtcaccgggagtgggagagatggtcatcgcgggcgggatcgtgcatggcagcggtacaaaccttgtgaagaagccgaagaacgtcatcgagaggaattggacatgtacaagaacatcatcgagctcatgctcctagcatagttctcaccatgtcgatgagtgtcatgttcttcctctcatgtttgatatggagtgtaggggacgaagaactcatgcttaatgtcttcctctttaaggcactcttctacttgtaggttctcgaattcagaaccattgtcgctcttt

SEQ ID NO: 92492 - DNA, 750 bp, Zea Mays
ctgggaagcggttgtaataacttttgattttgtaagatattctaagaaccgctaatgaggtagcattggaacttaaacttatctgtatgttatttgtccttgctgtgtatagcgtcatcaacttccccttggtactcagcccccctaggaggtaggctcgacgtgtcgaggctggataccagtataccaaagataacattggtggtctggcccctaggaggtagtctctaagtttgagactacctacaactagactgggacctggacctgcacacagctttggctttgaagtgttaggagcacacccataggacccatcgtctggtatctgccatcctttgattcatgcaatacgacctgcagtttttagcctgggaagccaagccgtatgcctagaccgagaggatcacagttccaaatactaaggtacccgtcgcagagtgatggagtgtgcaggcttagggtacagaacgaggctaagcagctacatagctccggaccactgcaggagatgagcgtcgattctctagaactggcccctaggttgctgtccccctatagcagtagaggggtcctgaactgcaagcctggctactcaattcggatgtcaatataccagcaaggatgggacactgtatgggtgggttagataaaaacaatgctcataaactgaagcagaatataaccatcacaaaagcacatctgtcgggcttacaagggcggacctcactggattgacgtacacatatg

SEQ ID NO: 92493 - DNA, 390 bp, Zea Mays
gaggaaaggagcatgtggtgacctatctaagtcggatactggtggatactgaaacgaggtacacttttatcaagaagttatgcttatgcttgttttatgcatgcaccaagtgtagatgttatttactgtctagtcgttacaccatttctggtcaaaccgatgtgatcaaatacatgttacaaaacccgattatgagtggtagaattggtaaatgggcttatgcactcatagaatatgacttggcctatgaaccattgagatctatgaaaggccaggtcatagcagattttattgtagaacatcggattgatgatactcataaagtagacatatcatacctcactgttactccctagactttatattttgatggatcggtttgcagtgaag

SEQ ID NO: 92494 - DNA, 366 bp, Zea Mays
cgaagaggaggcatataaagcgtgtttgtctatcatgttaggcattgcaagatttctccttttgcaggctcttgcttttcgtggacatgatgaaggtgtcgtggagctaagttggtgagttactaccatcattttcataatggaattttcattgttgtcattgatcaagttcttgttgagttcaacaaccgcttccctgaaagatcaactcagttacttggatgtgttggttgccttgatccaagggattcttttgccaactttgatttagagaagttaattgagctatcaaagatttatgatgctgattttagtgattatgaacgtacatgccttatggaccaacttctcttattcattgatgag

SEQ ID NO: 92495 - DNA, 565 bp, Zea Mays
taccatgtggtgtaaaagatgtcgtgacttgcaaacgagcccctacctagcatgcccactatcggtgttctaaaaacactatcaagtaatcctaagtgctttgcgcatctgacacagatggtttgcgagggagacataagtaatctacaagtgctagctaacgatgtgcgctcgttgccttgccctggtcaccactacctctttccttttatagaccaagaaaagggggtgtcctatgtatatggatgtgtcgctcggaatgatcagatgaagctttggtcttgtcatattgcccctttgccctctagatcgatcattgctcaatagtttcctttggttaacgcaaccattccttattgtaccttcatggtgaggcatgttgtgtcttgacttatcctactatggacctcgagatgtcctttgggggcgtggcatggtgtgtgttggtcagctttcttatatgcatgtagcccttctagagtagtcattcggacttatcgtgtcattagggcatgcatgcccattccctaattattgctctgtcatcctaaatgcatgtcttatc

SEQ ID NO: 92496 - DNA, 317 bp, Zea Mays
gtggttatgtaaaaaaaacatcatttgttgtctagttgcgcaaaccatgaccaagccatgttctttccataaatccttgcccctaaaacttcataacatttctgttgatcatcctagctgatcctgtttgcctacctctccttttgcctggatctggtaatcctttttcttgtgaatcatgttggctttatcatccgaatctcgggatcccctatgattctgccctattatctggttatccgttataacccattctcaagtatcggatgtcgatcaatccaatctctcatttctagtctttccagtgctctttctct

SEQ ID NO: 92497 - DNA, 511 bp, Zea Mays
gcattttatctttaacattcgtagcctcaatgaccatgcattcttccatcccatcaaggagactcgtgcaatcttgtcccatacatggttaacatgtttccatctacccaagaccctcttctcatagttcattaagacctgtcaatgatgaagccagtggtaggctttttctcgacaccttccattactaaggaaggagaaggttcgtgtctatatattttcactagtctgcacttgtattctataaatcttagttgatcaaatacgggcgcacaatggcagtatcaaatatataaaggtttagcagcagctgcaaagcatcccattgcattcaatcatctagccaaatatatgtgcttcttctccatcttcaaataaagatttgacatcaatgttttgacccactatatcattaactttcaccatcgacacaaccccttttgaatagatatggagtctccattattgttcttcaatgtcatcaaacaggtctatacgcgcacacctttat

SEQ ID NO: 92498 - DNA, 414 bp, Zea Mays
gtttcattgctcaactgcaacttcatctgctagaatctgaaaaccgaaatagccagagtaaggtcgactgctatggtgacatgcgagggggatgagactaaaaccactaagacaactcctatctcagaattgatgaggcgttatgggttagttgtgcaggaagaaactattgccgaaggtgttactaatgctgaagctgaacagactgtggctgaagctgaaagtgaaaatgaaagtgaggatgacgatagtatcatatgtccgactaagcctagccatattgaattcgggagatccatagttaaagctgaggatttagttttaatgaagaaactaggatattttggacaaaatgatgatgaattggttcattttgctagagaggagatgattccagagccgaaagaggatgaa

SEQ ID NO: 92499 - DNA, 510 bp, Zea Mays
gtctgcaacgagtccccctaaattcggccccatatcctacttttacgccacgtcacccagatgccaccttctagttttctccctcccgcagcgattttccctaaattctcccatatacccactataaccataaaatatcattttccatatctattcatcatcctttatatattttccccaactcataaatactaatgtgcaagcaaatcgacgcaaggggaggctcactgtggcgggatagtgggatcactgttcgttccccttatgactgtatcatgtagaggagcacatagggcgtggcgttgcggtttgtagcgttgtattgtttgccactgtagtagcatagggggaggggcgcgatgcagttagggagcgagtttgctgatgtagcgagatagtgggatatagtgaacaaatatagaggagactgttgaagagaatctcaattggctgcagccgtctccaccgctcgccccctcccctccaactagcggctacaggagcccattt

SEQ ID NO: 92500 - DNA, 344 bp, Zea Mays
aaaaaatcctacatatagcatgccatgccatgacatgtttagctacaaatcaggactcattgtctacaaaatgctctatcagtctcttgtttgtccaactgcagcttgcctctagtctcatccacctgcaatccaaagattacatttgaataagttgccatccacaatgaatttctaaagcagagcagatcagccatatgtccattttttaacaacaaaatgctagtcttcgaggccacaaaaatgcagagcaacattaccaaaaaaatgtgtgggttttttgttatcgtgcttaatctatgatcttaatgtatcacagaagtgggttagtatgaacagctagc

SEQ ID NO: 92501 - DNA, 664 bp, Zea Mays
atcaccctaagggtgcgaagtctttactataagacatgtccgagcaaaagccgcctaagggtgcagccggacatgcataataagcacgagaaatcaccctaagggtgcaaagtctctactatctgacacggccgaacaaaagccgcctaagggcgcagccgagtacgcgccagaagcgttcgatatcgcctgtgagaagcgaggtccccatctcatctaagtgacatgccaacacgatcacaagtagagacaatcttacaacaagcgcagcacgtggtgtcatcatagtttacatacacaaaacgaagggcccatcggccacattgcacaataatacaaatcacatcttgtttccctccctctctattgcgaatcgggggagggcagcattttcactcactgtcgcaacacgagagccaggccagcaaacatgctacattggctcagccttcagaataagacccgcctcctggaaattaaacaacatcatcttgaactcttcgccttcaaacagattccgaaaatcccccttcctaatacacttcccggacgtcgaggatagtaaattgcgttggctgccccgatcgaatcgaagacgggatcgttccatacccatactttgacgtctcccactttgtgacatcccaccaacacttagcttcga

SEQ ID NO: 92502 - DNA, 561 bp, Zea Mays
gttggaccatattctttcaagcagaaatttattcgtggaaatcctgatgaagtcattcaattgataaacgacgaaggcgaagctttcgaggaagttcttagcgatagaggggacttttgtgccttcgccagtgcctgtggggctacgtccatcttggagaagggtggctgtgatcatgctaaggttgtagttcagccagacttcgtcttctcagctgatgatattaaaaacccttcatccgaagctactaccttaggtaggaaattttattccatagtatggctgaagggtggaccaaaaattgctgatgaagctattaaaaaatgagaaagaatctcatgacgctttagaataagtaaaaagagctaaagaagctgtcgagcaggctagacttataggtatgcactttttaactcattttcgtaagtttttcagctccgacactgacagatacttttgtcgtaatgcagctgagctttctccacctcccgaaccatataaccctgaagctgacccatctgtcaaaaaggcgctagatataattaaaattcctaatgacgc

SEQ ID NO: 92503 - DNA, 602 bp, Zea Mays
atttaaaatttagtttgaaaactcaaaacacgtttgaattcaaaatctaaaatctgaatagaaaaaaaagaaaatgactcactagcactcacctaggccgaatcccagcaatcggcccaacacccctcctttttccttcccacggatggcccactgctctctcccccgtggttgcttcggagcgcaggtgtccgtgcacgctctggtcatggtggggaactagacatggcgcggtcggccggacctggtgtcgtgaggttgaagatgagcggtaaccgttgtatgctagatgaacgcatacgattaggtcgtcaaataacgtttcacttgaatcctatcgtcaccgtttgttggtgatcggaccactcctaggcagttttcgggcaggaaggatttatggccgtcggatgatatcggacgtgatcgggtcatgggtgatttcgggccttagatctcggatcctggggttaggatcgcaccctggatcataacgtgtgtacgtctaatctggatggatgaatcacgatccaacggctcggatcctagcgtacctcttcggcttggccatctatcaaaagaacccctgcagatttagaaattca

SEQ ID NO: 92504 - DNA, 529 bp, Zea Mays
tattaatgctgctataactaactcaccgctttggagttcagtaacaatcttacatcttacacaaaacatgagactttgttcaacacatttaacagaaagtgaacgagctcaacttgcacatttcagtgcatggattttagatgttggcaatggtactatatcagctacagaaagagcaggtgaatccaaacctacttggatacaaatacctgatgaatttctattagcgcccgaaaaaaatcaggttccagccttcattgcagaaatagatccaaaattagcagaaaactacaatgatccaagctacctacgtcaacgggctatattaacaccgacaaatgatgtagctgacttaattaacgaccatattgtcgacctcattccaggatttcacagacaatatctaagttgtgacagaattgcaccacaatcaaatgtgggagggacattagatctgttgtacccaattgaatttctaaattcaatagatggcaacaattttccacagcacaagctgttgctaaaaaaa

SEQ ID NO: 92505 - DNA, 712 bp, Zea Mays
tgattgtttaagcgtcgaatgccgaaggctgactccgcgatctttttcgacatctgctgtcatggtgtcttttttatgggatttgtgtggcgatatattacatggtgccgcctcatcaaaaacctcaccccctgtgaggaaaagagtgcgggcccgactggaataatgtatgtaggtgttacaaaggcgcgaaggccttgggatttattgccttagacataaaatattctcaggttgtctatattccacaaatgctcaaggtcttcgctgcattgtgttgtgagcctgtaactatttggggatgttttcttcatgacgataaagggcctttcccatttggcttgagtttgccgcatgactctgttctgctggttctgattaggacgaggtccccttcgccgaactcttttgggttgacattgctgtctcgccatgccttcgttgcgctggtgtctgttcaatgtttcgagggcgagaacacgatctccatctagaaggtccttggtagttgagtcgtcgacatctggtgtagccgtggcatttgtttggggtgatctatgcttcagctcttgtggaatcattgcttcggatccatacattaaacggaaaggggtaaacctggtaggtctagattatgttgtgtttagcacccaattgacttcaggaagttggtctacccatttgtcctttttgtcatcaaggagtctcttct

SEQ ID NO: 92506 - DNA, 730 bp, Zea Mays
gcaaattcccgcaactctgacttgtcctcttcagacaattcttggccgcccaggtgccgaagatcgaaatatttttcgcccgaaggactagcatcaatttccctttctttgcttggcgctgcgaccatttcttcctctatagccacatctttaaccacatctgatatgagcctatcaatatctaaaattgttgtttcggcttcattagtgttttttacttcggcaacagcatcagcttcggcctcgtagcagtcattattttagccgctaaggctgaaggcggtgtttgctcgacggcttgcatcacgttaactattcgttgtttcattttcccttcaaccttctcctttgcagccgaaggttgttctttcttctgtaaaaattgtgtcagttctgatcctagaggacttagcagcttgaagtgcggggaatcagtcattacctttaaaatttctactacttcgacaacagagggcattgaaggagcttcttctcctatctcatccaccttcggctcagcagagggcgtcatgtcaagctttccctttttagaaattgccgctttcggctcaagagctgactttgctttcttcaaaattttatcatcttcctttactagccgagtagctttcctacttaggatgctgacaatcctcttccttttcaccccttcggcccctttgtcaagcctttcatagtctggttattcgaagtttaatgcgtccatcac

SEQ ID NO: 92507 - DNA, 576 bp, Zea Mays
tcttctcaatgtcatccttgtgcatacggacctgatggtaccctgaacggaggtccaacttagtgtagaatcgagccccatggagttcatcttgcaactcgtcaaccactgttatagtatatttatccttgatagtgtgttcattgagggctctgtaatcaatgcaaaaacgccatgtattgtcttgcttcttcactaggaggaccggggctgagaatgtggatgtactgtatcggattataccacgacgaagcatatccgcacattgagcttctaattcatccttttgcaatcgggggtaacgatatggatgaacatctacaggtgcagtgcctggtttcaggtggatcctgtggtcacaatgtctggctggcggtactgactgtggttcctcaaagacatcatcaaaggactacagcaagtgatccatcatgtgcttgggttcagtgctgatgctacatgtggttggtgtagtggtgtctgtgcggacggaccctaaacccttccacagtatgcgtagaccttcatgccagaaggtcatgcaaaggtcctagagatcccataatactggtccca

SEQ ID NO: 92508 - DNA, 527 bp, Zea Mays
tcccgtttagtttgttttgccagtatggctagagatgtgaagactaaaaggtgctttctatttttttcagaatgcaagtagacacgacgacattctggagcattatggtgctggactgctgatgctaaaaaaccggatgctttgtatgctccaaggtcaagctggagacacctgatcagtatactgttactttggaggaggaactatcttttctagggcatgtgtaatgagccactgacatattaatgatcaggtgattatgctctctttaatcatgcatacacgatcatagatagatatcaatagtaattttaccattgaacacttggctaccgttacaccacactatgactaatttgtgatttgatatgttaaccacactatatcacttctttttaattttcatatctccctggcttctcagttctcacctttgtggccaagctttcagttgctcatgtatcaaatttagtagtcatcatctgaataacaggatctcagttcattatctgttccaaactattttt

SEQ ID NO: 92509 - DNA, 651 bp, Zea Mays
tcttgtagtcataacgattgatgcatcacttatggagtggctggagaagctgatgagtcatcatgcaagatagtaaccctttgtgccaacgtcaaagtagttgagcgtgagagcgcatgagccgtggttgtggatatcatgatagagatagccatgatcaatgtaacagtcgaggtagccgatgtcacggtggctgcacatgaagccgtaggcgcgaagagatgccatggtgatgacgaagatgcattgaggcagtcattgtggaaggggtcagtgccgggtcgacatagttagggccatcgaggaagtagaagaagacatcgacacaatcgaaagagggttgatgtactcaagctgccaggacgaagtgtgcatcgaggttgcctaggaacacactatggatgaagcacgtaccggtgttgctaatactagaaatacgaggtagagggtctcaaccatgcatcaatgtctaagggaccaacacaggaggtcgcgacgaaagttgtggtgcgcaaaatggtggggtagaaggtgccgtcgcagcccgtggttgttggagtagacgaagtaggtggggaaaagacgacactgagggtatggttgtgctagatgaataagttgtgtagaggcagagacacgtctaactgaaag

SEQ ID NO: 92510 - DNA, 652 bp, Zea Mays
cgaggagggcgtgaacggaactgtagagagctggccacggcgagctcacacatggcggtgttcttgactaatttggggaaaaactctaaattagagctctctagtggacaatccgaggcacgggctggtgcgttgggtgtatgattacttagcgaagctcactgagtggcaatttataggttccatcggtagtggtggctaattttgagaatacgcgcggcggcaggagcgagagaagagtcactggcgacgatctatcgtggcgattgcggggtaataagctacgacagtcactgggtaacaaccacgattcatgacgacgtggtaagatagccaaaggcgtggcgccactgaggaaaacggtggtagccacggcaatggcagtgcggccacgtcgccgacaagtgaatgggtgacagagtggctatagggttctgagttcatccaaggtgaagatttttccatggtcgatcataatccacgccacagaaggcacgaatcgtgacaccggcgtgaatccgagcgcacgggtaaccggcggcgagggggatgaacctgaagatctttctgcatactgtaccatgggatccttattcagagtgcctgaccgagtattttgctaggcttggatctctgatttctatataacaac

SEQ ID NO: 92511 - DNA, 743 bp, Zea Mays
aagtgcttctgcagtatgcacgagcttttatatgagacgaaggctactggcaaggaacagtaccacaacaactttggttgttatggatttatcgctcgccccaatgcaagccacccagtaccgacattctagaaaagatggcctaggtcctggatgggagaatggttttatgttaaaaatgacttaaaggcaagggaagacatcaaagaaatcattcagcgacccatctggtctcgcttcagcctccgaaggccgaaggtggaaattgatagcaatgtcgaagcatgtcagagggcttttagcactatgtgtgccttcattggcacaagggatttgattcaagagcatatatccttcagggtatggccacttgtggagagctgggatatgccaaaggagaccaccgccaattctagtgagggtggtctagtccgactaaagtataccttcagatttagggagaagtttggtgagccaaacgacgactggctgaagtgtatcgaagttactagtgatgagctacttggagcatactccaaggccgaagataatgctttgtccgcagcctttgggggtcggggcaagaaaagattaaacagggtatttgatgctattggcttcatataccctgattaccgctacccgctgcgagggcaagagaaaaagaggaagactgccgcttcggtcaccccagctgagcctgagccgaagagcaaaaaggtgaaggttctgacccaccggcc

SEQ ID NO: 92512 - DNA, 422 bp, Zea Mays
ctttgccttatatttcggtggtatttggctctgcattcccttaagatgcagtccgacatggttatcatgcaggagaaggtcgcctccgcgaccgactacggcggccaccaagatgggcagccccgcacggatcacccgccgaagttccagaggatggagttcccgcgctatgacggcaagtccgacccgctgatcttcatcaacaagtgtgggtcgtactttcgacatcaacgcaccatgccggaggaaaaggtatggatggcatcttacaacatggacgacgtggcccagctgtggttcctccaactccaggaggatgagggcacgccgccctggggtcgcttcaaggaactcctcaacctccggttcgtcccagcgctgagatcggcgccgctgttcgagctgacggagtgtcgacgcac

SEQ ID NO: 92513 - DNA, 299 bp, Zea Mays
atcacacttggatacagaccatttaatatgcaaatgaattctagaatgatggagttcaatgtatatcagatggaatggaccaacaaattcctataatccgaaattcatcacatacctctggaagtgtgtcgacatcctcttcttccgccagctgatgctggtcccaagctcccctgcagtgcgcgacagcggggatgaagaatatgaccgactacaataacatgaaatacctcaagaaaaattgttgagatctgcttatattttaggagactcctttccccaagcttcacaaaacaaac

SEQ ID NO: 92514 - DNA, 297 bp, Zea Mays
cttgcccatgggtttgggttctatgggggcattagtattgactttaggtgcccccatattgggcgttggatttttccagcctcctaggggctgaaaaggactcgtatccatgtgttggtggaataacatcacaattttgaggtttgttctgcataccttgccttggatggtctgacgtaatagccaaacggtccgagcatgctagccatctctagtgcggtttcggtggtttgtcgtggaggacgtgatcgatcgtcgttgggccaaactattcggccataggtacggactatacga

SEQ ID NO: 92515 - DNA, 391 bp, Zea Mays
ctcagacggcgatatgtgcatggtgtcatcatgctcactcagtcattcccgcgctgctgatgcacgagcgcgcgtacatacatacatacatacaatacatgctatgcattacgtgcagagcggcggcatggccatgcctccgacccccacctaattaatcacctaaccgcagatgaaggccgaccgattagtatctccgtcgatcttcgcttcgccggcctaatcgatccgagagacgaattcactactcattgttcatctccgccacacggcacacacatgcatgtgtgtacaattcagcatgtggctgttgtgcactcacaaagtccgatccatccatccagggaataatggacgcgtccactcaccactgcacgtatttatgtctgta

SEQ ID NO: 92516 - DNA, 315 bp, Zea Mays
atcgggatgtactcgggactcaccagatgaaatggaaggcgcgcacacaggaagtggacgttgcagaggatgcgaagaggatgagcggaggatgagaggtgctggcatccttttaatgttggtgtgatgggatctgcgcggcattgccaaaacggtgtggatctccctgtattccatattacgacgaggtgctaggataaggagcggacgcatcatcgacagagggctgcaagaaacgacatcgatttataggtttgtcattacatcaaacacaaggcatgcagggacagtgaggtctcaccggggtttgacgac

SEQ ID NO: 92517 - DNA, 379 bp, Zea Mays
tgcccataaatgtccgaacttcaagctcgtgactttcattttgcgattattggttcaacctcgattgcatttatcattgacccgataagagagcttacaacactcatgcatatgactttgttttggatccgtttgcaatctagagaggcaatataggtgtcgacatatttgtctcccacatctaataatgatctctatcattcccaaaacgaaagattcattgttccgtattcccagcacaatgatatcacgcgcattgctaggaacttcatcatcaagatgaacctctttgtgaggcaaatcaccagcagggcgagttcatcggaggagagttattatagaccacgtgaatctgcaatcagaacatatgctttgacta

SEQ ID NO: 92518 - DNA, 273 bp, Zea Mays
ttcggggaaaaaattatccgaagaagaaatcatgggagcccgacactatgcccaaaaactaaaatatccgaaaggggccttagtgtttaatggcactaacgaagatgatttcctctatctcccagacaacaaagaaatatctgtttgccgggagatagctaaaagtatgggatttcgaagcttgaggaagggctttcggttatgtcgaaggatgatcttgctgatagcctcgcgtacaacagtataaaggtatagaagttaactttgaagttg

SEQ ID NO: 92519 - DNA, 970 bp, Zea Mays
ttggagaagggactctgcagaggcaggttctaggcagagtaagacaacggggcgccaacattcgaaacccagccccttaacatcagatcaagtcggcttagcaggtcctcattgggaatctgtctgtttgtaactcggttcgaatcgttgaccctggtgtacaagtaagcaggatagactctgtccttcagaggttggatgttcttgaagataaagtcagcgaccatgacttcagcagtcagacccctgtcctttagtaagcaaatctcaccaagcagcaccttggctttggctacctctgaataagtgggggactctacctagctgggcgtgcgaacgttgggttgcctccctggtcgaggggggagggacttgttgtgattctccatggtgaaccactcggtggcgccatcccttgatgctgtccttaagggggatgtcaaggtattctactttcctccctcggcgaagctccaaactggcaccaccgacaagttgatgttgtcccccggtcataccaggccgacagtggtaaagatacctccagagcctaaagtggggaaggattccaagaaaggccttgcacaggtgcacgaaaatggcaacttgaagaatggagttgggatttaaatgtgtaagatttaaatcgtagaaatcaaggagaccgcggaagaatggagaaacaggaagggcaagccctcggatgacgaacgacacaaaaacaatggcctcatgggtatcctctgttggaacagtcaccccatgccagagtcgccaagaacacagttctttcggcggcaaaaccccagttttcacaagctgcagaagatctgattcagaaattaccgacatgtggttaccagcgaatggaagctggctgttgggatcaataggtggaatgatcagaacgacgacgctctgtctcttctgcttgggagccatcgcaatctctcaggtggaacgagcgggc

SEQ ID NO: 92520 - DNA, 332 bp, Zea Mays
gagaagggcgacacaaattgtcacctccatgggaaggaccattcatcattgcaaaggtcactcggccaggatcctaccgacttacccagatggacggaaccgaagtgggaaactcatggaatattgagcaccttaggaaattctacccgtagcagtacatcaaaactccagtcggcaagccgcactttgtaaacaaaaggtttcattatcaataaagattttgataggaacgggggtgcccgatcttccgtcaggtgaagataactatcgatttagtggagatgtcatacagacgacccggcttccaatcaacatgactagaaccccacaat

SEQ ID NO: 92521 - DNA, 309 bp, Zea Mays
cagaaaatcttgaaaaattcgggttgtacacctaatggatgcgcccaataggtgtgtatccattgagtagtgtacactgtcttgtccaaaaatagtaacctgacgtgatgaggagatgtaatgttgcgtctgagcggttgactttaatttcttctggtgctgtgttacatgaataggtgtcagcagtctgctccctttcttggaaacttaagtggctattgaagtcctcgtgactgtttgctaaacgagcgggaagtgaagagatgccctttgccctctttaaatagtctacttccctgtgtccgtttt

SEQ ID NO: 92522 - DNA, 445 bp, Zea Mays
gaaaaatcttctctcctttcccccgatattaacagacccttcttttcctattatagatggaagactctctggtcattaggacatcctactgctcagaggtggagggattcccacatctgttgcgaagttgtgcgcttcgcatggggatccgcaagaagccataatatgtctggaaggagtatctcgagaatggaatggagaagtgctctatggcagtctacctgggagaaagccgaaactacccgaaccacccttctttccaagtcactttcaccggacaccgcttcccagatacttgccaaaatgttgcccgaaaagccctccgtcaactatgtcagaactacagcagagtggtctttgaaacccccctttgccactttccacccagcaacaaaaatacccccgcctggaggaaaagacttcaggccctgtcaggaagagatcc

SEQ ID NO: 92523 - DNA, 563 bp, Zea Mays
tggaaagctcttggacctcaccaaattgattagctcgaggtccacctctcctcccatggagttgaaactatttgacaaaccctcctcgagttcgttggcaccttctgtggttcctgtttcgtctccttcctcgagtttgccacgacaacgctcacagtcaaccgaggaagcatcgaaaatggtgtaccaccatgtagaccctactccgttccttcatcagggtttcatcatgggccacatctagcaccggcagataatggtacgtcagtcactcgagctcagcccccgcttcatgaagattgggcgatcgtccttattcagcatttcctagtgcttgagcttaactttcaaggcattgctgatgttgcatgagaatatttggtgggtcagtggggcctagaaattcgtgcaatccagggctcccatcttatacatgccctggttagattttactttgtttttatcaagataacatggtcgatctagatccacagcaggcgctatgtgttagggatatgatcctcggtccctggggctcaccggtcagcgagtacactggcaaa

SEQ ID NO: 92524 - DNA, 619 bp, Zea Mays
tgacagttacggcgctctctgttcacaggttgacgatccattgaagccggtcagcagaagctggaatctaccacaccacggaactgagcattcggagcactggccccctccacatatgctggaaaaaaaatagaagaaagataacacggtagtagttaccagtctgtcggcaattaacacacgtcaggaaaggtgaccgatccatttctgtcggaatcggaacagaaagcatggcagttgcatgagcactactgaaccttgcttaaggtttgatgctgccgagactgaaagacaccactcaacaccatgctcaacgtgcgcccgggactcgagtggaaggtccactgattccgttcccgccaatgtttgtttcctctggatcgcttccacacttgtagcaaataatcttcctgagaattgcagttaccactaaccgagttcgagtagattactggttgatgagaaagatcaaatccaccactggcatcagggatcctcctgctggcggcggcaagtttggtttcgctttgccttttcatgcctgatggcagttcgttaatgcactacatgtaagcagatttgttgcctttcaccagaaagtaccaccccgacaaacgga

SEQ ID NO: 92525 - DNA, 783 bp, Zea Mays
gttttaaagacgagatgtgcgaatgatcggttagtgtttcacttgtctagtcagtaaacgttgtcataaataattgtgctaaaattggtcatgagaatgcagtggggacacgtatgtgcgtgtgtgccgtggtgtattatagtggtggtggcgtaagatatttgattgaggtgtgcgggaatatgccgtaatgtggttatactcgcggcgaggaaagatgtatgcattgggtaacacgacgcttaggtcgctgttgtataatcgaataaaggatgtattattgagcttgagtcaaaatgtggggtaccagtggtacgctaggcaggcggtgtccaaataaattaactggttgatgtgatggttgtcgtgcgtgatttattgttaatgagtagttggattatgagttatgtaaggagtatgttagaaactagtatgcggcgtgtaattgtgttcgtgtggtgaataataggtcagtaggtattgttggtgtcagtagcaactgtagtcttatggagttttacgccatgtgtaagtgcctctatgttagactccaacaatgtgctattttttggtgactggtgtgttaactaatttaagttaagaaatggttaagaaaaactaattaatctgctcccacccatggtttcgagttacaatgtctaaaatggtttgctaagtcttatactgcgttagccaactcatgtaagtattaatcgattatgtaagtgattgtgatatatatgttgtgtctcggattgcgataataataggcaagccgatgtg

SEQ ID NO: 92526 - DNA, 389 bp, Zea Mays
tcaggcctgatatggtgaaagagactgaagaaaaggttcaaaaaataattcataatatgaagaaagcccaagctcgtcagaagagttatgcagacaaacggcgaatgcccttatatttccttgagggagactatgtctacttaaaggtttcaccaatgaagggtgtatcgcgtttcggggttaagggaaaacttgcaccacgatatattggtccttttcttattctggaaagatatgagccagtggcataccgactccagttacccgaaaccttgtctgctgtgcataatgtgttccacgtgtcacaattgaagaagtgtcttcgggttcccgatcgaaccgttgaagtgacagatgttgtccttgaaccggacttgacatattctgag

SEQ ID NO: 92527 - DNA, 293 bp, Zea Mays
ctaggaaagaaagtgcagatgaatatcttaattgggttgagcaatgtgatcaaattttcagagttcacaatttttcagatcaacatcgaatgaacttggcctcagtcgagttttctggttatgctcttatttggtggaatcaactgcaagaacatcaactcagattgggactaagacatattaatacatgggaagagatgaagcgagtgatgaagaggcgatttgttccttccagctatcaatgtgatcttcgaaatcgattgcaattattgaagcaaggaaagaaatccgtt

SEQ ID NO: 92528 - DNA, 395 bp, Zea Mays
cacactgagacccaggctacgaaggctaggggtaagcatggtgcagaggcagtaatgatgtcactagggctccacgtcgcccatgccgtctatcataatgagcatgaggagagacaaccatgtgaccaaggcgcatacggaaaatgcagcttcaccagtgccgacccccatcttggcctataaaaataggaggttggtcacgaacgaagggcttgagtttcagaactatagaccaacaatcaatagaagacgaccacacacgctcgacgagacatgaagacctagaaaatagagccaaggctcagtggaggaatccagtcccgtagtctttaggtccacccacacataaaagacttgggagctcttattccctctcttgtttgcttgtaaaccac

SEQ ID NO: 92529 - DNA, 625 bp, Zea Mays
caaggtttggaataagaaatatattataaagtcaggagtcaggtaagaaatagcaaggagttagacaagacatatttgtcggtggccaagagtgaaataagataaccatgaactattaaagtgaggataaataatacaaccaaggatataaactgagttagggagaaagcattatcaaggagaaaagaatagagaggcaaagatttaatatatatcaaggtagatattgcacaagggtggcaatacaatagaaagaaaataagagtagaagtcaagggttatatagcaatattagggattagaaaacccctataatataatatcacccttatctaactagtcgaaaatcttaatactaaagaacaatcctatcaacctaaccaagaagtttggtaatagatctaaaggatccatagcaaaacttcttgcggagtggggataagacagagaatagggcatcgtcgatagcctcgaaaagggtttcttcatgcaaacttcgcttcaagttcctcaatcctaacttgatcatcttgcaatgcgtctcattagaactttctgatagacgaagaatcagacaagaagggttgaagataaaagagacgagttttgatataaagtaagtttt

SEQ ID NO: 92530 - DNA, 421 bp, Zea Mays
ctcttctcttatgtcggctactaagatcacttagcaccccacctaagagaagagaagcgcacacatgaagccggggcgactttaaattttgtgaccacacatccggacatagtacaccggctcaccatcgtcttgccccttaacaagctcgcagacgtccctagcccgaaggtcgtttgctatcaccaaatgtttccagccctcggtgaagcccacaaataacaagcagtggtggtggatgacaggccataatctcttcttggtgtccttcagcattataacatcacagcgatgccttctctgtctaactacattggaaagtgcacttctatctgctccgtgcttcccgacccgattcaggcattcagtcgatgccattctccatataagtcccaaacagagaatagggatgaggtagtca

SEQ ID NO: 92531 - DNA, 435 bp, Zea Mays
aagaaaaggaggaagttgcacctaaatgtacaactgtctggtcacaccggacagtctggtgcacaccagacaattgggtggatggtacggccaaccgcttggtctcgggctctgtcggctaaaagcatcggatagtctgagttgatcactggacaatgcagtgttacatatggaaatgactagttggccatgccagcaagcgacaacgggcggattggagcatcggacagtccggtgccccacaaaaggggaaggcaaccaatccaggatttggtgaccattgtgcggaggcgcactagacagtcaggtgcctcgcgtcgagggcaattttttcagtagctaccaaatggaaggggcaacgggaaggggctctcttggggctataaaagggacccctagacgtccatcttcagagcacaagtgcagccaacaagt

SEQ ID NO: 92532 - DNA, 749 bp, Zea Mays
tttttgaagatcgacatctcaatttgcttctgctctacagttcgaattacttaaaattattcacgttttattcaagtttggcagacatatgatttaaaagtttttttttggtatccctacagtcttttgtttttgtcttaatctcaatgtcgtacaaaattaaacaggttatactcatcagcattggtccgaagatgttatagatctcttctgtctttctttctgtgagaactagatcttactaacttcaaataaacgaaagcggagtagctgaccaaatgataagtgcccttgaataaaaattaccattctaagatgatatatgattcaattctgggatgttctgtcaggcgactgtgctctttaaaaatatagcataaccaagcagtgagcacgtttgcttgtgtcggcctgtcgggcagaacgcagaagtaaatgttcatttgtaatgtgaaatactaatctagctgcataagtcctatctgtgtacgctgcagccataatatggtgaaaacacatggagctctccttcatttatttactgaaaagataataggcaggaaggtctacctatttgattgtacagaaaaagtttaaaagaaacaggcaggagggtgcttgtgtcttaagcattgtactgaattttctcaattaacctatgtttgaatgtatatttggacatttcttttttggtgtgcacctataaagcaagcagttcagcttatcttctgaggttttaacttaatgac

SEQ ID NO: 92533 - DNA, 1021 bp, Zea Mays
gcacagagcttgttttgccacgcaaaccggtatatactcttggaactgagtaaattgcctcacatcagacagctttatgcatggctttctttataccaaaatgttggctgcaaaggaacatgaatggacctgtggaaatgctcctcgtcgtgtgtccgatgcattggccactccttccacataggaccacttctccaatcaattaaaacatacaatttccaccatcaaacctccaccaccaccactagctttttattatacccctgctcgacacacctcatccctctctgattccccatttgcttctatctcctcccgtgctctcctctctcctcacacctcatctcttcaagcaccaatctagtgttgtttatgccaaattcgagatgctagagatctgacctggcaggaaccaaatggcagcatacacgccccctatcaatgccaccaccactcttaacatgaagaagttgtccatcatggttgctgggctgctgaccctgtcctgttcggctgctcctgcttcctcatgggtcaaggagtaggtcaaggggaagaggaagagcatccctggaggtgattgtgtcatcatcaagttgacacaagcttaggtgccatgtgcagtaacagcagcctggccaacaggacctctactccatggagcacttgctgcggcaatgcttcgtcgcttttctcagaatgtttcaatatcttaaattatttgttgcaagggttttccgggatgtcagactcagtccttgggggatagaccaccccgggtattaaagaagagattttctcgctgcaggatcgcgaaaacaccctgaaggccccatccgcataggttatctgtccaggagcaaccaggatgtggctgcaggttacttatatctctgcagctgcgtcagtggaagaacaggccaacaagggtgaggggtgttccgtgtttttttaacccagccttggaattccgcacgagagaaacaacgatggtgcaagaggtaggcagatgtggaggtaa

SEQ ID NO: 92534 - DNA, 915 bp, Zea Mays
tttacacatgtgtgtgcggtcagtggttctgcgtgtttgccacacactagatgactaggcctctcaatccctttcgaatgtgtgtattggacacatgtgtgcgtgtggtgtggtgtgtgtagtgggtgtgaatttgtggtgtccttgtaccctatcaaaaaactgattcaagcaacaaatccaaaacaaaacaaggaaaagcaatggccaaggggaggtatacttgagaaccatcagcagcaattagatttgacctcaaataaaattcagtccgcatcatggttggattaggcaatccacatcatctagttctcaaaaaatcgctgctccagaaatacatgaaacgcaaccaaatcagtatcatattaagcagcacaaaaaacgtgacaggagaaagcacacatgtaactatgtaagtaaaggctcagatgaaaaatgggtaaaaagttcgtttgtcagcccaaagagagaaaattccctcattcagagtggtgcatgactttgtatcatcattgcccgtacaacctagcttagtagctttcctctgcaaacgaggaagaaagaggaacaccagaagctataacagacccaaaatcaagcaatgaatacacggtcgccaatcgaaatacacgatctagaagagaaaacagatccacaatcaagcaataaaaactcaagcagaaggaacaacgagtgagctactgtgctgcctctgcttggcagaggcggcgacaagccaaggcaatgattccatagctgctgcggcggtagtaacagggtattactggataaccatcagaggcaatagcgcaagtgtattgactacctagcaaagcacagtttcgctgaagacaaaccagggcatacaacacagttttatagctcataccaatacatcaacagtttttaagtctg

SEQ ID NO: 92535 - DNA, 553 bp, Zea Mays
gatagcgtttgatgtgccatttcaactgcttgcgttattttgccattctgaattttcttgctctgccaaatttttattagtttgtaagctttggcatttgcacatgtgttggctaaatggctggagagaagaaggttgttgaccctgcattagttgggttttacgaggctatggaaaagacgaacatagagaaaatcacaaatgaaatgttggttggattatctggggattccggcggtagcgaaagttttgatttggaaagtggaaatgaagagccgaagatcggccctggcggccgagtcataccatcttcagaaagtcatccatcaagcaaagtcagattgatgctatgaaagggaggtatttccgcgatatttctattgtgagtgctagaggagatagcgcggcccttgtgcccgaagtagacgaagttgttgtctacatgagcttcatgaaggcagggcttcagtttcccttgactgaatttttagttgaggttctgaagacttttgagattttccttcatcagattacccctgaagctatcatcagg

SEQ ID NO: 92536 - DNA, 280 bp, Zea Mays
cctattagagttgtcaatcaatgtaacaattttctatcattaaattcaaatgtgctatacatatcacagtgttccctagcagctgacacctcttcgtctagtggcgttttgagtggtctgtcgacaccaagataatcctaagatctctctccctaatggcttcggttgttccttcgcattagcttcagctttcttcagtctactactgctaacagtcatgtcggtcgttcttcagatgatctcaagaaggagatcgatcttgtgtacctcggcggtcgcc

SEQ ID NO: 92537 - DNA, 316 bp, Zea Mays
taaagctgttggtaataacaaagatgggataaaattgaaaggacattgcttgcttgcgacaaaaactgatgttaatgaattatttgcttccacttctgttgccctacgccttggtatgcaaggatgctttgatttcaattcaagatatgcaacattctttgcctcctgttgttactaacatttcgcaggagtattctgatgtatttccaagtgagataccagaggggctgccacctatacgagggattgagcaccaaattgatcttattcctggtgcatctttgccaaatcgtgctccatataggacaaatccgga

SEQ ID NO: 92538 - DNA, 373 bp, Zea Mays
cgacgcgttagaagccattgatctcaagattagcggttaagattagatcactgcttaccccttcgtgcaatcaatcctgaccatagatctcatatccagtggctgcggttagatcttagtatttaaaatctatgtcgtcggatccaaatctgagggccgtggttgcgtaccggttcgcggtgggacggatctaatccgggccatccacgcttgatcggacgaccatcaacgcttcataccccttcggcgtgcgcagtttgtagaaaggaccttataattttaacgaagcaacccgccatccacatggattgtatgctatgtctggggtattttacctcgagcaccctgcctttctctgttataatgtgcccag

SEQ ID NO: 92539 - DNA, 417 bp, Zea Mays
actcgaaaccatcatgcgcttacttcccaattcatgaacacataacgcgtattgacccgactcaagatatagaggaagcgatgactactttggtacgtcaccacctctctatataagccaaaacaatttctactattgactaagagttctaagtattaaacacattattactttccacgcgcaaataaacctcaacttaacactagtgacaccgatggattttactaaactcatcatacgcataacctcgtctcgcatacaaccatatggtggcgtgcactcgagacacttcgatcatcatagcgtaaccactaatatatgaactccgacactcatgtcttaataattcatcctccacgcaaactagcattttctaaactactcgtcacattaataaatatactcccgataaaatca

SEQ ID NO: 92540 - DNA, 351 bp, Zea Mays
cacggatagtcttttgaggaagacttcgattttgcgcacttgttgtgctagtccggctgcacccttaggcgacttttgcgcggagtgtcgcacgcgagggtagctagcgctgcccctcgcggtgactttgtattggttgaatgtcgaagaccatcgatgcggtcttttttcgacgtagatttttgcgggggatttttcgcttgtatattacatggctccgcctcgttaaaaacctcaccccccgggaggaaaagagtgcgggccagaataaaattgttttgcgaattacaagggcgagctggccctgaggagtcaaacaaaaaattgcggagattatcaatgttccaagaa

SEQ ID NO: 92541 - DNA, 735 bp, Zea Mays
aagaaaaaaaacaaagaagatatgagtaataccacaacagttggctgacgctgtagtttacgagccacgattctccaaccacacccctctgctttgcattcagctcgataccttgtcttattagtcaccacattgtgtacctcaaactctttcttgattgcgtgttgtctcaaagccatcctaaaatcatgcattgtaggaaaagattcaccaacctcaattttgggattttccttgtcaaccactatgctagcttcacaatctgcatcatcatcaactaaaatttgcgcctcacagatctcagcctcagtaacctgttccacctgaggagcttcctgagcgccatccctaaatcccaaggcagcataaaattgctcatcaccaacaaaaatatcagcatcatgcatcatagtaggatcgacatcccccacatattgacttgcatttttggtgcatggcaatttccccaacaatttctcctccactgatatgctccttacataacctggtttcagttcaaattgtacaaccaatgttagcactttacttgtccaatacatctgaaatgcgttgtcaagatcagtgtttgtgataatctgttgtagatacttattttctcgatcccaaaaccagcatatcggctcttgacaactcccccaaattgttctgcttgcaagatcatccattaaatgtttgactaagtagccacccacaacattcacggacaaaacatgg

SEQ ID NO: 92542 - DNA, 707 bp, Zea Mays
gctggagctcccaagcgacaggaaccagattagactccatccgcacctttccccccaatcaatttcgctagaggtggtctatcatgctctggccacggcgtcagtgcgggtgatcaagtggattaaggtgttccggatcaccgaaggctgggctggctaaattgaagctagggaaaggttcctgggttcaccagagctgacgcacacgctaagctttgggctaggcccgagcagaaaggtggggcgacagagagggtgtcatggcggtttttgacagtgcacgggtgcgttccggtgatgggcttcggccaaactccaaattgccgcatccaggagcaataagagatcaaagactaactaaaacagggagtaatttggtaattactgaccagaggagcgctggccacggatgtttcttcttggcggagctaagaacagaagagagagggaattggggctacgtgggttttccggtgagctcgagtcaagtgcttagtcgctgatgtgcggaatgtggtgacgaaacagcgcccgcactcaatttataggccgccggccgtagtcggatgaagatcggggatctctagatcgcgctggcgagcataccgcgcggcggattccggtgacagcgcggtgatcaccgtttaaccggagcctaccaccttagtgactcgctgacacatcgccgggaacttttaccgtggccg

SEQ ID NO: 92543 - DNA, 563 bp, Zea Mays
ctctacacccgccacagctactactccacctcccactgcactaacttctatcgctctagagccatccaccacttccgccatacccaccacctccaccactccaggtcccatttccgctccacccattccaccaccccgctttagggagcgagacaagacagaggtgcgaccattagctgctgatcctcaactacttgatcttcaacgtgccactgcagcccgggtacgtaggttcagacacgtacccgtggagtcctggttgtcagctcagagggatcctacagtggcagcaattttcagtaccaggactcagaagtccttcttccgagcacatttgtcaacacagattgccatgcgagcgcaccggcttttggatctacctgcctttctgctagcagctggtgccgattcagaggtgcatctctcctatctaccaggacttctttctctactgactacgagtggcagatacattgaggagtgggtccgagtatttacactacagtctggatagacccagatcatcagtggatgaggtttcgcttcgagagagaggatgtcac

SEQ ID NO: 92544 - DNA, 2136 bp, Zea Mays
ctcccaaattgagggtaaattccctagaagcagcaaccccaaggagattattgtagaaattccaaacagattgtttcttctctgcttgatctaccacgatccgatcctctactttcaatttgccaataattttttctctttctataccttgaatggtgatgaaaataagtggtgttggtgtcttcctccttcaaccagttcagaccactcctatgtctggccattgttctctctaatgatgccagccccaaagagtggtgttttagcttacgacgcaaccattcttcatgataggaaagatctcttgagtctctagcaacttccaggctatgcagaatctcattagacatcacaagctaccatttaacatgcccaacccttttgctactccaagattagaggtgtttagatagccgttttaacttatctgccatccgctgcaaaggacaaaccgcagcaattggttgacaccaggaattttctacctctgtcatgaaaccttccaacttagtccaataactttcaaaatgaaaacgatgtttgccttgagtgaactcgtgcaaacccaccaacaatggacagtgatcagagattgaggaagaggaactttgcatcaaacaattaggaaataaatcctcccagtccctggaatagaaaaatctgtcaagacgcacaagggtgggggtgacctttcgttggaccaagtgaatttccttcccaagagcaggagctcaattaactgcagatcattaataatcctctggaatctccccatcatggccctatcaagattgttgttatttttgtcttcagcccaataaattagattgaaatccccccaactgcccatggcccagcacaaacagatcggaccatgtggagctcttgcagaaactgcaactttttttcatcagattgtggtccataaactccagtaaaccaccagggaagattactatcatgtttgaattgaactgaaactgaaaattcattaccccccgggtgcccatggctgctagaaaggtgaactgatcaaacacatttccaaggacggagaagaccataaatctggatatagattccttcttcgtttcttgcaaacacactatgtcagggcgagtagactcaaccatcatacgcacaacatccctcctagctttcctattaagccctctgacattccaaatgagaatttttgacagattcatcgataacagaaatacaaccaaaacaatgcgaggctacagaaagccatcaagcacacatttcaaggcttaactccctaagcaaaggaacatccaagcattcttgcacattatctgggaccgaccatccaaacaaagctgctagggccttgatgtgtgagttggaaaggggcttgttaaacagctgtccaaattcctccagcaattcatcagtaacagccacctgtgaatttgtgacgttcaacttcatcatgagctccgcctggacctgtctgactgttgaatttaagccttcccttttctttgacaagcgactactgcgacatgggacaaaatctggcagaagctatttaattcttcttttttgaattggaggttgcggaagcaagcagtcaatgttcctggtgatattagccaccagcttcataacgggggtcgcctcctccaactgagaagaaacaacaacaggtcctagatccaaaactggtgtcgtcacctccatctgagatgaaaccgatgtaggtacctcttgcctgccctttttcaatcttgagtacaccttcaatctggagctctcaaggacctgagcatcaagtgaaatttcagcgggagagttcctgtccgcctccaacgacccaacaaaagattgagttgaggtcagccgggggaccaagtcgatcccgacattgaaactgttgcggggcgaaacggtcttggtcagcctctgcaacccaacaaccctctgtcgaggagagcccggcccaagcgatttcagcgacccagccaaccttgtccacatgggccccccatgcccatccatctgcaactgttgcacaactgcaacatcaacagcacaacccacaggaccaacgttcgagcagtctatcccaggacctgtgtccacgtctgctgccgcgagttccatatgaac

SEQ ID NO: 92545 - DNA, 642 bp, Zea Mays
agcgcgcaacagcttacggacctcctcacggatgaagtcctgccactcaatggactactttcatggcttctactacaccagcttggcgtcggggttgagctttagatggtgctcaatcacctctttggggatcccaggcatttgtgacggttcccaagcgaaccctagttcccgctcaccttcaccggcctcctcatcatcgtccttttctttgccagcccactatcgtgggtgcgagccatccttcagggcctactcacgccacttgatgacacgcttcccgagtttctagatcatgcagcactcggaggcactatgtttggtggtggggtggacagggcatgacctgttgtcgccaccctactgacatgggttcttgccccatgcgttctgaccaccaactaccgctgcagcgatcggagcgccggttgactgcttatcgctgtcgtgacccttgttcttcttcttgttgccactgctttgagtagcgccccctcgagccacccatttggggggccctagtccgaggatccgagtcccatgctcaaccctcggccaaactgacacatttgtcagctagagcaaaaagtgtggtgacgctttctacatcatgtgtcgccagcttttccagcatcttctcat

SEQ ID NO: 92546 - DNA, 612 bp, Zea Mays
gcgttctgctctaggttcgggatgcacgaagaagacatcacggtggtgcagcattacccagaggatttcttcatcaacttcgagcaccagcaccaccgtgacgcggcggtggcatgacgcgatttcacctacgacaacattgacattcgggttaggccatggcagctccctattcacggtgaccgcatcaacttcgactaccatgttcgtctctgcctcgaaggcattccctctacatgcgtggaacgagggcatcaccaagcgggcggtggctaagagctgcgtgctagactacgtcgagtctcagtcactgcgaaaggaggacacaaggacactcaacctctgggcgtggacgcggaacccttcagacatcccaaaggtaacttggctaaccattgttggcaggaacatcattgtccacaatgtgccaccggcgggacaaagtggcttaaccttcagggtcatcgtccaccttgaccttgtggagggttccccgggcaacgagggtcaaggaagtacacatgtgttcgactggaggcttggagttgttgatggcaagagtgctccacgcgacaggcacgacccttcacctcgacgcaacgatcatcaccg

SEQ ID NO: 92547 - DNA, 779 bp, Zea Mays
cgcgcactaagactacacgacgcaaatcgactggacctttttgggtgccacgacatccgctagcttccaagcacgaaggaagtagtagtggcagtaatgacccaattagagatctggaagctagggtggagcaactccggtcagaactacgccacaagaatagggcacgtgagcaggacagtcgtcgtatagcggaattgtcagccgcttgcagtacgagatctcagaacgggattcggccattgattgggccgtcaactcacgttcgttcgcttgggactgtgaaacgaaagctctagctcgtgtggcagagcttagtgcatccctcgaaagcctgcaagtgtactgtaatactttacatgaagaagtgcatgtattgtatgcgcgactgcacccagacgtgccttccgacgttgctgcaatgggagccggaccatcgggaacaacaaatgaaggacctgatggggagctagacctttttaagccccctccttccatgaaccttgctgacgaacggtctcctgccacaggaaatggagcaacaaaggatgaagaatactaaaataatatagtttagatattatacttatgtaaaataagtaatgaagtcaagttgtacattggagtctgtataattgttacattttggtaatgtaatatgatggtgtatgctggcatgttatattttccaaatgtttccttgcctcagatgccatcacggactcgtgcacatgatggtgcgggaacatcccgtggtagggaggatactcctaacccgc

SEQ ID NO: 92548 - DNA, 513 bp, Zea Mays
ctttcttcatggtctacggttcagaagcagtactacttgctgatctcaagtttggggcgccaaggttgatctttgaaaacatagcagaagccgaggctactaggctggaggatgttgatgtactcgaagaagaacggctgaatacggtaattcaatcagcacggtaccaacaaactctgaggcactatcacgataagaccatgtgacatcgatccttcacagtaggagatctcgtcctccgccgaattctaacaggggaaggacggcacaagttgtcacctctatgggaaggaccgttcatagtagcagaagtcactcggacgggatcatatcgcctcactcagatggacgacacggaaattgggaactcatggaacatagaacacctcaggaagttttacccctagccgtatttaaaaagctattgggacgacaatgtactctgtaaactgggaaatatatcatcaataaaaagacttcaagagcgctcaaattattcattgtcgacctgca

SEQ ID NO: 92549 - DNA, 513 bp, Zea Mays
ggagaagagaccgaggagagagaggaggcagtagccatcacagacaggcacgcacagttccatggagtgatgtgagttaaagctgggaaaggtacaattggacaaaccctcggagaagaaagccctaggatctagcgtcgcaaaagccatgcgtgccattgcccaaagctttaaactacgcgtaatcatcatcgtcatcgtccgtcgtccacacagctacctagagggtatagctaccagctgtaggcgccattcatttcgatcggcggtcaccctctgttcccttccatgaagctagctagctaccagtgtgaaagaaagaaagaaataaacgatacactagtcctacgagcagtggccatatgatccgaagctaaaagaaaaccaaaaggaaaagaagaagaaaaaaaaaggaaaactgtgggtgatatatattggcttcacccccaaggaagaaatctagagatatgaagcaggcttaaagataagcaagaatcgagaagcaagcacaag

SEQ ID NO: 92550 - DNA, 433 bp, Zea Mays
gtggctgaagatgaaagaaagcaggaacacttcatagaaagactcaatggacctctgcggtatgctctagtggctcatacctttccattgaacacaagcgtgttcagttcaaggacatgaagaggaaggtgatatcccagggtcaagggagcagtagcgttcgccctccttatgttcctgaaagttccctatgcctgggaaaaggatctgaatgtcgcctagaggggagtgaataggcaaataataattatcactttaaaactggaaattcttactctactcaaaggctggacgcagtggaatgaaagacccttcaagtaggttgcagcggaatagaagttcctgtcttaaaataccctgcacttcgaagacagcttgaaccacatataaatattgaagtgcaagtataaacagcaaataagacagagaaaca

SEQ ID NO: 92551 - DNA, 325 bp, Zea Mays
atgacatggtgtcatgtggctatatggagaagatcaagagatatggcttggtttcgatggaccgagtggctagtgtgaagggcaagtcaaaggctcacgtgtgagggaccgcgtggcggtgaagcaagagcaaggacttagcaccgatggacataaagcaacggtgaagagcaagctagttgagattgatgaaccaagaaggctatgtgataacatggagtggatcatatcattatagaattatcaagccatgtgttgatctgggatattgatcaagtggcttgatgatgatggtggaggaacttcatgctatggacaaatggta

SEQ ID NO: 92552 - DNA, 518 bp, Zea Mays
cttgagttgggtgtcgtgcagtgagccccaattagcttgatggttagtaagttcaagaggggaactggcggaccagggttaggctttgctgctaaggatgggagtgttgcttgttttggtaaggttggtgagtgtagtggcttaaaaccttcagagaaaccttcagccaccccaaaagttatcaagctcactccacctaaaattgtcatccctgctgtgaaaaatggagtgattgaggagtctatgagagcccctccttagaaacaagtatggtgtccaaaacttaaccatcccaggaacacacttgacacccttcccgacatctctattgttcccatccaagagctccttagccacccaaaaagatccactcccacaatagagatgggaacgggtgtgtacctgtcgggtagtatcatcccatacccgtactcatcagaaaatcctacccatcgggttacccgtataaggtcgtgggtatagaatcttaccagtacccgtgctagtagttgtaccca

SEQ ID NO: 92553 - DNA, 337 bp, Zea Mays
ggcataatgttcagtcttattcgagtgtttgttcagtaatctactgcacaatactttaatgactgttggcaacaattcctttggcatccgagcgtacctgttcatctaacatattattaactatacaaaatcgattagagaaaataaaaaaacaggtgtgtcaagatcatacggtgtagcagatatcaaaagaatgagaactctgaataatgccgcaagcaaagtagcttgagtttcacgctgtatcaagtacagtgctcctgcaaatcagaggggggcaaaatgtaaaatgcaaaactgaacagatctcttacaaagtggagggatctagttaatt

SEQ ID NO: 92554 - DNA, 566 bp, Zea Mays
agctaaagttcagttttgtgtccatacattcatgcaacttctgccataactaggaggtgaactagggtcctctattcaatgcaatcttctttggaatgccgtgcagacacacaatttgtgacatgtacaattctgccaatcgagatcccgaataggtggtcttcactaggataaagtgggctactttggctagtctatccacaattaatcaaatagagtcatatccagtaggagtgtggggtagaccaacgatgaaatccatactgatcccttcccacttcgatttgggtatcttcaacgagtgaagtaatatggctggtctctgatgttcagcttttacccgctggcaaacatcacatactgctacatgcgaggctacatcccatttcatgccaaaccaccaatacttttgttttaggtcttggtacatctttgtactgcctgggtggatagaatagggtgagtcatagacttattttagtatggtttcacggagactatttatttcaagaacatagatcctatttttgaaccagattgtgccttcctcatctttcgtgaaattt

SEQ ID NO: 92555 - DNA, 424 bp, Zea Mays
cccttttttggtagggcttaatcttgagcaatgctttaagggcacaaaagaatgctgaagacgaaagctgccaaatagcccttgggaaccttcggttagaggttatcagactgaggaatgaagccctagaaatggataaaattctgctttccttggtagacagagtaaaggtcagcgaagccaaacttactgcacagtccgcagctcatacagccgaagtcgaagatcttcggaaaaagcttgccgaagctaatgaaaactttgaacttgcaaaggcaaagcaagagataagtgaatggacaagtgagaggttggaaaagaatgtgaaagagctttatgaatccaaggaaagatgctatgagaaatccttggattgcgccaagaaactgaaagatagctttgccaaggtgggtgcatactcatc

SEQ ID NO: 92556 - DNA, 378 bp, Zea Mays
gaaggttttcatggggtttcctggactgttcagtgcgacatagttcaacagttcatgcttggtgccttgcctcaggacgaagagcctgtgcctccatatcctcataatggtcatcaacttctggtggaattttttggattggggcagcttgtgcccaacttccaatttgacctcaacatccctcccattggtgaaattgaagatgttgtaaatgacatcattgctgatgatggttgggacccatggccggctgaacaggtccagcaagagcaaccacatgcaccagtgccaattgccaacaatgaggaggaacaatttagttatcagctttccggtcttgaggacttgccttcagatgaatcagtgggtcttttcaac

SEQ ID NO: 92557 - DNA, 565 bp, Zea Mays
ggggcacgaagctgtaacagccaaagttgttatgatattgctcttttccggttgccttcgtctggtaagataactcgtgaatattgctgaagcacctagcatctggctctagtccgtgactcctcatagcccatataaaccccccacttcgataagagtttcaggggtaagttgatgaatatatatctcgaacgtcttcagaacctcaactaacatcttgtggagcggaaagcgaagcccatctttcatgaagctcttaaagaccaccacctcgtcagctttgggaaggggaacagtgctttccccccgaccctcactatagaaaaatcatgaaaatatttgcccttcatcgcttcgacttgtccttgcttgacagttgacttcccaaaaactacatggctcggcctccacggctgatcctcgacatcttcattcccactctccacgtcaaaactatcgctggaatccttagacaatccagccagcatctcattggtgatcttttctgtgttggtcttctccatagcttcgtaaaacccagacattgcggggtctgtgatcttct

SEQ ID NO: 92558 - DNA, 602 bp, Zea Mays
gcagtcataggcttccactccttgccatagctttttaactcttcaatcagtggttgaagcatcacattgaggcgtacgccaagatgcttaggcccaggtataacaagacataggaacataaactcatatttcatgcaaagagcaggtggaaggttgtatgatatggcaatgataggccaacatgaatacgacgcagcggtcatattgaaaggcatgaaaccatcagttgccaagccgatacgaacgtttcttgcatcgctggcaaaatctagatcaaagttttcaagagccttccatgcatcaccatctgacgggtgcaccattaacccatcttgtctgtccgtacaatctttttgccacctcatgtgcataggggtcttccttgagagaaacaaacgtttcactctaagagtgagaggcatgtaccgaagttgtttatgtgcaacctttgtcaccaccttctccccttcttcatttacaagctccacgtacctcgacttcccacattttaagcatttctgctctctaccatgttccttccaaaaaatcatgcagttgtcttggcaaacattaatcttctcatactccataccaagaccttc

SEQ ID NO: 92559 - DNA, 932 bp, Zea Mays
ggaggaggggagagggggccggccagccatggggcggcggcggctagagcaagggagggggcggcggcggctggagcaagggagggggcggcggctggaacagtcaaggctttgataccatgtgagaatgtctgctggtacagaaaccctagctacagtgcggatgcggctacagtactagtaaaccctagctacagtgcgtctacagcaccatcttcctcctattagtgcacctaccgaacggcaagcatgtctggcagcaaattttgaatggttttctttgtagataaaatgctggaaggtgatatgaactcagcaatacatcatacccacctaaatatttatattgtccttaataaatgaaagcaaattttggtacaaaccaaaattataggtagatatgttgccgtaccctactgtatcattcagagatcgattaatatttgctatataatatatattagtttatttgaataaattttcattaatatttaccttttgtgtatgaaatgattttcataacatgtgtgtgtcacacatgcatgtcaattgtctactagtgaagatacaaacacaaaaagtgctcaagcacgatcaacaaaaaagatgcttctaactctgcaggtgcaggacagcagctatagttggatgttaaggaaatatggtcattaatattcctcactctagccaaccattgaagataaaagatccactgagattccatgcaaagatgttagcaatactaactaaaagaaggggtcaaaaggcacataaatgtagatacaacaattgccatagtaacacttcttaccttcgaatgcctgctgtaacttatgcatatcatacctaacatcacgcatcagcactcataatccctttttacctgcccccaggatccactgaaatatgtgagggtcctcttcctccctagg

SEQ ID NO: 92560 - DNA, 295 bp, Zea Mays
taaccctttccatctgtatgatcctagatgaacattgatttagtatatcatatatgtactatacaggaaaaaccgattaagtttattaatggttgtcaacctaataatccaccaattaagttttataaaactcacccaatcaaatcaccccacactcataaccttcattagatccatcaaacaaattgcacccagacataatataccatcaaaaccaaaggtttagatctgtggataaccgcctctcccttactcaaatccaatggccaatattatttagatcattgctcatctt

SEQ ID NO: 92561 - DNA, 351 bp, Zea Mays
gtgattctgtgtctaagttttttgagtctgatgattctgggagttcggtggtgtggatgaaagagtcttcggatgaggatttggattattttgcggcattagatgtggctgcggcggaggcttctccgcgagtgttggatgctaaagttcccggtccgagtgctgggcgtaggcggcgaagggttgtggcgaagcgtagggtgagtgaggtggagggtggtcgtcttcgtgtggacagggctggcaagcgggaattgttgtcctcgccggctggggtgagcataggtgagggggagttgcgaagtctttttgagggtgaggagctgaggataatgttgtttaactataggg

SEQ ID NO: 92562 - DNA, 570 bp, Zea Mays
gggaatcagtgaagcttgagatccgtcgtgggcatctgctagccaaaccaccgtgggcgcgttgtttgcaggcgattggatgcaccagggttattgatttcgtcgtcggggcctcttcacccccccgtggaaccaccgtgcgccatcgaggctcggcgatgggagctgggaggtgtggttgtggccgtgggatccccagccgacggctgggattggatctgggaaaagatggcctggttgccgttgatttggtgatgggcggccaagattagcagttggtactgattgtgtctgtggtgtgcgtgaccgtccgatatggatcgtggggatgagattggatcgtgattaaattcgatctgggccttcaagactgaagcagacggctaggattatatcgtgcataccccttcacgcgatttaatctgggccgttgaatcggatcggatggccgaagcctatccataccccttcgcgctggcgctttacaaatgagaccctgaaattttaggatataaacccgaagttcaccctgactgtagtttgagtcttaggaatgttgcgcagaacccc

SEQ ID NO: 92563 - DNA, 292 bp, Zea Mays
ctaaggattgatgccctacttcggttgaaaccgaattcaagtcctatccagtgttttccccaaattaatttcaagattactgtcctacagctctctgcccacggtaaccgtgagccgcgaggacattcgctcgcgttcatggctacccaaggtggtttagcgcaattggacagattcacgagcaataagggacttaacagaggctagaacactaagcgattgggtatgttctaacctgaggagcactggccacggagaggcggctgttacggtgttcttgagcgaacttggg

SEQ ID NO: 92564 - DNA, 522 bp, Zea Mays
aaaatccataatgcaatgttgtggaatcctgctttcctgcatcgcactaaggaactccatataatcgcgatcatgagttttgttgcattgcaattgccctttttctgtatctttcttcaagaattcatgattatgctcatagtttaccagatcaattcggacagaaataacattctctttagcatcatcgtagatttttttaagtttcatcccaaccttgcactgtgttcgtttcgaacatgtgttacgcatccttggatttccagctcccctttgtgcattctttccttccattgaacaattcaaccatttacaattcttccgctccctatatttcttcaacggaaatccaacctcatgtgcatattgactataaaaattatatgcctcgtccacgttacaaaatgtcataccaactttaggtatcaatcttatatcaatattgttcgactgtgcacagaaatttaacatttacgaatcaatgacgaccaaatttaacgtgctactgctacagcattaaaa

SEQ ID NO: 92565 - DNA, 529 bp, Zea Mays
aagagtttctggttgctcagtcgtggcgcttgccggtgcaatagctcttgaagtggtgaatccagatgcgccacgattactacagcatggtaaagaactacggtgtggcatatttgggatcgtcggcgtatcacggcgacaccgatgatccggccacgttgtgtggctatgggtgcggttgataagcttcaacccgcgatcaaatccactccccttctgatcttttcaccctcccggtattatcctgcctgagttctacacgaatcactgcaatcagcgcgaatccttgcgcggaggtcgccggcagcgaagttcactgaatctgatcctatccagtcactgtaccattggaaccggtcattagagcgcctgacagagcagattaaaggccttggttctccaatttttgtgtgataacttgataatccttctgtaacaaagttgttgttctatatatcaactacaattcaactacagagaccttgctcatttacttactccctcgagctagaatcgaatccaaagttca

SEQ ID NO: 92566 - DNA, 816 bp, Zea Mays
acgctgaaatttgaccaagccaaaatccgtgcacgatcgaacgtgatcaattttcacgccgtaattttcggaccccatttgctgttacaaaacaaatatatgttttacgctaaatttcatactcatttacgctgttttagctcacgttttacgctggaatccgctcgagcagaacccgcgaactgcggctgtaaattaaaatttatttccttctactaatgctctcaaaccgtaactgtccctttatttacgcgattatgcaacacgtctttccttatatcaaaccggtcaagatttatataatgcatggtttatgctatcatgttacacatcgttatgcagtcgtaaacggtttattttacgcatcgttatgcagtcgttaaccgccgccaatatcacagatatgaacgtggacgagcagctgtaaataagaatttgtttcctcccgtaactgtgcctttatttacgcgaacgtggggcacgtctttccttatctcaaaccggtggatatttaaatgttgcatggtttatgctatcatattacacaacgttatgcagtcataaacggtgtacacatggtaatattcgttcccgtgattcgtggcccaaaagattccttctatgcatgatttatgcacatttatacatatatttatgcatgcgtatatcgcctgtcacgtctcattcaggattcgtggctatcatatgcatggctgacgcatgcatgctcgcgtacagtgggccgaccgcgacctggttggcgtcctggctggggcttcccccactaacggaagcccagggcttccattacctctt

SEQ ID NO: 92567 - DNA, 681 bp, Zea Mays
tgttgcatgaatcaaaggatggctgataccagacgatgggtcctaatgggtgtgctactaacacttcgtagctgaagctatgtgcaggtccaggtcccagtcgaggctacctcctggggccgggacaccaactctttcttaggtacgttggtatctagcctcgacacgtcgagcctacatcccaggggggccaagtaccagtgagaagttggtaacaacgcacacggcagagacaaatagcatacagataagttctatcactgtttaattgatagtttgcaaaagtatcttacaaaaacaaaagttattacatctgccttcaagcggagccctagcctcagttctataggtatgagctactcgacatcagtagggtcacgctggaagcgcgcggccgccgtctccacggcatcttgtacgacctcccgggcggcgtcttcagtatcggcaaccggaccaacggtcgccattgaaggcgacgtcgaggccattaaagccaaagagatggaggcgcgaaagatggatccgcagctcaactcgcttcccacctcatggagttggagctagaccagttcatggaagtgtaccatgggatgctggtaaagctcacgcgaaaaatggagccgcagctcagcttgctttccactcttagaaggttgctgcacaacacccttccgtccg

SEQ ID NO: 92568 - DNA, 562 bp, Zea Mays
gtcttcctttttggtatagtttcccagtatttcattacacatagtttcaatcatttctagccattcttggcaaggttgcttgaactgtttttcaaatttgaagcgataaggtaattgaacaagttcatatttcttctttgttgccttcatcttcggcatcccctagtcacttgacgttggatacattcggttggctaggtattcctgcaacaagtccctggtgccgatttgttcaacaactaccatgaattctacctcgaccagctggcatgctgaccctagctgcatgttgcacaggggcctcgtcattccgaagtttaaggacagcgggcacatgaccatcgtcatcagtttccccctcttcttctcatcagccttgatgtaaaaccattcacctttctagccagttggccatttggtgcgataactgagaactggagccttcatatccttgcgatagacaaaattgtagcaaccaaaattttcatgaagaccgtctgccctggccttcgtctggtagtgcaattcatgcactcggcagaatgcttcagcatctgggctc

SEQ ID NO: 92569 - DNA, 686 bp, Zea Mays
cggcggcggcatgaattttggcgcagagagggcgctggcggtctgatccgatgttgttactgtaccatggaatgctccatcagtgcttctgacaggggaatttacagagccaataacttccaattttgtgtagtaacatgatcgacactctttaacaaagttatagtcctaagatccggctacaatattgttatagcaatcctaaacaaattattactcgatcatgcccaaattcatgcccaaagtcactgcagtggcactgtcagtctgaaattcagacctcaacagcctgacaacctgactttaggtttaattatctccaaattcttcataagaacatggcttgttctcttaagcaaacttgttatccattaataggtctataagtttgatgtggtgccccagggcaaaaactctatagtttgaaagttacaaggctccaaagttaagctcaccaatctgaaattcagacttaggctgaaatcacaactaggggcctttttgcaaatgaatccaaatcttagggtttggcttccaaattcacacctaagtgaaccaagtgacttaagatactttataaacttggtttttgcactttagtccaaatgtgcatcaattttgcacataagtccctagggtttggttttagggttttccagggttctaatatgggttttaggtatccc

SEQ ID NO: 92570 - DNA, 714 bp, Zea Mays
aatggagaacaaggctccacaaatcacgctgtcagaacaaatgaagatgatggccatggtacagtgcgcaaaagatcttcaggtacatcacccctcgccaccggtgacccttgcgctgtgatctgcaccgttgctatgattcgtgctctctggcggggagatatttgcggcagagtaaagatcttggcaccggatcggttcggactcggtcacggttaagttcgtcgtacccacttggtctgcggctggccgagatgatcctcaccggcgttagccgcttaaagatcatgcgccacacgtcttggaagcttagcacgtcgcagtgaacctatgtatcaagctcgtccatcgctagaggccttgccacggtgaaagcgacgaatcacttgcgccagtgacctcccctctctccgcctaccagtgtgccttcgcaaaattggacaccaccgccgatggaacctaaaaattactgcccaatgagctctgctaggtaatcatgcatccagcgcacccgcccatgtctcggattgtccaccagagagctctaatttagagtttcccccaaatccattctccgcgccgtcgtgaacgccatgccgtgaaccaccgactcctggtccgttcataccctccctgcccttgttcgagcacccttggatgctatagatgcttatcggcccagcaattgaactagaccacgttagatcactgaga

SEQ ID NO: 92571 - DNA, 405 bp, Zea Mays
ctgggaagagtattgaacaaggaccttccgacgtcggtctggttttggagaaagaagacgcgtccgagaaggttgaatctcctactcccgaagcatctactgaagagcttgactttattattcaacatgcttcgggtaaaaagttgtctgaagaggaaattgcggaagccaaacactacacccgagaactgaagtatctgaagggggccttggtgtataatggcaccaacgaagatgactttctatactgcctcccggacaataaggaaatatctgtttgctgggagatggcaaaaaacataggatttccgaagcttgaagttggactttctgctatgtcgaaggatgacctcgcagacagccttgcgtacaatagtctgaaggtacagaagttatggacttata

SEQ ID NO: 92572 - DNA, 776 bp, Zea Mays
atttgatgagccgaacgacgactggctgaagtgcatcgaagctaccagtgatgagctgcttggagcatactccaaggctgaagataatgctctgtccgcagcctttggtggtcggggcaagaaaagattaaaagggtatttgatgttattggcttcgtataccctaattactgctactcgctgcgaggacaagagaaaaagaggaagattgctgctttggtcaccccagctgagcctgtgccaaagagcaaaaaggtgaaggttctgacccaccggccgcgttacattgaaccgatcgtggtgcctgaatttggcgtagggtccacttcagcagtcgaagcaacacagactgcttcgattacacagagcgccgaagagccgaccgtattgccgaagacgcttacagtcaaggcagtcgaagataaggccgaagagccaaaggttgaagaaataataaggatgccaaaaattttgagccctccgacgaaggcaaatctgccaaagatgcaaaaggcttttgccgcaactcccaagaggagaaggatggccaacgtactagatgctgtgctggagactacaaaggcattgagccctgctcctgcaaagaaaattgctcaaactgaagccaaatcacaggccgaagccgaaaccggccaagtagaagccgaagctacgcaagctcaagctgaagtcgaagctgggccttcagtgctcatcgagacaaagcctaccgcgcctgaagaaaaagcggcagagcaaattgctcctgaaaagat

SEQ ID NO: 92573 - DNA, 510 bp, Zea Mays
gcggtaatctcttttgtgctcgttgtgttcatggcataaggtcttcgagtagctggctgatatggcccagagatgaggggcggcatgtgtttatatccccgtgtacgaggagtagcaatcggggatggaggttacgtcagctagctcgcggctgggttggttactacgcgcggttatcgcggaaggaaggcgtaccagtttggtgaatcaccgaaaacagaaaataacaaaaacgcgagatcgctacgcacggactggagggagaacgaagctccacccaatggtcccacatgtcattgagccagggtgacatcatccatgatgttatggtgacatagacatccggttaaataataaagaaatataaaaaaacaagatgtgggcttgcacgctagggagtttaggccgtacgtagctctcctttctccatatccatttgtattcctatttctattttgtttttttattttctagtttactttccaaatccaaatctcggtttgatttcta

SEQ ID NO: 92574 - DNA, 336 bp, Zea Mays
atcctatcagaaagctgcccaacccgagtccttcggggggaccccttggctaatcatggatcgtggcaagtgtcctgcctcggagtgtcctcaccaagaccagttcaaaagtcgctcaatgctgaatggcttggtggtttctgaaggctttctaacccttccctcttttgttactttccgaggatttcgtcttcccccatggcttccccggacgaggagtcaagggctgaccctcgaggtggcggacatgagccttcccccgtggttacacatcctgcgctctggctttgatcggtcaccccctcccgatcgtgaggctagttgggcctgggcccc

SEQ ID NO: 92575 - DNA, 782 bp, Zea Mays
cgcagatagaccctcccctttctattccttcgcaaggtgaggtccccgaccgtggacggtggagcagtggctcaggcgagcctgtactagccgaataacgcaatgaccggtgctccgatgtggctgacacctaattctacccctaacgaccataacccctcactcaattacaaagttctagctcacaatcactatgtccacggtggcaatggaaaccagagataactcaacatgttctgggtgattcaagattgtctagttcaattgaatggttctgtgagcaaaaggggacatgagggaggctagaacatcccacaaaagagcatgagctaacctgtagacgtctggccacggcgagctcactcacgatggagttttgactgatttgggggaacttcaaaattggagcgctctggtggacaatctgaggcacgggctggtgcgttgggtgtgtgattacttagcggagctcactggggcggcaatttataggttccataggtggtggcggctaattttgagaagacacgcggctaccggaaaagagagtgagtcatcatagcagtctgccgtggcggtcactgggcaatgagctagagtagctactgagcagtcactacggctcgcgacgacgtggtaaatagcctaaggcgtggcgcaaccgcggtgaatggtgcatatttcagtgatggccgctcggccacgtcgccgatgcaagtgggcacgacaatagggcggaacagtggcccgagttcatccttaacgcgatatttcttaccccg

SEQ ID NO: 92576 - DNA, 390 bp, Zea Mays
cggctgtgcactgcctgcagcagcgcatgtggcgttgttggtcagaagaaggctgcttcgtgctattaaaacccggctggtcgggcatcatgtctgtcggcttcttttccactccactccactccactcgccgggcgcgggacacggcgagaaagattctcctcgtctgtcgcgtcgtgctagctcctcaggaatggaactcttctgcctcttgcttgccgtgacggcttcaccgactgctccaccgccggcgtcaactagggtacgcacgtcctactacttcactgtaggcctgccgagcaaaaaagacaaaaaacaaaaaaacaagtcgtttagttaggacatgataacgcataccaatgagcgattaattagaggtgcattttcctg

SEQ ID NO: 92577 - DNA, 630 bp, Zea Mays
gtcaatgtagatctctgcatacttctctgtcctgtgggtggtgtgtactggcaagaaatgagctgacttggtcaatctgtccacaatgacccaaatggaatcatggtgcctggaggtattgggcaatcccacgataaagtccatgcaaatgtactcccatttccaagatggtatgggaaggggttgcaaagggcctcctgccttcaaatgactagctttgatcctctggcaggtgtcacactcggatatgtacttggcaatctccctcttcattctggtccaccagtataaggatctgagatcatgatacatcttgttgctaccaggatgcatggagaatttggaaaggtgagcttcatccaatatcttctttctgagctcagggtccttgggaacaaccaatcgatctccaaaccataaaattcccttgtcgtcctgacggaagcacttgtatttctttgccttctgcttgatcatgtctttgataacctgaacacccttatcttcaatctgtgccctgactatttgctcttgcaatgtgggctccaccgagatatagtttaagtcaccagaagaaacaacttccaggttcaatttgcacaactcatcacacagggtggtaactcttgc

SEQ ID NO: 92578 - DNA, 346 bp, Zea Mays
gcgggtgcgaagggtaaggaagctagtcgagccaactagggtccgtgtaggcagttggaacgtaggttccttaacaggtaagttacgagaaatagtcgacgttgcagtgaggagacgggtaaatattttatacgttcaagagaccaagtggaaaggacagaaggcgaaggaagtggaaggtacaggcttcaagttgtggtacacggggactgcagcaaacaagaatggagtaggtgtcttgatcgacaagagccttaaagatggggtagtagatgttaagaggctaggagatagaatcatcctagtcaaactggtcattggggacttggttctcaatgttatcagc

SEQ ID NO: 92579 - DNA, 920 bp, Zea Mays
tcacaagatacaaagacttcactggaaaagaaattttggtccctcatatcagagaacaatttaacctctattttgtaatcatttagtcttgcacaatgttcgaatctcagttcatcaaaacaagggtaaacagaagaacaatattgagttcatggcttatgacatggaacataaaaataacagtacagccattacagattaaatattagtaagacagttcttgaagaaaaaaagtaagaaaatgcacaagtggaatttaactcagtctggacaaaacatacctgaagattaggtcttagatttgttattcctttccctccctagaggatatcagtaaaaatgctctgttagtgccttgaggaaattacagaggactaatcatagtgtatatagattctaatcaatagcaggtacaatgcaagcgtgaaatatgaaagacagaaaaccacaatgtgcaactaacaagcgctggacctaaatatcgagattagaatatgcagaacaccagtatgcacatttgcataggtgaagagtgtgaacctgattgcagacatgcaaataagaaaaatttggattacaagtaataaggttcccaacaaccagatcaacgagatgaacaagcagaggtcaataggcgaactaacctggatacacgaaggtttcacagcatctaggtcacgaacgccatcagcggcaaagcgggagtcttgagaacggtgtccggcaagaacccaaaataaagaagagctggactgaggacgacgatagaggtaggtctctaaaatgtcaagaagggacgaggtgtagggggcacataataaactgaaggaaggtactaacccagtttctgtggagaggacaacagcgtcggccactatgtcgctgcagtgctgaagcgtacgcagccgtggggtgctggg

SEQ ID NO: 92580 - DNA, 1112 bp, Zea Mays
gttcaacctgtaaacaaagtgaagtgaaccaaacaagaattgctttaagactccctaggtgcggttgcatgtcagtgtacccaaaccaaatagacggtatatggctcaactggctaaattgctttttctacctcatgtgcacgcctgtgaactgtgattcaggtttctacgaattttacagtacgtatcgatctctgtagtccgtgtcataatatccatgagagatatgcatgcatgtgcaatgcatctctggcctgtggccgccgccggtctcgcattccgcgaggacctagcttcctttcgtacctacacagtactgctccatccatatctccccaggttttaggtacgtttgtaccactgccctatccctgtcatgcacaactggatgcgtccaatactcctggccagcatcatatatgcagcttttgctattaattatttttcttccaggttaattaataatcatctattttaatttataagctttgcagaagtgtggcattgggcattgaactgagtgtacctggctagatttaatatagaggggacctaagtagacatgagttgcttttgcattttatcagttttatcctgtgaggtattggatacggtgtaagttggaattagggtcactagtgtatgccccaatttaatatgtaagtcaagttggtgtgtaaagatagcatggccgcatgggactttagtcctatattgctcatctaatcaacttatatgtgagagtgttgcctactcttcatataagacaaattttaaggggtgggtcttacattgttgtctctctttgagagagacagagaaagagtagaaggagaaaaagtcctttggttgtcgtggcaggtgcccctcccctggtcgtgcaaagtagtacccccgctatggtgtcgtccgtcactcctgttcatgtggcgtgttcatggctgaggtcccatggttagcctcagggctcgatggacgcggcgcgactttctcttgtcatcgtgggccctactttgtccttccgtgcgcacggattcgcccattcgatatggtgacccgtcctgttgcttctgacataccagctactgtggaggctctagtgctgaggtcgc

SEQ ID NO: 92581 - DNA, 340 bp, Zea Mays
tgagctccacgatctcagacacatgggccaagacatcagggagacgcaaatcgtagtccccaccgtgaacgcgggcaaccctcgtagactgattcacgcacaagtaaagactcgaaagctcaggctctagcgagcactacaaacaatgtcgccccacaagaacgaaaagcgatggatcattttttcgagaactcatgccgaagcacgttacaacatggggtcagtgagcgctacaaataatatcatccacagacaacctatctacgatgcgacttgctgcctcatcaacgagcagaggcacgacgacgccagaccctcatctaggagggccgacgacctc

SEQ ID NO: 92582 - DNA, 1684 bp, Zea Mays
taccagagaaaaatagagagagagacgtaggcctaagagagagaaccatagacatgggaccactgcaatagagtgctgacacgacaatatgcacaagcacgagatagagaggttcaggctgcctgagcataataccctatgttctctttgtagtggatgtttagagacaagcatggacagagcttacatactaagatgatgattgagctagtgagtggaattaaaaacctagagacttcgaagtccggtgccaggatctgaatgcaggtgaaagcgtagcctgacgcagccctagcaaccttagccacgcgacgcaacccaatgcaggtgagagcagccaaaactcaggaagcagcagcaaccctagcgacccgggccctttctatgttgctttatacttccttttatagcacaaggcaggagagttacatcctttcctagacggcaggccccgtccagcagaggtccaactactcctaccttgtcatgtcatagttgttgtatcgtacgcggtgcacacctccaatgtgcacagtggtgagtatgacgtgccaatggttggtacgggaggccacgccgtcgagtatggcgtagtgctcacgggtatgcctacagtctcagacgtggctacaatgacgcctcacactatcgactatcgagtccaagtagttggtagctattgtagccgcacgcaccgcatagtgcacacgtgtacgcctatagccttaggcgtggctagagcgacgtctttttaactgcagtgtcgcctcttgcaataaatgtgaagaacgagagccttatctcaaccactcgacgtcacgcggccaacctagtcaggggagcacatggtgctgaggccgtgccatcaagggtcgtgcccgaaggcatcttggaagtgtcgggggctcctacataaagcccctagcttgtagggccttagggcctgaccgacaagccagacctactgtgccttttgccagcatccagaagtacggcttccctgagacgttgtcgggtgcactcggcaatgtgtaatgagcaaatggtaatatgagtcatctattttcctaattgaactaatattgccctgaacttcacaattgggactacaggtgatattgaaccttagaaatcatttgcattgaaaattcctagggcaggttacactttaaactaaaagatcacttacattattaatgaaaaaggtacacatgaattttaacgaacggtgatataggcagtaacactacacaattcttgcttgcaatagtagtgtccaggtctgcatcatcttgaattttcaaaggaattatttcctagatcctttcataagtgttaatcaaatcataataccatcccacacggtttccccatttcctgatgcggtgaaaaaataattcagctgctactcatacaaattaaccaaacatctataatgtgtttgcttgacaattgtacacatcttgcggggaaaacatataaaccaattaacaaatgcaagctaggtcgctcgtaccagcaaaacaagaagcttaggcgtccagactccggcctgcaacgggagcgccacggcagtggcgtccaccacgttgtggcattccctcaccgtaacgccagaaatggaactgcctccaagacgcaccacgtcgtccacatcaccgttgtgggtgatcagatgacggga

SEQ ID NO: 92583 - DNA, 538 bp, Zea Mays
cgagaaagctgattacgaggtatttatagccataaacctccaaaagagccgttgagagaactaccaaaaatctgctctcggccggtgcatgggaccgatctggtgcactactggaccttcaatagtcggataccatcaatgtgatttgttccagtcttccctccccgcagggcatcgacctggtctggtgcagcaccgaaccgaccacatgtcagctagccgatgagatgacagttgagggatgaagtagctattggacccgaggcctagtgcaccatcggactcggcagatgtgcgaaacagtcgaagtcgattatgtaggacactctggaactttggtctagtgcgctaccagaccgatctattgcactaggccgccgaagttcccttcgagaccgctctgaaatttaggtctgatgcgccaccagactggtccattgtaccctagacagctgaacttttcctttcttctattttttcttctcctaattaaattaactttctccagaagtcttcccatgagttagacaactatttc

SEQ ID NO: 92584 - DNA, 587 bp, Zea Mays
aaaaggtagttggagcaccagctcagtctggtgtgttggaccactcgagttcaacagctacttcgagattcaacggtcgactccaacgactaaccgatatggctgttggcctggtgaggtccggtggtgcatcaaactagtctagtgctagcgtagaaggaaggcttcagacaagatcatgatgattctgttatagcaagaggtctagtggtgcaccggtccaatgcatccgagaaaagcagaattccagtaatcaatccaacagctcttttaatgggtttgaggatataaatacccctcccaaatattccattcgacacaccagtcatcgctagatatgtgcttcattcctaaacacttatgcaacacattcaagccattctgagagatctgatgtggcagaaccacctagattaaatccagcttaagtgcttacgtcccacctcaagggcaatgacacacttaaatcagattaaactgttaaaccatcgggtctagcccgattaaccacttacactagatcaataaccactgctcattcgaagatgagcccacagaaatacaacaattcacaagaaccatcattg

SEQ ID NO: 92585 - DNA, 453 bp, Zea Mays
cgccgttatggattgttctctcttcattatcactagcatattgcagaaatgtttcatcttcttcgtcttcaaataaatcttcaggttcatcctccctttgtctctgaaggtcttcaactatacttgcatgaacagtaaaagaattttcaccgaccaacacatcactgtccatattgacatcataatcttgaatatgaaaatcaacacagtcatcatcttggtatgacagttccacaccctttgatatttcatcacttgaaatttcatccacattccacaaatgcctatgtgagaatttttgaacaactcaccagtctccacgatatttggtatcttccaagtaaaacacctttgccgcctgcgtggatagaataaaaggatcatccttgtaccaaatacatgcatggttgatgcttctaaagaatccatcatctttcatccttgccctgttac

SEQ ID NO: 92586 - DNA, 399 bp, Zea Mays
gcaagtcgtaaagtttgtcaccaacattatccaacgcttcgaggtaccaaactcggtcataacggacaatggtacatagttcaccgggaataggttcctagagttctgcgacgaatagcgcatctgtgtagattgggtagttgtggcccaccccaggatgatcatgcaaggcctcaagtatcgagttttcactcgtctcaagcaacttggacagcgatggccacaggcgctaaccgcaatcctctggagcttaagaacgaccccaaaccgctcaaccagatacacattgtactttatggcgtatggagccgaagtggtcctccccaccgacctcgagtatggcgcaccgagggtaaagttgtatacgaatgagcagaatgagtcaatcttagaagatgt

SEQ ID NO: 92587 - DNA, 359 bp, Zea Mays
gcgggttgattaatatagagcacatggtctcttttgcaaaagtagacgaccgaaggggtatggacttttatggaccgttggatcgatagtctacgatgcagattagatcgaagtctcggtcgttagatcggagatcggcgacagagattttatgatagcagatcgaatttcccccgccagattgaatcggacggcccatggtctcagccgaatcggtacacgaccgatcccatcacagccattggatctaaaatcaatgctcgagattaaaggatcccgcgatctggtctcggccaatagatctgagatcaacagctacgattttcgatcacgatggggtatttgagattcaatcgtga

SEQ ID NO: 92588 - DNA, 785 bp, Zea Mays
gttcgggtgactaagggaatttctaggtgggtagtggggatgccatgcttttccacaaaactagtggctatgaaagaatgagatgctcctgaatcaaaaagtacagtggcgggagtaaattcaactaggaactcaccgagcactactcccggggcttgctgagcctcttgagcgtcgacgtggtttactcgtgctctgccatggtactaggtcttgctctgctggatgttggaggagggtgccttggaggcgggtgctggggcactcttggggccattcaccgagtgagagtaagtaggcccagatgccttcaactgggggcagttattcttgtagtgactggggtctccgcagtgccaacaggcattagctggaggttggttgcttgcgacggagggggcctgaaaggatctttgaccctgctgactgaaacatgacggagtgggtccagctggcttgttgaagcttggtcccttgggtggaaacccaaaggatcgaattctctggtgcctgtcctgctgctgagctcggaggacttggaatttcctcttgaggtgacccttttattcttcccttgccctttccacttgtatggccttgtttgagaggtgcgagaagctgaggaagtcttggctggccaagatagtcttgagttctggtcttagccctttcaagaaacgggccatcttcttggcttctgtgctgacatcgtcaggcgcatagcgagccaattctgtgaatttgtgcacatactctctgacagatcttccaccttgagttagttc

SEQ ID NO: 92589 - DNA, 1174 bp, Zea Mays
aaatcttccagatatttaaatccattgctgcagagtatttagcaagagctgaatgaatcaaggaacaacataccatccatcccaatcctcagtccatattgttggcttgttgtaggaatttggtttgaacccatcacagtaaaaggcattgcaagtattgagctgccaaaaaggacaaggcagtaatctatttactttgcagtaagcacatttgacaatctctaatgtaatgtgaagtcgatctcaatagattttgaggcaacctacaatttgttctggagcatctgtttgcctacacattacccaaggaacaccagtatcaagtgcaagtgccatctgagctgcccatagcatgtatctcttccctgcttgaccataatggccttgaatgttaccgtattcattttcaatctgtcaaacatttttcagacaaaacaattatacgcattttaatgtaatacataattcaactgacacattaagcatgaatataagcctcttaactcttaagaaactgagacctgctcatttggttgaccactcatgttcaagtcctttcccagtcaaatttcagtgcctttttcttcttactaaaagtaaaagatgcctagttcctcctagattggtcaagtttttattaatatgagcctcttacatccaccaaatttcaggtgtttgtgctgaattaactagagcacagagccaacaccataagtattgctacttcagaaggtaaaacagccagcatctagcttttggctacataacatacttcagaattgtatcctttaccacattatggttcaatgtttaactctatcatgagcaccatccatatatagaacgccatctaacagttttattaaacaaaggaattaactgaacatcaaagatactaagcaatgttgtcaccaaatggcaccaaccaaaaattacttaagccacatataacataatatccacttgtcattgatatttttcagatctctgtgtactgattaatgggtgatagcttagctaactgttgggtacctggaaacagggtacccaaagaaggcccgaaggcctcccaaagacaacccacgaaccgagcagcccgcctgccaaacaaatcggcgggaaagaccaaaaggccgcccagggacggcctaccaagccgatcggcccaacgaac

SEQ ID NO: 92590 - DNA, 324 bp, Zea Mays
cactccaaatgaggtcgaatgatcttgagcacttctaccaatgcaaagaaaaatctccacgaaagggagatcacaattcctctcttctctcttcataaatcgacccaacacaaatgctacaacagttgttcaactatctaggcactttgcaaagtgtatatggtaagcacaaagtgattttggagtgcttaggtggcaaggagctaaagagatgaagccttgacttgtttgtaatatgtctaagctcatggatttgtgatatgcctgatgaggtggtgattatagcctccccactccagattagttgttagaagccagttatag

SEQ ID NO: 92591 - DNA, 321 bp, Zea Mays
cacataattgctttgggaacttattagttcactcaaaaacatctattcaagtcataaacacaatcatacacttatttgtgaagcacaatttaaggaacgcctaacgcgtatagactcgacttataattatagaggaagtgatgactacttatggcatgtcatcacatctctacttaagccgagacaatttctacctacaacgaccaaacatttatatcgaacacactttatttccccctgtctcgcatacaaccatattatggcgtgcacccgagacacttcgatcaacgtagcataaactactagtatatgaactccgac

SEQ ID NO: 92592 - DNA, 663 bp, Zea Mays
ctcaacttaaattagttaacacacaagtcacctaaaatagaacattttagggggtctaacatagaggcattaacacatggcataaaacttcataagactacatttactactgaaggactaaagcacttatgtgcatatgttatcggattgttcttcaattttaacaaggaccgacttatgaacgctactcgcttccaataattattgggctgcgataacgctcatataagacctctaatcgatcaacaagacatttatttatccaatgggaatggaatgcaatatttgacaaagcaagcatcacattgccatacaacaaaaattatgacaacaccgacagacactatccactaaccgtttgaaaaactcaacttacttctcgcttgccattacatcactccccaatcacatgaccatcatgagcatccttcacatgattatataatagcgacctaagcgtcatgttacacaatacatacatctttcctcgtcgcgagtataaccatattacggcatatacctgcacacctcaaacaatatcttacgccaccaccactataatacaccccggtccccacacacatacgtgtccccatattacgcacaagacatcaacaacatagtgactccaacaggactaatcatacccttatttgcatcgac

SEQ ID NO: 92593 - DNA, 529 bp, Zea Mays
gatgagccaaatgatgattggctagacactatagaggcaacgagtgatgaactacttggagcgtacttgagggcagaagacaaagctatgatagccgcctttggtgcttgcgggaaaaagaggttgaatagggtgtacgacattattgggtttgtttacctagattactgctttcccgtccaaaggcaagggagaaaaaggaaagttgctacttcgacatcttctggtgcgctgaaggcgaagaaagtcaaggtcttgacacatagaccgaagcccattgggacggtcgatgtgccgaagttaattgaaacggcagaaactgcccctctagccacatatacggctcctgtgatgccgattgaagctagtgtagacccgatcaaagaaccagaattagagaaggcagcaaagcagccaaaggcgctggtgacaacgttgccgaagctatcagttattgcaacaacaactccgaggaagaggaggatgggtagtgctttggatgctgttctggaatccgtgaaaacaccac

SEQ ID NO: 92594 - DNA, 507 bp, Zea Mays
acaggcgcgaacacgtccctttgcttggcaccatgacctatggtgccgagacgtgttacctcagcgccatgggccattgcactgagcaaagggtccaaaaccactattaagtcatccaaggagccaaacgtgaatattttcaaagaaagggctaacatacaaaaaatggtcaaggctcttagaaggatttattgacgacggtcgctcacggccatcggaagttatctatttcgaacggcaaccattgaaaataaagctatttctgatcattatataggtatctcccattggaaaaaagtactaagtcatcgaaagtagactattctgacgattaggaccatattttcgatggcattggccaacggaaattctagggtttactgttgtgcacaaaatcttatatcttctgcacctggtttacgacaagttcgggttgccatgatgacaaggaacattggtcatgccaaaattatcgtatcacccttctaggacgtggctagatattgc

SEQ ID NO: 92595 - DNA, 337 bp, Zea Mays
gcgtacttgtcggtgagttactccctgccgcattcgtcgtagtccctgcatcgttttgcttaggttgtctcggtgtttgggagctctgtgcatcagggtgtttgcgccggccatggtgtccgtcgtgccgcaggggctcgctgtcgccgcccagttccgacctgggggaggaagatcgcccaggccgttagattcgtgatgggtggtctggattagaacctagataacgcttggttgtatcaaattgtagccgttgatccagatcgagcgggtagaatcagatctaggggaaataatattcccaccgttgatttccgatccaacgcgtggtactgca

SEQ ID NO: 92596 - DNA, 1551 bp, Zea Mays
gaacgttgttttgaactcatcgccttctttgagcagaatctgatgaaaacttgcccttaagtccaaactggaaaaccaacttgccccttgcaactcatccattaactcctcaatgataggaacagggtatttctgcttaaccgtgagggcgttgagatgtctaaaattgacacaaaaacgccatgattgatcctttttccgcactaacaagaccggactggagaacagactgttactatgctgaattgtgccagacgcaagcatatcattgacttgtcgttcgatttcatctttgacagccagggcataacagtatggcctaatgagcactggctggtaaccttgaattagaggaattgagtgatcacaagaacgtgaaggaggtagaccttgcagaatatcaaacactggttggaaactctgcaatactttagaaattctaggatcaagatcccccattgccgagtcgctgtccatagcatgcaataaatagaccacatggaacaagtctagactgtatgtatattgacatttgccttgaagtaccacagtatggcccttgtagggaattgacaaccatttttctatccaattaattttcatgggactaaattgttcaagccagtccatgcccaacactgcatcataagtctgtaggggaaacacccggaaatcaataaataatgtatagccctaaactgaccatggaatggagctaaaaaattgggaacaagaaacattgcctccatcggccacttggactgtcacaggatgaggtagaggagatataccagagagcttcccagctaatgttgaactaacaaatgaatgtgagatgcctgaatctactaacagaacaataggatgcccttggcatttgcccgagaattgtatagtctggcgcgaaggaatccctaaaactgcagacagtgagagagacaatagcccgcctggtggtgagagcccagtatccacttcgttagtgcttggcttttcttcaattaattcccacaattcttccagggcatgaagttggactattggtgcacaacgatgtcccagcacccatttgtcagcacaccggtcacataacccacgagctctgcgataagccttcaatgatgcaagtttatcatccatctgacgagagcgaggcagggaattcagcttgccagaattagccaccaacacttcagtttgtgggggtcggggcaggggcagcggagaataagttggtcttgtggaaagatgtggatataaacttgcgatgatctgctcgccctggctccaagacttcctcctgcaattgggcaagagcacaagcagtatcgagagtcgaaggtcactgtaacaagacaacagacttgatatgatcttttaagccatcaataaatcgcatagtgtagaagcgagggtcggtgtgagactcataagccaatagctgatccactattcctgagaattgttcaatataagctgctatggtggtggattgtttgatgtggaaaagttgtctaatgagggcgtcatgttgatcccgaccaaagcgtt

SEQ ID NO: 92597 - DNA, 319 bp, Zea Mays
taggtgagagggggtctccctgtcttaagccctttttgagctgaattttttcaccagcaacaccattgagcattacatgtgtggacgaggtagatagcagtccactcagaacatccgtccaaatctgcccaaaccccagtttttgaagaacttcgaggaggaaaggccaggatactgagtcaaaagctttagtaatgtctagcttcaaaaggattcttgcttgtctttgctgaaggaggagtctggcagtttgttgcacaatcataaaattgtcttggatgaactggcctttgatgaaagcactctgcctttgagagac

SEQ ID NO: 92598 - DNA, 308 bp, Zea Mays
acccaaggcaagaagagctggtgcatggcttgacgagggaagatcagcagaaacaatcttgagagcactaccccgggtgatgtcggccccaccagcagacagcaggttcctagcgtctggctcgctgacctctaaggcaacttggccagttaaggccatagaagcatgtgctgctgtcaccccctcggaccggatcgaggatgacccgatgtggacatccatggaagcattagaaagagagcatgcctgaatatcctcaggggctggatcgctaccagcaacaccctcgggggctaggtagctgctag

SEQ ID NO: 92599 - DNA, 357 bp, Zea Mays
ctcccttgtgctgctaatatctctcgttcgagtattttcaataagtttgaaaagaaaaagagacaattataaagggagggcactccaatgatttttttgaagaacaacaacaccaacttagacagtaagatcttcaaattaaccaatggtgtggttataagtattctaaacctttttcatttggagaatactaggcataagcacgttattgcaaattcactatgccttgatcaagatgttcaatgaattttcctatttgtctttaagagaaagtgcatcagtccaaagtcattcagatgcatattcttagggggagcactttctatatcttgattatgttgagactaacccgttctc

SEQ ID NO: 92600 - DNA, 829 bp, Zea Mays
gggcaatcctaggctgagcagtatggtcaacctagttgtcgtgctcaacaacgagctggaccacacccttggcgagttgggcaagggtcgggcgaaggttgcggaattgcgtgctgagcgcgcaatgcgccactatcaggatggtggttctcccgctcctgtcaggatttagcacccttaccgctcgctgcctcgtggccgctttgattacggcacccctgactgcaggacccagatagatttggagccatagattgacagagtcggagtctgtaataatgcttacttcggtgtcttagtcttagtcagtcttagttagccttagtttgcttatcatatgttttgatgcttgtcgtgatgaacttgtaatgaagttggatctttgtaatgattgtcactaaggtgtgagcatcccctgcaacatggtgtagttacaattatttagttgggcaatccctttatttccacttttcccctttatctgagaagttgtgttgagagtcagtgaagatgatcaatagttcagtataatgaagatttccgtatatcttttcttgtgctgaaagactatagagtcagatttgatgtctgtgtgctttctatagatgtctgagaacagacgtagaggtgaaaggcgtgctcaacagaagcagcaggcaccctaggaggaggcagcctagcagcagttgccactgccaccccccgatgaccattgagaagatgttcctgatgcaaacccaagcagtccaagcaattggtgagactttagcagcaatgtagcaggtgcagcagcagcaaccccaacctcaacctcaggtgcaagttcaga

SEQ ID NO: 92601 - DNA, 627 bp, Zea Mays
cgcgtgtgtttgatctacttacatcactcgtatcttgtggtcagcactaggcagggaacttctagatggatggttatttaactttacaacaactaggattcagattgcatcccttgtttattattccccactaagctccacatataagccatcgtaatcggtaatgtggtcttgtattcgcttaaccatcactttattgttaccaccacacatgtttcttgcaacccgcagggacctcataagagctttggttggtaagagtggtgaggttgtgagattctatatagcttcatattccacctatatttttgccttgtcgccactgatttcgcaggaagatggatcccaacgctgagattgaagaatgtgtcaccctgatacaatttaatgagctcaaacaaagcatagaagacaagcaagatcggttggcacaagatcttcagacacttatggctgaaatcagaggtcgtcgtagagcaagaaaccatgatgaagacggggaagaaggtgaaggaaattattctagaagggaaagtgaacatgggaggaggaatcaaggtgctgcacgtggtagaggaagagggggaaatcaaagaaatgatgacaatgaagaatctgaatttgggg

SEQ ID NO: 92602 - DNA, 4518 bp, Zea Mays
ctggaaagagcctaacaacttcacatttgtcattacttgtgatcaggatacttggagcaagtggggtggaaatttctgctggctttcattggtacttgaaacactattgtgcagcacatatatcttgggataaaaccggtggtgcacaactatcaaccattccgcgtcctgggtcactacctcgtgttcctgatggtggtgtactgattcaaagacccattgactggagctactaccagaatgcagttacatccagctgtaagctgatagctaattttgaaattttggctgttgattccagaatcgatgcatcaaaattttctcatgtaaactgaacttaaaacatatttctctacttaaaattattttgttcaccctttagattcttttgcttggtgggattgggaccgttgggagaaggaaattgactggatggctcttcaaggaataaatttgcctcttgctttcactgggcaagagtctatatggcagaggatttttgaggtatgtatatttattcttttttaagcattattcacagtcgataaattactagtatgttttttgtgacattagcgtgaaataatgcacaaaagcaacctgtaatattaggaagacattgaagcagatgggttgatgcataacagtaaatgcagtaaagtaggaaggcagtatggataagcaggcaaatacgcacatcacaaaatttcgacatgttatgtcatgttttgatgttttttcttggcaaaattattttggcacagttcttaaaattgacattttgtggaggaataaatggacccttctagggtagatgtaacctcaccggttcttcctgctgacactatctattattgtattttatgagaatattagcactcttttatctaatacaaaaacgattcaggttattgcaccttatcaaaaaaaaaatctcaggttatttctttaaatttactcaacctgttttgctgcaaatggtttgtgaatgactttgtttcatttcattaaattcttaaagaggtacaacattagcaaatcagatctggatgatttctttggtgggccagcctttcttgcatggtctcgaatggctaatatgcatgggtaagttacacatctgatttgtcattggtctctcacatctgaacttttaaatttatatgaatctgtattgattccagtattcttttgcagtaataatttgacatgttgtgtcttctaaaattattttaatttattcctcagctctgcagcacaagataattaccttgctataaattattccttccaacccaaactataaattgttatggctttgacatagtatatattttggtgcatagataaagccaaaacaatttataatttggaacggagagagagtatataactgcaaattgggatgctcacatctagaactgtcggactaagacagccaaggagaactgtttatatgtggaatgtcaggaaaataagatgtgactaagaaagctcaagaaattttgttttgagctttgattcccttttcctgagtcctatgtgctgatttttttccaagcatgttatgtctgattgttttagctgcctacaatatttcggtatcatttttggtacttacaaggaatagatagttactagttacccatattatttagttttatcttggatacggttttttttggaactttttatttcaatcgtatgccatatattacttattttcagctcttttatctaaaaacgaagatactggcttcacatgttagatgttttttggtcattgtcttttaagtaattaccctttaatggcacttcctgatttatcagatggggtggacctctccctcagacttggcttgatgaccaactagttcttcaaaagaaaatcctttctaggatgtactcttttggcatgttcccaggtggcacttctaccattgtagcatttttggattttgtgcagttacttgagcaacttttctacgttaaggttacagtatgggatataaatatatctttattggtttgcacatatgtgcgttttcagaactccagttctgcctaatataaccaatataaatgtttaatttctcagtctgtgtttttttagtacatcaggaccccttcacttcttgttacgtgtctaatagactaaaatctacatttgttgcagttcttccagccttctctggcaacatcccagctgcgttaaagtcaaagttcccttcagctaaagtcactcaccttggaaactggtaacagcgattttctatcttctaaataacattgggatatatgattttccatgatcattgcttaaatataaaatacggaatcttggctgcagctcctgtaacattggataatttcatgctgttttgtgtctccacttttgttgtatttcagttatgtaactttgattgcaattttgaactgctaccactgatcaaattgggacagtcacactacgcattcataacaagcttatgcccatttgtaattttaatgttcatttcaccttaagtgcttcatcatattatattcataaatgaagttaaatattaatatcctgtttttagcccactgaacactaacactgcttttcttgctggcatccttttttcatcagtgttaagtcacttgtgcttatttgactatactctgtgatattaaggtttacagttgacagcaatccaaggtggtgctgcacatatcttcttgatgcatctgatcctttatttgtagaaattgggaagatgtttatagaagagcaaatcagaggtaggatctgttattttgtgcaagttgatgtctaacttcatgtgcaagatattttaatgtcagacccgtaatcttgtgccattccctaccataagagtgatggctagccattcttttaaaacaaatgatggctagcttttactttattagttaatctgttttgtaagagtactttttacactttttcataagaagacaacaaaccttgatgcatcggagttttcttgtacttttgtgcagaatatggtaggacaagtcacatctacaactggtatgattattaaccatccttctcactggaagttcccaatcaattattttttctcatttataaacattttttacctgtctagcgatacttttgatgagaacactcctccattaagtgacccgaattatatatcttcgttgggtgctgcaacgttcaggggtatgcagagcggtgacaacgatgctatttggttgatgcaagtatgttctctgtgtgttagtattttgcttattattggatttttctgtaaaagcagttattagagatatgaatatagatcatggatgtcttggttgttgcactttacattttcacttctggaactactttcagatgtgtgattcttttctccagttgagagaaatgccgtgctctattgtcacgttcttggatatatggatatgcaaggttctgtaacatttattactctgcagggttggctgtttacctatgatcctttctgggaacctccacaaatgaaggtgaaactttattgtatggtttgataagatatgtatgctagtaattttattggccctttttatttgggcttcttgtttcttcaaaaaacattgttggagtagtaaggattgaaattcatgtgactttcattttttttccatttaactgtttgtcctaaatgtcatgtatttaaaaatggagggagtttgttggatatgatatgactgcaattcatgttccagtggtgtgagttgatcacattcatttagtcagggtaagcattgtgttttccaataacatattaggatttttgaaataacaccaaggaggtacagcaatttgcagtggtgtcatctgttatttttatttggttcatacagtaaaaactaaaaaaaaaacatgcctgtagtgactaatttatgttgatagcaataatttcagattattcttggagaaaaaggtgatgttacattgccaaatgattgacaaccactgtatttctaataatctaataattatttatgcactcagtttcttcaccttttctgctgaaaacttgaataagccttgtcagcttaacgtggctactgtctaatacatcagttgtctgttttgagcatgcaccttcgttattgttagtgttgttgtgtttggggattcagctttaacgtaaccaattttttacttatctgattgaactcaattcctgttatttttaggcactactgcattctgttcctgttggcaaaatgattgttcttgatctttacgccgaagttaaaccagtgtggataaattctgatcagttatatggtgttccctacatctggaaagttctcttttctctttctgccaactccatgcactattaccctccttttattttccttcataaaaaaactcgtgtgaccccttttcaggtgcatgctccacaatttcgctgcagattttgaaatgtatggtgttttagatgctttggcttctgggcctattgatgctcg

SEQ ID NO: 92603 - DNA, 378 bp, Zea Mays
aaacatatcatgtaatctagtaaacattgcctacttccattggctttttcagtattaaatcagagataacatttttacctttatttataggtgaaggaagaattatagcttcgtaaatgagagttatccactcattctccgatcataatatgtccaaatacatggcattgttcctctatttataggcgcagagaacaaccttgataaaattatatctacaccctcaagcccatacatttgaattatttagcatgagaagggtaatggtgtcttttccttctgtcatcttggtgaacgaattcgaaaacacctgcttcggcttcctctaacttcgcccttcgcttttttatgatgttatctcgaagcttgtaccttcgt

SEQ ID NO: 92604 - DNA, 513 bp, Zea Mays
agattatgctagagatggcccgatgggatagaaacagaggtatggatggcgtggccggcaactaggacgatgataaacgtttttgctacaatttgtatgcttttgctacaaatgacctgcttgttgatcttgaagcacaattttgacgtgataaacgtttttttatgaccgctggcatgactgtagtacgtctcacacgagaaaggcgacgccgcggcgattgctcttagtagtgaccttggttggtgacatgcatgatgtgtctcatacgtgtagccctcgacgaaagggggctgaaagagagaggcagcatcgtggcacttcgtgttgcacgctgcaattgtgcttagctaccgtctatcgcgttctgccttccagacaaatgtcatcgatcgtgctacggcccagcagccacacagtgccattgcaaaggcgtttctgtcgtctcttctccgcacacagcattacctacggaagatttctctggcaaactttctgcatttctaacttcta

SEQ ID NO: 92605 - DNA, 537 bp, Zea Mays
tgaatattctagtgttagcgttgcccaactgcaatgaacaatttgttgtggagaccgatgcttatgcttcaggttgtcccaaaatggtcatcctgtagcattttacagcaaggctttgggcaagacaaatagcagactatccatttatgagaaagaatttttggttgtgttgatggaagtggataaatggagatgttatttgcggagaagcacctttattgtcaaaactgatcataggagtctgtgttacttgcaagattagacactctccaccaaattgcaaaagaaatatatgtctaaattggctgggctacagattaatttcagtagagaacaaggctgcagatgtgctttctagagtgacccctaacatcaatgtgtctgctatttcttctgccactccagtatggatgcagcaaatgactgattcctatatagctgatactaccgctcaacaactattgagggaactagttgttacttcaccaaatgcccaaggttatttcttatctgctgggctcatttatggacatcaac

SEQ ID NO: 92606 - DNA, 595 bp, Zea Mays
cgagcaaccccgcgaggaggagcgcacaactaactcactgtcgagcaacctgagatggagcgggcgaccaaccctccgacgagtaagcgtgcaagaggtgagggcctgagccactaagccacatcgcaacaagacgcatcaacatcaaaccatgtcttggacgtgggtacatagccgaaaggactccgtgatacatgacgacacgcccccgcgcatatccttaagtatgccctcgctgacttgtggggcccagtaaaccctagtcgtagggacctcagcacaggagtctatacaacgacccacatactaggaggggcgtgatggtacaccatacatccataccgggtgtatgccaacgcatgttggaaagtgacgtaatgacacgacgaaagatggagccgcaccaaccacgaccctgaaccccaccataagtctactctgtgggacccataaagcactacaacatcgacatcgaacacgctacagggacccatataccggacggatagagtagtacgtcataccaagagtacgatagtgcacgaccctacgaacaatgtgagaagggctacaccacccagtggcaacaagccga

SEQ ID NO: 92607 - DNA, 432 bp, Zea Mays
ggtgatcgtgttccgaacgactaacggcatggctgctaaaattgaagcacgagttagcttcatcggttcaccagaggttatgcacacgcttgaatttggattaagcaagaatagaagagcgggtcgacagagagggtgtcgcggcggcgttctacgggacgattgggtgttccggagtgtgggcttcggtaaagtttaattggtcggctccgagagcaatagaaggccagagtcaagctagaacaggaagtaatttggcatgtactgacccgaggagtgctggccacggaggggttcttcacggcggcggaagaaatcgattcaagggaactccgatgatcactgagggtggtggacagaatagagtgactagtgattcgttggcttcgcaacgaagggacgaagagctgtgctcgattgatttggatgaag

SEQ ID NO: 92608 - DNA, 427 bp, Zea Mays
aattctagagatgtgctgaatactgaattcgtcaaaagaatgaattatgccccaacacttttcaaggtaactatttagagtaccatcaaaacattgatattcttctaatacctgttggacaaccagctgagaatcaccaaatgtcttcacatgttttactctcatataatttaaaagctccaagccgaacaaaagggcctcatattcggcttgattgttagtgcaataagttttcaatcggctagagaagttgaaggagacattacttagtgaaacaagcatgatgccaattccttgcccttcattgcaaaccgatccatcaaaatataaagttcaggtagtaacagtgaggtatgatatgtctagtttatgagtatcattgatccgatgttctataataaaatctgctatgacctggcctttcata

SEQ ID NO: 92609 - DNA, 276 bp, Zea Mays
gtctatgacaaagatgaagcccaatatcttcaaaacaattgttgagaccgtggaggatgttgaggacaaggttgcggttggagactggctcactaaggtcatgaagggtgtccgccatgcctttgagctttcgataatagtcgatgatggtgaggaccccttgggtgatggtgcggaaggaggcttcaaggaagatggcacgagttttgcggctatcgaggaactgcgacacgagtccaagccagatattgtgggcgaggcaccatgctcaatgac

SEQ ID NO: 92610 - DNA, 281 bp, Zea Mays
cagggatctgaagtaccctcgatggtccttggtgtacggtggaaatgacgaatatgatttcctttactgtctatcagacaataaacaaatacatgtctgccgagaaatgatgaacaatatgggatacccaaagcttgaacttggcttgtctacaatgtcgaaagaccagcttgcagacagtcttgcttaacaatagcttgaaggtgtgtatattttggtttgtcgttctataatgaaccatttctatgtttttcttaccctcatttcatgctcattcttcg

SEQ ID NO: 92611 - DNA, 458 bp, Zea Mays
gtcacatgtcgtcgacctggtgcatgccgtcgacctggtgcacgaaagcacttcacaatttttatctaagttgattatgttacatgtttgttgagaacattctacttaagttggaaccataagtcgtgaaggacataattgttgtctgttatgtcgtttcgtgttgtaatagaaaataaatctgtcggcctgtgcaaacatgttacaagattatttgatgcatttgtatgtcatggattactttgaacaatttatgatgtttgtactcaattcgaatgttatggtgaattggtacacaatcttattaatgtactgcattagaatgatatggtggacatggttgaaaatatttatgtatgtacaacataatgatgtagggaggccaaacatgattcatataattgaggttatttatgtcaaaacccataagtacgacatgagagtccaaattacaatta

SEQ ID NO: 92612 - DNA, 491 bp, Zea Mays
tactcaaaaaactagccacttttatcatgtaagcgtgattgattattatttatcttttgttggtttgctcggaaacctctccatgcttcattacaaaactgtgatcctcattgtgttcttcaatccatggcaacctcagcaatctagccctgttgtcgttagtatgtgacccatatctttacgtcaacacaatgtaataccgagaattgtcttttaaaacaaaataacgttgatagaagaatgtcctcactacgtatagtggcaactaaagtgtctcacgcggttcttttcctataccactaacaaatagtgtgtttggatgcgtgatatatatataagtaagattgctggctagctggtcagcgtgtggcgaccattgacttgaggcgcattgcgtgcacgtacgcaatggtatacgtactgaaaatgaggaaacagaacatagtccactgaacgattgttggaagtccagctccattagcatattttta

SEQ ID NO: 92613 - DNA, 305 bp, Zea Mays
cacatcctcatctaggttcccaataaggaaagctattttgacattcatctgccaaatctcataatcgaaatatgtgtcactagctagaatgatccgaatagatttaagcatcgctactagcgagaatgtcttgtcatagtcaattccttgaacttgtcaaaaaccctttgcaacaagttgagccttctagatgtgaacatttccgtccatgtatttcttcttcttataggtccatttgcactctatgggtctaacaccatcaggcgggtcaaccaagctccaaaccaaaatttctctcatggaat

SEQ ID NO: 92614 - DNA, 425 bp, Zea Mays
agtgaagatttgaggtagtggaaggctaaattaggactaaactagggctactcctaatgcctaaggtaaaaacaataagtagagttgattggatcgattgtgtggattcaataaacgaggaagtctagacccgttacaagtcggttctcgagctaatcccacaggttttgctaacaaatcccgcaagacaactagaatcttaactgattttgcgcacatgcagaccatcctcaccgccaccatagaccattcggatcgcggaccatccaggcctagggtcaaactatccgcttaccatttccggtgctcaacacatgccccctgccttttagtggagttgacgaaccaaaaccacggttactatcgacaccctttgagaaaccatagttctcacaagtcatcttattcccgaaataagaactaag

SEQ ID NO: 92615 - DNA, 546 bp, Zea Mays
ttccgaaggttttttctcggcaagctctgaaggcccagcttcggcactagcttggcctactgcagcttcagtttcggtcggctctgtctcagcttcggtttgcatttttgaagcctcggcaattttccttgaaggagtagagcttaaagcctttactgtttctagcacgtctaatacatttaccatcctttttcttttcggagttgccgcaagacttttttgtgccttcggcactgttacttccgccgaagggcttaaaatttctaacattttagtttcttcagtctttggctcttcggccttatctctaccagcctttgactcagctagctcggctgaggacgccttcggcatggtagctggttcttcagccttctgcgtaggaggaaagggatcctttagtttagcagctaaagaagtctccccgccaaactcaggtaccatggctggctcgatatagcgtggccggtgggtaaggaccttcaacttcttgctcttcggcgcaggctcatctgaagtggccgaagcagcagtcttggtcaaagc

SEQ ID NO: 92616 - DNA, 328 bp, Zea Mays
accggatctaaaaatctatgcagttttgatccaagaatcctataccaaatttgaagattgttgtctagtgaacactttttattaatggagattaccctgttcttaacaagaatcaagagaaagagggggtgaaaggaggtcggttcagccgaacaatgaatatcagaaaactggaaatatttgcagaaggaaaagatctctagttactgtggttttggacgtgtgtaggtgaagtggagataggaacgatcgcggcaagataactacgggctgattaacggtcccgcgagcctagccggagcctggccggagatttttcgccggtgca

SEQ ID NO: 92617 - DNA, 440 bp, Zea Mays
ctccccaccatgacttctgtcgttctgcttgctggcgctttcccccttttttccctaccgcatcacaatctccgaacgacatgcggacgtggaacgctaggcgacgacatggagctctctctgcggtgtggtgcttgctcggatagcagcaggactcgccaagacgggcagatgaggggaggcacaggggctcgtatatatgctcaacaccgagagctctaaggctgtctccaacaacgctctgtatatgcgtctgtacgctaaatatagagtacggtagcgtgggcaacccctccaacaacacccgctaaaggagaccgtaaaatttaccgttcgctgagaatcctctaaatgtggcagacgaagaagcgtccgctatatggttgcagttgcatcctcgcgcccaaagccggaagcttctctctcctgctctgttcccc

SEQ ID NO: 92618 - DNA, 428 bp, Zea Mays
ttcctttaaacaaatatttatctaaatttcttgggtgtcaaaatattctatgtgaggtgctactaacaaccatagtgtatgcatatgatgaatgaaatgtctcatgaggtgggggtcttaggagataaataagggcgggggtttaggagtttagggtttctaaccttgggatcaaaattgggatgttacaaacctaccccacttaaaagaatctcgccctcgagattcagactgggtttgagaaaaggtaagggtattccctccccaaagagtcctcactctcccaggtagcctcctcttctccttctctgctccactgaactttacagagtttcactactgagtttcgggtctttcggatggctgaatcaagaatcttcactgacttttctcggtactgcagatccttctgaatctaaattgtccct

SEQ ID NO: 92619 - DNA, 462 bp, Zea Mays
gtgtcgtctgtggagaaggcgtcttaggtctaggctgcagctttaacatggtcgcaaccagccttctccagaattgctgtaacccctagagcgccggcgaaggcacaaatgtccccgcgatcactgaggatctcttcaaaagctttggcttcttcgcttatccaatcaataactccctcgaggtcacctcgaataaaattctctttggaagattatgcacccaccttggcaaagctggttttcaattttcttacgcaatccaaggatttctcaaagcatctctccttggattcatgaagttcctcaacattcttctccagcctagtgttcgaccattcacttatttcttgcttcacttttacaagttcaaaattttcattagttttggcaagttttttctgaaggccttcaacttcgactctatgagcttcggattgagcattaaattttgcttcatctttc

SEQ ID NO: 92620 - DNA, 438 bp, Zea Mays
cattattgcagtagcgtgatgatacatgtatgattttattttcttaaagctgtaagactttcggctcagtgtaaaattcgggtttcattcctcataatatgttgagtatgagaatgattaattcttttttcttgtttccaggtgaatcccgggaatggttcattggtaatgcgatgatcccaagcatctaggacaccttcactcacccaggttcacgaatttaagtttttagttatgctacttagaagactagtgccttgtacaggtctgacttcatgaactagtctagcattgtttgccaaaacagatgtaaagttttttttctttgacaagaaaagttaatttaattttttatacaaggtgtacatttaactcttcgtcattttcatgtcctcaggtcgtgtactcattcctcttcaaatctagtactgctttcta

SEQ ID NO: 92621 - DNA, 658 bp, Zea Mays
tctcgtattctttatggcggacgatgcgggcaacgtggaggctcaggtgctatttttcgagctacaccgacccctggccttcgtagcctgggtctcagcacggcgtgtctcgttgtgccttgcaagcgacctacgcacttgggcctagccctgatagggcatgagtgtgccacagatcggggtgcatgccagccataaatgcatcatagtccaaggggttcgtaggtcatgagtgtgctgcaacccgaggtgctcgtaggtcaggagtgggaggcggaccgacgcccctacctcgacgctaggcgtagttaacgttgtcgatcacctaaggcaggtcagtctctgactgcgcaagggatccactcgagtggtttcccttcggttcgcctggctcccatgtctagcttcaccacgccctacccttggctcggtaccttggggttcatatgggggcaggtgcttccagtgcagatgttcccttcctcctccttctagctaatgggccttggttatcaaatgcctcttccccgcgtccttgctgaccgatgggccctagtgactaggaccttatccccgacaaaaatatatctagaatagtatttaactattacctcttatctgatctcgtctaaggccatgtttggaacctctaaaacta

SEQ ID NO: 92622 - DNA, 519 bp, Zea Mays
gtcatcctgctgagggagttgatgtatctataacacttgtgcatgttggtggactcccaatatttcccagactcagagagatgaagatctctggcttcatctctggtaggttggcggaaatcatggatcttgatcttatcaccagaaatatcattgtcagtgaatccaagaatgtgagcaaaccgacggtagctcaccttgtaccagctgccttcaatgtagaagttcagataaggatagttgtatggactttcctcatcagctggcttgatccacagagttgagtaaaactgggcaatgacttcatcattccaatcatattggaatgtcattatattcttcatcctatttctttcacaggccctcaacgcatgtgtcatctctgggtccccaatagcctcacatccttcccagttgatatagcgttgatgaagtatgggttgatgtttcttggggaggatcactgagttgtaaaaatccacatgttggagcgtccaaaaacggttcccatcagtcctg

SEQ ID NO: 92623 - DNA, 587 bp, Zea Mays
agcggaagcaccggggtttcctcggggtagcgaagtttgttcgctactagctaggagataagctagaagagtgtgatcagcatgtacgcgggaagcaccctacggtcgtgtatataaggccaaaggggatccccatcattttcatatcattagcacctcaccacttggtagacaccacttataaacacctcccacttacaaagtcatcccaggaagtagggtattacgctcctcaagcggcccgaacctgttgaaactcgcttgactctcattttctcgtgcccacgacacgatccatcgagttacaatccacgacaccgtcctacccaaaagcaccacaagggtaccccgggtgtgcggtcggatactaaacaccgacaatacccgaatctgaacccgaaattgcgggtagcattttttcttggctgttatcgggtaacaatttatattactcgaattttttaatacccgaactacccgacccgaattagacggctaacccgaatgcccagtcttaactccgacactctgtgaccacaccctatagtgatttgtgagagatttgagcgttgtttttgagctgttct

SEQ ID NO: 92624 - DNA, 712 bp, Zea Mays
caagttagtttgttgtagttggtccaggttgttgcagtgacatatcagcgaggaactggcgctggtagtcctcaaccgatgttcgtcggagatccttcagatcggcgagcccattgttgcgcaggggtggtccaaaccgcatgtggacgaattcggagaagcgtgtccatgtgagaatgacgctagtgtcatgttcgagggtgtagaaccattctgcagcgactccttaaggtgcagggatgcctgccacaccttctcgtcttcccatgttctcatgcctctgaaataggtgtcacatttgttgagccatggcagcggatcagactcaccatcatactgggggaaattgatccttggatgaggggatgtgtcgtcttcaaatcattcccggtggctactggctgggacttctagtgtgggcgccattgaagtccaggttggcaccgcatccatgggggacagatcctgatccctcgtgcggcctggtgtccatatgaaccgacgtcaaggtgtcttgtggcccaggcggtggtgagctgcccaggttgccctccagtagtgctagccgctggtcgtgagaatccatccgggaattgacagtggcgagttgcgccaggattctgtccaacttggcagagtcggtcatattggcaggattgtcgtcgacgccggacatggtggtcggtgcgtcttgtggctccaataccaaatt

SEQ ID NO: 92625 - DNA, 479 bp, Zea Mays
cgagtgtttacatctcccacatctatcagcttttgaaaatttaccttcagattcaattgtatacaattgcagaaaggacagcttcatcacgcaccgagccttctgcgatgcactggctgaagacacctccagggtgaaccacagcctagcgacaatggtgggaagtctgcatgggcaccagcaggacatcttctcacacggagtacctaccttcccgacttcaccgcccgacgtgatggcaaacctgtccagcatcaacgaccacaactcagacagccacctcaggtctctgtccccctacgctctcatcacaagaaacacggcactgttctccaaccagatatcgcccaaggatccaggcggctttcctctcgacggcagcgcgtcgagctacccttacatgtccatgacttccccctacatgtcggccactgcgctgctacagaaagctgcagagatgggcgcaaagaccagccagg

SEQ ID NO: 92626 - DNA, 368 bp, Zea Mays
caaacccttcttttcttctaccagatggaaggctcctttgtcattaggacatcctactgctcagaggtggaaggattccctcatcttttacggagttgcgcgcttcgcatggggatccacaagaagccagagtacgtctggaaagaataccgcgagaatggaactgagaaatgctctatggcagtctacctgggagaaagccgaaactacccaaaccaccctcctttccaagtcaccttcactggacaccgcttcccagacacttgccaaaatgttgcccaaaaagccctccgccagctatgccaaaactacagcagggaagtctttgagacaccccttcgttactttccacccagcaacaaaaatac

SEQ ID NO: 92627 - DNA, 285 bp, Zea Mays
aaaagacttctaccaacacaaaaagggggagagagggtctccttgccgaactcttcttttacacttaaagaatttaccaggtaccccattgaggagcattgcagatgtgtcagatttcataatcatttccatccacttgagccatttgggaccgaaacctttgtgttccaaaaatttgtagatcacatcatgttatattttatcaaaagctttttcaaaatccagtttcaggatgtccatttccttctttgatgatttatagaggtgcaaatattcgaaagacca

SEQ ID NO: 92628 - DNA, 357 bp, Zea Mays
agaacagggcagggaatcggcgggggggtcaatccaaaggatgcctctgtaatgttctcttggcattgtattcacgtggtcagctgtctccctgtggatcattgctccaccccaattcaattttaaatattagacacggccacatcatgataggttcaatctaacccacataaattaaagggtcactaaacattgcatagcagaagacgacagagtattagtgtagcaaagatgaaggagaaagttgacacgtatgtactgtaagcagtaggtgaggaggagtggctggctacccatgccatgcatgaggccatgacaacagcaagattagggatttgtcgcatgcattagcatcac

SEQ ID NO: 92629 - DNA, 500 bp, Zea Mays
gcatgatgcacatgaacataatacagagaaacttaatttgaaaccaaagataagaaaaggatacccaacagaagtgtcggtgtctaaacccgagggtctcaccaactagtaaaataatattgcgtaccctggtccagatgggtgatgcaaagtgacacaagtggtttatcctatttcggacaagagaaaaccctacttccagcagagggaggatgagacttacattacttgcacctaagtgcttgtattagggagtacaagctaatcgagagagggaaggatcccaagtcactagggttgattgaggcaagtgccaatatcgtggtggatgtgagaatcgtgaactgttcgcctgcatccttgaagtcgtggactcccctatttttaacttcaaggggggctgccatgagcatcgggattggccgcgtacggtgaggaggcgaagtcgagcccctttagatggtatggcctcgggtatggggcttgcacttgctgttgac

SEQ ID NO: 92630 - DNA, 476 bp, Zea Mays
caaaataatttttttaaagagattagcacaataccaagaagccaataacacaggaataatctcatttgaatttagaatatacatttaaaaaaacattgctgcaaggtatatatatatctaattaaattttgactttaaggttagcgcataaaaatacaagatctttttctaatacttttgttgtgcagaaaagttggacgtgaatctacaccaaaccaggggctaacatgtaaaatgcttatcctctaccttgggcctttgtgcacagggagagggggttcgacgagcaggggagtagctggcaggcgttcgacgagcagtagcaggggtcgacacgggcacgacgtcaagttcaccggtggcgggcaactccgttgacgagcagtgttctggcgacggtgagctgcgcagcagtgagaggagaacgcagggagcagtatggcacggcgagagaacggagtgcacgggtactgctc

SEQ ID NO: 92631 - DNA, 599 bp, Zea Mays
gactatccgcgcgaaagtcgtctacgagtgcagccggaatagcacaagtgcgcaaaatcgaggtctcctccaaaagactccgcgcaaaatacgcctacaggtgcagccggtctaactcaacaaacgcgcaaaatcgaagatttcctcaaaagcgcccggacacaagccgcctacgggcgcggccagatcaacaaaggcacacaacctcatcacacaaatcatagttacacacacatcgaggcatcacacattacaatggctcaaccttcgggatgatacccatctccctgtagttgtacaacattatcctcaattcctcaccctcaaaaagatttcgcagctcaccctcacctacacttgcctcagccgacgaagacaacaattcccgtctggcagtcccgtccactcgaagacgaccaccctccacctcaccatgacgcctatcacttcgtgacaactcactcactctccgcttcgccaccgcccttcgacgcctacacccagcactcgcacaaggaatatcctcaccggtcacacgcagagaagtttccgctacagccgcatccaatgctgcaaaatagtctaaatcctcatccgaa

SEQ ID NO: 92632 - DNA, 399 bp, Zea Mays
ttatgttatttaagttcatgttttacgctgaaatccacccgtgccagaacccacgcatgattggacgtgcgtgatttacacgccgtaatttccggcccaatcgctattacgaaacaaatctacgatttacgctaaaatttgtacacatttacgctattttggtttacgttttacgctgaaatccacccgtgccagaacccacgcatgattggacgtgcgtgatttacacgccgtaatttctggcccaatcgacgttacgaaacaaatctacgatttacgctaaaattcgtactcatttacgttgttttggtttatgttttacgctgaaatccacccgtgccagaacccacgcatgattggacgtgcgtgatttacaggccgtaattccggtccaatcac

SEQ ID NO: 92633 - DNA, 389 bp, Zea Mays
ggcattagggggagatttcgagtaccaaaaagaatgccaggaaattataatgaatgcagaaagcattcaggctcaggatcacgtactaaaactgaacctttgggttcgaatgatttgcaataaattgcaaattgactgccttgtgcatttactatgaggtgtcactcaaattaatcttatgtgaaagtgccagaaagagtggttaaatggaacaccactcaactccctattacaatgatgttgtaaataagagggggagaagtatggtcacaaattgggattaagatgcttgcaagcagctgaaggctagaccttctgagatagtaaatgcagaccatctattcgttggtaaccaacctagtgttggtggacacctaaaggatattgat

SEQ ID NO: 92634 - DNA, 289 bp, Zea Mays
cccaagcaacataacacccacgtctctctttcgctaacgctactactcgataacggtgacctcagaaaggggcgaaaggcacgccgccaagggttcgatcctctacagagcgcgcattagaggaaaggggaaagggaagaaatagacgatgcaccagggagaaggaaacacactagggtgctcatgacgtctttggacaagggaggggaaggtcttcatccatgaaggactccaatgacaatgtcttgacgaccctgaccctggcctcgatctcggatagagcaagcga

SEQ ID NO: 92635 - DNA, 360 bp, Zea Mays
atgttgttgcttggctaagaattgacatgcctcacatctctggactaggtcggctgcatctttattagctgttggctagtagaaaccagctctgaaagctttgcccatgagtgtccttgatactgcatgcactccacattgccctgcatgaatttcctccagtaaacatttcccaacacctgagtcgatgcacttcatgaagactcacgtggcccctctcttgtacaatacatatcctatgactgcatagtgaaccgactgcctcgcgatgcgctcagtagtgtccttatcatttggttcttcctcattcttgatatacctaatgattggcatcctccaatcattccgatctgattctgc

SEQ ID NO: 92636 - DNA, 377 bp, Zea Mays
catgctagtcctcactatatgcatcattatcatgatacacagaatgaaatttagtaacgaagtcacagtaggggagatccttgatgtatttttctcatgaagttgtgaaaggctaattgaactgtttccattgtagcattataccctttgtgtcaactgctgctatactttctgcacttaattttttcattccaagtcttgaacttaatttttttcattcgaagatttgaacttgcttcttatacccttttctgtttgttgtttccccccttttgcagcgtgctttgaaggtaccacacctcaactttttgtgctcttgcttatttatgtttaacatttattcttgaaattttgtgcctctgtcataattgatacca

SEQ ID NO: 92637 - DNA, 780 bp, Zea Mays
cttttcgctccaggcctgcaaactttttgttgttccttgtaacttcatttccagggttttaaaaggacatgtagccgactcaaaagaattccatgcggcaagaacaatatcctggaacccctcgagcttggtccagaaggattcaaagtggaaacgccttcttccagaattattatccctaagccccagaattagaggacaatgatccgaatcctgtgaggcagtactctgaagaacattggggaagagcaactcctaatccactgagcaaaacactctatctagcttgaccagaaccgacacattttgttggtactgtctgccatgcaagggaatttctttcagtgccatatcctcaattaatcttcgaaatctacccgtcattgctctgttgaaattattattgttcttatctgagtctttataaatgaggttgaagtcgccagccaacatccacggtccaagacattcaaccctaatatccctgatttcttgtaggaacataatcttctcattgtctccttgaggaccataaacacaggtcagccaccattcattccccctttcattacagaactgaactgatatactatgattatctagtcttttttgaccagtgaaacccaaatgctgcctccaagccactagaatgcccccaggtgccccaacagaaggaaggtaaatgaagtcactaaagttcgtcccaagcatggaaagaatcaatcgacttgaaataacttgcattttggtttcctgcaaatagaccacctctacccttga

SEQ ID NO: 92638 - DNA, 772 bp, Zea Mays
ctgccgatgtctccaaaaccattcattcccttttcgtttgcaatgtgggtaaccgaagatgtttaagaaacttggctgtaaggtaatctaacacttcaaatattacagcccaaaagctcatggttaaggattaaggatgatagtgttactattttcagtctgttgaacaccctttgttgaaaaccatttatggcactggacacgaccggatggtccggcctgcggacggtctgttcgtaggcgcgaacaatctgtgatatgattagatcagacgaattaaactcctacctccacgcttatttatctctctaaacccgtgggagttgttagagaacgcctacgggtctaggcctctcctctttatatatttgaaggggtacaattcattgaagcgaatcaaatcaatatattttccgttcctttactttttgttatagcagtagacagtaacgtagccctctttatctcaatctttacctttcttcaactctacatcgtctggaggcttcttgggtggcctgccgatctcaagacaaaccctaagatctctcctccctgacggggtccctcccggggtgttagatctaggtgttgttgacaaacaccgccacctctgcgcacacacgaaccgtttgtccactaggcgtggaccgcccgactcacgcatgtcatggactgtcacatccggaattaaggacaattccaaatgcatctaaaatatgtgctaggattaagtcccacacatatgctgactcatggtatagaaatcaat

SEQ ID NO: 92639 - DNA, 310 bp, Zea Mays
tgggaagatgagctatcgctgcggcaacaatttccttctgcagctgcttgggggcaagcagctccccaaggaggggggaatgtcagcagcagaagatcatacaaggttgcaagaaagggaagacagcagcaagtcaaggagaacgagaagctacagggcgaatccgtaatgggccgccgtgttcccaagcccaacactcgttacccatcggacatatggtccatgtaagcccgtgtaagtgggatattaactctggtgctgtccaggagagaaaataaggaaaaagacacaagtattcctcctatcttct

SEQ ID NO: 92640 - DNA, 552 bp, Zea Mays
tgatcttttgtaggactttaaagacgtgtttccacaagaaacaccggctggactacctccaattcgtgggattgagcgtcaaattgatctcattccaggggctgcacttcctaaccgtccaccatatcgaaccaatcctgaagaaactaagaagatacgaaggcaagtgcaagaacttcttgataaaggttttgttcgtgaaactttaagcccttgtgctattcctgtgatttaagtacctaaaaagatggatcttggaggatgtgtgttgattggagagctataaataatattaccgttcactatcgccatcctattccatggctagatggtatgattgataaattaagtggttccacaatttttactaaaattgatttgagaagtggataccatcaaataaggattaaaactagagatgaatggaaaactgcatttcgaaaaaaatttggattgtatgaatggttagtgatgccatttggtttgacaaatgctcctagtacttttatgagattaatgaaccatgtcttaagaactttcattggaaaattt

SEQ ID NO: 92641 - DNA, 1296 bp, Zea Mays
agaggatacccatgagtccgttatttacattccttttctcatccgcggccttgctcttcctatttctcctttctttcgcggtctccttgatttctaccatctaaatctgactcatctgaatcccaactctattctacaagtttctgtttttgttcacttgtgcgaagcctaccttggaattttgtttcattttggcttgtggaaatacttatatcattgtcggcctggaatggccgggggcaacaccagctcgtgggtggtgcgagtttgaagatgcaccgtgggaggaagacagaatacctcgacatcccactcaaggacagcatcaaaggatggcgcttggagtggtttattgtagaaaatcatggcaagtccctcccccctcggtcagggagacagccggatgttcgcgctccaagttggactgaatcccccacatacttggagataacagaggccagggttctgcttgctgaaattggcttgttgaaggagagaggtctgactgctgaagctgtagttgcagactttgtttttaagaatattcaaccactaaaggatagagcgtacccagcttatttgtatagtggtgtcactgattcaacctgggttaccaataagaggattcctgctgtggatttggtaagccaactggagatgattcttagaggcaaagtatcaaatattggtgctcctattgcatattctgcctggaatttgcctccttccaagacttttttcaattttgtgtccaatcctcctgttagtgacagtggcttgggtcttagagtgcgaccctctctcgaagaagttgaggctctggttgcttcacttggtgatctccctaatgatgagaggcaagttcactttgagatgcctataaacccgagcgatgcagagataagtgctatgctggacatgttggctgaggattcttctgactccatccccgctgaaaccatagctgttgcaactatcccagagcctgaaaaaaccttgaatgctcaaaaatctgatggtgctcgcccaaagcgccttcgcccggccagtcatccaactgctcctgccatggggaagaagaaaaagaggaggcttcggcgagtgtcgtgtttgaatcaggatgctagcccttctgttcctactgctgaagaagtaccagtggaacttttcactagggatgaccccaatgggtgtgaccttgatgatgctgatcccaatgggtgtgaccctgctgatgctgaccccaatgggtgtgaccttgatggtgccgatcccaatgggtgtgatccagccagg

SEQ ID NO: 92642 - DNA, 513 bp, Zea Mays
ctataggtctgcttttggttactatgctaaaaaagatcataactatttgtgggagccttcacagtcacaatgggacatgtatgaaaaatattagaccaatcttaggaacaatggctggagcaaccacaacatttttaggatcaatttatcccacaaccaatgtcttctacccttatatagtgaaagtaaagattgtactaattggagcaaagaattctggtgatccatatatatggagtatggctactgccatgttagaaaattttgataaatattgggaaaagaggaaaaatatcatggttattgctacaatccttgatcctaggtttaaaatgaggtatattaaatggtgctttggtcagctttatgacttgactaggtgtgaaaaagagtttcatgagatcaacaaagagttggaagggttgtataagaaatatgatttgttgtatcgccaaaagatggataagggtaacctaagcactcaatcagactcttcatcaatgggtacaaata

SEQ ID NO: 92643 - DNA, 643 bp, Zea Mays
gtcccaaaaaaacctaagttcgattcaccctagggtttacatgtacttcactagtttaactagatcgatttatttgttcatggccaactgggacaactagggtttactctgtcctccgagtcgcctattatgctcaactgatccgtcgttatcatgtacaccaagaccaatgctttaagttatcgatcataggatacgacatgaagactcttgtctgcttttgatattcgtcatcgtggagtgctcatttcagtgtatgcaccaaactgtaactgatcaattaatttgctgtcatgttgtttgtatgttgtttgctcaatgttgctcgtactcaaattaatgttcttgttcctatgcggacaactaagtaccatttaccgtatacttccccaacagatccccttgttgttgcatatcaatttcttgtaattcgacttagtacctctgtgtatggtttgtagtcaggtctcatacaattttgcttacatgactaagcattgcatggaactgatgatacctttacttattatgcagcttgaaaattttaatttcattatttgacgtccacttcaactaactgaggttctaaatcctttttcgcttaagttctttgtttttattaatctgctaaagtgtagtgtcc

SEQ ID NO: 92644 - DNA, 661 bp, Zea Mays
tttttatggctaacacccatctagtgtaatgcctaaatattctataaaacgcacaaaagccaaaccgaacttgtcgttcaacgtgtactcctatgtatttagagtttgccagaaatcgttgaggagtaaccatatatgtttgaatgcttctacctgatgtagatgtggatatacctgggattaatatcatatccacatttgacttactggtatttgatctattctgcggggacgcctgcgaatatgattcatcggccttagtcaaagcatatgctctgattacatattcacgtggtatgtgataactctcctccgattaattcaccctgttggtgatctgcctcacaaagatgttcatcccggtgatgaaattcctagcaatgcgcgcaatatcattgtgctgtgaatatggaacagtgaatattttgttttgggaaatgacgaagatcatgttaaatgtggaagacaaatgtgccgacacctatcttgcctctctaaattgcatctggatccaatacaaagtcctaggcatgagtgcctgaagctctcttatcgggtcattgataaatgcaatcgaggctgaaccaagaatcgcaaagtgaaagtcacgagtttgaagttcggacatttatgggcactattgaaataatgtgtggtgaat

SEQ ID NO: 92645 - DNA, 664 bp, Zea Mays
caggcattaggggtgtcgacagagatgtacctgcaaagggtggggtcctaatggtggaaaacagagaacctgacaaataaaaaaatcaagattatttgaatgagccgaggtagagaaggggaaatctatctcatcgaagacaacatggcttgaggcaataatgcggttggaagagagttaaagacaccgatatgccttatggttagaagagtatccgatgaagacaccgagtggaacgccacatgaaggttgggatagcaggcgcagccgaaaacttggaggtgtttgtagaaagggggagtaccgattagggcaaaacgggggcaggaggcactgatggtctttgtggggagatgattcatcaagcatgtcgtggtgtggaggccttctacccagtagcgtgttggagtagaagtttggaaaagcagagagtgaacaacattattagtagaacgaataatatgcttagctttaccattcttctgaggtgtaggggcgcaacatgtggaacaaagtggcatggggaaggagaaaggaccgagtggaagcaatatcaaacttgtgcctgttgttgcactgaatggcctggatggaggaacgaattgagtggatacatatgagaaaaaatgggacaaagtaatgaacgtgtcagatttcaaacgca

SEQ ID NO: 92646 - DNA, 718 bp, Zea Mays
ttcctccattggtttttgacatgaaatttgcaactcattacagattctactatattgcaccatatggaagaatggcaagagatatactcaccttgcttctggatgggcacttttgcactgatagagttgatattcatcatgagtatattggctcaatttctgttcaggaaatttagatgctggatacagaggctaaagggtgcagctcctgaaagcaataaacaacatcaggaacataagattattgctataaagctgggtatctcatataaagcttgcatagcttgttgtctgcttatactaggcagtcatgtcctgagggcagtatttctacagttacatgaaagaataagtgactgcaagtatccaccctttattctttgtgaaggtttgcaggtgctatcgtggataatattgtcactactagtattcagttttcagaaaacaaattctgcaaaacttccaatggtaattcggtcctggtggatatttaacttcctacaatcagctaccactgttgtaattgatctcaggtcaattttggcaacccatggcgatataggatttaaagaatggattgatatgttcatgcttgttgtttgcatttacctgtttgcgatttcagctggaggaaaaacaggaatcacattcacagacagcagtgtaacagagccactattgaatccatctgtgggacagcaggcagaagccaaacgaa

SEQ ID NO: 92647 - DNA, 329 bp, Zea Mays
caccggtgaacgccacggtcacagccacccgtattcttccctatctccggccgccagcacgccgtaatcaaattgagagccaccgcccccggagcctataaattaagtgcaccatcggcttcgttatgtattcaagcagctagcgcacgcacccgtacctcagatcctccaccagagagctccaatttctcatttcccaaactcactcaagaacaccgctcggattggcctcaccatggtcagcgacctctaggtctgttcatgccccctgctatcttgtttcaacattcttgtgtgcccctgatactccctgaccaacccaattaagc

SEQ ID NO: 92648 - DNA, 567 bp, Zea Mays
atcctagccacgtagattatggtagggtcatcttcattatgatctcttccggacaaagcctgggtcttttcctccatgtaggggtatttttgttgctgggtggaaagtagcggaggggtgtctcagagacttccctgctgtagttctggcatagctggtggagggctttttacgcagcattctggcaggtatctgggaagcgaaggccagtggcggtgatctgaaagggattgtgattggggtagcttcagctttctcccaggtagactgccatagagcatttttcaataccgttctcgcggtattccttccagacatactctggcttcttgcggatccccatgcgaagcgcacaacttcaaagaaggtgagggaatccttccacctctgagcaataggatgtcttaaggataaaggtgccttccatctggtagtaagagaacaagggttgttaatatcgggggaaaggagagaaggttctttaagaggttaagagttctttcttttgaggaaagctttttaggtcagggctgtgatctacggccagacctatggctccgataccac

SEQ ID NO: 92649 - DNA, 590 bp, Zea Mays
tcatcgtggcattcagcttcgctcgcgtggtgccacacctccgcaaatcttcgtacggcacgaagtctcgtccacgggttcgcctagccggggaacaggggcaccgtcgttggcgttgtgagatctacggcgcgctgcaagtctccgtgatcggctacacctgtgcctcgaatgcggtaagaaatcatcctcgattcaccactcgtcgttaaatcctcagcacattggtgttatccacacttcgacccacaactgcaagtagctgttcatcgctcgccagggcttggcttcctggctctggcaatggccgccctttggaagctaggtagaagacgaaccccggcccctcgatttcgcagtgtgcggctacgattagatcgtgccgtaacggttcgtttggacgagggaaaaccatagatcgatgatcgtggggctgtgggtgattcgggtttcatagaatccggttcatcagatcttaatccaagggctgtcctcgcgtatcacttcactgggggcgcgatctaatctagaccgccaggcgtggatccaatggtccaaaccccaccgtacccctttgcgatgacgtttta

SEQ ID NO: 92650 - DNA, 473 bp, Zea Mays
cggcgagatcttcaccatggggagctttgtgccgccactcaactctgtctaagggtagaagaggggttccctgccgtcgatcttgagatccgtggctcgtgtgagtaggtgggttttgatctagtcacggccctcaatatctgatcgggcggccccggttgctggccgaatcattataagtcagatctaatcttgcgcgtctggtgttgatcagacggctcagaactaccgataccctttcagcctggaagacttacaaaagagaccctatctttaatataaactaacccgcggtcctatgcaggttacccggccctatgacttagactttttatgcaatagaccctacactttctgataactatgtgctcgctacagagaaacagaaaaccaaataaattcaattggaaaatactttttagtgtaaaaataattgcaggaacttaattaattcatagaaaattcatattaac

SEQ ID NO: 92651 - DNA, 695 bp, Zea Mays
aagcttttgacaaattggagcatgcaactattattgaggttttaagacacaaggggttcagagacaaatggattcactgggtttctatgattcttggctccggcacttcagaagttcttttgaatggcgtccctgggaaatgatttcactgtaagcgcggagtcagacaaggagatcctctgtccccacttctttttgttcttactgcagatctcctgcagtcgattgtcaacaaggcttgtgactgtggcatcctccggctccctctaccgaacacttgtggtcctgatttccctattattcaatatgcagatgacactatcctcataatggaagcttgtcctagatagcttttcttcctaaaggcgatgctcaattcttttgctgaatccacagggctacatgtcaactaccacaaatctaatatttatcccatcactgtcacggaccaaaaaatggaaatccttgcaaatacattccactgcaaaattggatcaatgttgttcacctacttagggcttcccttgggattacaaagacccaacctgggtgcttttcttccacttattcagaaaattgagaaaagacttgtgtcaacctctgtcttcttatcccaggctggcaggttgcaaatggttaatgcagtcttcttttcactaccaacatattacatgtgcaccctcaagctcccaaaa

SEQ ID NO: 92652 - DNA, 474 bp, Zea Mays
cactcggccgttatttccaaaacggccgacacggcccaatttaactcagctgttatttctaaaaaatgctggcgttaccagacttcactgggccactatttccaaagcagccgacgtggcccgttattactcggctgttacttctaaaacgccgacgtcaccagtagtcactcggttgttacctctaaaacgccgacatcgccagcagtcactcggttgttattcctgaagcgatgacatggcttcaaaggattcggctgttacttctaaaacaccgacatcaccagtaatcgctcggtcgttatttctaaaacaccgacgcggcctgctatcactcgtttatcacttctaagaatgccaacatcgctgataatcactcggccgctactattaaagcgctgacatcgcgaagaaggcagtctgaagcgcgactcaacgattttaagtcgctactcaagcattacattcagaaac

SEQ ID NO: 92653 - DNA, 2491 bp, Zea Mays
ctccctgagaagcattatcatttaaggaatggcaaacgtgaaaagataagcatatagcaaacagatacaaagcacaccttaggcagagatggataaactggcatgctacagccaatacaaagacgttcactttgagtattcaatgtcatagccactgggatatccacttcaactcttccaaaagcttcacagactaagatacctccatttgctaaaacagcagcacgtacagtctaaatagtgcaacagctcagtacattgagtgtataactgatccagattcaagattcaggagtaaatgatctcaaaatggtacaacttacagagttccccacagattttgcagatagtttcccagtggtattttgaacttctacaattcccatgttcagacttgagtattcaatggaaactccagtttttggaccacctttaacagaaagctaagcaggaggaagataaaactcaggacccacaatctttttacgaaaatggaactaaaatgtcaatgatttggcaacagcatgctaaggctattcacaatggagattccgtaccactttttccaacactgccacatcatccaaggtgtcatgaaactcagaatgaaacaatgcctctcaatgcaaaaaaatcacctcgctatttcagactaacataccaattaaatgatgtaactcaatgaccaatagaagttagtaaaatatgtaaagatgaaacaaatcactctcaatggaggttccacacggtttccaagaccttggaaacgagttgacatggtttcattcccatgaaactagtttcatcccatgaaacttaattctcttaaatgatatgacatgtcatcaaaaggtctgatgtggcacactattaaatgtgcatgaaaccacaatgaaactactatcgagactagcctaatagtacatccccaaatgtgcattagaaacttgtagggatgtagatatagctggcataaatttatagaaagagagcaggttattaatggttagttggttaccacaaaagaggcgcctggagtgaggtaaatatactcaggatgtatttgcaatggtccatacacttccaccttgacaacctgacttaaaactctgtgtccagagctttgtttagtactgacctgaagattggacatagtaaggatcatcaaccaatacaagcaactgaacatatatctatcaccaacttacatatagagatgtaatgccgatttttgcagctttaattgaaaattcgggtccatccattgattcgcttggaccaataagctccagaatctcatcgtcaagatgcaactcaatgtccatatatttgaactgcaaagatggagagaaattagcaaactcagaaaaactacagtatagccaatcaaatgagcaaagacaagagcaaacaattgtcacagcattaagatttggaaaggaaaaaaaatcattgagacaaataataacaaccctattttccaggcttgaaccaacatgataacttgaagaactcatagaattggtgttagctgattgaatacagttgaaaaggataatgggtaataaaaatctctgaaaggagtttaaaggatattaaatgtaaagtttagacattttaaaccagagtattgttgtaaatgaatagtgctaaatttaaccaacatgctagaaaaatatgaagtagatacataatgcatccaagcacaaacctgagaatcaccaaatatttgtccatcttgggtgccagctaatatttggaaatcttttgtgcttccttcctataaatgaaaaaaaatcagcaaaaaatacaaaaaaacataataaaaatggagatcctcgtaccataagactgatttgctcttctgctgttatcttaatccagtcaacatttgcaactctaacctgcaaacagataagaaaacagcaccacaaaaactactgtcagtttgatatcagtggcctcaaaaggaagattagcacatctttattatgaggggtagtctgatagaagttgactgtaaattagggatgacagatatatatcaaaattcaaaagttatcattatcccaagattaatgctagacaaagcacagatacaaagatatgactcaagggatgttggcaaccatttgaacagtataaacatagtatgcaacagaagtcacttgattgaattgtaacaagtataaaaagtatcaggagaattaggaagataagcgccaaagtgatgtaccaaagaatgagtagttgctcttggagaaaggccaacatcctggattatgattatagcttcgcctaaacctttagccgcaagaatcaattgagaacataaggcttttcctggatgtgtaactatttgcaccacatgtgtgtcattggtagaagcatctagggagcatgttccaccacttacaatcaggttttcctgtggctcaaatgtataagagcataaatagcaaagggggcttaaattacttcagaccatgaa

SEQ ID NO: 92654 - DNA, 2228 bp, Zea Mays
cagcgagacagggattcaataagaatgtacagtcgaatcatgttgtgagatctatggatcctctaacttgtaaaatacgctccttttttatttgaattgcagactggcgattacaaaatagtggacaagagttatatggtttgagtgcattaatttagaagattcgtcatgttcaagcactaggagtattttcaggatgtccggtgcgattgaaatgatgacttcttgcaggtagtgcagagagactgatagttgatgtggcatgacagctcagtagttcactgcccatagacataatgtgataatgctcatgttttcacacctcactatgacagaacttggtgcattaagactctgtctggtaagattctaaatggtagcaactgcttttattcaaattactcacattacattatcctgcattccaatgtactacagaattacaactacctttcaaataggttcgcaagtgctcagcaatcttgactgttaaatagattttagtgtcttagaatgctctcaaaactctaaatgccaataactgtatggagatctctgaatcatttcacacatacacttctgtccttccaacttctcttgacaacggtcaagtatccttgattgtacatggttgagcttgatgttgtattttcctccttggtggttcttaccagatgtgttgcacaaggttgaatccccaacacaaatgataaactgacacttcccctctttatctagaatcaaatttcgactgtgcatacagttgagccaattcatatgcgtgcttggtgcattgcatgttctgcgcatgcctggttgataagagctcggcaagtgttggaaactatgttgccatacaccatatctttgagtaaaggataccttgtactgtggtattaagaaactctggcaattaatttactttgtcatgtcaaatttacttttgcaaatggctaatctatcacgcagctattgatccatcatccatccacagcacttcttatctgttctgaataaccttgtgtgttcgatgaaaaatataagatttttttttcacttgatcatcgtagcaatatcctgaaatttgagcaaattttacccttaacataccagtttgccttggctgcacagctgtctgttgacagcagcttccaagctctacaatctttatggttcataataggcaactttctcagttcattgagtggatcaaatcacaaaaaaaaaaggtgatgaattggtaagtaatcaaagaaactatttctctgtatgtatatagcacaggagcctatgatattgtggttactgagcactccaagttacttattttaatttcatagggatagaactttttattcactagggtccatcctccaagttcccttttttatatttcttgggcccctgcagaatcactcccagaatagtggatttggtctcctgggtcgagtttcctggagctaagcatctttgctgccggtaccacaatagatctgctggcttttggccgtcagcaggagcagaaggctgttttgatggtacatttgtttgatctctagtcttaaagccaaaggtcaatgttctgtgctgcaaaaggtgcactggactttctttatttcattatcaatgtcctagttctgtagagggcacatgtctcttgtccctccgtacctatttaggtatcactatagattttttttttcaaattaatctataattttttaataatacttctatctctaaataaagttattataaaataaattcaacaatctatttaataatactaattatgtgttataaataacatatttatttgtatatttaattaaagttaaatatatctgacttctcacagtacacatctgtaatttttttagttcatcttgctccagtccagccataggcccatagccctggggcctgggctaggtcctctatctgcttgcattggacttgagaaaatatattgccattgcagaacttttagcctctactcccatgttgctctattctatattaatatatggttatcttaatccagggacatggcgactaacagaagtccaagattcctttctcatggatggatggtcccaattgagttggacgttttcggtgggaagcggacaaaccaaagcaggttcccgtttgacacctaaactttcttatacaaaattacttcttgcaagaccttttccaacataacacttacatataaatctgca

SEQ ID NO: 92655 - DNA, 630 bp, Zea Mays
gcgccgtagcatgacggaccacagctgtgcagtgcccgtgagatagtacgtggccatccatactttatccacctccgttgtcccttgattgtagaataagctctcacagcgggacagccagccaacaggatcctctttgctgtcgaatgtgggaaagggaaggttgtggtggtgctggttgggagggttttgctgcggtgggtaagctgtatggtggggttcggaaaagcctggattggtgatggggagtggaaagggtgtctgatggatgggtataggcatggtagatgtgggtggcagcaaggctgaggttggcggtggaaggttggttgaggtggatgggagtggagcggctgtggtggtgattggcgatgatggtatgggtggcgcggcggggtttgacaagggaggtatcccgccataatctggcatgccatatgggatggaagtaggtctggtggacgctgggggcggtggtggtattggcggcctactgatcatttgagtgatggcggtggtgagatcggcaagggccttcgtcatggtgtcgatcttttgctctagcgctgcgttggcggaattggtcgcggcagcagatgcgacatcgctggtgttgtcgtcgttgcctgg

SEQ ID NO: 92656 - DNA, 471 bp, Zea Mays
aattgccactggtcatgtttaggctatacaacctaaggttaccgtcatagtctagggtcaatctcctcatcgtctcatcaccaagatcagaagcttcaaacttaagctggtcacttgccacaaaccgtcctgtctggtcaagaaccccatacctggtactattataggtagtcctaccattatcccatggcatgtggaatggatctggccaatatatgctactagtctcaggaccgttgtaaataagagttaggatattgttagtggcgaagtagaaggcatagaaacctgaatagagcaaacccctagcagaagcagataccaacctagtatctctagtcatcggctgccatggtagaagtgtatcagttggtgagtcgaagcttctccagaggtgacgcccatctgtatccatgacaacaaggttgccgctatcgagaagcatcgcacgatcactgccggacgcggttg

SEQ ID NO: 92657 - DNA, 471 bp, Zea Mays
agagacaaaaaggcaacaaacaatgtgaaccctacaactatctctcagggtggtggtggtatacaaattatgaagcgtcttaccccgctcttacaacgttcttaccagcactgcaggtggcaaacagtgaccgaagtgactatccaacgagcgtgggtgtgattgcaaaggagtacctgttctgctcgagagaaagctggagttctgggaaggctgactaaatatatatatgtggcacacaagtcagtaacagatagcaatgctgaataagtgttacaagtaatcgtcctagttgctggcctagaaaatgtaatagaacagttggaccaaggcacaagaaaggaggtacaagtatatgggtgcagcaagaaaacaggcttggggcaaaataatcacagaggtgcacagaacactggcgtttctgtttatgtgctactcttttcttttttttcttgcgattttttttcaaat

SEQ ID NO: 92658 - DNA, 964 bp, Zea Mays
tccctcttcttcttttttccgtctatgtataagtataaggctctttcgaagcggaatgtattctgctaatgtgcaccacggcacggagtttagatgaaatcccggtggacctttgggctgctttatctcattccactgcagaattgggggttcacaagaactttgacatctttccgcgagagctggcagatcatccactcttcattgaaaagtgcgtaaattgcctacctagttttaaaattaattagaaaatgagtgtcacagcagtagcttttaagatagatggtagccatgaataaggatataaatgagaggagtgagtgtgaggagaacttcccatttgctgttcttagaccctgtaataaaaactttggaagcttcctaggagcgagtcagcaatttcgctcgttttcctggtatccagactttcatagtaggtctcgtagccaatatccctaccagacaatccaaaatggaaccttagagtgctttacccgtgacctttcttgttgctccctgggcaaatagaaactatatctttttctataaatacttttcaaggaagtcagtatcagaccatatgtagttctcgtctcgagggtcttacttcctttttcccggaccaaagaaaagagataatttattagccttctcacatggacataaagacacgagttaatcattcgcatgcagcctcacataaacaacaaataacaagcgcatgcagcctcacataaacaacaaataacaacgcgcacaagcttaacactcatatattttttagataatatggacataagattcccctcttacccctaactaacgattatgctgctctcgtcctgtttttccatacttcccgcagcgcaagaaaaagaaaaactagaaataggaacaaaccgagaccgagagcgagagcgagagggtgaatgccaaattgatccaaaggactctccgctaaatg

SEQ ID NO: 92659 - DNA, 492 bp, Zea Mays
accacctaagggcgcagccaggtacgcgtcataagcgtccaacatcgccgtggaaagcgaggtccccatcccattctacgcacaacgattacaagtcaggacaacctcacaaaaagcgcagcatgcgatgtcattgtagtttacatacacacagtgaggggcccgccaaccatattgcacaaacaaaaaaatcacatcttgttgccctccctctctattgcgagccggggagggtagcgttttcactcactaccacaacacgagagtgagggcagcagacatgctacatcggctcagccttctgaataaggcctgcctctcaaaagttaaacaacatcatcttcaactcctcgccctcaaaaagattccaaagatccccctccccaatacacgtcccggatgtcgaggatagcaaatctcgttggccgcctcaatctagccgaagacgggatcgttccatccccatccgtcgacgcctcccacttcgcgata

SEQ ID NO: 92660 - DNA, 400 bp, Zea Mays
ttcggatgctgctctgtccttgaactccctgcttctgatttttctagctgagcggcggcagcttcggcagccccagcaggtattatctccaaagttgagggagtagcttcgacagattcaacagtttccatcttttctgtagcaggcagtgcaacaactctctctaagaaatacgagctcaaccgatgagttaaaacttttgcccttttcggattcagcgcggaggaagaggtcgtagctgtgattttcctcatcgtaccttgtttttgagcgagaaagtagtagtcaggataggcaaatccaattacatcaaaaactttgttcaaccttctctttcctcgagcactaaaggcagtattcatggcttcgtcttctcccttcgtataagcccccaacaatt

SEQ ID NO: 92661 - DNA, 351 bp, Zea Mays
cttttgataagatatgcacaacttttcctgatgtaatgtatgggtggataaaatcaaggtattgtgtgatgcttgtgagtttgcaaaacacacgaggacatcttatataagtcgaggtatcaggagtatatctccttttgtgctagttcattctgatgtctggacgtgtcatgtgacttctattaatgggatgaagtactttattacttttattgattgtttttctcggatgacatggttctatgtgatgaagcataaagatgaagtgttgaattgctttcaaaaattccatgaattggtcaacaataaattcaatactcaagttaaaatgatcataacagacaatggaac

SEQ ID NO: 92662 - DNA, 1004 bp, Zea Mays
cggccatatttggagacagagcgaaggcatggaggtggagtgtggagcaggctagggagaagtgtggggagtcggcccaaggctgttgctatatcaaaaggccccgaggagttgcgctcgcagattcaaaagaaatgggcttctcacaacccagcagatgccagggggctacatatgggcaaaaaaacagaagaagggggtgttattgttgatgtgcgagatgagccactgagcaaaagatgctcaaaaatcatagtgggaacaatggagtgcgacatattaaatgctgcagaaagtccccaggcagatatggctaagcagaatggtcatgtggctgtcacaaagaacagtgaagaagtggtagccaagccaaatataggacagggacacatagctgctgctgggacaaacagattacaggagagtaggctgcaaagtggtggaggtcaagggatgagaagcaagcgtatgaagcttgatgtagtggctacactacaaatgagtaattctgctagctgggataggaaacacaaggctgaaatgattgcgaatcagcacgtagtcggtcccggtgttgtgatggatggccactgtagaggagagcatcacacgtgggccgaactaccaggttgcagtaataaatggacagcaagagggctggttagagagtggattgatgaaggagaaaaaaatgtgttgattggtgtcgcccagaatgcaggtcctgttagtcaagcttcagctggtggtgtgctggacgcgaggggcagaaaaaatcatggttcagttgcgcccggtacaaaaccagcaccgagatggtgtccacctgggttaagccgtacgcaaaagcgtcgtgtccagcggttgaggactatggaaatgacagaaaagatgaaagaggaggagcgtgacaggtggtttaacgaggataggccaatggttatccctaagaaaacgtggagggagaaacgattggccagggaggaaaaagatgataatagcag

SEQ ID NO: 92663 - DNA, 433 bp, Zea Mays
cgcatgcatcatgcctttataccgtagtaaggggtacccctaatccagggtaccgacagatcctattaggttaacatgctctcgggttgcttgaaaccaacacatgagcatggaagctgaacatatgttcatagatttgttgacatgcgatggggcgagggcgagacacttattggttcaagtgtcttaaccctttaggggtcggggtagtcgctgagcctctagttcaggaggcactacctgcaaacttgcaactggtgcaaggcccgactatgtgttattgtactaacatgtgacagatcaagattatgcgcatgcacggaagtgcaacgacttttgtgctcatccttttatggcgtttaaagtaatgaaatctattgtatcatgatagattcttgtttcaccgaggaaaaacaagccatgccaatcccaa

SEQ ID NO: 92664 - DNA, 397 bp, Zea Mays
cgatgacttggcttccggcattgctaattctaggtacatcctctgcctctctgtgctttcttgttgtttacaacagtctgaatgccactgttatcaaataggtcttagatttaattgtggccttatttgctcgcttttcttttgcctctgaaaaaacgttgtccagttgtgatgggcaacatttaaattagcaatggactacagtgactcttacgcttccattcctattgttgcaacggtcttagctgcagtgccaaaacagatgtggcacatttatgttgcacctgtactgccatggacctattatgctctgaactaaacctaattttcaccagacttggctaaagtttgcaacactcgatctccagatcattactttgcaacctaatgtgccctt

SEQ ID NO: 92665 - DNA, 570 bp, Zea Mays
aggaggctctagaggcactgaagaagttcttgaccacgtcgccagtactcaagccgtcgcgcgcgggctacgcctggtcagccggcggaagatctgctcctatatatctcctgcacgactcacgtggtaagcaccacgttagtaattgaacacgcggaggaaggacatgcataccctgtgcagcatccagtctacttcatcagtgaagtcctcgggccctcaaaaataaggtatcctcaagtccagaagctgttgtacgcggtacttctaaccgctcacaagctccggcactactttgatgaccacaaagtcatagtagtcacaggattcccaataggcgatattctccacaacaaagaagctattggaaggatagctaagtgggcatgcgagctcgaggctcacgacatagagttctggccccgcatggtgataaacactctggcattggtcgacttcatatcagagtggactgagcaccaggtcccggatagcccagaagttgctgaagtgtggagaatgtactttgatggctcgttgaagctgcaaggagcgggtgcagggattctc

SEQ ID NO: 92666 - DNA, 697 bp, Zea Mays
gttgcagtcggcaacagtgtttagaaaatgtaacactccaaaatcgtatcttggtgagttaagaaaattccctaaagatttaaaatctcaagcgtattttaacaaagttatgaattgagaattttctcacttgttgcttcctacttgccgtttcctactcgagactgaatcaaccgtaacagactccgtaacaattgggatttgatcccagtgattggcctaggacccagctgagccctgcatgtttcttgagtcatctaggactatatattcgagtcgcccgtgaccctccttgctccatcaaatcattgccatgagtccccttcgacgaggggagcggtggaaaatagagcttcgtcgatgggtttctggttcatcgatctaatctctggttcatcatcaatctaaaaaaacatgatgtccaccagcagcgtgggattaaagggcttggttggaaggtaagttggtggtaggttatgagtctttcccgcgtgataggtttgacgctttctatataatagattaactagcaccatagaccttttacatgatatgcagcacaaatttaatattaggtacaatcatgataaattggcagcagttgggtcatatctttataaacaaacctttatcatctttaacaaaccaatctaaccaattagattgcatcatgtcacctatttctctgcagccttac

SEQ ID NO: 92667 - DNA, 1888 bp, Zea Mays
agaaggtcggaccctggggttcgggtgaccaagggaatctctagaggagtagagggaatgccatacttttccacaaaactagtggctatgaaggagtgggatgctccagaatcgaaaagtacggtagcgggagtaaattcaacaaggaactcaccgagtactactcccggagcctgctgagcttcttgggcatcgacgtgatttacacgtgcccttccttggtacggagccttgttctgctggctgacggcagagggcgccttgggggtggatgccgaggtattcttggggccattcaccgagttggagtaggcgggtactggtggcttcagctgcggacagttgttcttgaagtgactgggatcaccgcagtgccaacatgcatttgccgggggttggttgcttgccactgagggggaatggaaggagctctgactctgctggctgaatcgcgatggagtgggtctagctggtctactgaagtttggccccttgtgtggaaacccaaatgattgagtcttctggtgccggtcctgctgctgtgcccggagaacctggaacttccttttaagatgccctttttcttcctcctttgccctttcaacttgcatggccttgttggaaaggtgagagaagttgaggaagtcttggctagccagaattgtcttgagttctggcctgagtcccttcaggaaacgggccatcttcttgctctcggtactgacatcatctggcgcatagcgggctaactctatgaacttgtgcacatattcgctgacagatcttccgtcttgagtcaattctcggaactcgtcctccttaagctgtaccaggccttggggcacatggtgctctcggaaagctgcttcaaattccgcccaggtagcatctctgatggtgacattgaaggtgtcccaccaggctaaggccatcccagaaagttggtgggcaaccagttgaacacgctgattttctgggcaatcaatggcttccagttttcttttgatcgtacgcatccaatcgtctgcatcgagggggttgcttgatccagcgaacgtgggaggtttgagtctcaggaaatcccccattctgtcttgtggtcttccaccattcggccgttgattctccagatttcgagtgaggacctcgatgagtcgggtttgattggctagaacttgggctaggtctaaggatagtggtggaggtgcgaggaggtgggtttcactttcttctctaacgacttccccttcagctctcaggggaaaccctgctccaatcccagaggcggtaggcgtggttttatccgaagccatctgccagggaagagagtcactattatgcacatgcaaattgtttttaaccgagttattttattcattacaccatctcattacaagcataagactactacaggtggaactacacgagagcgttccccgaggtactagcgaattccttatctaaggtgtccccaaatgccttgagaagatcatcgaggcttgctagggatacatcctcttcgtcggaccagtcatctattctggggggaggtagggctagaggggccttcttcttcttcttctccgtctggcatccttggttggtggtcttcttctggattttcttcttgggggcgagtttctttagcttcttgtcatagtccatcttcaaagttcgataggcctcacgggtgttggcttcctcgccttctgctatgtcgagactctcctggagggatgccttctcttgcttaagctctttgacttgctgctctaggctttccactcgggagtttaggtgggtgcagtgggaggagagctcgtcgtagtggttgtcgagggtgtggaggtatccggccatgtagacgatagtggggtcatcttctgtg

SEQ ID NO: 92668 - DNA, 795 bp, Zea Mays
tatcaagtcctaatgagccaaaacagattagattgaaccacttagggaggatcacgaagacgtttgtgccatcttgttgatgtggccgagacgtttgtaccaccgctaggcgtcgttgtccttgggttgggcaagctgcgctacctggcgcaccatctgaagccatagtacgtacaactgattcttctgcagctccacccgggcgagcaaccggtttcgtgatcccagatgcgaaggatgccgtgctcgacctcaacacgggagccaccctcgtcgagttgacccacactgatgatggaattctttagccgtgggatgtagtagacaccccttagtgccttgtgctcgccacgcttgctggagaagaccaccgtgacgatctcattgatgtcaacgacgaaaccatcaccaaacttgacatttccctttatgtcatgatctagctcggcgaagacgtcatcgcaaccggtcatgtgatttgaggctttggtgtcgacataccagcctttgtcgtcatccgctgctataacgctcgcaccttgggctcgttgatgtggagacctaggcgcgtcgttggttcattctccggctcgaggcaagttggagcgggatcgacgctcgtgacagtgagtaggagagccgcatcatcctcgtcttcgtgtgtcaagttggtgcgctccttccttagcgcgcgacactccttgaccactgcttcttcttgccacaattatggtccttgaggttgttgcacccaccagacttccttcgtggcttgcggcgttggtagctacttcc

SEQ ID NO: 92669 - DNA, 334 bp, Zea Mays
ctctgctccagaaaggctagaaagcctagcttcactaaattttaacctctccaccaaagagagcaggatcttatccttctcgagagcttcgtttctcaaagttatgaccaccgaacgaaggtttccaattgctatttggttgctctcatcttctacatccttttgagcttttaaagctttactaagaattagaccctggcaaacaaggaacataaaaataataacaataagaattaccacaaaaatagttcaccataacaaaaattaccaaatgcaaagccaaagagtacaaaccttcaggttgttgtaggcgaggttgtctgcaagttggtcc

SEQ ID NO: 92670 - DNA, 660 bp, Zea Mays
tcaatgccagggtatgcgtcgcgtcggattggtgacggtggacaacaccaaaatgtgggttattgtggccaatggtgaccacactccttgcgacggtgtggaacacaacatggccatgcacatcgatcagagttcaccatcagctgcttcagcattgacctagtgggtttgacctaggttcgacctcgtcctgggtgtgacctatcgccggaccttggggcccatcctgtgagactttgaggccctcttcatgacattctcgagggacgatctctgcatcctctagaagggcatgggttcccctcacaacgacacactacagtcggtgctccactccatcttcggcgttgctggaccacctctagtagtacggcaaggtcttcgatgagccccgttggctgccactaacgtgcccctacaattaccgaatgtacctactttcggacaatgctagtggccatctacacttaccgctacttgcaactgtagaaggatgagctcgagcggcagtgccctgccatgctggagcaaggcatcatctggtccaacacttctttgtcctcggcacggtgctgttggtcaagaaggtggaggatttctggaggttttgcatcgattgccatgcgctaaacgataagatgtccaaggacaagttctcct

SEQ ID NO: 92671 - DNA, 385 bp, Zea Mays
acctattgcttctttaacctcagccaaggcagtggagttcatacaagacataatattcaggtttgggataccgaatagcatcataaccgacctgggatctaacttcactagctctgaattctttgatttctgcgaacaacggagtatctagatcaagtacgcatcagtagcacacccaagagccaatggtcaggtggaaagggccaatggaatgatactggaagcgctcaggaagaaggtgttcgacaaaaatgaaaagtttgcaggaaagtggatcagagaattgccctatgtggtttggagcttgagaactcaacctagtcgagctctgcatggaaataccccattcttcatggtctatggttcagaggcagtgttacccgcc

SEQ ID NO: 92672 - DNA, 345 bp, Zea Mays
aattttattgcgcacagtgcgcatcttgtaattgaaatatgatgtgtctttcattgtggtatatgctctaagttgcagatgttagcgtcttcgcgcgattgggtgtcgctaatacgtttatattgatctgaccgcaagtttaggcgactgttggtagggtattatcttctatataggtgatgacttcaccttttttgatgcacctattgtgtgaatctagctgcacccttaggagacttttgcgtggatagaactatgcgtcctggggacgacttcgcacccttgagtgttgttacgcatttgttgtgctgatccagctgcacccttaggcaacttttgcttgga

SEQ ID NO: 92673 - DNA, 408 bp, Zea Mays
acgcgctccaccactctgcgacgcgtgtcctagtatttgaagctgtgatctagggggtccggacacatggattggctacccggtctaaatcctgcaggtcctgttgcatgaatcaaaggataaaagataccagttagtgggggttctatgggcgcactactaaagctacctagccaaggctgtgtgcaggtacggctcccagttgagactatctcctggggaccaggtcacgaatttttcttaagtatactggcatccagcctcgacatgtcgagcctacataccaaggggccaggtaccagggagaagttgataacaaacgcacacagcaaaggcaaatagcatacagataagttctgtcactgttaggttaatacttcccaaaagtatcttacaagaccaaaaaat

SEQ ID NO: 92674 - DNA, 859 bp, Zea Mays
caaggggacccatcaaattttgacagcatcagtgagtggtgggttctgacagcctctctcatcgcaaaagaccgaagaagagacttcaacggaatcacaatctacaccatgtggaacatttggaaagagtgtaatagaagaattttcgaccatagctcactgtcggcgttgcaggtggcggggaaaataaaagaggccttacgcttttcaggagtgttgttgctctctagcagcctaacctagtggttttgggcccctgatgttcttttagttttcccggtgggtcttttcaagcacaagatgtgctcctagtgtgtgtgatctgtgatccatgatctttgttctataactcttttccctctttaatgaaaggcagagctactgccatttgcgtttcaaaaaaaagctttgtaggcagatttggagctaaacaaaccattgcagttaaatctccaaacatgcttgtcatcccacagctgttagacagctaatataacatgccaagttcacgaaaagccaggccaggtcagttgtgggcagtaggtcacggcaacaacctgattcctatgggatcacaaatcatggctagagctttgtagacagtttggcccagcttgcctcaggctacctgtttctgttgtacagttgattccttttgctttaaggaaatcctaacagtggggcttacctgctattttttcaggtaaaagaaacaaatcatggctaggatatggatgttactcaggtcacctcacacaatgcttcaaagctagacttttttagtgagaatggcatagatgattcagcccatttagttataagtcctcaaggcttcggtagtgaaacaattcatgtgatc

SEQ ID NO: 92675 - DNA, 983 bp, Zea Mays
tgatgattcaaatgtcgaagaagctgtgaaaaacatatatgcaatggcagctaagcagagccaaggatcatttaatccacaaagggagagacatcctaacggctggtctcggtaaccctgagcatcctggccgtgtacgaggaatctcgtctaaggaaggatggaaggaaggattcagaccacagtgggaaggtttgtacaagaaacatgatcgatacaaagaagagttgttggattattttacgcaggaggcaaagaaagagttcaaaaacctgatgtctcaaatgctattgaattctccactagaattgatgcagcagttggcgagtgcgatgtctattcaacagatgaccactccacagctgcaaataattccagcagctcaaccgtcggcttccaccgattgtaccaccattccaagctctgtcgcgtcaacgggaaataaggtcccttatccagttgatgacataacaaggccagtgacgtgcacactagttataagatatggtattaacaataatcgcatgaagaaagtaggaataggcattgcgatcccaagatgcaagtttcatggaagcgacataccagatgattattgcaaggtagaagtgacgacggtcgtccaaggatccgaggacgacatgctagacatccctaggcccgaaggaatcaagacacttggacaagccatcaaaaaattcatcatttggcctcgaagggatgtcgaattggttgatctgccaacgtcgtcgtcgtatcatctccaaccatctccgcctcgtcaaactttagtacctgtacatccatcatcacctctacaatcttctcatgctgctcctcatcctctttctaatccaccgtctccgccacaagcatcaacatttaggacaccaccaccttctccacaactatcaagggattcacgacaatcaaagaaatctaaattccctgtaccaaaattggtgtccacatttgagaaaaag

SEQ ID NO: 92676 - DNA, 339 bp, Zea Mays
caacaattatctgatcgctgaatttgtcgatccagaagaggtaaagctcaaacttgaaactccaccatctcaaattcctcctatcagtctgagcacagctacagcacagcagacagcaaccttccaacaggcaatggctaaccaaactctagtacctccccatgttcctgctacttcgagaggtttattgcccactccagcacggtttgccaaggtgcctcccacctctgaccctggaccagcaagggagagccttcctccccctccactgagcctggaacctgcccggacactggatgagctcttcaagaagacacagacgtacccaaggatttacta

SEQ ID NO: 92677 - DNA, 482 bp, Zea Mays
gggcgcagccagtgctcagccaatgccataactcgatcgattaataacgtagtatgatcgacgtgtctgagtacccactatacaatttaatcgctcgacatgagtccaaaagctcaacacatcataaatatttagagcgattcaggtatacaccatatagtcttcacaagcacctttaataattttctactatttatctactacgggaaataaagcagaaaaataatacaagaattaatgcataagcataatcagatcaggtgcatgatgccattttctcatattcaagcatgcatttttctactaattatttactcccggaaataattgattaaagtagaaattgtaacataaaacattatttattgtacttgttatttgcaacaagaaataaatagaataaaaacatgaagcatgcataccaattaaaattatacaaaagttagttaattcaacgtgaatttataaaaaaaactttaaag

SEQ ID NO: 92678 - DNA, 429 bp, Zea Mays
gtcggggtggccgttcaggggcgctcaggtgagctcgccgtcgtagctgtctggtcgccaccgttgttggctcccatgtggagaagacatggcaatgaccatagatttctttctgaatggcccagatctaaacataatgataccggttcgggaagagttgtattggtcgtcgattccctggttgggcggtcacgatgagataggatagagaagcgtttgtagccgtgcgatcttgatccaatggccctgtgcgtaccgcttcatcaagtgaatagatctaatctgtgccgctaggcgtggatccaacggtccagaatggcgcgtaccccttcgcctcgagatttattcaaatgagaccccgtattatttactaattgacccgccgtccaacctagtggtaatgtaattatagaagggccctggatttta

SEQ ID NO: 92679 - DNA, 372 bp, Zea Mays
accactatcccattcctgaatcctaaactacaaactgatccaccacactaatcggtttgccctagctagctgcctttgcattaactcctgcttcacaatcttcgctagatcaaaaaccctttgagcctcttatccttgaccaccttacaatcagccctctattgtgcaacattttttctgagatcaatcatggctccactcgggtttcagtgggcaaaccctgattttatcccctctagcggataccctttttcgtaaaactatgataccttttgcatatgacctccgattgagatgcatttttttcaaattgtgtaaaattaaaattttacatatgaatttgtgtcgcttcgctgcatcctatcaaagttt

SEQ ID NO: 92680 - DNA, 460 bp, Zea Mays
ccagggtctgttcctcccaaactaaggtagacacatcgtctaaattatcagagccgtcagatcgtttatccgtaatgagatcctaccgtccagctgttgcttattgttacgtcttatctgcctgctccaactcttcgactacttttttagtcgtatactcgagtcctctggaaagctctgtcgtgagagaaaaagtgaggagaggtcacgtgaaggcgacacctcccaggctgcagacgcgacactcaacctcagcgtcgtcgtcgcttctttcttcctcaagcgtttcctattcagacttcctccttctggaggtaacactcatttcttttcccctctctctctctctcttatcccatctcccgttctctttcccatctgtgccctgcactgccagttcccccttgccttgcttgctccgtccgaccgtcggcgtgctacttgcttccaccgttcgccc

SEQ ID NO: 92681 - DNA, 825 bp, Zea Mays
gcaatcaggggtcttcacgtaggtgttctatacaaccactacataagagacccacccaaaaacttacaagatctatatcaactgttctaaaagtgtgccatgtccgaagagccacaccaaagaaaaatcgagtcacaacgaaagcccaaggacactctgcagtccagcaatacatgggtcaggcccccataatcgaactcaggctggcaaaaccataaccagtcctaggtgcacaacatcgccaatcagcagcagactagagacacaactcgtcatcacgaataccctgcgcagcagggcctcagcggaaacactagaggcaggggtagaggccgaagcccatagcagcgaaggttctattgccttttccatggcaaagactcggcacatcccaccagggactgccctaaaaccaaagccataaaggatagaatggccagaaaccaactggctgacaaccaaagagctatcgcccacacctaccatccccaacaatataactagcaccaattccacaatgagcattaccatccccactagcaaaaccacaacatataccagcaacaccaagaaatcccagctctaccgcctccgccaccaccacatcacgaaaatcaatggcctccaccaccagcactgaaacaagaggactttgtcgatcaaccctattgaggggtcgttcatatgatcgtcggaggatccaactccgagttcgacataaaacggtagaagaaagaatggtatcgaagggtcaatcatgtagccctcaccgggccagttgttcaaacaaagtagtcccatataccacttacctctcgatgcaag

SEQ ID NO: 92682 - DNA, 669 bp, Zea Mays
aacgtgcgcaacaggcgcaattgtggctcgctgatcatggcggtcgaaccgtgcctgcagggcatgcaaaaaattcgcgactcagtgatggcggtccgactcaacgggagtggtccgactaagtgagagtacaacatagcaatcacataacgcagctaagttcgtacgacacaaataacgtgtcgtgttgccagggcgcaaccaatgctcgccaatgccataactcaaccgattaacaacaaagtctgatcgacatgtttgagtacccactatatagtttaatcgctcgatatgagtccaaaagctcaacataatataaatatttagagcgatttaaatatacacaatatagagtttacatgcattttaatattttctgctaaatatctaccacgataaataaaagcagaaaaataaacaccaaaattaatgcatgagcataacacatcaggtgtaaaaggcaacttccttgtatgtaagcatgcattttttagtaattatttactacaggaaataattaattaagatacatactgcagcagaaagcatgccttattctatttattatttgcatccataaaatattatagaaaaatcacatatgtaattatccgcatccgctcatgttgtgcgtgggcgtccctagccgtttctggttggtcaaatgga

SEQ ID NO: 92683 - DNA, 612 bp, Zea Mays
gttgttttacccttttgtaccttcacatagagacgctctcttcattgtgctttgtacttagtcttagctgcttaagacctatactcaagataatatatggaaatattttgcacaagagagagttctacaactagtgatccttttctaagtcattatcagcatatatcaaatggatcacaaattgcatagatgtatcatgaattctccttttaacttagtgcatatcaagagatattgattgatagaatatgcggaactaagaaacataagtgttcattcaatgatcaaacaaagaacatatgtgatcaaaagaacaacatatgctttagataagctttgaagtaggagaatccagtaaatatgctactttagcaatgaaagcaacaatccttgataagaacgacattattttaacaagttggattgatatgtagtagcatacatcatgagaaacttattctcatgcaagagactatatgggattactaggataaagcgatagtctcgatatgatcaagatatagaaataggctcctcctagagatatgcatcaaagaattgaaatgaaaagaatagatgcattcaactttagagacgaatagggagaagcat

SEQ ID NO: 92684 - DNA, 313 bp, Zea Mays
gctttttcaggcaaaatctgttctatagcttcttcctccgctgccttttctccaatttctgagggtttctccttggcaggctctgaaggctcagcttcggtgctagcctggctcattgtagctttggcttcggtcagttttgtttcagtttcaattggcacttttgaagccttggcaatttccctggagtagagcttgaagcctttaccatctccagcacatctagtacactagccatcctttttctcttgggggtcgccgcaagacctttttgtgcctttggcattgtcacttctatcgaagggcttaaaac

SEQ ID NO: 92685 - DNA, 493 bp, Zea Mays
aagaaggggaaaataattaaatgtgaacatcaccttcgttggagtggagattctgtgatgcaacagagagacaaacaggtaacaccccgagatctgaacatcacataaacatgattttcgtaaactgtattgtgcgaaacatacaaagaactagtcccggaacaagtactaatgtgtatgagagtaccttggttgcactgcaaattggaaccgaagacgaagacagcgagttgataagggcaaactgcaggcaacattggacatacaattagctactgcaaccatcgataccctatttcgtccaatgaattaactgcagattaggcggacgtgtactcaattaaagggtacgacgaaccctagctacactaccggatgggggaggcgagggtttggatcgagtcgagcaccaccgtacctgtgcagatgacgacgcaaagggtggagcagaggaagcttcacgacggacccacggcgccggtttaggtgcggc

SEQ ID NO: 92686 - DNA, 441 bp, Zea Mays
aaaagctcctcgtgagcattcaccgtgatagggatagataattttttctactcacgaggatagggatatggagtcatcccctgacagggaattctccattgatatccacacctacaaagatagtatttggttctaaagcgatgtataactttgtggttaggaaagtctagaacagagtggctccaaaacgataataatttcttgatacgttgaatcctaccattcaccaaaaactatcgagcctcttcgctcgtgagcgttcctgtttgaagccccttccttaggatcattacaagcaaggagacaatctaactgtcaacgatgagctcctgcccggccccagccagatccatcgatgtccctcctccatgcacccctacatgtttgcctcccactttctccttcccttctcttccctcctttcttcgatatgaccatggc

SEQ ID NO: 92687 - DNA, 518 bp, Zea Mays
tgttgtctgcataacttttctgtcgactctgagcttctagtaacctcttgcggatcagggcaactttctctttggcttctttaacaaagtcgggtccttctagtgtcctttcccctacattcgaccacattaggggggtctggcactttcttccatacaatgattcaaatggtgacattttgatactggcccgatggctgttgttgtatgagaattcggcgtacgccaaactggactcccaattcctgtcgaacgttaacacacaggctcttagtaaatcttcgaggaccttgttgactctttccgtttgaccatgactgggggtgataagcggtgctgaaatctaacttggtgcccatagcttgctgaaggcctttccaaaattttgaggtgaactgcgtccctctatctgacactatcttccgaggaataccatggagcctgactatctctttaagatatatccgggcaagggtggctcctccaaaagtggtttttactggtatgaagtgggccac

SEQ ID NO: 92688 - DNA, 481 bp, Zea Mays
agatctggtcctttgccgaattctaacgggggaaggacgacacaaattgtcgtcactatgggaagggccattcatggtagcagaagtcactcggccaggatcatatcaacttactcaaatggatggcacggaaatagggaattcatggaatatagagcatctcaggaaattttacccctagctagatttcaaaagctatcggggcagcattgtattctgtaattggaaaagtacatcatcaataaaaagacttcattctcaaaggcactcgaactatttattatcgatctgcatgcttacttgacttagggtgaccactataccctactaacggagcaatcgacttaagtcggcagtgacttaagacggtgcaacatgctcacgcttacttaacttagggtgaccactataccctactaacggagcaatcggcttaagtcggcagtgacttaagacggtgcaacatgctcacgcttactta

SEQ ID NO: 92689 - DNA, 329 bp, Zea Mays
aaagaaccgatgccaagggagtcggtgtttagtaccagcaatgcaccatggggtgtaccacatgatgcctttgtgagttggcaacatcaactgtagctcgatggttcgctttgagatgcgacaaaacacacgaattatataggttcgggctgcttgatgcgtaataccctacatcctgtttgcggtgggtagtattgctttgatatctagaggttacaatgagggctagagtttggatgtttgatgagagagcggggggcatgtataagattagatcctctctagatctaccttgggagggatccctagctcgccttatataatccggc

SEQ ID NO: 92690 - DNA, 439 bp, Zea Mays
cttgactcaaaagcagaagaagaccctccagcaagcctcggctcttcgactgcctcagcgcgcttggggcgatgtgtcaaaactttaacctttttcggcttcggcataaatagaaattgccgaagcagcagctcttcttttctttccttgctttcgcgaaggatagcagtaatctgggtatacgaaaccaatgacatcaaaaaccctattcaaccttttcttgcctcgaccttcaaaggccgctgtcatagcatcatcttcggcccttgagtaggcaccaagcaattcattgatggtcacttcaatggcatctagccagttgtcgtttggctcatcaaattggctcctatatttgaatgtatacttcaaataaattaagccaccttggctagacccagcagcagcctccttcggcatctcccacccacttccgagtggc

SEQ ID NO: 92691 - DNA, 449 bp, Zea Mays
atttagttaggcaacccatttatttccactttcctctttatctgagaagctgtgtttggttattttgggagtcggtgaagatgatcaattgttcagtttcattaagatttacatatatcttttcttatgctgaaagactacagagtcagatctgatgtgtgtgtgctttctccagatgtctgaaaacagacgcagaggtggaaggtgtgctcaacaagagcatcagacacaccaggaggaggcagctcagtagcagtatccaccgccaccgccgatgaccattgagcagatcttcctgatgcaaacccaagtagtccaagcaattggccagactttagcagcaatgcagcagcaacaacccccacctcaaccttagatgcaagtttagatgccacagatgcctagggacaagcaggcagaattcatgaggggcaattcccctatctttg

SEQ ID NO: 92692 - DNA, 271 bp, Zea Mays
atttctcaggatgggatatcagttgatcctgagaaggtacaagaagtgatggattggaaacctcctaccacagtacgacagatccgtagttttctgggactggcagggtattatcgacgatttattccggatttctccagaattgccaagccaatgactgaactgttgaagaagagagtcaagtatgaatggagccagaagtgtgaggatgcctttcatgcactaaggtagcatttaacaacagcaccagtgctagctcaacctgacaaca

SEQ ID NO: 92693 - DNA, 529 bp, Zea Mays
tatcatgcccaccctgcaggagacgcaaagtgaaacactggttgagcgaggtgtgaagagcgccacgtggttcgatcggatcaagtgctagagctcggacgcgatcactccacacgagagcgtgacttgcgagtcgtcaccagcaagaggaataattgatagcaaccttgggcttgcgcctcaacatgcatggagtgtggctgccaaaccaccgagcctcccgagagttgtcattgtgtcaacatttatcatctcgtttgtttccatctcccaacactagagcttgttttatttttgtttatatttgaactgacatagactgtggaggctctccatgttttggccgaactagtagataaaagaccaaaactcgaccaaaaatcaattttgaactaaatgttagattatacgtacagtacttcatttaaacaattagttcacacagacaggacaggagtgagcaggcacatacctttcgtctacgtctgtgaggctgcgacgagacacgcgtacgtcaaacttatttcaa

SEQ ID NO: 92694 - DNA, 1164 bp, Zea Mays
cttacggagttgaggcagtcctccacaccaacctatagtatgccaccccatgaataaggttgtatgcgaacgaagaaaatgagtcaaacctcgaagacgcattggaccaacttgatgaagcctgcgatgtagcgcttctacggtcgtcaaggtaccaacagatattgagaaggtaccataaccgccacatacggaggaggactctataagtgggggaccttgtgctctagcaagtccaaactaacaagaacatatacaagttgtcctcactatgggaggggaagtttataatcagagaggtactccagccaggcacctacaagttgaagacaagaaaggaaggatgctcgccaatgcatggaacatcaagcagctatcacgattctacccctagcgaagcctcaacatctcaggccattgctgccccaccatgggatgaccgacctagggattaggggcaacaggggctagaaagggaaggcactacacgggtagccactcaaaattttctacgtcctttatgtcctcctaacaagcatgatcacactaatatctctactcttttgtttactcgaataacgtaggtcctcgaaaaaaccaaaggaaacacagaccgaccaagccaccctacggaacacccctgcctaaggaactaagcgaatgtcgagggctcccttctcggtaagatcccaaactcgttgaattcctttgtcagggaccaaaaaactcacagcgagcctgtcgtgaactttggagttcgaaggtcagtccgtggaaggttcacgaccgctccagcaaaaaacagagcgagggacagcgggtgatgggcacactggtagcccagaccctgatgtgagaaatgtcgagggtgtcattagctcgtgttcgagttctgagaaggtctaacccatggtttatcacggagagaggcagcgagccattggatctagtcaaacggagtcgacgactagatgagtctgtgcctgagagtatgaggacggtccccagcggaccccacgcttggatcctgcgaaaggaactagggcttcacttggattacctcgattgtaactcaccaagcgccattgctagcccatcgaggaaagtgtggtacaactcacctcccctcatttccacaaaggggatgtgtaggggagagttaga

SEQ ID NO: 92695 - DNA, 533 bp, Zea Mays
cttacaacaagaccaagctttcttttcgttccaaagaatgtgtttttcttggctatagctccttgcataaagggtataaatgtcttgatcgtgaatctggtagggtgtatgtctctagagatgttatctttgatgagcatgtctttcctttccatcgtgattccaaccagtctagttccactaattctcattcatgtgatatgcatttggataacaacagtgttattttgagtaatgatcctctgcgcgctcctttgcctgctaatcctttgcatgtagacaatacagagccattatcctttggattcccaccgtcctctactgagcagctgcatgcaaccttgattggcggccctgattcagttctagcattgcccacatcttccacgtgccagcaggaggagatcccatatgcatcttctttgcctccaacaaccagtgaactcccagttgttcctcctacagtggacacttctgtacatgcacctgttccaactgcttctcctacactggaccgtgtatatatacctgcg

SEQ ID NO: 92696 - DNA, 409 bp, Zea Mays
tccttcatcatctgtgtaaataaaaatcgtaatgcatgagcttcctcaatgctgcctactttatatattggataataaatatgggaaagctgtgacttgggatatcctgattcctctatatcttgtaagcgttttaaaaaccgctaggtctctggccacttagcacttgatcctcaactgaccaggctggaggggtggtgttgagcaccagtgtgccacctgggcaggcttggctgctgccattttagattggtttagaatcctctaatgatacaatatggaattgtggtctccatgtctaccttttgaaaaaaaaccccagaatgtccttttatgacacagtgggggggatcttccaacagttttcagaaccctcagtcctggaattgttgagggaattttagctcag

SEQ ID NO: 92697 - DNA, 393 bp, Zea Mays
aagagagagacaaattccatcttgactgaccatgcctcacaacatgcttcttaacaaacctaaaactacctttataactacttagtttcagagtagcgtttgatagttcctaagtatgtcaattcacatcctgagaacatgtgacaatctcaggtctaaggacacattgtacatattgtaaaaagagaactatattactatatctcaagttgggtcggtccagcttcatgtcatacatgcgcccacattattagtttgacaccatgtccataacttgtaaaatgtagtcatcaactaatacatgtgttggtcatcgactctgaccagggacaccatttataataatcatacaagtaaagattctcacaaacaattcacataattgctaattaa

SEQ ID NO: 92698 - DNA, 325 bp, Zea Mays
gttttgtggaatctgtgttgcttataggtactctcaataaggtatcctcattggaacccaacattataaatgacatcattgagcatagacatatgtccaagctgaaactgaacgcatgagcccacaagacaaatatttctgctatctaaaaggtaaactcctggggcctttccgtgtgaagggaatccatgttttatgcacattagcttttcacttgatgaattctcacttatcttcaattatttgttactaggcttcaactactcaaaaagtgaagatgaccttaaacagtttcatttcgccttattacccgaatacttgctgc

SEQ ID NO: 92699 - DNA, 964 bp, Zea Mays
aatttggttaaatatttctcaagttatgaatttcctaagttctctgttcattaaaaaggatatacagaaatggttaaatggaaaactaacttgcatcggggtccctagcgaaagtttctaagtttccttgcagactagtcctcgggttactattcacatgagtctttgactacgcagaaaaccccctggggtgactctaaattaaacccacggtccttcccctaataaaacagtaaccgcggtggaggaaagggcggaggggcttaccgacggcgagatcgctccggcgaagaggccgagggtgtaggggaggtcgtgacggtcatgccgatgtgcggattgtctctggggatggtcggagtaggtaggtccacgtgcacaggcgggggagctcgtcggcagcgatggctctagcctaaccagggcggtagagttcaattgaataggtcagtgagctccactaggtgctagggaaggcatgggcgcgaggaattgaagaatggctcaccggataactcggtctacgcgcggaatggctcatcggataagtccggcgatgatgatcttgctgttccagtgagacagggcttcgattctcgcttggagaagcttcacggctcttcagggaagctgtccaagggttggttgaggctgagggtctctggaaatggctggccacggtggtaggcgctcaggtggctcgggcgggtggcgcagagctcaccggagataagggtggtgtctggctagcgagggtgagtgcggagtgaggtgaggcacgtctatgggtggtcttaaaggcgtgggtgagcacgatcaaggggtggctctaacacgctctcggggtgtgcacgggcgagcgccagtgcgcgctctggcgcctaggcacgacgtcgagcacaaggcagcgcagagagaggtcatgttctagcgcagattggatccaaatctttgtgattatggc

SEQ ID NO: 92700 - DNA, 922 bp, Zea Mays
tcagaagcatccattccattattatttatattatatatggcatcagtttatatccacatagaaatttgaattaaagagatgtagcaaggtacctaagcccagcaggggtgacacagaatcagtgcaatagagttcagggtcttttgtcaactctggtgaaacagaacatgtgtatcagaatgtaagaaaaaagaccatcttctgcaccaaaccaatcagctcttggctcaaatatagtgaaaaaaacactccactaaagctaaataaactaaagaactgcatccataaatgtttcattcaaataagaaatacttgaaacatctcatcttcatgcccacgaaacaagaaacatcagtttcagggatacaaaacataaatgcactcaccgcatacaaaatttcaagtgacatagtgaatcttatgtaccaagacataacaagttacacatttggaggggggcttgtgctttaggaataagaaacaaaaagaaccatgagtctgaatatgtggctattacttcaggcatatgtaaacctcaaatagaaaataggacacaatatttttcataatcttgacgaaccaaaccagaatcatttaattcaaaatcacggcatagaagattttgagtttttttatcacaccaaataaaaatcacggcaacgagaaaaaagatgaacaactattagtaggttatggtgctgttctaaaaaagattaagaacgtacctaaaagaagctttagaaaaactgagtgagatatcaacttaccacgttttgcctcatagggttgctccttcatatcttctgctcttaaatactctaactcattgacattgcaactggtcagtctcacaatttcggccataggatcttgctgtcaaaatatagcatggcctaagaacagatcttagcttagatttcca

SEQ ID NO: 92701 - DNA, 411 bp, Zea Mays
tctcgacggagcccaatcaattccaccaattcgccgctcgtcatggtcgggatcggctgtagtgaattgtgaggtacgtgaccgttcgttgcattcgccagacgtagggcatcatgtagcgcccttcgaattagtgtgttgcgtgtggtaccgaggatttgagggagccgaccatggcaccaccgcaccgggaggctgtgtcaccggtgagtctagcggatgggggaagacaactttcgtgccatcggatccggaacggacgggcacgattagaagtagagtaccgtttcgttctgggaaatcttagccgtcggatcggacgcgggcggtcaagattagatcacgacacactagttcgcggattaacctgatgtcgtccgatttccgtcgaatgtctgagattggtggctg

SEQ ID NO: 92702 - DNA, 415 bp, Zea Mays
caaagaacaatgtccattctagtgtctcttacattgaccatttaaaaatgtttttacaataagtgctagttttctttcaggattttctccgcaacttcatttagcaatttattgacgactttgtcaacaatagattcagccatattaatgatctccagtgattccttcgtttctggatcggccaggggatcgaacggttccggtggcggagataattcagctgaagtgggaaaaattaattagtctgaatccataaaaacaaatgtcgaagctgaacatcaaaagatattacctatacgtttttcgcgctctacatcttcttcagcttgtctcgcttctatctgggcgtcatgggtgtctttttcacttttctttataatttcatgagccatctctcggccaccattcatccaga

SEQ ID NO: 92703 - DNA, 472 bp, Zea Mays
ctggtactacactacagggccttcggagcatcgatctgttagatgcatttaagcctgatgaatcagtggatcatatatatatatatacacacattaagcacgcacttgagctcaagaactagctaggtgggagagcgtctcgatcgactccgttcccttgtcagcactccggtttttctgagagtacaacgagcgctgtgcgcaaaagaacgacgaggacacgccgtttcttatgacacgtgctgtggtacagtggtagtgtggcgcatgtacgtgtcttccactctacgtgcaggaaaagaagaagggccatggacctacgaggcagagcctagctagctagtacgtggaaagcctcccgcaagaggtagtacagtgcagagaaaagagcgcgcagtttgtcggttgggttgaacccacgtttggccaggcggacggtcggtacgtccctccctctaggccggatgttact

SEQ ID NO: 92704 - DNA, 293 bp, Zea Mays
gtctctctcaaccctcttagttgatcccaatgatcaaacttgagccctcagtttccgaagaataagacacagtatccacaaggtactccacaaatctggagcctcttgctagcctttacaatagaatatcacccatacaagagcaagaaacacaacaacacaacaccaagaactcagatcacaagagcacactctctctagaatcaatatatctacacaaatagagtgcttggatctctccgaataactcaaagatgttgcataagtgtttgagaatgatgcttagatctagt

SEQ ID NO: 92705 - DNA, 547 bp, Zea Mays
gaaggaggacggcagcgagaggagattggcacgggcgaggccaatggaggaggcgcggcgctgcgcggatctgcgggagaagttgacagttctgttgaggacaaggtgattgcagcaggtaatcgctcgctgctgttgtttgcctcatttgcgtcctgcgttttgggatgtcacaaaatcgaaagtggggttaagttcagaggatgttacataaatcgatttgcatagattgagtgtggcatcttgcgcttttttgttgttttcccgtactgcatttttgcgatacttttgaaaagggaaacgccgcaaaaggttgcatttccctcctgttcgccggttgaagagggaggggcgcaaaagtcacatgggcatagtgagatggtggtactcgtgtgggcgcctggaataaaagcctgcgtggctcttgggtcgcattagctcaaaggcaaagcgtggctactttctcgttttccttggagttggggcgatacttttgtgataacgatgtagtacagcagttggagtatgttgtatttgtagcttcggg

SEQ ID NO: 92706 - DNA, 476 bp, Zea Mays
cgatgacaaaattcgcatggccttgaccgtccggagaccgatgctcgcttactccgtagtacaaatccacaaatgccccggcgcttcaccctctccacgcccagctcgtaaaaaaaatagtgcaaaacgagcaatcaccatacatcctctatttcagaaatttatggctaacaattagaccacatatactttaatgtttggaaataaacaataattatatttgcagcctaggcaccgctcccacgctccccgcctcgtgggggcacattactagttatgatcaataaaagggaaggcaactgttagtacaaatgctgcataatgaatcaatgatgggcatccactaccgacgggtgtggtgggagccaacagtgggccatggaggcggtgggtgcgccagggtatagagagttagcaggcggcggttagcatctaatatgcgagagaaacaaacaagaagcccagcccaccaaccc

SEQ ID NO: 92707 - DNA, 574 bp, Zea Mays
cgacgattataagagagcactcaagttactatatgctctgctctaggggtttgggaggtgaaggtctcgacaatcatatagtcatcgaactatgagaccctcgcagtggataagcatttcagcaagctcaagtctattgaaattgaccacaagactcacgccaagattaagaaccctagtgctcccaccatgacccttgtcttagaatgtggtccttccttagctaactcttcgcatgctttgttccctttgtcctctttgctatctattttagaggagtgggttgagtgccttgaggatgaagagttagcgcttgtggccaatcggttagcgcggctcgacaacaatctcatgaaccgatgacgtggcgtgggaagggtgtctgcttaaattgtgagacactgaccactttatcgccatgtgccccaagatgaagggtgccagtttgagaagttttggacttgtcattatccattttgtgatcgatttgtttcattggactggtgtatgccttaggaacattgttcaacacatgcagtcgctagttggttgagaacatccagccactagttga

SEQ ID NO: 92708 - DNA, 829 bp, Zea Mays
ccgcagtcaaggttctggcacatcgatagccgttttccaagcactcttattcagacacagatctctaggtatatctcattctttcacatctctttttattgcttcccctcatgtcaacttcggtgttcctctgcctcaactcacattattatcttgacttagaactccacaatggtagcaataaccatattgaggattaaattgtgtgcttctcacttcagggttcttacttgttcctgaaacaagtacctcgtgagcatctacctcattcatgaagccaaattctaaagggattacaccacatgatgacggattatattcagactgcaggctgacacaattgtgttcaggacccgatgcagctcttttggtatgcttagcataaaccataaaatggaccttgctttgttacaattttttttactggtttgcgaaatcaaatatatctgtaattgcaatgactttgtgtctcattttgtactatgttacccttcacatttgatttataataggtcttccttttttatatttctatatctaccggtaatatctgaatgctttatacatactattaatacatgaaatcttatctttcttgtaagtaatgttgcgttttgtttaaaaagtgacatcttacattgaagaaaattagtgtacaatcagttgtggcaataagcaatgcatgttgtcctcattgttgtattatgcgaactgcgaagactgaaattgtgtttatttttcagagagatggttatggttctcactttattcctacagaagaggatacatcgcatgagaagtctgtgcctggtcctcaatttattcatga

SEQ ID NO: 92709 - DNA, 785 bp, Zea Mays
gctcccaacaggtgaggtccagggttcattaggtgattggaccaaaagagctccagcacacctttttggcgactctgctggggactaagagaacagatctattaaatcaaccacgatggttggttacaagaatcgctctaaggtctccaatgataacatcttgaagctagctcttgagagcatgtcgactgatgaacaacaatgatttcaagactacatgaacaaggtgtaggaagaggcgaaggagaagtacctagtaaggggagatctagatggcatctctcgtaccttcgtcacaaaactccagtgtgagtaaatccaatgacatcacgtcccttaaacaatacgtagatttacagtggaatcaattacgacaatgcatagggggaatagaggagaaacttaagaaattcacgcagaccatagaaaatctgttgtttctagtttctcatcacatgaagtcatgattgagcctaccatgcaaaaagcatcggttacgaatgggtcctcgcaaactcacccattatatggtatgtcgtcgaacacattcacaacaccaccatagtcatcgccgctcgcacctagcacacgaccgactctaggcatgaccggactatgcgggccttatctcggaccatccggtatccttcgccgaaccattcagtcccacaccaatctatgcgcaaaccacccaggcggcgccgtatacagccggatagtctggctataaccatggactgttcgacccaaccacatatcgtctggcgacacatgacagaatgcct

SEQ ID NO: 92710 - DNA, 298 bp, Zea Mays
gctttccgttgattgcgtaggctgatgaaaggtttgatggcgcactggacatgcatgtagaggtctggtgcacccgaggtaggtgcaaatttttggaatctcacctaacgactaattggggctttcgggctataaataccctcttagctggtcaagtcaaattacaagagctatgctttcattcccaaacactagtacaacacatcctagtcattccaagagatccgagcgtcacatttgagtagagatagtctttctagagaaaagaagaaggtagtgtgcctgtgtgatctgcatt

SEQ ID NO: 92711 - DNA, 1546 bp, Zea Mays
gccatctatagctccgactcttggacatgtctcgtcgtacggccagggaccagtcgtaccctgtcggttagctgcagcaccaaattcatgcgactgacactgctctgcttaggtgcttatacatacataattaattgcttcagaggacagtagcttaccttcatgtacaaggctcgagcctttacgacgtttatggctgagaaccctacccgacagagagagagagagagagatgcccaaacaccgcttcccggcaagagttgctcgcggaattaatggtttcgcttgcgcgtcaaatgactttatgagagacccatgcccacctgtcgatgtaggagcacagcagaagttgatgcatggccgtgtaatttcagaggcggacataactgaaaacagcgacgcttccgtcgttcacattaatcgagatcgttaaggcctgatatagcaatttcatatacgcattcccactgacaatattggattggatggaattgtcgaatcactgtactactactactactatagtactatttgagaacagcatgagcctcctcctatgttcttcatccaagacttcgagaaatcctttcctttccttggttaactgaggcttttaaaactactagtacgggtaaaattgcttcctcttttatctgacgcctttcagctgctccggtttttcatattgagagatgtaagatgttcactttttggtcattcagaaagcttatgcatattttcaggtggtgtctgtcttgcacagatatttatcagtattcatctttctttattgatgccgacctcctacccatagccctgtccagagtcctgacccatatactaatcttgcgagagatattaccattacgactttataataatatttacagcacttggatatttcaggtgcctggattttccggtaatttttaggcaacactttcatacaacaaactggtacagataaattattacttcatgatttattatctgtcttcgtatatccttgtctgactatagaaataattgtagattgttaattatcttcgtaccgacgtaaataaaattttgccgggtttatggtcttgcctaacggatactattactacaagatataattattcaaaatgcagggagctgctcagctgcctatctagaagcaatgacacacataacttgttttacgtttcgaccaaagttaacaaaatctagatccctgcctttatttgtaaaaacagaattatgtctgcgaatttaaacagaataaggaacacagcaaacagaatgttacacttactgctgcttctagctcttgccgcgcacgtgtaattcaagagtttacacaaatgaaaactccatatccaattactctaccactaaggtgtcttggatcaactgaacgaaaacaaccaccaaagtttcaccgtttgcacttaattttcttgcattgtcttccttgcgcgaggtttctttttgggcaaatttcagtcgagcggagcggagtgttccttgttatttcggcaggatgtaaaacttctgtgctttg

SEQ ID NO: 92712 - DNA, 294 bp, Zea Mays
taacgggggaaggacggcacaagctatcaccactatgggaagggccattcattgtatcagaagtcactcggccaggatcataccggcttactcaaatggatggcacgaaagtggggaactcatggaacatagagcatctcagaaagttctatcccttgcgaggcctcaaaaattctcgaagaaacattgtactatgtaatcggaggacttcatcatcaataaagttttcgttttcaaaggcattcagactcttgactttcagctgacttcgatttgattggacttgaaatcagc

SEQ ID NO: 92713 - DNA, 915 bp, Zea Mays
atcataataaaaattgaggtacgcacattgcccagcgaataggtatccatcgttctcatcatcatcctcatcctcttcgaatatgacaccctcatcatcatcacctaaatcgtgaaaatatgagccacgtaaaaggcaagggcatctagggcgggggaaaaatgtaatgtgaacaaagatttttaacaagtaccattggaaatgaactttggcttcgtatgtgtatggtccactccttgttcaaccatgcctgcactcacacgtttagtcggactacatgctatcgtcatcgtgcaatattcatttaaaattggttgtaattaccattggtgtggatctctgcagttggatggggctgtgtccaatcgtctccttccatagcatcacaaatagtatcctcggtcattgtagccacattccttccaatgtcgtcttcaaattgttggtttcgatggcctaaggtagctggtcttgtcccagatagcacatgatgtctacgtcttagtggctcagtagacatatcgagtgaaccaacatccttagtctgtgttgaagttggcaggaaaggtgtcacgatgaattcagggataacccagtcgcaagtggtaactgaggatccatatggttcaattccatatgttgtaggacgtacaacctcaggggtatatactgggtcctccatggtgatggactcctgattcaaagtgtcaccctgtagtgctctacgttttctgttgcactctttgttagcatctttccgtcttggtgtcttattatacaacctaaggcgtacacgtctagactccctctcgacgggggtcatgtttttgtaccgctcaactaaaagtaggcggcccttttcatagtatgcttaggtatgttatcaaacagtttcatgcacacaacctggaataa

SEQ ID NO: 92714 - DNA, 900 bp, Zea Mays
cgagcacatcagcacaaacatccattgcaccaccatctggcggttctgacaacagatcttctggaaccatgtcttcaagagtttgatcaaagttcgccagagataattcttgtagaccaatgagggcagacaaggcaggagaaggaacaccactactttccccactagctatgtaacgccgggctgttcttccgaatcagagggatttcgtcctcttcttcatcatcctcatcaacaacacggacagcacacccattggggtcagcgtcagacgggtcacacccattgggttcagcttcagtaaattcaggcactggcacttcctcagcaacagtagcagaaggaccggcaccctgatccaagctagacacccaacgaagacgtctcttcttccttttctccccctcagcagaaaaagaggcttgatcggctcggcgagaacgttttggacgaacattgacagacttctgagcgtccaaagccttgtcagcctcaaggatgggcgccaccaccaatgtttcagcaggagcggcatcagaagaatcctcggctagcatatcaagcatggcacttatctctgcatcacttggattcaaaggcacctcaaaatgaacttgcctctcgttgtcaggaatttctccgagcgaggcaaccaaagtactaacttcttcgggagagggtcgcactctaagacccaaaccgctatcacctgcaggaggatttgacacgaaactattaaaagcctgtgaaggaggcaaattccaggccgagtatgcaacaggggcgccgatgttcgataccttgcctctgagtatcatctcaagccgactcactaagtccacagcaggaattcttctgttggttacccaggttgagtcagccaagcctcggtacagataa

SEQ ID NO: 92715 - DNA, 1244 bp, Zea Mays
gctgagattggcgacactgctgacacccatggtgaagagttgccggagacgaggtgagacaaggttttaggaggtctagggtagtcggggtaggctagaaaagttggggttacttggggaatctcgtgacagtgctttggccacgagggagtgaccagagggtttagggcagggaacacgactgtagtagcctccggtctgcacagagagacagaccatgtgattggtagcctggctggctatgtgcaggctcagcgggtgcattgactatagccgtgcacgtgattggtcccctgtgtaggacaagacgagcctgctcacgtgcatgcagcacagttaattttttcatctcccacttgcacgcgtggggatgccgggaggcggcttctctgctggtccaggtcggcgcgagcctagcgctcgtgggcataggaaccaatcacacagagagagggtgagcaggggcagagcagtaagaaaggggagaggagaaacctaggcgggttcctggtgcaccatgctcgggtggagcttaccgtatcaaaagcaacagcatggatgcaatgatcgtggcggtagcactactgtcatgcggagtaggagaaataggcaggagagtgctgcgaatggggagtggggttgtgagcggagtccgatgtatttgatttgaaattcggatgacgcgtggagagtgtgaattgttggggcatgaacgatggttgctagcgtagagcgcgtggcacgcgtagagcaaggcaggtggttggagaagaagtggctgaccagtggggtcgaggggtcaacgagtggaaacagcacaggcacgcgagcattggcgttgacaggtggggtgcaactgtcagtgggtgagggtgagtgaaacgcaggcgacagcggcgacaagcaaggcataagtgttagtgactcgatgcggtgtggggggaggtgggccgagcagaggagtggaccgaaaggccggatgaggtaaaaaagaaagggtttcccttttctttttctatttgaatttagttttcctcttttaattcaaattcatatatgtctcacaatttaaataggcacacaacaatacaatttaataacaaataagaatagatacttgtaacacccctagtgttataagaactgaaactggacatgtcagcatatgcattgcaaggattttgaatgtttaaccttagtatgcatggactagactaaagtgtgtttaaaattaaaatttaaga

SEQ ID NO: 92716 - DNA, 502 bp, Zea Mays
ggaaaatctatacgaagctcttcttctctttcccaggttgcttcatcttcgccatggtgactccactgcactttgcacatctttatcacattatttcttgtaactcgagtcaaagtatccaaaatcttgatcgggtactccgtgtaagtcaaatcactctaaacactgagctcttccattggtaactgttccttagggacacggagacacttcttgagctgagacacgtggaacacattatgcacatccgatagactagcaggtaactcgagttggtatgccatctccccaactcgcctaaagatcaggaatggtccgatatagcgaggggacaatttgccctttcactttaaatctcctcataccccggattggtgataccttcaaatagacatgatcacccaccttaaactccagtagtcttctccgggtatcagcatagctcttctgtcttgattgtgcaattctcaaattctctcttatcattcgcacttgttcttct

SEQ ID NO: 92717 - DNA, 464 bp, Zea Mays
cgcgtcgacggagaggtcaacgtcatattcggaggacatgggtcgcaagagaacaaaaggcaacagaagctcagcgaccgacagatactgatggcaaccaccagtgcccctaccccttatcggtggtcagaacacccaatcacctttacccgggcggatcagtgactcaacttcgatcatccaagcaagtacccgctccttgtcgatctagtgatccgagagagcagggtaaagaaagtattagtggacgggggaagcagcatcaacgtcaccttcccccggacactcttgggcttgggagttgcactcaaagagctccacgagtcggacactcctttctttggcattgtgccgaccgaaggagaatacctgctcggacatgttgttacctttggaactccagaaaactacagaaccgagttcctgaggttcgaggtggcaagcttcgactacgtatacaatgc

SEQ ID NO: 92718 - DNA, 638 bp, Zea Mays
ccttttttccccattcggacaataaatcgcactacgaaactagattttgtaatgctacgaagagcaagcaattatccgctaaaatcgccggttcgtttgcaggtttggggcgtacttactacttactttagccgtgttttcgatgctctgctcgtgctctacgaaaacactttgagatgtgtctggctcacggtctcctaaatgttttctttgatgatcgattcgatcagaaattcttcgggttttttttttgttgaaaagatgatctcaaacggattctcctttccaactgtcatgtcttgttggtgtcgatggtgccgtcgagcaagggtcttgcagcaagactgggtggggttgaactgttcttgcatgcttgcaatgtgagttcaccaattattgcgcttaccatttcacgagcttaaagcgtcaaaccgcatgttagcgcactttccaagtctcatgcaggtgacagcagcagtgaagtaagacaagccaaaagtcatctcagttttccatcttccaagggaaaaaaaaaagactgcagagtttatctagaatacagcgttgctcccattttaatgctcatccaaacctagttttggcgtacaatcaatgaatcaacacgtactcgtccatca

SEQ ID NO: 92719 - DNA, 1965 bp, Zea Mays
agttattgcaaagtttaagcgctgtgataataaaagagaatgaataaactccaatttccacatcatttaaaaaattaatatcaaaatggggtctagtttaaccatgtttcactcttttctagtaaatagaacagcaggggtgttagaagtaatcttgtcacataggcatattagtgttagacatgctataggcctggatggttcttggatcatgagatagctacatgaagacagcagctctgaagtttccagtactaggtagtagctagttgagttagtcaacttgaaggttaccactgcaggaagcaacaagcaaattgctgtggtgaaaaaatagagcaaaataacttttacttctaataactgtaacagctgattgcttagcaagcaagtagagtaatgtgagctgtgtactaccaggtctgttcctgtagcagtactgtaatagtcatccgatcctgaaagtcatacaaaaggggcaggatatggcgcaaggtcatccaaacatgtacagattctacccaaacatatcctacagatcatttctaggataaagatttcctgtcctgcagacaactgatcaatttcagagcacaaggtaccacttcaactcgcatggagagtcacgacagcagcagtgatggagctttcactgaacagttcaaaattttgagaggcacatacagagaacatctgtatcctctctagccatgttcttccttctcttgtctcacttttttccttctaccagaagcttgttcccgatgtatctctgatcctgatctaatccccatgcctgctatgaattccaatcttctaaaggttgtaacctgaacctcagatatgttacacgtgttctgcttatggattaggggttgggaattggggttgctaacacaggaaaacgtcgtgtaggagagagtttgggatatagaaaagagagagcttggttgtgaacatcaagctagtgtatagtgtctagtaagcctgtgtgtatatatataccatagcttggtagtgaagatcaagtgaggtgtgtaagcttgttgtaggaagctataagattagtacagtgcaaacttgtgttactaacttactagctagttgtgtggttgtaagagagaaacaaagttattttgtttccaacaagggcttcccatcaatcaatcccagcttacagctctgactagtaaatttagttattttgcttgtgtaaaacaacaaacagacaatgaatgctacataggtagagtgagatacacaccaatgacttcatctggtacctcgaccactgccgcttttgcgttgtaaggacttccggattgtaagttcctgacaggtctggtgcggacgaaaaccctttcatgattttcgaaaaatgctgctgaagcttctgcattgggctgccactctcatctttggatgaatacactacagatgtccgtgcagactgtgcagtggcagccgaggccgcagcgataaacgctcttgcaacctcttcggttgtttgaatgaggtttgatgtgttgaatttaataccctctgacccatcattcttgtccaccatcctaaatgcctggtaatcatgcaagcacggagattgctatttcagtggtgtgatcgagagagcagatggtagtcattatttgttagtcacacaacaataggaaacatgaagtagtagcacgaaaaacttccaaggtcacgttcatgttccagttatagcatctatccaacaagcaaattgtaagccattctatcaatgtccgctttgggtcacctaattccaatcatataaaactcctgccatccacagaaccttagatgttcacttctactaaaaaaacaccaaaacatggcagctaaaacgggtaacgaacagcatgaaacaaactagtgtctcaatctaatatgcagccataaagccacctaacaaccaactgcatgtactttgctaaactaaaa

SEQ ID NO: 92720 - DNA, 358 bp, Zea Mays
gtactttagatccctggtgtattgtttagcttcggcaatctgctctttcgacagctacttcctcgaagcatgtcgcacgataaattccagctctttagcaggcacttcaggagcagaagacttaacttttttgggcgcactttctttttccaaggtcagaggaatagctcctgaagcatatgcctcaataggagctgatggatcagctttgaccgtatctagtgttatgccagcttcactagatttctgtgttatgccagcttcactagatttctttgggatttcacccttgctatcaggcgctgaagcaggggtttgtacttttgaagattccataatagcgtctagtacgctggcc

SEQ ID NO: 92721 - DNA, 299 bp, Zea Mays
attcgtccttagccatgtgcaaatcacgacaacgcttacaaatcacgacacaaggttcgccggtggtgggttcagtgaacctggtcttcttcagttgactgttcacgtctgaacaccactttggcttgtttgacagaccaagtttggaagcctttttctctacaattcacatgacactagatccaactgcttgttagaagtttgttcaccgatgtaagggcttcagctttgttataatgatcgtagtcattagctcaatggatcaagcacaaaatggctcgaaaattaaggaaatgtca

SEQ ID NO: 92722 - DNA, 1126 bp, Zea Mays
gccctagaacacgccagggagtcacttcgccttgagaatgcaccgtgtagtgcccaccatcgtctggtttctccgctcgacaactccattctgttgaggcgagtaaggagctgtgagttggcgatccactttgatgttggcacattattcttcaaacttgttggacaagaactctcctctgtccgtgcggagggcatgaacccgcttgcctggcttgcgttccaccatcgactagatgcgcttgatggctgcgaaggcaccatccttacagggaagcaacacaatccacttataccttgagtaatcatcaacgagaagcagaaagtatcgatttccacttggagttggtggcaagatggggccacagatgtcaccattgagcaacttaagcacttctggactgagactgggtgcgctcaggaagtggagtttgtctgtgcttgcctgcaagacaagcatcacatgtttgctttacttggttgagtagtggcatccttcagaccagctcctctcgacccatctttagcgcttcaaaattgacatgcccgaaatgggcgtgccacagccaggcaccatatggtgtgtgcgccgccagacacattggacatgcgatgttggtgtcaagcatgtagattttctatggagacgatctctatggagagcgtgctgatgtcaagaagagtttctatggagatgacaagttgtttgtacctaggacgagtgacgcaaagatattttgccacaactttgtcttcgagctccgaatctccaagtatggccagacgctgaacaaggttctccagtcgaagtgtagagtcttcgatctgctcgttctcccgaagcactatctgctcatactcgactcgcagactctgtgccatcgacttcctcacccgtttgtcgccgatgcgcattgtcttgattgccttcatgcctccttggtcgtcaacttcgttccaagggtggggaccatctcgggggaaccattgagcagatcgcctccaacgcagtctgatcattatggaagtcgttgtcgtcgttgaatttgatgatgtcccatagatgatgggcctagagcttcagcttcatcaataatgactagttgtcgtaactggccttcatcaac

SEQ ID NO: 92723 - DNA, 367 bp, Zea Mays
tgtgggtgaggatccgaaaatgtgatgcaaggtggtgaggcctcagggtctcatggtgctcgcggtcgaacagcccagaatccctctggtcggtctcgacctgcggccaatccacaggcatgggagccaactagcaatgatgacggaggcaaggatgatgaagttgacctcccctctgccaacgcacccattatccgggggttggttcttcacagggcggaggctcgtcgatctgcaaatgagcctgtcacagatttcactgccagtggagggtctgcccttctccaggatatccgattccaaaaccctacattgcgtattcgtgatgctaggatcaatggtaatcggttctggacccttcaacatg

SEQ ID NO: 92724 - DNA, 574 bp, Zea Mays
ggagtgggcatataggtctgctccggtgaggtcgcggtcgccgattcgggcggcactgcttcgggtggacgttaggtggaagaaacgtgtgggctgttgatcggccgatgtatggtcgtgattgaaccgcgcgcctattctcatcggccagtgatcggctattggatgaccagattagaccctgagtatagtgctctcatgtgtaatatgtgccctccgatcgggatctggtggttagggttagagcactcttcaataagatccggaccgctgatcttaggcggagggctcgaattagattcgtgttacaattgaatctggaccgtggatcggtgatcgagcagtctcgggcgcgtaccgattcgtttaaagtgatgaagtaatctacgacattgatttctgatcggatggaccttgttccccggtaccccttcgaccgcgacgaaattgtaaaagagcccttacactttccagaaaccaacccgccatcctcgattatagagaatttgttcacctaagcccttggaaattgcagaataacccctggcttcttcagaaattagatttgagctcg

SEQ ID NO: 92725 - DNA, 378 bp, Zea Mays
ttcagctttgggttgtgccttggaagcttcggtaatttttcttgtaggagcaggactcaaggtttttgttgtttctaacacaacatctagcacattcgccatccttctccttttaggagttgcggcagaactcttttgtgccttcgacactgttgcctctgttgaagggctcaaaatctctggcatttttgttatttctccaatttttgacccctcagccttatcagccgtcgcctcaactagcttaactgaaagtaacttcggcattatggccggctctccagtgttctgcgcaggtggaacattttcttttgtttcggtagctgaagaggccccttcgccaaattcaggaatcacggccggttcgatgtaacgcgg

SEQ ID NO: 92726 - DNA, 559 bp, Zea Mays
gaaaggggtgtatgactgatgtcgggtacctttgtcaaatctgaactgagtcacgacctcaatcatcttcataatgaatggagcatgaagacaccccttcaaaggaaagcaggcggcatgaataatttcctgccatatcatgtcaaagacatttatcctttctgagctgctgggtttcataaaagagagcaagacctttctctcctcaagaatgttcatctgattacccccttttggaatgagggtcatcctacagagggagttgatataacgataatacttatgaatgttggtcgactcccaatactttccagactcagaaagatgaagatccttggcttcatctctagtgggctgccggaaatcatgaatcttgatcttgtcgccagatatatcatcgtcagaaaagccaagaatgtgagcaaatcgacgatagctcaccttataccaactaccttcaatgaagaagttcagataggggtagttgtaatgactctcctcgtcagctagctttatccatagggtggagtagaattgagcaatcacttcatcattccaa

SEQ ID NO: 92727 - DNA, 336 bp, Zea Mays
gggatcggaccctcgggaacaaccccgaccctcatggcggaccacccggagatgtagcctaaggggtccgatgctgccacgtgctggccaacatcggaggagacgagatctcccctaaacaccatccggacccccagttaagggcagtccggagctgtcacgaggaagggcggtcccagtcactactccccacacaagatgaggtccggtgctgccacgtgttctacaacgcgtgatgtaagccattggggaaagcctgaaatcagtctctaagtgttaagcgcctctgcattaactgcgaacaagacgtatacctacccacccagtggcaggcgg

SEQ ID NO: 92728 - DNA, 760 bp, Zea Mays
ctacatatggccaggatacatccaataaaaattactatttttttcattagagacgatgaaaattactagttttttagaccggatcctacatgacaacaccggcggcacacgtacagtttccaaatgatggtactgtgagagctgctgttgcccggccggcgtgactgactacacatatgctgcagttgcttgcacacacataagtctcgacttctcatattcaagtgtgaacccggccctgatggtacgttgcccgtgcgtctcgatagttcgtctactagagtagtagtcatgcatgtagcgtgcagtgtgggctagcttagctagctaggttgttaaacctaacctactccacctcctcctccaaacccatcgagcggcccgtcctagctacttggattctaccgggccgcaaccaccccacacagttgccgatcgacctggcgctttcgtcgcctcatcttctttgcctagcccgttatatattctgacgagccgtcagtttcatcgtcctcccgtcgtcatgtgcaaaccaaggcgagactgtgtcctgtccctgtgtgtgagaactacgctatatattctctctcaatgcggaaggccggtgggtggccgggcaaagcaacacactgcagccctggcacaccaatggaggttctggtaggagaggcagatctaacgaacctctttttcttttctcgaaagaaagaacgaaacgaaaggcggagagcaaagcgatcagctactcctggaactgaaa

SEQ ID NO: 92729 - DNA, 986 bp, Zea Mays
tagcaagaattagctgacttgtagcagcacgaatacaaccaacaaccttaaccaagtgcaaaagggcatcacgagcacacccaacaacctccacaaagggcaaataggcaacatgacttcgagagcaacacaggtcaagcctagcacttcgtcacattccataacttcaacttcatagataaaaggtgtccgctctccactagcctgcaatctacccctaccagcacaactatcgatcaagaaattggcccaagtacagtgacaactctaacccctcacaatatattatgagctactaagtggcaatggcatcctctagaggtgaagataatgcaatggcaaagtccttcatcatagctctagagggcccagctctcacctagtacacaagactaccaccattgtccatcgactcatggaggacccttcgtgagaactttttgctcaacttccagggctacaagacagacaccgatgctctcgtagagttccctctaaaggcaataagaaaaggatctatgattactacaacaaatttctgctaatgaagtcatatttgtcgtcagtcaaaaactgcatcgcaatacattatgccatcagtgtcttcgcatcggtcatctctacaaccattgtactatagatccccctagcacactccaagagttgtatcggttctttgagaaatatgcaagaaagttggattcatagagaaagccaaaggtgcattcacaaaacagcagtaggccttggcccaagagccaacaagaccgtcagcagcaacaagcacacaacataagcaaccaacaacaacctggcaaagccccccccccccccgcccacagcaaaaaaaacctagactggcaggggagtaaggggtggcaaaggccacgaccgcagtaggggactcacacatgaccacaagttatattgtgtttgccacgatgaagacgtcagccacttcaccaaggattgtccgatcactaaag

SEQ ID NO: 92730 - DNA, 586 bp, Zea Mays
ggttcaaaagaatgttgaagagctttgtaaagtgaaggaggaatactatgccattgctatgcaatgctctgacaagctaaaaatgcttttactagtgttggcgcattctcggctgagagaaattttatttgcggtgatcctgagggtgtgatcaaatggattgaaggtgaaatcgaagcatttgacgaagttctaactgacaggggggtttttgtgcctgtgtaggcgcttggggggctatgtcgctgcttgaaaaagctagttgtgaacatgcgaaggctgtaattcagccaaaattctcagtgtcagcaaatgacattaaagaaccttcagccgaagctaccgtccttagtgggaaattttattctgaagtgtggatgaacggcgaccgagagatagcaaacgaagctattaggcaaagcgaaaaagaatctcatcttgcctcaaaagaagtgagaaaagctgaggaagccacagagcgcgaaaggcgtataggtacgtatatcatattttagcttcgtatctaacaaaaacttatattttggtgtagctacactttctcctcctccggagccatatgatcctg

SEQ ID NO: 92731 - DNA, 384 bp, Zea Mays
cgtgttatcgctacgattcgtgccctctggtaaggagataatcacggtcgcgtaaagatcttggcaccaaataggctcggacccgatcgatggtgagttcgtcgcacctacttggattgcgatcggccgattggtcctcactggctttgggcgactcgtgaccttgcgccatgtgctcgggcatcttaccacgtcgtagttgctcgcgttaggcatatccggtgatcgccggtgaattgccacggtgaaagccacggtatcacctgcgccagtgctctttcccctctctggccgtcgcgcgtctctaccaaattagccgccaccgccccggatcctataattgagcgtgcctttggctccgccatgtagtcaagcacctaacgc

SEQ ID NO: 92732 - DNA, 738 bp, Zea Mays
cttacacccataaggacgctcaacaacctcccaagttgcattagacataatacaatccatctcactccttattgctttcttccaaaagtcagcatcaggagaggaatatgcctcttcaatggtacttggtgtgtcatccacaagatatacaatgtaatcatcacgaaaggactttgcaatccttggtctcttactctttcgagttgatacattgtcatcttccacaggattatgtatatgggattcctcagtgtgttctaccggaataaaatgctcatggggtatcgttggttcatcattagacatatcatgtgtaactttcatagaaaattcgtcctaaaaaaatgtagcatctctagactccataattgtaccaaccaacatgtccgatactctagagtttattgttaaaaacctatatccaatgtcgtggaaagtatacccaaggaaaatacaatcaacagttttctatcctaatttgtgcttcttattaattgacacattcactttagccaaacaaccccaggtgcgcaaataggagatatttaatttcttcctttcccattcctcgaatgttgtgatttctttgttctttgtggaaactttatttaggacatgacacgtcgtcaagattgcctcaccccaccattccttagatagtcccgaagtctctaacatggtgttaaccaaatcagttagagtacggttctttctttcaacaaccccattggattatgg

SEQ ID NO: 92733 - DNA, 681 bp, Zea Mays
cccaactcttgtcaaaggtcagcacacaagctctcaataaatcctcgaggactttgttgactctttctgtctgtccatctgactaggggtgataggcggtgctgaagtctagcttggtgcccatagcttgctgaagactcatccagaatttcaaggtgaactgtgttccccagtctgacactatctttcatggaataccatggagtctgactatttctttaagatatatctgggcaagggtggctcttctgaaggtagtttttactggaatgaagtgagctaccttggtaagacggtcgattataacctagatagaatcgttccctttttgggtccgaggcagtccgattacgaaatccatgcctatttcttcccatttccatttgggcactgggaggggttgcagtagatctacaggtctctgatgctctgccttagtttgctggcaagtgtcacatcgggccacatactgagctatctcctttttcatccctctccaccagtatctggccttgaggtctagatacatcttggtggtccctgggtggacaaagtaagcagagttgtgggcttcgtcgagcaggattccccgtgcctctccttttggcacgcacaaatggtccctgaaccagagggttccttcttcatctgtcttgaggtccgggagttgttctttgcgag

SEQ ID NO: 92734 - DNA, 499 bp, Zea Mays
cctttcctgttgatctacaatctttatagggtgctcggaataagtcaaatccggttccagatcaacatcagaaatttctaccactttgtcaggcacttgaaggcatttcttaagttgggatacatgaaatacattatgtatggccgaaagatgttcaggtagtttcactttataagccacatctccacaccatgctagtatttcaaaagggccaacatagcgtggtgccaatttccctttaatgccaaaacgatttacccctttcataggtgaaaccttcaaatacacaaaatcgccaacttggaaaaataagggtcgtcttcgcttgtctgcataacgtttgtgacggtgttgtgcaaccttcaaacggtgttgaataagtttcaccttttcttccgcctcttttactaaatcttgcccaaagaaaaaccgttcaccgggccccgaccaattgagtggagttcggcaccgctgtccataaagagcttcaaaaggtgcc

SEQ ID NO: 92735 - DNA, 534 bp, Zea Mays
tgagaagttaccacaacattcatttccattgcacagttgtgctgttaaaaaatttgaccatagccgaagctttttgtattgcgctctcgagcaaaacgcttcatcgtttaaggttagcttcatcaaacggtaaaacaatcgaaatggcgagagtgcgatcaactgctagagtgtctcgtgagggggacgaaaccaaggctgctgaaatagcgtcgatttcagaagtaatgaaacgatcaggtctggttgcgacagaggaggttgctgacgaaggtgcttcaaatgtcgaagctgaacaaactgtggttgagggtgaaaatgttgatgagagtgaaaaagactatagcattcttatcccaacgaagcctagtcatcttgaatttgaaaaatctaccatgacagaagatgacatgcctatgatgatgaaattgggatattttggagaggctgagagcaaacttattcgatttgctggagaagagataatcccagagccgaagaaggatgaagttgtcgttttcaatagcttcttca

SEQ ID NO: 92736 - DNA, 663 bp, Zea Mays
ttggggtgtcacaggtgcaatgattgtatacgtggcctatgcgcggcgctgatggcataatggatagcgatttcgtcttcgatcgacgacaactgagatttgagtgatagaaatttgttatagtagtcacgaagattccttctctggttgctggcataaggatagctccatgagggcatcggtctatggtctgtatccctgaaagttgagtaggaatttctctcgaagggctgcccatgagtcgattgataacgatggcagcctgatgtaccatgtcagagtaggccttcgaggcgattatgaattactctgtcattgcattgtcgtctccttcggacgaggactactgccacctattagcccatgatgaattgcaaagggttagctttactgttgtatttgggccaatttcctgctctataattgcggggccagggtgtcgcctgtagcctggctgacagagggtacctttcgtcggtgaagttgaaggcctggaaggtgtcttggtgtggagtctgtctggtttcttcgaagttgtcctgtccttatctatggtgtgaaaggtgagatggtagttgctgagtctgaagctctggaatttctcgttcgagggccctcgggcgctcctttttctgctggataaggtattggaccttggcctgg

SEQ ID NO: 92737 - DNA, 337 bp, Zea Mays
tcatcaactcttgtccgactaagttttgaaaattgaaaatttcctcttccgaagcatcttcagctatttccttctccttctcacgtactgtagccatggcttcttcagcggctgcggcaacttcttctgtggccatgtccagaagtatcttatcaatgttagaaagtgtgctttctaaatgtacatcttcggccgtggcagcttcgacagctgcagtttcagtaggtacagctttggtagctgttgcgctctcaacagctggagccttcgaagccgaagctgacggtggtgtcccttcaataacttctgtcacagtaataattcttcgtttttttgg

SEQ ID NO: 92738 - DNA, 1172 bp, Zea Mays
gattgttgaatttgaaccacaggtggtcttatgtcatcggcttcaagcagtgtcagaactattagtattttacctttcctgattccatagcaaacagaaaatgcacaagtctatggaatattttcgcaagtgcacccatttcagctgcttatttattcaatcaagcagttttttgctcctctttgtatgacctctcaggctcacaataccttgattccaatgcgctcattcatctatttgataaaaaacctaggactctttaagtgattgaacacctatggctgcagaccttatgtatcctttcaacccagcggttttgaatctcctaccagtcattcagactttttttttctgaactatgaacctttcttgaatggttatcgggtgcgctaccccaattggcttcactcatgataaaaaagtttctcttattactgatgatgacaaagttcatgggattgaaacagtcaaacaaccaagatattacttgtaacacgtacatatgtgcatcagccaatcaagtttctgagagatgattggcataattgcatgtttttttttggtaattgggctggaatgcagtcacacttcaacaggatacttaatcttttgccatctttacgggcggcgcacacacaaatgccagttttaaaggggactcaacaaataattaaatatttaaatatccacacttcatcgtggaaggaaatctgggacagccgttcttgaagaagcaaggtcaacatgctggcatggagtcggaaggggaacagaatgattgtatgaataccgtgggcagtggacttagcccaagtgtctggtgaaaaaacactcagatcattttcctcaaaagatgcgatggccgagattttggctcttgtatgtctgcaaatactatatttgtattaactcgcataaagaggttgcctgattatgtatcttctttggttaataaaattgatgtggcggatggaatttggtactgagtattataatgtaacttccagaagatattcctcctgttagtgctatagaggatgatcttctgatgcaacctgtttgtttgacgataatcttcatctgtagtctgtttactagaggtttggtctgccagaagtatactatataataccattaataatccatgtattttatttacattggctttctgt

SEQ ID NO: 92739 - DNA, 6090 bp, Zea Mays
ttattttgtaacgacaataaaaatactaatccttgtgactttgttagtttggctaccttatttgtactagtgtgcagcgcagctgtttgtgcttaaatactactaatacttctcttactttgctttctttctaaaaaatagaatgctgaagataacgaatacccttctgaagtagcaccttctttggagtttctgattacatcaaaggatattactggatgtggtgcatcctcaactttgctcattttcaataatgagaggggattctctgcaaccaatatcgagtcaatttgtagagtcggaaaatcaacaaagaagggaaacaggcatcggggttacatcggagagaaaggtaaatattcactgttttttttcattcatagtgtttccttcttcaccattaaaaaaaatctcttcatccatggaaaaagaaagttaggacctatttgaggcattttcaggcaaatgatagcagtaaaagatcagaaaatatttttaattttgaatgactggaactatgctcagtactccatatgatgccactccatcatgggaatgtattccgtggaatcgtgaaaaccacctcaaaaactgcatcaagaagttctcaataaatttggcacttggctcattcatattacttgcaatttgtagaaaagttgttatccatagtcgttcttgaataattcatacaaaacttttgaggtccatgtgcattagaacacgaatgagttcacatctcaacttttgagaaatgtcttatatatcaatttactatggacgcgccaaggtttgaatcctatgggaacttctatgaatatttcacgattctaccaatgagatgttttccaccgaataattatacagcacactacttaaaacggtattactggaaacctatgtgttttgtaattacttttctggttgcccatgtccaactaaaacatagctatttaatgcaaattattttgatacacaaatactgcacatgtatgtattttgagatcctagcatgagtattcacaaactgaacatttgggatggattactttgatcaaattggtcaacatagttttatgaattcaagtagttattccatacgctcatatatgtattaatattaaaaaaactactttaaccctgccttagctacagcttgaacagggcagtttatcgttgcataatagtttaggatgattcacagaaaaatatactcaaatttgttcagctgtcaaatctgcatagcattttctgtcaccatctgttttttacccagccccaaccaatttactgcaaagagttacagaatgtactgcatatctgcttactattgctgcctattatcaacttataatattctgtggcttttgattcaggtattgggttcaaaagtgtgttcttgatatcaagccagccccacatattcagcaatggctatcagatcaagttcaatgagaaaccctgtgcagaatgcaatattgggtacattgtacctgaatgggtggaatccacacctagcctttctgacatcgaaacattgtacgggtgctcgaaagtcctgcctacaaccaccatcatcttaccattgaagagcgagaagattgatgcggtgaagacgcagctgtcaagcatgcatcctgaaatgctattgttcctgacaaagatcacgaaactttctgtccgggagaactctgatctcaaccatacaactgttagtgagatctcgataactagtgagaagaactaccaagccaggaagaacatgcatgcggagtcgtacacactccacttatctgctgaagagaccgggaaagaagaagcagaatgcggttactatatgtggaggcagaaattcccagtcaagccagagaacagagtcgataagcgtgctgaaattgacgaatgggtgataactctggccttcccacatggccagcgtctgactcgtgggaagcagctattacctagcatctatgctttcctcccaactgagatggtaacaagcttcccgttcatcattcaggctgacttcctccttgcttcgtcaagggaggctatactgtttgacagtccgtggaacaaggggattctagagtgtgtcccaaaggctttcatggatgcttttgtgacacttgtaaagtctgatgcaccatcaatgtctcggccatctatgttcaactttctacctgtcgactcctcacagatcccactgcttgaaccagttaggtctggcatcaaagacaaggtccttgcagaggatatagttccgtgtgaatcttacgcttcacagaagatattctgcaagcccagtgaagttgcacggctcaagccaacattttggactatccttgccaaagcatgggggctaggagtggatctgaagaatctgtcaacccatggaacttatattcttagctcacattttgacaaaagtatctatgacagtgtgctaaactttctggatgtgaaaaatgtgaaccatgaatggtatgcaaaatgcattgaaggctcaaatcttgtcaaggaggtagatgaacaactttacctggaaattttatattttgttgcagtcaattggcaaaacttttctggtacaaacatgatgtccattcccctgctgaagtatgttgataggggtggtgttctctcgttctggagcatatccagagctagtcagtgtaatgataggttgtgcattgcgtctgaaaacaagtacatatcatggctaatcagctggaatagggagttcctatcttctaaccggttctttctgcctcctagcacacaaacagctctagaaggttgctcggagaagatgaagagctggcttcagaaacatgcaagagttgaggttgtctctatttatagttatggatcagttgttgttaattccttgggttctgatcaaagagctgtcattgccttcgcacactttctttatcactctttcaagaaggatcacatcggggactactacttgtcagaactctgcagcagcatgccagtaattgatagctatggctatgttgtcaaggaaagaaatagcattatagttcctgccaagggaagcaaatgggttggtttgatgggaacaaacccatggagggatcacggctacattgagttgtcagcagaatacaagtcagcaggacattttgctggaaactatacttctgaagaccagctattggaattcctcaagacaaatttgcaggcttcggatgtgccattcatactcccaccagatgccagattctctactgtgtcatcatctctaactgtggacaatgtattcttgctgctggaatggataaagaatttgaggtcacgtggtgtaagattaccagacctgttcttgacttgtgtcaaggaagggaattggctcaagacgtcggctgggtacaagtcgcctaatatatcatttctgtccagctccaattgggggagtcttctgcaaacagcaccttcctgtgttgatataccaatggttgatcaagagtactaccaaaacaggctacatatgtacaaagaggaactcaaggcaattggtgtgagatttgaattccaggaagcttcagcttatatcggaactcgtctcatgtctattgctgctggcaattcgctgacaagagagaatgtgtacacactgcttcggcttattcggtttctacgagagaagtttctatctccgagtgatctgatcgaaagtgtaaaagagggacgatggatgaagagtactcttggctacaggcgtcctgctgattgtatcatctacgattcagattgggaagtggcatcatgtatcagtaaccaaccattccttgatgtatcattctacggtgcagccatcctcgaatataaagtcgagctggaattacttggtgtcattgtggggttcaaagacaattaccaacttgttattgacaacttcaagtttagttcttgtgatattacctctcaagctactgttttaatcctcaagtgcatccgttatgtggcttcatgtgatgattttataaggaagctcaaagatttgaaatggttgaagacaattgtgggatttcatgctcctaacatgtcttttcttgtggatcctgaatgggagtgccttcttaaggtctttaatggagttcctattattgactatggattttatggtagtgtgatcagttcatacaaagaagaattgaggaagactgggttgatcacaaggttcgaagaggcatcaaaagctataacagaaattttcaagcagagggtgttgaattcatcgcttaaaaaagctgatgtcctggctctactaggatcgtatcgtcaactggcaatgcacagtccacttccagttgagctgttcaattctatgcgtactgaaaagtggctgtacacttcactgggattccgatctccatcagatgcaattctatttgatgatgcatgggtatctttgtctccaatagcaaatttaccattcatagatgatggtgactcttgccatggtttaggaatggagatacatggctacaaagatgaactgaagaagttgggtgttactgttgatttaaaagaaggtgctagattcgtcatcacaggcatcagcattcccaatgacccttccaagttgtccaaagctacaatcttgtcactgcttggttgcatcaagagctacttcacctttgcagctggacctcttaagggcttcaaggaaaatatgtgcaagaagaagttgttgaagacatccatgggatatcagtgtcctaatgattgtatcctctttgatccaaagcagtcttctgtctgcatggaagatggccctttcatagatgaatcattctatggttcagagatagcctcattcaaagatgctcttacaagaatcggagtaaccgtggatatcaaacttggaaaagatcttgttgctcggcatctgaggagccacaataaaacagttaccatttcccggatctacttatacctgatgacgagcaaatgggtgcctgcaagtaaaaatagcaattggatttggataccaaacgaaatggatggtggagaatgggtggcctcaggaagctgtgttcttcatgaccggaacaatctttttggcctgcagtttcatgtcctggacaaatattatgacaaaaagctgcatgacttctttttgtacactcttgacgtgagggacggacctggttctgaagattactgcaagctatgggccagatgggagaaatccgtcaaggagatagctgtgtctgattgctctgctttttggaaattcatcgcgacaaactggagccaaaacacccagaaacttctttctggctgtgccaaagttcctgtatgtactgacggaaagatcattttgacaaagaaggaggacgtgttcattcctgacgatctactactcacggacctgttcagcaagctaacccagcattcatttttcatctggtatcctgcttctatcctcccttccatgtctcgagctagacttaaccacatctatgacaccatcggtgtccaaagaatctccaaagcagccaccaggaacgattccttcaccatcgacggacgtcatttcagaacgattgatccaagtaaggtggtcaaggctggtctgctccaaatagtgctctcattcctcgctgaccccgctctcgacattgctgccgaagagaggcaccggatggtttcctgccttctgaatgtgactgtccaagagagtgacgagccaatcacactggggtatagtgtaaggctgtcatccggagaggttgtggatgtgaagtccagccgaatggtcaggtgggagagggaggattctaagctgtacgtgcagagtggcgacggcgagcccagctacaaagagaagatcgagttcgcgacatacttcgcagaggagatctctcagggcctgctctttgagatggaggaccagatcccttccctcgctgagcttatcaagttcggcagcttgctggatttccaggacgccgctgttgggttcttgctcaagtcaaagaacctgcagatgtttcctgaagatgagcatttcctgaagtcttcaatgctaggtctgttccctgattctta

SEQ ID NO: 92740 - DNA, 661 bp, Zea Mays
gcagtattttcccatcgaatcgtttgagcaatcccactccttatttatctggctgatgactaccagagagtctccgtataccattaatcttttgacgcccaacgatatggcaatgttcaatccatggatcaaagcttcgtactcggctgcattgttggaggccgggaatagcaactggagggcgtacttgaggtgttcgcctccaggtgcagtgaagagaatccccgctcctgctccctgcagctttagtgagccatcaaaatacattcgccatacttctgcagtctccgggttgtctggtacttgttgttcagtccactctgatacgaaatcaaccagtgcttgagttttgatggcagtgcgaggccggaactcgatgtcatgagatcccagctcacaagcccacttggctattcgaccgatggcttccttgttgtgaagaatatcccctattggaaaacttgtgactactatgactttgtgatcgtcaaagtagtgacgcagcttgcgggtagttagaagtactgcatacaatagcttctgaacttgagggtactttttctttgaggggcctaggacttcactaatgaagtagacaggatgttgtattggataggcatgtccttcttctactcgctcgactactaacgcggtgcttacc

SEQ ID NO: 92741 - DNA, 464 bp, Zea Mays
atgtctgtctcatttatgtgaagggcgagtcggtggatgattatgtgtgtcaggatgcgttgtagtagtgattgcgttgaattgaatggaagtgtctcgagtacacgtcacaacatggttgtatgcgagacaaggtaatataaggtgtgctcgacacgaatgttcggtcgatacaagtagaaatcattttggcttaattagagaggtggtgacaagccaaagtagtcatcactttctctatagttataagtcgagtcgggtcgatgcgcattatgcgttcgttaaattatgcttcgcatatagtgtatgattgtgctcacgatttcgagtagacacttcaagtaaatcaagtaggatcgtgatactagttgtttaatgaagttagttgcttgagaataattattgaaatgttctgttcatatgataaacatgtatgtgttcacggtttggaaagtaaatgcatg

SEQ ID NO: 92742 - DNA, 319 bp, Zea Mays
gaggaacatcaacacaatcgtcaacgaagagggaataaaggtcagaaggtggggaggagtcaacaagagggaaaacgtcctcatcaaagacgacatgatgagaggtattaatgcggggggtgagaagattaaggcatcagtaccccttatgattatgggagtaaccaaggaaaagataatgataagatcgaggggcaagtttgtgaggagcggtggcagaggtgttgggataataggcacacccaaagacccgaaggtgatcataggagggggtggtgctgaagagggtgaagaatggggtgggatgggaaaccgtctt

SEQ ID NO: 92743 - DNA, 450 bp, Zea Mays
gcacttttctcaaacgctatattactatctggagttattccttcggccctctgctccgttgtggcaggctttgtctcaacaggcactgtgggccctgcttcggtttcagccagggttattataactttagtttctatttgcttagtatcagtattgggttgcgttttatcaacttcagcaacctccctatgggaacgggacttgtggagtcggttgtctccaacacatgtaatacatttaccatccttctccttttaggagtcacaacagaacccatttgtaccttcggtactgttgcttttactaaagggctcaaaacctctggcatcttcgttgtttctacagtttctggcttgtcagccttatcaaccttcgtttcaactaccttagctaaaggcacctttggcattatagtcggctcttcagtcctctgcacggcagtaatagttt

SEQ ID NO: 92744 - DNA, 548 bp, Zea Mays
gaatgtttggctgaccccttagtgggagagttcctttttgacctctcaaactcggtctgtgaaatgctcgaagctggagatcatgggctcagggccggatgaagaaagcaccccagatcgtgtgtgtgatgtccatcgcctccgacagagttctccttggcatcttcaaacttcctgtgcaaagttggccaaagaaaataggagcaatggaaagggcaatagagggtgaggatgggtgcaggaccatggagtaagggcgcaaaggtcctaactcttaaagaggcacgaagtctctcttcctccttcactcggccacccacttcctcctccaaggccacgatctaagctttggcggcctccttctctcgctctaggatgcaaaggcaggagtttaccttcacacactcgaggtgggcgagggcaactgtatccttatctctttttgtcgcttctgctaggccgtcgtaagcgttctagattgatttggcatgggcacgagcttcggcgacctcgttcttcgccgcctggagatcaccggcgaggcgctc

SEQ ID NO: 92745 - DNA, 619 bp, Zea Mays
gttgagatctcggatccactatctagaggagggtgatgcgaacactaagttctttcatttacaatcctgttatcggaagaaaaagaatttcatttccaaacttgaggaagatggaagaatggctaccaatcatgatgacatgcagcaaattcttgaagggtatttttgcaatctactgggtgctgatttgcagagacattttactattgatttgagtaattgccataaggctgcgatggatctcagtgctctggagcatcctttttcggaggaggtaagagacaccattgcttgtctctcgtctgataaggttcctgggcctgatggttttacaggaaaattttacaagacatgttgggacatcattaaagtcgacataatggctgctcttaactccctttaccttggaaatgcctataagcttgatttgctaaactcagcgtatctcattcttctcccgaagagagaggatgctacttcagctggtgatttttggcctattagcttgattcatagttttgctaagttggtcactaagatcctcgctaatcgattggggccatatcttcaggacctggtggcagctaaccagagtgcatttattagaggaaggtcaatc

SEQ ID NO: 92746 - DNA, 836 bp, Zea Mays
ctagctagttatcgccatcgaatagtacacgcccgatgagaactcgaaggtgctcctgatccaccaaggaccggctccaacaagccataggaaacacgacaaaaaactcaaaggtgaggaggaggctaaacaaaggatacgagacgagaagggggcaagaggaaagtgaggagaatagggagaatgacaagattaaataaatgccactctacgtatctctgtcgcttagaccgatgtgaggtgactcgtctgacaaggaaacacgtctggcaccaatgggtcagaagcagacgagcgcacatcaccgcctcttgagaggaggggcatgcaataattcctcctagtaaaatagaaaagggggaagagagtgcacaagcattgactaacctccctaggtcacgatgtttcttacatcaaggtagactttatcatgggtcacccgacccgaccaacctgactcgcctgaaaccccccggcccgagctaacccgaccaatgcaacaggcggatatgagccataatttctgaaccacaataattcatgggccgggtacgagccatgattttgacctaaaaccccacccagagccaaaaaacctgacccaaccccataaaacccgacccgacacatcaaacagggaggcatgagccaacccgacccaaaccaacactaggcatgggtcgggtacaggccgtgctaaatggcctacaacccgaccttgacccaacccaaatccaacccaacccgacgtttgaacaggtctacatcaaggggagctgagccccccaccattacaatcccaaactcaggtgcttgccacgaggccataaagcgaa

SEQ ID NO: 92747 - DNA, 334 bp, Zea Mays
tgttttgtcaggaaacttgtttagtcccctgtcacctcttttccggtcgctctgcgtccttttccttgacctctcggtggttgtatcggtcggtaccggtgcatcttcatcttggttcagccccggtgcgtcttggtatcgtgccacggcttcatcaagtatcgcacgatattgagacaagacctcctattcatgtaatgaaatgcaaaacatgcattgtgaaatcaaataattaggtatacacacacgaaactaaagatgtgtactttacctcacactcttgtggatcataattagggtcacgatgcaattgacaccaagcggccctatctat

SEQ ID NO: 92748 - DNA, 781 bp, Zea Mays
atgaagacttatattatgtgtaggttaaccttactagtttggatatttttcttagttgagttttggatgaagtatagtgacattgattgagcaagtattgtgttgttgttgtgctgtcagtgctctttgtggagttttggcatttcttcgatgaactgtgtcgtgcagaatgttattggcttcttgtcggctttattgctccattagttatgtagactttctcccttttgtggggtgcaaagaatgtgagattacatgattatcttttcaagatggcaagaacaaggtttaggaagattaggagttttgtttcaatagaaccacttgttttctggtgctttgaggtgaggtgtttgatcttcttatacattcatttggtgtggatgtttcaccattgaattaaaatgaattgttgaagctggtaagggttgtgcttagtccatattaccccttcataaaagagtgttgtttgaagacattgatgttgatgtatagctgcatccaaattcgatggtgtgaaatcgtagtgttgattgcatctatgacttgctttgagcttcattgcatgttgattcatgttggatatcaggctgtgtagtttccttagacaattagtccgaggtggaagttcttgtgttaattaagaccaataatggacccatgttttgaatggtggtgctacatggggtaccttggatgctttgcttggagtggtcgaattcgaggacgaattctttttaaggggggtagagtgtgatatcccaattttctgaaaagaagt

SEQ ID NO: 92749 - DNA, 684 bp, Zea Mays
attgaaaccctaatctggatttagttgaatcagctcccctcgggtgctccctaagggcccaggcgcccaactgcacaggctcgagcactattatctatccctctcggccttttgttgtcaccaatcttgggcactaaccaagccaccaaccaccatggggaggaagaggacagctgttaggaagtcttctgctagtaggaaagatggttgtagcagtcctccccaactctccccaatcgtaggaaatgctgccttggatagtaccgaatctactgatagggttcatgttgaagctgaatcctttgtggccagtgcctcctccccagcagatgttgctggaggttgacctgtttcaaacgatgatggggacgatggtgatcatgtgccaatgccactaccccgaaaatctaaagcctctgtttctagggaagagtgttggaatcatatggataagcaggaaattgttgagaatggtataatttttattgttatatgccattattgtaaatctgtgttgagtgcagattctactggtggaactggacatttgaattatcacttcaaagcatgtttgaagaaggtagggcaaactattggtggaggtgtgcaaacccaatagaacttcgctgccgatggcactgtaagtacatgggtttacaacccacaggtagcatgtgaaaaaat

SEQ ID NO: 92750 - DNA, 948 bp, Zea Mays
tgggtttccacccaaggggccaaacttcagtagaccatctggacccgccccatcacggttcagccaacagagtcagagctctttccattccccctcagtggcaagcaaccaacccccggcgaatgcatgttggcactgtggtgatcccagtcacttcaagaacaactgtccgcagctgaagccaccaggacccgcctactccaactcggtgaatggccccaagaatacctcggcatccgcccccaaggcgccctcctccgtcagccagcagaacaaggccccgtaccaagggagggcacgagtgaatcacgtcgatgcccaggagcctcggcaagctccgggagtagtgctcggtgagttccttgttgaatttactcccgctaccgtacttttcgattctggagcatcccactctttcatagccactagttttgtggaaaagtatggcattccctctactcctcaagagattcccttggtcacccgaaccccagggtctgaccttctatgccagctcaagtgctcccaagtcagaatccttttaagtggggtagtattcctggcagacttaaccgtcttgccatccaaaggaattgatgtgattctagggatggattggctaactaaacacaaaggcatcatcagttgcgcagacaagacagtcctcctcaccgaccagcagggaaagtcagtctcttgtcaggcacagccacccgccagtgacccaatgatgttcaatctagcaacagaaagtatatcagtagtagaagaattcatggatgtgtttacagaagaattaccaggaatgccaccagaaagagaagtggagttctacatagatctgatccctggaacggcacccatcgcgaagagaccataccgcatggctcccaccgagttagcagaactgaagcttcaaatcgcagatcttcagcaaaagggatacat

SEQ ID NO: 92751 - DNA, 535 bp, Zea Mays
tcgggctcgtctgcgacaaattgtgtggtacgtgaccgttcgttgcattcgtcagatgtagggcatcatgtagcacccttcaatttagtgttttgcgcgtagtaccgagaacttgggtattccgaccatggctccgctggggtgggatgtcatgtcgccgcatctggccagtctgggggggggtaaagagagtctccgccgtccgattcgtaacatacgacctagattagtaggtgtcagtcggtgtgatcgattcaatgccggacgtagatctctggctcgatgattgtgattaggagatcgtgtaccgcttcgccgagtcaatccgtgtcgtaggatggtgatggggcagacgagcttacactgtatttcattaaaccgtgatcgtcgatcttagatctgatggtcacacatgtttaccggttcgcttatgatggcaatctaatcgggagcgctcatccgggatccatcggacgaaattgaatcatattgcttcgacccccactttgtagaaagaccctcggagaaatcacta

SEQ ID NO: 92752 - DNA, 317 bp, Zea Mays
ggaaggtgatcatgtgtacctcaagatgtcaccacttcatggaatgaggagattcaaagttaagggcaaattgtcccctcgctttattggaccattcagagtttttaggcgagttggagagatggcctatcaactcgagctacctgataatctatctgatgtgcataatgtattccatgtgtctcaacttaagaagtgtctccgtgtccctgaggaacagttaccaatggaagagctcagtgttcaaggagatttgacttacacggagtacccgatcaagattttggatactttgactcgagatacaagaaataaag

SEQ ID NO: 92753 - DNA, 695 bp, Zea Mays
caattttggctctttggccgtatcatccttggcttcgactggctcgactgtaggcaccttcggcactacaatcaattcttcagcgctctgcacggtgggagccgcttgttttgcttcggcagttgaagaggtcccttcgccaaaactacggccggttcaatatatcgcggccgatgggtcaagacctttattttcttgcccttcggcacagcagtggtgaccgaagcggtagttttttctttccttgccttcgcaatgggtagtgataatcagggtatatgaagccaattgcatcaaacaccctgttcaatcttttcttgccccgacccccaaaagttgtggacaaggcatcatattcggccttggagtatgtcccaagcagttcgtcgctagtagcttcaatgcatttgaaccaatcatcattaggttcgtcaaacttctctctaaatctgaaggtatatttcaatcgaactaggccacctttattggattcagcagtagtctccttcggcatttcccagctatccacaagtgaccataccctataggctatgtgctcttggactatatctcttgtgccaatgaagacacaaacattgctaaaggccttctggcatgctttgacgtcaccttcaatagccaccttcggcctttggaggccgaagtgagaccagacggggcgctggatgatttcc

SEQ ID NO: 92754 - DNA, 716 bp, Zea Mays
atcacatcacatcattaaaaagtttgtggctctaagccatcaccacatgcatcacaagtcagacgaataataattattacagaccaggtgttcattacataaattaaaggtgctgccaagatgagaatccttctctccctttttggcaactagcaccaaagaaggagagagccaccaagccataaatcaccactgaggaggatgacgcggaccaaagaattgatgcgccaggtgagttgcaaagtgttcttccccagactgagctgggggaggatagcttcctgaaggatcctggggcggaggatgagaagaggattgacttggatccccctggtggggaggcggagcaaactgctcacggtcatcaaagtattcttcatcttcttcttcatcttctggagacatgaaaggcaccccatatgcctgctggtgccactcattgatttccggaggaggaggatgaagaggcacatcaggcgaacggggagcaaatggcatacccatagaggaagcttgacgacgaagattgtcgtcagtctcccgctgccgtcgagccagctcatgtacatctgaagatatatttctgcacatggaaaagaatgatgcaatgccatgggccagacgagcacccatcccacgaccacgacctcgaccacgaccacgaccacgtggtgtgggagatccgcgaccaggagatggacgcgagggtccggcag

SEQ ID NO: 92755 - DNA, 493 bp, Zea Mays
caaaaagggaatgactctatctgggtaataatagatcgtcttaccaaggtagcccatttcatcccagtgaaaactacctttggaggagccacccttgcccgaatttatctcaaagagatagtcagactccatggcattccaagaaagatagtgtcagacagaggaacctagttcacctctaaattttggataagccttcagaaagctatgggcaccaagctagacttcagcaccgcctatcaccctcagacagatgggcagacagaaagggtcaacaaggtcctcgaagatctattaagagcctgtgtgttaacattcgatagaagctgggaatctagtttgccttatgcggagttctcgtataataacagccatcagaccagcatcaagatgtcaccgttcgaagcattgcatggatgaaaatgccagacccctctcatgtggtccaatgtaggggaaaaggcaccggaaggacctgcctttattaaagagg

SEQ ID NO: 92756 - DNA, 634 bp, Zea Mays
gagtatttgatgtcatcgggtttgtatacccagatttctgctatccttcgcgaaagcaaggaaagaaaagaaagactgctgcttcggtgacttctagcacgccgaggtcaaagaaagttaaggttttaacacatcgcccaaacgcattgaaacggccgaagtgccgaggcctattgaggggtcttcttctgtatctgagccaagtcgctccactcctgtcgaagctaggacagaaccagccgaagagctagaactgaagaaagtggcagagcaaccgaaggctctgagtccgttgcgagagacggagctactgaaggtatcaaagattcctgcagcaactccgaggaagaggagaatggccagcatactagacgctgtcatggatctgtaaaagtaccaactcctgcttcagcgcctgataccgagggcgaagccttaaagaaatctggcaaagctggcatggcacaggctacctctgaggctagaccctcaattcccaccgaagcatatccttcgagggctgctcctctaaccttggaaaaagaaagtgtacctgagaaatttaagtctcctactgccgaagcacctgccgaggagctagagtttattgtgcgacatgcttcagggaagcaat

SEQ ID NO: 92757 - DNA, 570 bp, Zea Mays
ctctcaaaaacggggtggaggtactggtggagtggcagagggagcgagagcagtggaagcgggtgtggtggaggccataggcataacgagtgtggtggtaggcattggagtggtggaagctggcatggtagtggaaggtggagtggtagtggtgactagagcagaggggtcaaaccgagctggggtggagtgtgtccaagacgagaggctaaggacacagaaggcgatatgatccgatccaatccttaactagcctccctactctgctctctcagctactgctgctactgctgctcgagtagctgtatccaacttcctcttcttcttgcctccctgtagctcaaggtagtcatccttgcccttgtcctgtcggaatgggcgaggagggtcctgatcattgcctccccctgctggggtgatattcttagtcctcaccatcccgactaatcactgacacgctgctcgagaacaagagagataagcgagtgtagcaaagcaggagataagaatagagaaggaaagtgctagctatatggggcatgtctctcgagggaaaaacaagcaggagag

SEQ ID NO: 92758 - DNA, 450 bp, Zea Mays
acctggctgatgaatggactcctacacccgacagtgaagctaccaaaagtgataagaaactagaatagtgtagtttagatatgataatgtataataggtattgtggtcctgttgtaaatttgagtctgtatcattaccttttaagtaatgtaaatggatggtgtgctttggcatattaaatttttccaaatgttctttgcctcagatgccgtccaggactcgtggataggatggtgcgggcacctcccgtgggagggagactactcctaatccgccaccagtaccccaaccttggctgaggctatcgctaccttagtcaatgcagcagctgataacaccggctttcttcgcgaaatggcgggacagcaatatcagcagcaaggcgggcgagcttatccacaaggaccccgcaaaacttcatatttggattttcggaaacgcgtcccccgc

SEQ ID NO: 92759 - DNA, 375 bp, Zea Mays
atctaatctaatcttgtcataccaaactaatctagatcccatctaatctaatatgatctaatctaaagtgggatacataaacaggttggttaatactagtaaaatagatcagaccctgtccctataaacatgttttaaactaattcattttaacctaaattggtgtattaaaaccaactcagccatgcactcctaataggttacataatccatccattccaacctattgataaacaagattttgagctacccatgtacctcggccatcttaactatatgttcctaactcagatgatcacaccaagaccggagaagggataggtcaacctcgtcgaggaaggacaaaaggcagacaagttctccaaataagtcaag

SEQ ID NO: 92760 - DNA, 349 bp, Zea Mays
gccacggtgtagcctacagttatgctaccaagggagaagcatcgtcaaaagcaaaattgccatgatgaaagtcaccgtaccattcatcatcattgtatgaattttcttgacgaagctccctatgttgtggccttcggtcttggtcgtcctgggtaaggtgacacatttcctcggtggcttcatcaatcttcttctggagatcagcgagccaaagcatcttctctctcttcttttggacctattgatggataacttcgagatccctgatttcttggtccagttcctcctcctgagttgttgggctagtagccttcatcttctggctcctagcttcacgtattgtctcctg

SEQ ID NO: 92761 - DNA, 318 bp, Zea Mays
agtgggagacttggtccttcgccgaattctaataggggaaggacgacacaagttgtcaccactatgggaagggccattcattgtatcggaggtcactcggccaggttcatatcggcttactcaaatggatggtacggaagtggggaattcatggaacatcgagcatcttagaaagttttacccttagcaagacctcgaaagctatcagagtgacattgtactctataatgggagaatacatcatcaataaagttttcattttcaagggcattcaaattgttaactatcacttgacttcgattcgattggacctggaat

SEQ ID NO: 92762 - DNA, 483 bp, Zea Mays
ccctctgccattgcgaccgcactggattttatccggttcgacaccattatgcctttcaacttttggttgcgttcttggttctagggttcgtgtcctccgtctgctagatctttgctcggcttcatgtttgtactggcggctgtgtgacagcgaatcgtattctaggaaatcctctcgaaatctaacctaacctcgcccctaaaaccatagctagggtggtgcggcttggaagccacatgttcggcagtcagtaccaggctgtccggtataaggatttcattacctagtgaactgttggaacggccctcaagaaacgacagcgtgatttttttagatgatccaaagcagctattgttgctgtcgggaacaatcgttgagcttcttctagtcaatgtagagggtgcaatggtaattcgtttgccagtttgtgtcatatgaaaacctagataaaaaatgacttcaatgttactttctatacaagcg

SEQ ID NO: 92763 - DNA, 1172 bp, Zea Mays
atggcggcgagatggagggaggccgtgaggttccctgaaaatatcctcaaaggaatggagcaaagcctccatgagatcacctcctgatgctaaagctgcacactgtggtggcagagcaccaattccagtccactgaatgttactgcctcgatataagaatgacatggagagggcctcaaaattccacaaaattggtccgagagtgcgaagccaatggacacctaatacaatgtcaaatccatcccatggtagggtatagaaggatgtcgagaaatcagcttctccaataaccagaggcaattgagtgcacacacccgcagtagttacccgatctccgttggccaccttcaccgtcaaacctggacgaggttcaacttgaagctgcagctggctggccacagaatcattgatgaaggaatttgtcgaaccagtgtccacgagggccactaactgacggccatacaaacaaacagaaagtttcatggtagtgccaatatcaataccggtgagagcatggagagagatgccaacatcatccaatgtttcaccaccctcatcgtcttctgttaattccagcaagaaaacccctttgtttgcacatatgtgatcggaagtatacttttcagtacaatggtagcactcaccgctagcccgctttgctgctaattcttcactggaaagacgcttgaaccgagggcgttggttgccaacaactgatttaataggcgtactcacgccacgggctgcagggcgcgccatggagtgtgtgcttacagccagcgccatgcgacgctcatatgctcgagcaaggttgattgctgactacaaattagttggcccttggagttcgatgtctgtcctcaatggctcacccaagccagcggtgaagaggttggtctgttgacactgtgaaagattgtcacaacggcaaagcagtaaggaaaattgatgtgtataatcatccactgttccagtgcgatagagatccttgaggtcagcgaggccattcatgcgcagtgggggccgaacctaagattgatcaattcggagaaacggccccaggtaatgtcgccgtagtcgcgctcgatggtgtagtaccattcagcggcaactcagtcgaggtgcagggacgccagccagactcgttcctcgtgcagtgtcctcatgccgcg

SEQ ID NO: 92764 - DNA, 374 bp, Zea Mays
tagcatacattggccacaactggatgattgtggttgaggattttatatgtatacttttagaacatctcggcattagggggaggaatgcccatatagtgtaatgcctcaatattctattaaacgcacaaaagcaaaactgaacctgtcgttcggtgtgtactcctatgtatatggagtttgccagaaatcgttgaggagtaaccatattggtctgaatgcttctacttgatgtagatgtggatatacccgggattaatataatatccacatttgacttattggcatttgatctattctcggggacgcctgcgaatatgatccgttagtcttagtcaaagcatatattctgattgcagattcatgtggtctgtaat

SEQ ID NO: 92765 - DNA, 866 bp, Zea Mays
tgctagtttagaatgttattcatattaggaagtttgcctttacatgtttggtcaagagtgctaagtttgatgtttagtttggtatgttactcatgttaggaaaccaacgtttacgtgtttgattgtaggattgtaattttttatttttcatgtaatcttctatttaagcaaatgaatgtaccttggaaaagctatcaagctttgcagcaccaaagaaagaccatattcttccgagtcacgtgagattgtgtgctcgtttggtcaagtgcttgctatgataaggttttaaagggacccgccaattggtatcagagctatgttgtcaaagatgtctaagacaaagcctaaaaatgatacctccgaagatggtgtggtgatccaactggtgattcatgaggtggacggtagaaccatgtactcacaaagacaaattactcagattggttgctcatgatgaaggtgaagttgaaagcaagatctttgtggaaggttattgagaatggaggcaacgattcacgggaggagatgatgacacttgatgctctatgttgcacagggccacctaagaggctaagatggatgtgccatatttttggaggtaatcttattttctggagttctcgcaagcaacccactatctctcgttgtactatagaaggtgagtataaagctatcgttggtgctactgccgagatcatttagcatcaagttctgtatgtgaacttgatattccacttttgagggcgaccacacactattgtgtgacaacattggagtaagtgggagtcactatctttctaccaatcctatttttcgttgttggactaaacaagctgaggtggactatcattttgtccacgtacgag

SEQ ID NO: 92766 - DNA, 374 bp, Zea Mays
caatttcaaaccccgccgcgggtaacaactcttcccacacccaccaaactgcagcggcgccgcttaacaatttcatatctttaaaattatgacagtagaggtaacaaccaaaaactccagaggcatctacataaaattccccacaagttttgtatacaacttataattaaaccccaacatctaattagcccaaaaccatccacaaggtacatcctgcaatctgttttttggacagtaacatacccggattcaaacagcgatatctcctaatttataactccgaattgagcgcataagtacttgttgcaaaggtatgacaaagctatacataattctcatactgtttatcattaattacccacgaaaaatcccca

SEQ ID NO: 92767 - DNA, 353 bp, Zea Mays
ctgatcccaatgggtgtgacccgattgtttctgatcccaatgggtgtggccttgatgatgctgaccctaatgggtgtactgtccgtattattgatgaggatgaggaagaggaggaggaaatccctttaattcagaagaacagtcggcgctacatagccagcgggaagagtagtggtgttccttctccagctttgtctgctctcgttggtctgcaggaattgtctctggcaaattttgatcagactcttgaagacatggtccctgaagatctgttgtccgagcccgcagatggtggaatgatggaagtttgcgctgatgtgcctgatgtcgggttagaggtatcccgagcagcg

SEQ ID NO: 92768 - DNA, 437 bp, Zea Mays
aagctaagagagctccgatcgttgctgtgaagatgcaaccaagaggagctggtcggcgtggagctgcgcgcgggtatggtcggggttctggccgcgatcacgtctggaggcgtatcgaagatggtgatgttcaaaatcaaagaggtggtcgcaatattgaggaggcgaatatgaaagaggggggtgataccttgaatcaaggtaacccatctccctgggaaagtcaagttaacagatctgaagaaaagaatgaagatagttgggaaaggaaatccccatcctatgggagaagatggtcctaaagattcgcatgtgaaaaaagaggtaactcgcagttttaatctggatagatctggatgtgctttttgtcactttaaaaatcatcttactaaggattgtcgacatcgctttccttgtgacatttgtggttgtgatga

SEQ ID NO: 92769 - DNA, 438 bp, Zea Mays
ctcatttgtgttggcatatcgagctgaaataaacaaatgtgtagcaccataatcaaataatatggctgcaggaattgaattaatgtaaaacataccaatagcgatgttagcttcatctgtggtagcattggcacttgattgactttagcaatgctgaatcccttgccagaacctagagtttgttgcttgttttggacgggtgtgctggcaatcctctgtggacaaacattggcatagtgccaaacctgtacacacttgtagcatgtggtgcatgtactatgtcatgtgggtctcgccggggtgctagtggtggcagcctgacgagcatgtggagtctgtggagtgccctgtggtgcatactgagttgggcgctgacctcctctagtacgagccactgtaccctggggtggaacatagcgaggatgaacgctattgctc

SEQ ID NO: 92770 - DNA, 382 bp, Zea Mays
ttacctagtgaatgcattctaggtgtaacaaacaacatgaaatgccaatgcatatgatgtcatgctcaagttttagtgccagtaacaccagggagttacatccttcccccataaaagaatctcgtcccgagatttaaggtcctagggtaagtagtggaaaaggaaacacgtcacatctttatttccttatttatcttagagggcaggaggtggtgtggggtttgttccaactttacaatcagatatacacatcttacaagttacatgaagctaaaaacctaggaaaatttttctccaagaagtcttgagtctcccaggtatcttcatcttcagtatgatggttccattgtaccttatagaattttagggttctttttcaaat

SEQ ID NO: 92771 - DNA, 1856 bp, Zea Mays
gccggatggttacggctcctgctccggtggtgcgacctgcctgcaaccgggagaaatgcgattccggcgtccggaagaggtttgtgtcgtcgacgggcgttgctcaggttgttcggaacacagagaaaacagagccgctagtcgatggatggcagttggtggaatccaagcagtcaaagcgacgccgattgaagatggagcggcaacgtcagagacggcccgtcccagaggacctggctggcaggtgctttaactgcctctctcatgatcactttgccttccagtgtacgcagaagacgaggtgttttcggtgccggaagcaggggcatcgctcctttgattgcaatctacttaaaaggccggtgaggcttgaggctgtgaaggtggcggtgaacaacagtgctgcctctcgacctgagactgagatctcggtttggaggaggatcaatcttccggagccaagtacgaccagtggagacagactaagggagcaacctcgacctgagacacggctctcggtctggaggaggctctcttcgtcttcagcaacctctgtgatcaaggtgaagaagaagagactggtgtggagaaggaaagacaatcagcatcctcctagagattcaggtattgctgttcgacaccaggaaccatcaacaatggagggcgacggcggaggcttgatttcacttgatgctgtcggtgtccaatcaaaaagacagcggactcgcaagagacggcgtagaaccaaaccgatttctgatttggataagcgccccgctggaccggtgtcgcctgctgaagatgataaaccctgcatcttgagatggagtcagcagatgaccagagctgaggatgatcttcagaaggcagtggtgattactgttatcagcgatcgtgagaaagtaccggttgaagagattgctgagttaattgctcctaggctggagctggaagaggggacactgataattcggcattattcccagtcaagtttcattctctttctacctggctgtgacatggtggagatgctggtgggcaattggccttttctcagggcagccacgttcacaatcacctgcaggaaatggtcccggtttctgaactccaggggtgctgtgttacctgtcttgttggacttcgagcttcagggtatccccatccatgcatgggaaaccataactgtggaacaattgcttaatccctttgctagtgttcatcaggttcatcctgacaccctggagcttaaggatgtggctgtttaccgatgttctgcttggtgtttagacccgtccttggtgcctgcttcaagggagctttggatcgtcgaacctccctttgccgttgatgggatgtcttctggcaggagaacgctgatgtatccaatccgcatcacattctcgtctgcaccacggagggatggatccgatcctaagcttcatgctattacttcgggcggggatggttctggtcacgtgcagcagggatcccctcctttttcaagacctccccattcgagtgggagaaggggggaacatggtcattcgggacgtctctcagttcatgagcgtttgggcccaagagatgagagcatgcagcagcggagcattagctccggggtggcagtttcagatttgaagagaactttggaatctgatggggggaacttgtctcctaggctggtagagatgactgatgacatggttattgtttcaccggtgaaggcgaagcagctgaaagtttattttcgtcaaagactcaagaatgtcctgaaccaggaggaagctggaactcccaattctgtcactgtgcttcctccatcaccctcagacgtggcagctgctgacacagatcca

SEQ ID NO: 92772 - DNA, 766 bp, Zea Mays
cagggtatcgctgagagctcggtggaaagaactattctccgttgatgaactcgcacgcgctccacgtgaacgacgactagccacggccgcccaccgagatagaacaatggcatgactaaagtttccctcgcagctacaccttcctggcaatggtggcaggtgatgtcgagctctctatgtcttcggatatggcgaggctctcagcgttctcgtgatcggcccagatggagaacctgaggtacggggttgggttttatattccccacggccaggggagatctgccctgggacgttacaacagacggcaatctcggcggaggttgttttagtggtcaagcgtgcgcggtgttcggacttcggcatggtttgttacgataaggaaggaagacacggttctgaacgagcaaggcgcagagcttcgtacgtgatcctgtggtccacatgtcggcgacggcgactacctagaagtagacgtgtgcatggaaatacgactgcatgtgttgcttgcttgatgtcacacttgtgtcatgctgacatcatgtgcggcaagaggattaaataaaggaaaagaagagatgtggctatggggaatatggcaatggtgctgggccgagcgccaccacaggtaaatcttccttcatttttttctttttattttctgtttcctttttttgtttcttccatgtttttaaatttcaattacaatttcaaatttggacctagttttcaagattccacttcatttttatgcacgaacaaactccag

SEQ ID NO: 92773 - DNA, 431 bp, Zea Mays
attttctgtagtgatgtatgtgagtttttctaatgatcaatagagattgctttaggctatttatcatatggcagtattgggttaatttttgctattttacattttcctttttcataatttgttatgcactaattacacgccttgtctaagaagtttgattgcacacattttcacgtcgatatatttcaaaatgaagaaggggctttgctgtggtactcccaaatcattgtgagttgtttatttaattaatcggatggtcgggatcatctattactttgtaggaggtaatggtgaaataggataaataagcaaagttttagatctattttttcctagatctaactgatgcaggcatgatctattagacgtgataaatgtttttattttccaactttgtatgacataatttgattataaactgtcatttttat

SEQ ID NO: 92774 - DNA, 591 bp, Zea Mays
gtggtaccaaagctaaggtgaaaaagtaagtacttgcattaagtagaagagccagtcaagctcaagataggtcatgctaaggaagttgatatttgttgaagaaggttatgaagatgaggggtggacattaattaagttggtaatcaatgaacatgacttcgagtcagtttggcataccaaggaataaggcaagaaagaaatttgagggactaagcaactaagaaggtcaaaaagattgaggtaccaaaagctaaagtgaagaagagacttattgcaaggatcaaagctgatcaagctgtgaagagttatgtgatattgaagaccgcaacataagaagatgagacttgaaaccatcgatactagctcaagaaatggatatgatcacaagatcaaggtgaaagtaccaaagtcattacctagaagggctttcaagtgtgcatactcaataaaagagcctaaatgagaatccaaggaagaattagtttatggggaatttcagagtttagaaaagttattgttgaccattggaacacaatggagctcaaagatgtggtagagttgatcagatttggagtttaggttccaagtggc

SEQ ID NO: 92775 - DNA, 573 bp, Zea Mays
gagaaattgtcgtgaaatactaaactagatctaaacctaaggctagattactcctactactaggaattgaaagaacgatccaaataaggtaaaatcgataattacatttgattagatcaattgtgggggttcaattggtcgtacccattcatccttataaagggtggaggtcttgatccgttacgagtcagttcttgagtaattccgaaggttttgctaactaatcccgctagaaatctggaaccctaactgattctacacatgtgtgatcgtccgctcatcaccgcggactatccgactctaagggcgaactgtccacagggcacttttgctgttgaacacctctcttcttctatcttcctcatcctcactcgaggtctcgagttggccatggtcacgtctggatgatccctagagacgccatggaagaagccgttttttggagggagaaagagacatatggtgataaatacgacctattagactatctttagcaaacttactatcttactttttatttcaaacttcaccctatcttatataactatatgcacgatctgctgagcagtggcg

SEQ ID NO: 92776 - DNA, 394 bp, Zea Mays
ggccctttgaagccaagggatgagccgagatgctgaagcattctgtcgagtgcacgagttgcactaccagacgaaggccagggcagacggtcttcatgaaaattttggttgctacaattttgcgtatcgcaaggatacgaaggctccagttctcagttaccgcacaaaatagccaaccggctggaaaggtgaatgattttatattaaggctgatgagaagaagaaggggaaactgatgacgatggtcatgtgcccgctgtccttaaacttcggaatgaccaggcccctgtgcaacatgcagctaggatcaccatgccagctagccggagtagaattcagggtggtggctgagcaaatcagcaccagggacttggtgcaggaatacctagccaac

SEQ ID NO: 92777 - DNA, 731 bp, Zea Mays
gtgtggatgacagaaggtcaacaggaggctttgcagtctatttaggagataaccttgtctcttggaatgcaaggaaacaacccactgtgtcaaggtcaagcactgagtcagaatacaaagccatggctaatgctactgctgaaataatttgggttcaaacactacttaaggaaattggaattgatagccctgcaaaggtgcacttatggtgtgataacatgggagctaaacatttggcctcaaatcctgtgtttcatgctagaacaaaacatatagaagtagactaccactttgtgcgagaacgtgtgcagaaaggtttgctaggtgttgattatatctccacaaaagatcaaatcgcagatggttttaccaaggcgctcacagcaagataattggagaattttaggtacaatctgaacttaggaaagttatgattgaggaggggtattagacaaatcatgtatcatgcttatccttgaatcgctggagatattattcagcggtggttgccatagatagatgtatttgttataacaaactccataatcatcggctgtaaataggagatcacggcaaccacccaaaactatctctaagattgtaatcctgtgccgtttggccctatataaacatgcaatctgccggcacaaggtgcaacggcgtttctcatccaatctacttccatactgcagttttctacaaacacaacaacatgcaggtctcggtctcgc

SEQ ID NO: 92778 - DNA, 1091 bp, Zea Mays
ggaacttaccggatcgctcaaccgcgcttggttgaacggtagtgggccactctcgtccaaaatgtctaacgtaaccccgccgtgatagcaaggacgcgggttgtaagctcctccctcatcaagttcttggctgaatggcggccggagtcattatccctggtgtactgccacatggtcctctagcaggccgcgagtggctggaaacgatgatccatgaatgtgcggatctgcctctcaccagaaaggccccgcttgtgttgccaggcaaccacatccaacacaagcttgatcttcggcttgaacttctccgtgccatagggccactcaggcttgttcaccgggatctgaccagtgaacgacggtgcactcccccaaggttccggacatagatccactcaccctcgtaacctcgaacggaggatagaagggggattgagaggtaggagacctgtgtgaaccctggagctagacattgaacgagccaacaaaaggttggtcacctcggccagggttcgcccgcggactgaacaaatgcgcccacagcttccagtgaggctccatgccgaggtatgcctagcatgatgaagcacactatgtggaggaccgtgttcgagtggaggttttgcagctccaacccatagtacaagagtagtccccgcatgaagggatgcaaaggatgcccgaagttgtgctcgtaaaaggaggctagcaccacgacctctccatcacgaggcgccgaaacaccgccttcctcctccagatgccagccagagaccaactcaggaggaagaaacccctttctctctaggtcatcaaggcgctctcgggtggtggagcacaagggaaaggcgtccatggaggcaagaaggaggggcacagaaaggaagttaacgtgagaaacgcttacggatctttgaaggaaggaggcaacaaccgatcggtcgagaaagcacggtaagcgaaactgactccaagcgccttcgtgtcctatttatacgcagaaataagtacgcgaagcgacgcctgaaggggaggccgcacgaacaacgccgagggattcgtcgcatcggtattcccccttgccttgggca

SEQ ID NO: 92779 - DNA, 371 bp, Zea Mays
caagcattgtcatgaacaagcttactttggtatgtattattggtgttagtgtattgcatggacacctcaccaagagctagagatttatcttgatcagcaaatctcaaaaacacatacagaggctcaacatcatccaacacttcttgcatgttatccaccagtcgacatttgtcatgttgttaaaagcatacctcccaccttggctttcaaagaaatgtgaatgtctgaattatggtgacatcactcataccatgaacttggtgttagtgcattccatttgactaactcacctccgatggcctacctcatcaagttgtgcaaagtgttggagttgtaaatctagctacaaatgtgttgggcgctatgaatca

SEQ ID NO: 92780 - DNA, 823 bp, Zea Mays
gtcgtggatcgtaactcgatggttcacgcttgggcaagggagagagagagaagcgatttttagcaggttcgggccactttgaggagcgtaataccctacttcctaggctgcctttgtatgtgagcggtcttaccggtggtgtctaccgagctgtgagatgctaatgagatgaaaatggagggggtcccccttagccttatatacatgaccgtagggtgcttcccgcgtacatgttgatcatactttttttgcttatctcctaattaatagcaaacaaccttcattgtcccgagtaaaacccggcgccttcgatccgagctatctccggcgtttgagaaagtcgggcgcgagaaagacgaatgacctcaacacgatcacgcctaacccacgactagctcgggcatgggcccatcgtgctcctaggtcggcccacttccatcgtttccctttgcccgacccacaacgggatgtcatagaggggcgaatgtcacgtggccccgggcgaagttttcaccaccgagtggacccgagggatatctgtcccccacataagggactcgtcgtcaatctcaaatgacatctcaacaggagagcagtcgccatcaaggggaaggcggtgggggcctcacccatggagattgaggttgtcgctgtcagccccccgccaggctccactgcgcttgaggttgcccccgttgacctctagccaagtatagtggcattcgagggtgccgctgctgaccagcagccaagcacatgtgaggttgtcaccatcgaccgcctgttatgctctatggtatgtgaagttgtcacccctgatgcc

SEQ ID NO: 92781 - DNA, 558 bp, Zea Mays
ctaatatgctccgccacaactctaaattccactttggctaactggcagggggactcgagttgcatgttgcacaatggccatgtcatgccgaagctcagtctcaggggacttatcaccatactcataagcttctctctcttcttctcatcagctttcatgtaaaaccatttacttgtccagccagtcggccacttggtgcgatatccaatcacaagtgccttagtatcctttcggtatgtaaaattgtaacacccgaagttcttatgcagaccatcagccctagccttagtctggtaatggagttcatgtacactgcaaaatccttcaccattagcagtttttccttgacttcgtaaagcccatatatacacgctgagtttgactatagcatttggggtgagttgatgaaggtagatttcaaacttgtttaaaagttcaccgatcatcctgtatagagggaaccgaagacctgctctgaagaagcttttaaaaactatgacttcatcatttcttggttctggaatcacttcttccccagcaaaccgaactagttcgtca

SEQ ID NO: 92782 - DNA, 977 bp, Zea Mays
aactaccggtgtcgaccgaagacgcgggggtcagggttcatggtttgcttcttctatcgtctgagttgttgtcgaccctccccttttatagaccaaggagggggtcggttacaagtggcttctcgtggaaggagttaccgtgtcggggcagaacgaagcattttacctctggtagaaacatgtccatcggtattcgctttggtcgtctgagctctctggctagactctttaagtctggttgcgtgtgggcgatgagggactcacgcgtcatcattacctttcctgtgtcgcgtcgacccctagccttcgtagcctaagcctcgacacggctcatcgtgttacgggtcttgtagatcgccaggggactcaggcttagggttgataagccataagtgtgtcgtagccctacggactcgtaggttatgagtggggttctagcctgagttcgcaggtcatgagtggaaggaggctcgactccccgtcgtggcttggcgctagacatatttaatgtggtcagtcatttatgatgggatagtcctgggccagatgcagaattcactcgagtggcttcctcttggtttgcccgaccccccatttctggctccacctcgctcgaccccgggctcggtgcctcagggttactcggaggcaggtccttccggggcagactcttcctccgtcctttctctgactcgtgggcccagtggcccggggatcttaccctcaacaggtagttagatctttgttggacataacctgtaggaatgtaactcgctcctccctagtaccataaatgggagacatagtaatataaaagagcttatcattcgactctaaggctagaaagctatgtggctctctccctccataaatattgcaagggactaggactattctcacgggctagctcagacatcatctgatccacacttgcatctaattacatgaagtaccacataaaagacgtaggatatcac

SEQ ID NO: 92783 - DNA, 512 bp, Zea Mays
gcaccactagacttaatacattctgatttatgtgagatgaacggaatattgactaagggaggcaaacaatattttattacttttatcgatgattctactagattttgttatgtgtatctcttaaagtcaaaagacgaagctttgcattactttaagacctacaaaactgaagtggaaaatcaactcgagaggaaaattaaatggttaaggtctgatcgtggtggagaatatttttaggtgatttttctgatttttgtgtggaacatgatattatacatgagaggacaccgccatactcaccacaatccaatggggttgctaagagaaagaaccgtactctaactgatttggttaacgccatgttagagacttcgggactatctaaggaatggaggggtgaggcgatcttgacagcgtgtcatgtcctgaataaagttcccacaaagaacaaagaaatcacaccattcgaggaatgggaaaagaggaaattaaatatctcttatttgcgcacc

SEQ ID NO: 92784 - DNA, 323 bp, Zea Mays
tacactactctacttctattacaccattagtcctgcttcccattactcttggcggcctcatcgtcaggtgtgggagtccagacatcaaccaacctcaaggaaggagggggctcaaaaaggtctaactccccacccagcgcgcgtcccgcaacgtgagagggtccggcttccgcctcagcagggtgtgcaggtacactagggtgtaattgtgagtatagtacatggacttcctcatgcaacgtattgcaatagatctacaggtcatcgatagttgagctaagttccttaattcgggcctgagcccttgcttccttagcacatgc

SEQ ID NO: 92785 - DNA, 580 bp, Zea Mays
gttgcgggtgttgggccgagatttggtccaacagggagaggagagggtttttccctttttctttttacttttcaattcccatttcccattttgcccctttttcttctgaacaaaatattttgtgaatactctaagtgtttagaaaatagaatctaagtgaggtgctttgtgatcaaacaaaatgtatgcatatgatgaaagaaaacttagtggagatcttagaattagaggatgaagggaggggaaaaaggtagattagggtttcaaacctagattaggatttttgggatgctacaaacctaccccacttaaaggaatctcgccctcgagattcagacggggctcgagaaaaggtaagggtattccttcctcagagagtcctcactttcccaggtggcttcctcttctccatctctgctccactgaaccttacagagtctcacttccgaattgcgggtccttctgactgctgagtcgagaatcttcactggcttttcccggtactggagatctttttgaatctgaattgtctctgcctcgatatgggtttctggtacttttaggcatttgcggagttgag

SEQ ID NO: 92786 - DNA, 638 bp, Zea Mays
attgttgacgaggatgaagaagaagaggaggaaatccccttaattcagaagaatagtcaatgttacatagtcagtggggagagtagtgatattccttctccagctttgtctgctctcgttggtctgcaagaattatccctagcaaattttgatcaggctctcgaggatgttgttcctgaagatttgctgtccgagcctacggacggtggtatgatggacgtttgctctgacgttccagatgtgggattagagttaccccgagcagcgtctcgtgcctcgtcgaccttggagtgcagtcttcagggccaagaggctggtcaaggttgttcaattcccatggaggtgactgagaatccttcagccttagaggtggctgttgtagagaacccggtcctcaaggatggcgcaagcggttacccagcccccgagggtgttgccggtaatgatccggcttgggtgggtagcgcaagctgcaacccagcccccgagggtgttgctggtggtgatccggctctgatgggcagtgcgggctgcgacccaacccccgagggtgtccgagcgggctccccttctcatacctccatggatgtccacgttgggtcttctcctccacattctgatggcatggcaacagcgca

SEQ ID NO: 92787 - DNA, 628 bp, Zea Mays
agcgatagagtcttattttttctttacccatactataaacagaggcatggatggatatcttaacctagttaatcctagtgatgagtgatgatgcaaacttaagaaatctagtgctaggtaacaaatgtgtagagaacggtgacatctaagtgggggaggggtgagttaggaaatctattttttctcctgttatatggccgctatttttctactagttaaaacctacacaaaaaaacaaagtaatcttatgtgcaattatggttctaactaagagttgttatctctatcgcaaagagttatgcaacataggctccaaacctatctactagtatataactaaactagaaagataaaacatataaccaaggtaacacaatataaatgtagaaggttaagagcaataaaaatacaaactttagttgaccagccaatatttctatagaggtatcaaaagggtgcaaacttcccctaatcctcattggagccccacataaaaggaatgcccacacatgagggccaagcttccgatcaataactccatggatagcctcgagattgtttccatacacaagtggtgctccaattttggtctctctcggatgctcgtcgttatcttcactatcaagtt

SEQ ID NO: 92788 - DNA, 5546 bp, Zea Mays
gatttgggtacggtgggcaaagcagggacaaccagcagagcatgtgcatcattagggctcagggtgtgtttggttggactgaaagtttgttaacgacttgcataagttggaacacacacaatatctggagaatgcagagacggagaacagagtagttgagatagtacttggaaaggaagaagaactagagtctagagttctgttacagcataaaaaaccctacgcgccgccaaacccttatttaataatcggctggattactctgtgctgtttacccacgccggcccaaagacctttgggttgcgcttcctcagccttttggcccgacacggcccatctcctgctgttgcagccaaaccttctttgtcatttgccgcaccgatgactgcttcctccgcttcgctgacattccccctgctaaatccgctggttgtccccaaacagctgcatgcggaaactgctgttgcaagtcctgcgcaaactcccaagtagccaactccacgggcatgtgtgaccactggacaagaatttgttcactggactgccccccacgagccaccgtccgacgctgcaagatcttgacaggcacactgaactgaaattgctcattaggcagcactggagaagacaccaaacctgtacccaaggcacgcttgagctgggatacatgaaatacaggatgaatccgtgacgaagatggtaactataattcgtacgccacggctcccacacgtcgcagcacctgaaatggcccaaaaaacttaaatgccaatttctgatgagcacgaacagcaacagacgactgaacatatggttggagcttaagaaacacccaatcaccactagcaaattcccgttcagaacggcctttgtcagcctgtcgtttcatgcgcaatttagccctttccaagtgctgttttactaaatcagacatgacctgccggtcctgcagccatatagataaatcagtggaagcaatgacagcagaatccgaaataccaaactgtcgagggcgacacccatagagcacttcaaatggcgaccttcccgtagctgaatggggagacgagttataccagaattgtgcaactgatagtcacttactccattgatgagggcaggcatggacaaaacaacgaaggaacgtctccaaacattgatttacacgctctgtttgtccatcggattgcggatgataagctgagctcatacgtagctggacatcagcaagccgaaataattccttccacaggttactgagaaacaccttgtcacgatcggaaactatagaatgaggcaatccatgatgtttatacacttgatcgtggaaaaggcgagcaaccgtcagagctgtaaatgggtgtttcagtggtaaaaaattggcatattttgaaaacagatcgacaaccaccaggatgcatgtatacgaatgtgaactaggcaaagcctcaatgaaatccatagaaatgatctgccataaagaagaaggaaccggaaggggttggagcagaccaggtagcctagcacgatcagctttggcttgctgacatatcaaacagtgagtgacatatgtgtgcacttcagttttcagaccttgccaagcaaacagttgcttcaaccgggcatatgttaccggaaatcccgagtgaccgcccactgcagatgtatgaaaagcagctatcaacttctgatgcagatgagctgaaggtcctacccaaatgcgcttcttataacggagcaacccatcttgccaggaaaaatgtggaacggcggacgaatccacagcgagcttagcaatgatatccgaagaatgggtatctgccaaatatgtatcagcaacttcggtgacccactgtggctgacaggacgacaccgccaggcaactcgctgacactataggatgtcgcgataaagcatcagcaaccccgttctctactcctttcttatacacgatgcgatattgcagtcccaacaaccgagtaaacattttcttttgccatggtgtgtgcaaccgctgttcatccaactgagcaagactgcgatgatccgtatatatgatgaattccttaagttgcaagtaatggcgccaatggtcgacagcaatcaaaatggccaaaaattccttttcataagtcgacaacccttgtgatctgggtcccaacgccttgctaagatacgcaattgggtgaccggactgcaacaacaccgctccgaccccatgattgctggcatctgtttctaaacagaagggcaatgaaaagtttggtaatgccaaaacaggagcagacactaaagcttgtttcaaggctgcaaaggaagcttcgtgtgcgggagtccatacaaatatagcacccttttttagtagacccgtcagaggtcgagccaaaagaccaaaatgacgaacaaagcgacggtagtaccctgccaaacccaaaaaactgcgtaattccttcacagtcctgggagaagaccactgagaaacagcctgaatcttgcttgggtctgtagctactccggccgctgaaatgacatgaccgagataggataactgaggcctggcaaatgaacatttattcaacttaatttgccattgatactgtatgagtagttcgaagactgctcgaacatgctgaatatggtcttcaaagctcgaactgtagattaaaatatcatcaaagaaaactagcacacaacgacgaagtaatggtgctaatgttgcattcatggcgcgttgaaaagtggctggtgccccggtcaaaccaaaagccataactctaaattcatagtgacccgagtgtgtttggaatgctgtcttatgacaatctgccggtaacagccgaatctggtgatatcccgctgtcaagtccagactagtaaaccaggaagcttgccccaattcatccaacaactcctcgatgacaggtaccggaaaagatgtcttgacagtaatagcatttaagtgccgaaaatccacacagaagcgccatgaattatccttcttcttgaccaataatactgaagaagaaaatggactagtgctgggttgtataattcctgactgaagcatgaccgaaacttggcgctctatttcatctttgatagctggtggatatcgatatggtctgacatggacaggaacagcccctggcactaatggaatggtatgatcacactcacgagttggaggaagaccatttggtggtgcaaacacagctttaaattcctccaacaatgccatcagcacaggtgttaaatccaagtgtgcaaacagaggtggttcagattctatcatatctaattccactatcgacccaggtggaaaaacagcagacaatccatgtaatagcacccaggaacgttgatatggaatgatcatccacttttgggaccaatgcaccttcatcggactattagctgccaaccaatccataccaatgatcatatcatatgaagccagatccaaaactctcaagtcagtgtcaaacacgcagtgttgaacggaccatctagcgccaactagctggcaagaacacttcaaacgattgccatccgctacctgaaccagcactgacttggccatatcagttacacctgataacctcgatgccacccgggatgcaatgaatgaatgagaactacctgaatcgatcagcatcaccacttcaatgccttgaatcagtccccgcaacttcagagtatggttcaactccaatcctttaacagcagcaatggagatggccaaacattcagtctctatgatctgatcctcgaccacaacatcctcaggaatggtgtcttcatccccttcatataattcccagagttcctgtagagcatgtaactggactgtgggaggacacttatgatcacgcgaccacttctccgcacaacgctggcacaaccctttagctcgacgataagcgcgcaaggcagcaagtttgtcatccaagacacgagcacgatgttgttcagccggctttgtttcttcgatcacagctccagtcttgtcgggtcgtgctgtcaagaaaggaggcactgaagatttgccatacccctttcctgacgacgcccattctggacgtcgatgctccaaacgtcggtctgacgtggccacctcttcctgcagcaaggcgagagcgcaagcagaatccaaggaagaaggccgttgaagaataatagcagcacgaatgtctgaacgaagaccatccacaaaacgttgcacaaaatagagaggatccacaggtcgcccgtacgacaccaacttgtctactaatgaagaaaactgatctacatattcagttactgtgccatgttgacgaatgcgaaacaattgtctaataaacaactcatgctcatcttttccaaaacgctctaaaagcacgcggcaaaaaacaggccaactagataagtgtgaatgttcgtccagagatgaaaaccaccgagcagcccccccaacaaaatgcatcgacgctaccctgatccataggtgcggttctacttcatacatgtcaaagtagtcatggctgcgacggatccataatttggggttttcgccatcaaacacaggaaaattcaacttaggcaaacgaccacgcatcgcgccccccatggttggatatgacagatcgcccacatgctgatggaattccgaagtatgcacagctggagaacgaggcaatgatgaacacatacccttgaccggggtatggaggagggtggtgaccgacccaaaaccatcctcccggtggctcgattcgacgcggtgcccatggggcctgttggctggaactccggcaggttgttgctcgacagccggtggagaaggagcgaggatgcccgccatagcggacgaattgtccactacagcacgctcccaatttttggagatcttgcccacctcgagtcgcaggtcatccatcatcccttccatgttcatccgccaatcttccagcacaccagtggcttgttctagagcccccacgcagcggtcttgtccagtggtgaactccgagaaggtcgcgttccaacgcgactcctgctcggccactctgcgatcccacttggagtcatgttcagagaaacgccgcgacaactcatccaggatgagttgagtgtctggattcatgagaacacgtcggaggcgagcacgggtaaagtaatgctgctggtcgccgcgatccagcgcgtcaacacccacaagccaaggatcggtaacctttgataccacttgttaacgacttgcataagttggaacacacacacaatatctggagaatgcagagacggagaacagagtagttgagatagtacttggaaaggaagaagaactagagtctagagttctgttacagcataaaaaaccctacgcgccgtcgaacccttatttaataatcggctggattactctgtgctgtttacccacgccggcccaaagacctttgggttgcgcttcctcagccttttggcccgacacggcccatctcctgctgttgcagccaaaccttctttgtcatttgccgcaccgatgactgcttcctccgcttcgc

SEQ ID NO: 92789 - DNA, 580 bp, Zea Mays
ctcttcttcgctttcccatgtagcttcatcttctccatggtggctccattgtactttgcacatctttatcaccttatttcttgtaacccgagtcaaagtatcgaaaatcttgataggatattccgtgtaagtcagatcaccctgaacactgagctcctccattggtaattgttcctcagggacacggaggcacttcttaagttgagacacatgaaatacattatgcacatcagttagattatctggtagctcgagttggtatgccatctccccaactcgcctaaaaactctcaatggtccaataaagcgaggggacaatttgtccttaactttaaatctcctcattctacgaagtggtgacaccttgaggtacacatgatcaccctcctcaaattccaacggtcttcttctattatcagcatagctcttttgcctggtttgagctaccctcaaattctcccaaattatacggacttgttcttctgcctcttgaatcagttcaggcccaaagaactgtctttctgcagtctggtcccaatataaaggagtcctgcacttcctgccatacaaagcctcgaat

SEQ ID NO: 92790 - DNA, 326 bp, Zea Mays
taaggaaaaaggagaattcatgattcatttatacaacttgtgatccatttgatatatgctaacactaacctgaaaaggatcactagttgtagaactctctcttgtgcaaagtatttccacatattgtcattataggtcttaagcatctaagactaaggacaaagcacaatgaagagagcatctctatacaaaggtacaaaaagggtaaatccacttcctattatttacatatgtacctaaaatcttcctcttatacattctttacatatcttgtataaaaggaaaagaaagcatgtcctttgcatttatccctgcttcatacctag

SEQ ID NO: 92791 - DNA, 367 bp, Zea Mays
tctcactcatgaaaaagatactaaaaccctaagttcccccttaagccattaaaccctaaacattggataaaagggaaaagattatgcaaatggctaaatcatgaaatgaaacctttacaaaaaatgaagtacattaataaagctacaaaatgtagtaagggaagttttacaaaaaggcccaacaaaaaccccaaaacaattcactaagtggagagcacactagagccatcaaaatttctctaagtcccaaatcagccctagcctaaagataagatgtgttcacccttgtgctggcgccaaaaccacttggtccaaataacaaaaagtggccaaactacccaaggcacacccctgaaaaatttgaaac

SEQ ID NO: 92792 - DNA, 963 bp, Zea Mays
gcattagttgcctaccaaaactttgattgatgaaggctatcatgttgtaattttgtcctaagtcaaaactcaagtggagagaaatcacaagcataacatacaaacaaaatagcttaagaatcttactttgtcaagaggtatttcctttagttgttggaccttcagttcaaccgagatctccttcatgtcagctaagtaacctttagctttaattgtgtccgggaattttcctttgtattttccagatacacacaaaggagagttcgctgaaaggtctggaatgtactcagaatccacctaaagaataaagaacgacaattagacaaccaaaaccagtactgctccagcaaaacctgcaggatctttcttaatataatgatacaaagctcccttgcgcgttctagataaaacatgcagaattatgactggccactaacccggcctaaaaagttgttatagtttcattatcgacaaatataatagttaccaaggactcataatctgaagaacacacaatggaaacttaaaaataatgaaaaacttatcatgccttatacagtacaagttttagtttatacatctgcatctccacaattaagcacactaaggtagttttatgaagtacataggtttattctgtccaaacagcatatccacattgcttggcaaggtgggctcaaccatctggaatcaggtaccaacttgacacaaaatggtaaagcattacagcatttgagggcatcatgaactttgaaaatgaaatttgtatcagccaagaaggtcaataaccaaggagtatagattgtactgccacaaggtcactgaaaaaagtataattactaatcaatcatgcacaaactcacttcgaattcatcaagatgtgtcaaagcatcaatggagatatttgccacaattgtactcgacgctctcctgaaccatttaagaatctgattctcgattgat

SEQ ID NO: 92793 - DNA, 410 bp, Zea Mays
tgccccttgaataagttcaggtccaaagaactgtattcccctagtctgatccaatatagaggagtcctgcatttcctgccatacagagtctcgaatggtgacatcttcagattggcctggcaactattattatatgagaactcagcataaggtagactcttgtcccaactactaccatgctgaaggccaccagctctcaacatgtcttacaatacttggttagtcctttcggctagtccatcagcctgaggtaggctgaactaaaattcaacttcgcatctgtattctcatgaaaaaatttccaaaatccgggggtaaactgtgatcctctatccaaaatgatcttcttcagtacaccgtgtagagacacaatccgagccatatataactctaccaattgagatacctta

SEQ ID NO: 92794 - DNA, 339 bp, Zea Mays
tagaagagagacgaagcgtcacaagtcattgctagtagctaggagaagtgcttcctcaggagtgaggagctacaaggccgtcgcgcgcttgcgacgtgtccttggcgagcattttattgtagctccattcgaagctgagcgtgtactgttttgccagagctaggccagttgggaacgagatagagatggttggtggcctttcgatgcaaagcatggacggcagatatgtagtggatggctgttgctcgaggcatttggttcattagctaatctgtttcttgtagctggatcggaattaaccacccctcatgcatgacgcaagacgatattggacaccac

SEQ ID NO: 92795 - DNA, 578 bp, Zea Mays
ctgaatcacacgggtgtgtatttgaaggatggattaggatattcaacgacaggtctaccgacatccgctcagcctctcttcatggacgtgcttcctctgccgcgactgctatgtgggctatgccatggcctgctccacgcatcagtcggctagctacaactacatccatagacagagacggagtcagaaaaaagtttaggagggactgaactaaatcgctacagtataaaagctcattttacgttatattgtatacattttagattaggagagtctgtagtggggctacatgggattcgaagcggtaggggagactcgagccccgcccgcgccaccgctggatccgtccttgtctatagacgtacctatagaggatcccgccaactcttcattatcctctggtaagtgaggagattgcctctctttaatagattatatacaacaatgttccataaattttattctcttaagaaatattcattgtcttttacaataccctctaaaaaaattctatatctatatattcatcgtctcccgtagtgttttctaaatttcatcatcaatatcttatactctac

SEQ ID NO: 92796 - DNA, 620 bp, Zea Mays
ggacctttgggttctctttcgaatttcatgtaaaagtttgggttcaaatcaagtctttttgtccctattgagctctgattgtcctctggaacttggtaggagcagtcaatcgattcatggttgatctgttcttttgtgaagtgtttttgttgtccctggaggttggattgggtcaaggaatcaagtaacaagtactgttctcgcagttctagaattttgtagtggctctcattcaaccctctctggtcacctcactggtcctttagtacatttgttaagcaacttagtgtctgagagttgaacaagtcttcatcgtgtgacaaattttggatctttgtcgatggtggcaccgatgagtacgatagaagaagtaaggaagtcactagacaagtatattgatgtaataatatggggatgataattgatagcactattgaaacacgaagatagcgtgatggttcaatttcttctacatgcatttgcaatggttggcgaggaattgatgcaaaactaaattcatttgttgtgtaatcatccgtgaggagtcgaagacatgatgacaccaattgtcatttgatagttagggatatagacaagtgcacccatttaagtttggtaag

SEQ ID NO: 92797 - DNA, 486 bp, Zea Mays
gcgatgggcagaaggtgattagctgctcgagtaagcagccgccggtagccttctacgtctggagttcgcgggaggccatcaactatctgggctagcatctctccaacttcactcggcgtgttcattgcgcgagcaaagtcggggtacatgttccgagcaaagagaggattctcccagcgcaatcttgcgccttgctcggcttgctcccgctctcggtcctgagcttgttggcgatttcggcggcgagaattccgtctttctcggtgtactcgctcatcgggagtttctcctacttctgaaagttcgtcccgggatacgggatgtgctgggtcctattctccagcctcgtgatgtcgccgcacatttcggcgtctgttccttcgtcgccgcgcttcatgctggggaggttcttccccttgaatggttggctcgttgttggagatgggagacgactccaatctccccccgttgaagaggatgtcgggg

SEQ ID NO: 92798 - DNA, 389 bp, Zea Mays
agttggtgtacatgtgaacttgtatgctatatttcatatatgcttcatacttaaagtttgtatgaaaaacttacctatctcgatactttattatcatcagtaggaacatgggttggctgatcgtgatgctgatcatcagaggttcgaacaggaggagtggatacagggtcatttgtcgggggcgatgaggtagtgggtgggttatctacatttggacaataaaatgataaattagttgatgctgatatgaaccagaaattgaaatgttccgtaataaaataatggttatacatacatattagaccaaactacatccacataatatcatggtgcgtaaaacaaaatgagagggtgcatctaaaatcaaatgaaaggtattggtgatgtag

SEQ ID NO: 92799 - DNA, 514 bp, Zea Mays
tccagatccaaaagacgatgaaatcatagtttttaaaagcttcttcggggcaggacttcgtttcccactacatgagatgatcggagaagttttgaaaaattttgagatatactttcatcagctgacacccaattaaattgttagacttaatgtctacatatgggccctccaaagccagggtatgagtcccaatgctgaagctttctgccgggtgcacgagctgcactaccaaacgaaggccagagcgaatggtcttcatgatagcttcggctgctacaactttgcgtatcggaaggatacaaaggctccggttcttagctatcgtactaagtggctgactggttgaaatgtgaatggttttacataaaggcagacgagaaaagaagggagaagctgatgactatggtcatgagtccattgaaattgagcttcgggatgacaaggcccttgtgccatatgtagcttggctccccatgccaggtagccgaagtagaatttagagtggtagcggccg

SEQ ID NO: 92800 - DNA, 353 bp, Zea Mays
catgacttttggtaggttttatgggaatgcggtgtcttccgaaggcaccgtgccggactcgatgattaatggcgctgcaaaacagtgttccaccgttataatcgaatccatcaaacagtatgggtacggttcgagtagcctggcattcaaatcggcccaactgttcagcaagactttaatcccctaggcttgctcctgggccgaaaaaatgaaacctgagcgctcgaggccataaggctcaaccggaccgaaacaaatccaagatttaaagtcggaagtcggaacagcaaagaccaaagagctctggtgttaagagttcatgggtttgattttcgaggcctcccattagatgt

SEQ ID NO: 92801 - DNA, 480 bp, Zea Mays
aaagtttttgatgcgattggttttgtatatcctgattattgctatccctcgcggaagcaaggaaaaaagaggaaagctgctacttcggccatcactattgtgccgaagggcaagaaaatcaaggttttgacccaccgaccaagatatattgaaacggccacagtgccaaaatttggtgaagaaacatattccgctgccgaagcaaaacaagctgctcctgccactcgaagtgctgaggaatcaactatagtgccgaaggtacctatagttgattcagtgaagctgaagatgagacaaccaaaaaaccagaactagaaaaggcaacagatctgccagaaattctaagccagccagtagaagcagagctaccaaaggttgcaaaagctcccgccaccactcccaagaggagaagaatggctaccatgctggacgccgttgtggagacaacaagagcgctgactcctgctcctgtgaagaaag

SEQ ID NO: 92802 - DNA, 495 bp, Zea Mays
ttagaattaaaccctggcaaacaaagagtgaacaaataataatgataagaattaccacaaaaatagttcaccataacaaaaattacaaaatgagaagccaaagtatacaaaccttcaagttgttgtaggcgaggctatccgcaagttgatccttcgccattgcagacagaccaagctcaagctttggataccccatgttgtccatcatttcatggaaaacattgatctccttactgtctggtagacatgaagtcatcttcgttgtctcctccgtataccaaggacccttgggggtattttagctccttagcatagtgttgcacttcggcaatttgatctgctgatagctgctttcctaaagcatgtcgaacaatatagttcaaatcaccctggggaggtgcttcgggaacaggtgacgtgggcttttctggaagactctctcctaccagctttactggcgcagctcccgaaggtcctacttcaacatgaatagaa

SEQ ID NO: 92803 - DNA, 297 bp, Zea Mays
atcatatccagtccccagcatgcgaacggccaagttactggtatggtctgcagttgctgtgctagtagatgttgttgctttgacaagtactggcaaccttcgcacctctgaactaactcggctgcatcacttttcactgttggccaatagaatcccgacctgaagaccttcccaactagtgtcttggatgctacgtgtattccacattgcccagcatggacctcatccagaagttgcttccccgtagatgagagaatgcatttcatgaggacacccgatgcgccccttctgtatagt

SEQ ID NO: 92804 - DNA, 540 bp, Zea Mays
ggtccaattttgtcgccatacaacttccagatcaccatgttacttgggttgaatttaaagaagcttttcgtgttcatcatgttcctgatggggttttgcaaatgaagcttgaggagtttctaagacttaggcaaggggcagatactgtgatgcagtatattgggaaatttaaccacctttctgtgtatgctatagagcatgtgaacacggatatcaagaaaagggattgctttatgagaggtctcaactcaaaattgcaaaagaagatggccacttgatatgatcttaccttcaatcgggcaataagtgtggctatagttgtggaagaaaaggcacgagtacatcaaaatgtgaagcaggcatggaaaggttctaggtcagggtttctcaatcgtcggcgaaatgccagaaggtggtaatgaggactactggttctacaaatgttccttactattcaactacctatcctttcaaaaaccccacttatattcgtcccaccaactagccaaaccagcttccacctgcaaatacccaagttcc

SEQ ID NO: 92805 - DNA, 509 bp, Zea Mays
ggaagaggtcgaagatcatggcatgctcacctacggctcaaatcgacagtgatggcttgttctctggtttgaagagtaaggcaagtgttgttcggatgtgggggtgacaatgagatggtggttggactgtgaggttctgcggcaagggcatcagtatttataggcggaggaacgacagtttataatggagggagtcttgaccggcgtactgtgagtggtgacgttgccacagtgcagtcgcaacatcccgaggttggcagggtaacttggctcatggtggggcattcatttagttgtgattgtaacaagtgactggcgtgtgctcaagcgggtgcacgaggtcttgccggagtggctttctgcactgaggtatcacttcaaggtctgcaacctgacactaatatagcagctcggtgtgcacgacaaaggctgtctcagggcatagggtgtaggtggggctcactaggatgcacaaatgccaaggcagctagaggcaggcttatgatttc

SEQ ID NO: 92806 - DNA, 300 bp, Zea Mays
tttggtgttactccccagtggggctccgctaattatatgctgctatggtgtttggtggagttggtgctgccgaagctgtggattggttggtgtcatcaattccggcatgactattcttttgatggcgatgtctttgttagcttgcagcctgcacaggctacgtgatgcttttcagttgctttcagctgatttatgcaacttggtctacttccatttttatgcggtgtgttcacttgtagaaatgtgttctggagaaaaggtgtcaatccaatgtatgctacttttatgcttatatgtatg

SEQ ID NO: 92807 - DNA, 965 bp, Zea Mays
ggactcatcaccatgctcataagtttttcccttttcttctcgtctgctttcatgtaaaaccattcgctcgtccaaccagtcggccacttggtgcggtagcctatcacggggccttcgtatcctttcggtatgcaaagttgtagcatccaaagtttttgtgcaggccgtcagcccttgccttcgtctggtaatgaagctcatataactggcagaacccttcgatgttatcactatttccttggcttcagagagcccagatgtaaacgctgagcctgacaatggcattcgaggtcagctaatgggggtatatctcaaacttctttaaaacttcacctatcatctcgtaaagagggaaccgaagtcccgccctgaagaagctcttgaataccacaattaatcttcctttggctccgaaattatttcctctccagcaaagcgaaccagttcatcatcattttccccaaaatatcctagcttcttcattagaattagatcttcaaccttaaatgtggacctcccaaattcaacatggctgggcttagttggacatagaatgctattgtcatcttcaatttcattatgactctcaacttcagtcatgacctgttcagcttcgacattagaggcaccttcggtaatagctccttcctacacaatcagccctgatcgtctcatcatttctgagatgggtgctgtctcagtcgtttcagtttcatctccctcacgggatacccttgcagtggatcttactctggccatttcgttgttcagcttctctcggatgaagttgttcttaagagatggaatgcttgttcgaaagtggaatgcagagagcttcggctccggtgaaaattttcaatagcacaacgttgcaatagcaatgaatgatgtggtaacttctcaccaacctagaagacaaaccaccaaaacacgcacactgactgatcggtggaccaacaagcact

SEQ ID NO: 92808 - DNA, 673 bp, Zea Mays
cttgcctattattatcactatctaaggcacaacatacatcacaacatttttataaacatacatattcacatgtatattcatacatcgaccaaatcatacgaaccgtaaaccactaatctctaactcgaaaccatcatgcgcttacttcccaaatcatgaacacataacacgtattgacccgactcaagatatagaagaagcgatgactactttggcatgtcaccacatctctaattaagccaaaacaatttctacttatattgaccgaacattcgtgtcgagcacaccttatattaccttgtctcgcatacaaccatgttgtggcgtgcactcgagacactaccgattaacttaacgcaattaccactacaatgcacttcaatatacacgtttgacatcacagtgcttcgacagaccccacacttccaatctacttgtcacatccaaacacaccacatgcccactgcattctcatgaccaattttagcacaattatttacgaaaacatttatcgactagacaatgaaacactaaccgatcattcacacatctcatcttaaaaacactaatcacatgtcacataatttatatcttcgatccactctatcctacactacgatgaatacataaaatatttttaacatagacaaacatcttagccgactgcgaaaat

SEQ ID NO: 92809 - DNA, 438 bp, Zea Mays
gcggtgaggatcttttaccctgagaggttatccacaagtccggtgcacgaatccaaacgtcggcgacacgaatcgcggcggagggatccgtcggtggtgaggatagccgcgctggcggtctgatccccaaacgttactgtaccatggcgattggtattcagtctgtctgacagacaaagtttgggcctcattttctcacaaattcacatggtaactaatccgaggctctgcagtaaagttgtagactaacatatcatctccatctttgttatagcagccatgggcaaattcttaatagattagtcataatttgtctccaaagatgatccaatgtcactgaccatataatcttcagcttatttcattctgacagcccatctttgggctcacttatctccaaatttctcacaagaacatggcttgcccacttcagcaaaa

SEQ ID NO: 92810 - DNA, 385 bp, Zea Mays
tgaacagggagggggcccaagattgtagaatagatcggggggattatcccattttgggcttctgaacttagcaaagcacgcctgctgcctccccgtcactttgaaacgaatcacacatacgtgctaattataactatattgtctacgcctgctaaatgctaatcttggaatctcttcgcccagcaacaggagcaacaactaatcataatagcgtgcaccatcatgaaaagcttaaaaaggacgaccacacgcaccgggacaggacaagcaagctagagatcgagctgccccacccagcggcaggcagctcagctaccgcaccgcaccaatttataaccgtcgatatgcatgtcgcaacacgagccatgcagatccccgtacagac

SEQ ID NO: 92811 - DNA, 422 bp, Zea Mays
cggcaatgaacgagttggtcctttggcatcgacgcgacatcaagttgggtgatgagccgatcttaagccgatcaacaccaatgcaacagaaagatagttcaatcattccataccccatggtgcaggaaaatatgacaccgacctccacaaaaatcgttaaaactttcatatcacctcttgcgaaggaactcgacgagggggacgtagacaaaattgttcctcagaatgtcgacgcaaacatcaaaaaggaagcaaaggttgacaccgatgttgaagggccaactatttcaaagaaaattcatcagcgaatcgccactgacgatgtcaagaaaccgtcagaatcagtggcacgctacctgcataaattgcggagagttatgacaaatcaatcaaaagcggaatcagcatctcatggagtacgc

SEQ ID NO: 92812 - DNA, 520 bp, Zea Mays
gccgttcatcatcaggaatctccccaagcgaagcaaccaaagtactgacttcttcagcagagggtcgcactctaaggcccaaattgccatcggtcacaggcggatttgacacaaaaagggtgaaagctttgggaggaggtaggttccaggccgagtatgccactggagcaccaacatttgaaaccttacccctgaggatcatctcaagtcggcttaccaggtctacagaaggaattctcctattggtaacccgagttgagtcggctagccctctatacagatatgccggataggccctgtctttcagtggctgaatgttcttgaaaacaaagtcagtaaccacagcttcagcagttagacctctctctttcagcaatccaacttcagttagcaacacacctgcctcagccacttcctgatctgtgggagactcagtccaactcggagtgcgaacgtctggctgtcttcccgaccgggaggggagagaatttccataattatcaactataaaccactctag

SEQ ID NO: 92813 - DNA, 704 bp, Zea Mays
cagtctcttgggcttttcttattgaggtgctttctcaccttggttttggaattatttggcgtaatccgatttcgaatttgttggcctcttcatccactcaagtgttgttaaatgggtctcctggtatttctattaggcatcggagaggacttcaccagggtgatcccctatctcctatgttgtttgttctgattatggatgtcctcagcagtctgtttcttctagccgaagatagagggctgcttcagaatctgcagggagcgaatgttcgaaatagaatttcaatctatgtagacgatgtggtactgtttttcaaacctattgaggaggagctgaattgtgttaagatgatcttggactgctttggctcagcttctggtttggtttgtaatatgcataagagttgtgccatcccaataaggtgtagtgagcaagctgtgcaggagggctgcaaccttctcctttgcagctcagcttcctttccttgcacatatttggggctcccagtctcagacaaaaggcttagaaagacagaccttatgacctgggttgagaagatagcagatcgactccctaatcggaaggcttgtctacttaatcttgctggtaggacgacgttggtgcgctttgttctctctgccatcccaatctatctcctcattgccatgaatatccctaagtgggtgatcaagtcgattgacaag

SEQ ID NO: 92814 - DNA, 952 bp, Zea Mays
caaatcctgatcggactggtgcaacagaaagttgaccgactggctcagatgtatcgatctctcgagttgccacatacacatattgtagcttgcatattgtggagtgtagcaaccgattgagagatacacataacatgaagctcgatataaaaaataggttgaaattacacatgataaatagcagatcttgccaacaaaacacttagtacaagatctaccgggataagacgataacaccgtattgcccctgatgcaatctattagatactacattagaacagcatcacgtatactttagaaaacccttatgaacgttacttgggtgaacgaatacattctgattattattagcatacactatataatcctttaatcttgatgtgataaacactccctaacttggcttcttttattgggcccattggccaatagggttgtaccaattcggccaagatttggtgccaacacccatactcttggggccctatgccctagggagccttttcatattctaacaaagtactagggccactaggatagggggaatcctaaggtcctctaggcctcttggggtcctctaagactccaggaccctctaggtctccatggtcctttaagacccttgcttggctaattttagggagccttgtaggcaaaggcccataacaagcccctcctagacattccttaggatgcaccacagggtggggagcctcggacgatacaatcctaattccatggatgcctctagtcaaagatgaccatatgaaacgaggcgagtaatataaggattccttccatcacattgaatgtgatggacaatgttgcgatcaagaaagagcattgtctatatacctaaggtcgtagatgtacccatggtcattatgtagtgcgtgctgctgtcaccgtagccacgccatcacatgcaagcataccccaaagcatacccaca

SEQ ID NO: 92815 - DNA, 377 bp, Zea Mays
aaattgggagcatggtgagcttctgcaacgtaccaggacccaagaacagttgctaggaaggcgggtagaaggtcaggatagcgggtcgatggaggaggtgttcacggcggcgcggagagtggatttggggggattccaaattagggcgctacggtggatgatcggaggcaagggtgggagctctggcttcgtgacaacctaacggagctagcggcacactcaatttatagtgtccgagagcggtggctctgaattttgaaggagaaggctggtggccggagagagggggtgagtcaccggcgcaggttatcgtggctttcaccgtggcaaagccaccggcgatggacggacttactgctatggttcactacgacatg

SEQ ID NO: 92816 - DNA, 445 bp, Zea Mays
ctcctttctctgaagactcgttcgtcgggagtttctcctactttcgagacttcatcccaggatacgggctacgctgggtcccgctctccagcctcgtgatgtcgccgaatattccggcgtctgttccttcgtcgtcgagcttctcgttggggaggttcttcccctggcatggttggctcatcgtcggagatgggagatgactccaatctccccccgatgaagaggatgtcggggtagaaaggagttactgcggtagtaaattccttttcgtccttctttgagggcgaaggtgccgaaaagatggctcggcggagctccgttccaggaacgcttgcttctttctttcttgtaattcgtgtcagctcctttgtgggcgaagtggacaacggggttcttcgggcaagtgaattcctggctctcgacttgcaaaagtagtcttcgtttg

SEQ ID NO: 92817 - DNA, 327 bp, Zea Mays
agctggaatccgttatgagcatgaggttaaaggtttaaaagctaaagtcaaagtcgaagcagagaaaagttctaaattatctgaagcccttaaaatgcttcgggacacctgctctggcttcgtgactcgatgctctcttcgcctgcgtgagatttttagtttagtcggggcaatgtcaggagaagagaaatattttgcttgagtttgtggaaaaagaaatcaatgaatttgacgaagtgatggaggggcatggagatttttgtgccctagtggctgcccgaagaacaactaatatatttgcaaaagctaggtgtaagcatttgagag

SEQ ID NO: 92818 - DNA, 1134 bp, Zea Mays
gcaaaatataaggtaagtgcaagtcagcaggatcaggtgatcaactgcacaaaagaatgctcgttaggaagctaccagtcagcactacttcctacttactcaaaagaactaaccaacctcaactcagaacactctaagtgtagtaatgtttgcccaagaaagtcctcatccagaggactctatgtgagtcagtcatgtgcacaaatgcagtgccatggttcttgtgatccagcagatgtgagtatgcaacaatcaaagcttcttcagtgaagccagacataaacataacagcagcatagaggtcaggatgcacatcttgctgcttggtttccctaattgcttcagccacattgttaacagcagctgtcataccaccaaagacatggacatcatcatcagttagcactgacctcttcctttttccccagacctacttccagaaccaccactaacaggcacctccttcttgctgccatcctctggccccttaacatcctcatcagacttaaatgagctcccagcaaagtctaaaggagaacccagtggctcactagagcccatggcaaacttgccagtggccaggccattgccaaagatgacctccatttgcttgtagttctctatgggtttattaagtagttcagcatccttagggtgagcctagatggttatgcgagaaatgaagtcagaattgtaaaagaggttagaatgaaatgcaagtcgggaacttaaacctaacaaaccttaacatggccactagagtgttcttcttctagggtgatcatatggttgtcttaatcaaacagagccccactaagctctctaagtttgatgatcctaacccatctctgcctccacttgcgcaggtgattatacacctgagtcccagtgacatcatgcccactgaactccttgaggtcctttgcaacctgattaaggtgcacctccttgaaccctttgtcagtcctaatcccagttgaaatcagctgacagaaacgcttaagaacaaaagcagacatcacatttgtctatctcatggactgcctggaggctggagggtttggaacagactcagtagcatcagcctgagtctcagggagcaactgggtcattttgtcagtgtaggacacaact

SEQ ID NO: 92819 - DNA, 403 bp, Zea Mays
cgacaatctcaaaactgtgatgcatttatacactgccctatccccatctgacataataatgaactatattggaccaaaaccgggcaagtagttcggtgtcaacatggcaagtccttcgctaaatttaaaagcataaaacaacgataacgctggcacctaaagaacagagaaataaagcgttgatgcttgagttgaaaacccaagcatatatacactatgtaacgcggccaaataaatcagtaccaaagtacaaacggcacgccactgtgtattgtaggcgatcagcaagatagacgacgtagtaatgtgggcagggacaatacctcagagctcctccgagatcggtcagaagaggagccgcgcggcccgcggtgcgcattgcatcggaatccgaggaagcgcg

SEQ ID NO: 92820 - DNA, 274 bp, Zea Mays
gtggtatttagctttcatgatatatttcattttttccgatccacgtgttcgcatacttggatattcttcaacaatgtatgtcgtagtgcggttgttttaagacttactatgggggttctttatattgataaagcccctacttttgtataagcctctcacatatgctctaagctaaatagacaattaacattgttgtatgccgattcttaaattacaaaagtgcggtttgaggggttctgttgagatgttagattcgaattaaatcattgatgat

SEQ ID NO: 92821 - DNA, 546 bp, Zea Mays
ggcgtataggtgagggatgaagaaggaagaagaagatttcatggtgcatttactggtggattctctgctggcttttacaacactgttggctcaaaagagggtatgttctgttgaaattttaataattattatactatgtccatctagaaaatgattcaattctagctctaccccttgccaaactttctaaagtttgaccaaatgtatacaaaaaagtatcaatattcataacatgaaataggtatactataaaaatctatctcagacgaatctaatggtacttatttgttatcataaactttgatgtttttttggtataatcttggttaaacttaatgaattgacttggtattatactagaattccattctttcctgtacagaggagtagtatgcttgaaagtagcgttgaggaaacacattctataatatatgcactatgattttcctcagggtggacaccacagacatttacatcatcacgaaagaatagagctgagctgacaaagcaaagcatatacaattttcttgatgaagaggatataaa

SEQ ID NO: 92822 - DNA, 404 bp, Zea Mays
cttgactataaaggggccctcccacttgggctccagcttgcccctagactctgtccgagttgttcggacgagtacgaggtccccttcgctgaattccctcgggatgactgcgtggtcgcgccatgcttttgtctgggcttggtacttgtttagggcctgcagggcgaagactcagtctccgtcaatgagatcctttgaagttggctcgtccacgtcggggacggctgatggaactgttcgcggggacccatgttttatttcttgtggggtcatggcctccgatccgtatagaaggcggaaaggagtaaacccggtcgccctgcactcagtcgtgtttagtgcccagactgcctcgggtaacaaatcggtccatttgccctttttttcatcgatgagcatctttt

SEQ ID NO: 92823 - DNA, 336 bp, Zea Mays
gctaatctgcactcgattttgttccacattcacatacatattgtgcctgtcctacagctccacatactatatcttctgatcaatacagatttgaccttgcaatcgctgtttcactacctcttggtaagtatcacgaaccagcctccgattgtaccattctttgcttgtatttcgtcagacacttgtaagaccttggtaagatacattagagcgtgttcctgtgttccacccgagaggagagtgtagtgagattattagggataacctttaccgtttgttccctaattttgtgtttcgatggcaggcgacgacgaagaagcaaggatccctacatac

SEQ ID NO: 92824 - DNA, 295 bp, Zea Mays
agagaagagaggaagattacaggtatttctgagatgactaggggctttggaggaagattccgccccagacacgttagaacgatccataattccagcacaaatgatgacagggcaaaccacacccaaggtagccagcaaagctcataatcttcgagaatgcagcaaacctcctacaggccaccatctccaagaggcatagggggaagaagcttcggaggaaggtttagcactcaacccaggagattgttttgcttattctgtggggaggataagggacacacaacaaggatatgcc

SEQ ID NO: 92825 - DNA, 442 bp, Zea Mays
gaaaaaccttctctcctttcctcgatattaacagacccttcttttctcctaccagatggaaggctcttgggtcattaggacatcctactgctcagaggaggaaggatttcctcaccttacggagttgcgcgctacacatggggatccgcaagaagcccgaatatgtctggaaggaataccgcgaaaatggagtggaaaaatgctctatggcggtctacctgggagaaagccaaagttacccaaaccaccctcccttccaagtcaccttcatcgggcaccgctttccagacacttgccaaagtgttgcccgaaaagcccttaaacagctatgccaaaactacagcagagagatctttgaaaccccccttcgttacttcccacctagcaacaaaaatacccccacctggaggaaaagacttcaggccctatcagggagagaccc

SEQ ID NO: 92826 - DNA, 468 bp, Zea Mays
ctgtatctgacgaagcttttttagaaggaaaaggagccctcgataacgaacaaggcagctgggccaaaaaaacaaagaattattacagtgacagaagttattgaagggacaccaccgtcagcttcggcttcgaaggcaccggctgttgagagcgcaacagctaccgaagctgcacctgctgaagctgcagctgctgaagctgccacggccgaagatgtacatttagaaagcacactttctaacattgataagatacttctggacatggccacagaagaagctgctgcagccgctaaagaaacgatggctacagtacctgagaaggagaaggaaatagccgaagacgctttggaagaggaaattttcaactttcaaacttagttggacaagagttgacgaaggctaagaaagaagagttaaaagaatatgccatatcctgcggatatcaaccaggggcactacttttcg

SEQ ID NO: 92827 - DNA, 673 bp, Zea Mays
gcacgtctctgaaggttcatcattaaccacatgtcctcgaatgcaacaaaggctttttgatttgaaccaataaaagcatgggctggtatattgacactgatggtgtcgatgccaactgaagatgcccgcatgtaccaatcatgcaaccttttaatattagccgggaccttcattagtttctcaaaagtgagtagtggtctgcccgacacatattttttaggcacgcttttataatctgccttagttggcttctttatctttgcggccattgtctcagcttttttgcggactcctcgagatcggccaaatcaacagtgtctgacgtgaggctccgtccaatccctttcaaaaaacgagctgtgccagcagtggatttactcttctttttcttctcgaacggggacactaattttggtatagaaactttagatttctttgatggtcgtggatcccttgatggctgtggagaaggtggatccctgaagggcgatgtatgtggcggagaaggagggtcagaaagaggatgaggagcagcatgtgaagtttgaggaggtgatgatggatgtacaataggaacagcaatttgagaaggcggagacggttgggcctgcgacgacggctgtcgtggtggatcaaccaattcgacatcccttcgaggccaaaggataaaatt

SEQ ID NO: 92828 - DNA, 527 bp, Zea Mays
gttcagctgcaccaagatataagttttttgtcagatacgaggctaaagtacttacgaagctaaaatatgacaaacgtacatatacgcctttcgcactctgtggattcctcagcttttcttgtttcctctgaagcaagatgagtttcttcttcgttttgcctagtagctttgtctactatctctcggtcgtcgttcatccacacttcagaataaaatttagcaccaaggggcatagcttcggttgaaggttctttgatgtcatctgctgaaactgagaattctggctgaattacagccttcacatgttcatagccagctttttccagcagcgacacagcccccgagctcctacacaggcaccaaaatcccccctgccagttagcacttcgtcaaatgcttcgattcacccttaatccatctgatcacaccctcgggatctccacggataaaatttcgctcagccgagaatgcgccaacactagaaaaaacgttctttagcttatcataacattgcatagcgacggtgt

SEQ ID NO: 92829 - DNA, 531 bp, Zea Mays
ctcggactgtggtgcatttatggctcgcgccccagcccgcggtgcacttatgacctatcggactaagcatgagtgtgcagatcgcttacagagcacacaagacaagccacgtcgagccacaagctacggaggccaggggttggcttagctcgaatgatagcactcggtccccacgctgctcgcgccatccgctataaagaatatgagacaaccagaccaccccggagcccacaggcgcacatggctagcttcaccccatggtggaacgcttggttttaccatcgcccggttactccttgaggacaccaccgctggcggcccccctccttggcctataaaaggatgaggtcgatccccagatgaatgagaggacagtgagacaagagagacccaggcagacattcagacgcgaagacgatgggccgacgagaggaaggaggacgcactgacgaggacccacaaaccggagccccgcctcactctgtagcccttagtgtcaccacctccacaacaagagacttgggagcctct

SEQ ID NO: 92830 - DNA, 310 bp, Zea Mays
catcagtcattccgacgctgacatggcttcgtcaccactcggacgctatctcaaaagcgcaaatgttgacaataatagctcggccatcacccctaaaagcgtcgatgtgatgcccgagttatttaattactatcccaaaggagtcaacttcataaataaggcgggcgaaggaatgattcaaaaactctaagttatgccacaaacacaatagcaagataatcggcacagaggagacgaaaccattcttcattaagggaagttggcatacttacaaatcaactcattatgagttgatatttccctactgctg

SEQ ID NO: 92831 - DNA, 918 bp, Zea Mays
aaaacaaataaatgcttctgaagaaacatactgaacaactaaatatagcacatcaaccaaatctgtgaaaaatgacccagttaccatcagaggaaaatttaaggaacagttcagactctgcgaccttggccccctatcacacagtctagtggtccttgtaggtaggactggaggttcaaattatccatcttgaatagcagctacaaggaaattatatgcctgctaaactcaactttcatcagatctatgcatgtttgccatttctccaactcaaggtttgcatcgcaaacagtagcagttattagttgttaacctggttgcgcaattcaatttagagcctttcataaagttttaacaaatttcacaacaagaacctcagcaagcgagggggagtcgttgcttggatgtgcacgccatctgccagagttctttcccaaagcctagggaccatgggaaacaacgaaactaaatcgtctctcccatttaacttaagtttgatcaaggacctttaagatttattacttattagcaccaaagaaaattagacaaactgagctgagtgccctacaacaaaaggacatttggcactaagacagccaggagttccgcttcagtttcgcgctcgacataatgatacatcaatatcataatagagtagatagaaacgcaagacagctaatgacagcaaggatgaccgaggaccggaaacgaatatttccggcagctgatgaccccctccaagcagaccagcatctgaaattctttctagataagaacatttgatgctaaaagtacacctaaatctgcaccccgcgggacaggggttagtttacaatggtgctttacacggtgacagcaccacagccgggagtggaaagcgggagcggtagagaaccgaagcaacggatgtgattccgt

SEQ ID NO: 92832 - DNA, 577 bp, Zea Mays
atggcaatcccgctgtcgcttttggtgccaccagagaagatttcttcccggatgggtccgcgaggcggtgcaagatgccttcctgatctgcaatgaaggagatggatcagaagtggaagatcactccaacattgaaggtgatcgtggtgttgaagatgatgccttcctacgtggcgcgccagctgtcggtgtttgtgacccgaccgtgcaccacagggttacccacgtgatgcttttgggtaggacgtcatcgttgattgcgactcgatggtacatgaagaagcacttcgatgttgcacaagggtttatacaggtttaggccgctttggaatgcgtaacaccctacttcctgttgtggctgtgtattggtttctggagtatgaaggttacagcaagtgagctttgcgattgctcaggtgttgtcgatgaggatagggtgagatgagataattttgtaggggttccccttcggccttatatacacaaccatagagttatccctttacaagttgtgatcactaaatatttcacttatctccttctttgtcgcagcttgcagccctgcatatccaaggtc

SEQ ID NO: 92833 - DNA, 320 bp, Zea Mays
tcctccatggacccagcctccgcgtcttccattgaaccagtcggctcgcacatcgccgcgagttccacaacaaaagctttggaataggcccctgcatctacttcccctgagcaattcgatggaatcccggtcaacgtgcgtcattgagcagggccccagttgacgttttctttcccctcttcgggtgggccttgtgctcctcatacttgagacccatctagctaaatatgcaattacgtgaaatgtggcctctgcgcagagcaacacccttctcaacttcaacctccatcacaagaccaacaaggtcctccgcctccttt

SEQ ID NO: 92834 - DNA, 433 bp, Zea Mays
ccaagtaggcctccatcaacttctggacatgctcatccttggcttgcttcagggcttcaacaacaatgacttcacgactttccaaggcagctacacgggcttgagctatggtgagatccacatggagcttacggttgagcttctctgcatcttctgctcgggcaatcatctgacggtggtgccgagccaagaaatcatatcgtgcatctagggtgagtaggtatgcagtgaggtacacgactgaggggttgtcctcaagcagcagctgcccttccaatgcacgcatcctggccatccaaactggacggtttctctgaaagggcggaaagaatttgagcagtgtgtcggccacttcttcttcatagatctgacacagggtcctcaatgccttgcgggcgatgacttggcaggtgtctttgaatctgtgcccagc

SEQ ID NO: 92835 - DNA, 414 bp, Zea Mays
tgtggagatgcgtcaggccagagccagtagtggtagcgcagcgaatcgccattcggatgcgtacgatcgagcggaccgattatcatttttatacagcgcgttccatgcatgtagcgcgacgactattatattccgatgctccgaccgttcagcacttgattggcctcaggttgtgcagcggatgtggcgcagtcacctaacacgtgatcgtcgcacgcgctggcactgcagtgcgcatccgatccgcccgatcggtgtctccctatagccacgtacgggaatagcagtgttttgtgtgtttgtttcatgcatggataggttgtccaccatgatttgctcgcgcatgcgaaaaataactaggtgcgatgtaataagttgaagctaacaaattgagaaagtgttggatacttgact

SEQ ID NO: 92836 - DNA, 710 bp, Zea Mays
ctgaggcgtccacccaacgcaaccctaagaagggcaagaagaagaaggcacaacagggccatcgtgagaccctcgccatagatcttgtcactgtagcagaaaagcgcaacccatgagccccccaatggggatcgtacgtgtttgataagatgttgaaggagtcctgcccttaccataagggccctgttaaatataccctcggtgagtgcgacatgctccgaagcttttacaataagcctggtcctttggcaaaggaaggcagcaagaaaggccccagcgacagagaagacaacaaggacgactggttcccgatgtgcacaactgctacatgatatttggggtgcccaccaccaacctgtcctcgaggcaacaaaagtaggagcgtcgagaggttttctcggtcgaggtagcagcaccagtctacttagattggtccgactgcgccatcaccttcgacatggacgaccatacagattacatctcgaatcccggaaagtacccgctcgtcgtcaaccccatcatcagcaacactcgtctcactaaggtgttcatggatggaggcaacagcctcaacatcatctatgcggataccctggagctcatggggatagaacgttcttaggttcgggccggggctgcgcccatggcatcactcctgtcaagaggatacaccccctcgagcagatcgatctgcctgtcagcttcaggac

SEQ ID NO: 92837 - DNA, 482 bp, Zea Mays
acgagcgcgtactccgcatgcaaaggaacacccattgtcggaactaacacgtcgatcaggaatgtgagcacgagatggctgagtgcaatcctaggcttcctcatgatcattagcttctcccccgcaattagcagcttgagtttactccggtcatgcagactccaagccaggttggtggagtactaacttggattgccaataacttacctcgcacgcccgacacggagggttaccgatagatcctcacttgggaggtaaatcaccttctcttgctggaccattcggaggatgatatgtgttacctcatcaacaaccaacatgatgtgtggagcaacattgaggcatcgtgtgcatgacaacacgaagaagaactaatgcgataaaagggtatgaccaggactacaccgcctcactctggggagccaagggctaggcagactccgttgctgccttgacaaataacccatcaccatgtcactccg

SEQ ID NO: 92838 - DNA, 737 bp, Zea Mays
tgtgctgttgtgattatagttggtcttgtcgcggacggtttgatgttgtcgtttctgcctttgttgtgctagtccggttgcacccttaggtgtcttctgcgcggacagtcttcgcggtaggcttcggttttttcgcacttgttgtgctagtccggctgcacccttaggcgacttctgcgcggatagtcttcgcggtagactttgattttttcgcacttgttgtgctagtccggctgcacccttgggcgacttctgtgcggatcgtcttcgcggtagactttgattttttcgcacttgttgtgctagtccggctgcacccttgggcgacttctgcgtggatcgtcttcgcggtagactttgattttttcgcacttgttgtgctagtccggctgcacccttgggcgacttctgcgcggatcgtcttcgcggtagactttgatttttttcgcacttgttgtgctggtccggctgcacccttaggcgacttctgcgcggatttgtcgcacgcgagggtggctagcgcttagcctcgtggtgacctcgtgttggtcgaatgtcgaagaccgtcgtcgcggtcttctttcgacgcatgtttttgcgggggatttttcacacatatattacatggttctgcctcgttaaaaacctcaccccccgggaggaaaagagtgcgggccggtacaagattgtttttgcgaattacaagggcgaaatcagccctgaggagtcaaacaaaa

SEQ ID NO: 92839 - DNA, 569 bp, Zea Mays
gggaataacgcattggctcagcaaaacattttacaggcacttcattcaagtgggattggaggtcattctggtattcaaggtacctatcatcgtgtgaagcaactttttgcttggcctgctctaaaaaaatcagtgcaacaatatgtccaatcttgtgagatttgtcagcaagctaaaacagaacatgtgaaatacccgggattattacagccactgcccattcctcaacaagcttgggagatagtgagtttggattttattgaaggcttgccatcctcagaaaattataatactatccttgtggttgtggataagtttaccaaatatggacacttcttagccttatctcatccattcacagcattgaaggtagctcaactatttttctcgcaaatttacaagttgcatgggctgcctcgcatgattatctcggatagggacaggatcttcacgagtacgctctggcaggaactgtttcgactgtcagatacagtgctaatgatgagctcgagttatcatccacagacagatggacaaactgagagattaaatcagtgtttagagggttt

SEQ ID NO: 92840 - DNA, 385 bp, Zea Mays
gggatgggcgctcggccgtggatctggccacgaacggcccaaatttaaccacgcgtaacccttcgctggtgcagatcctagccgttagatcgtaaatggacggccgcgtagtgatcctaacattttaaatccctgccgtcggttcccaatcggatggttgtctgcggcgctcttagatttatccacgcagatctaatccacaccacccgcgagagatccgacggccagttcgaggggataccccttcgcgtggcataatatctaaagagacactggattattgatgattaaacccgcagtccttccctggtttagcctgagtctggggaattcttgtagaatagtccctgcacttctcagtatttgatgcccaatccagagacta

SEQ ID NO: 92841 - DNA, 667 bp, Zea Mays
agacgagggatgaggcttatattactcgcaccaatgtgctcacagtaggggttacaagcacgtcaggagaggggaggaccccaagtccctacgagtgattgaggcaagtgccaataccgaatgaaagagaaaattgctaagtgttcccccctttggagccatggactgtcctatttatagacctagggagagctgccttgtagatgggagctgaccccgtgctatgaaggggtgtcttcatgtcctgtagacagtatgacctagaactttgttgttgacttgtgcttgcttattttcggttgagagccaaggccgaggccaagggctcggtcacgtatccgagccccccttgcgtggggttgcccataccgtagtggttgacacagtgctcgccatgggaaaaaggctcttacgggacacgtcagctccactatttttatgacgttgggaagttctctatcacagatatcgagggaagagccgagctcgggcgaggcggaggtccgtccgaggttgtgaccgagccttgtcttgagacttgatgatgcttgccacagttgacgcagtggccttccatgggattcgcgggggagtaggtagccaaggcctaaattgggcgagtcggagcttgcgctcgaggttgagtttagtgtcgggcgagacggaa

SEQ ID NO: 92842 - DNA, 361 bp, Zea Mays
cgacgcgattggaagagacaagctatttgaatggacaaccaaaagcaaaagagaatgcttctctataccatttcgagattcaaacacccccgaaaaaatagacagccccaaacctttgaaataaaggcctcaaacatataatcatcagtgacaaatatgcccaatttaaacatgaaaaagaaataactacataatttgttgttaatgatttatcaaacaaacaccttttattgtttcattccaggtgtgtggaaataaacactaaacgaagacatgcatcttctactgtgtgtatggtactttgcacaatcaatggagacaagcaattcgacattatatgtaagaataagatgtaacgaac

SEQ ID NO: 92843 - DNA, 972 bp, Zea Mays
ctgaccatatcctttagtcttttgggactctttcctcgtccattattaaattgctaccatttgacctctattccgttttgttattgacatgctcgcatccttacatttttaatacccttatcccttgatctaaagtacttacccttgtacctatgttgcctatttaaacagtttagtttatgtgtccatgaccttcttgtcttctgagatcctttcttattttgttgttaagtcgctatctttcggcaatttctatgcccctggccttagtatgctcgtatccttggaatcttgcatactcttatattcttatgtatgcttattttcataccccaaaaactgttcaagacatttcagttaacatgtccttgaccacccgtttcttaacggtccatgagcgatcatgttatgttgcccatccttggtgatctcgttgttcctttataacttctctcgataatgaattcttacttcaaccattctattgcatcctcacctatcttacccttgattgtttctccactttgccacttcgcgagtcttgccttaactctatcctttgtcatgcctttgttattatcaccttcaccttaggcacctctatatcttacatgatgtttatcttatccctaccctttgaaatctcctttccatctcaatctgagagttgtaacttacctactttccttggctgtatccttttcggtgtcgcctgcgagttttttttaactctatcctttgttgtgctttcgctcttcgttgcctttacctctctcttttcttgatcttaccttggtgatgacattatgtctgttatttaaaatctacaatctcctatccccatattgagggtgatgttttacttatcttactcttggcaatatcctcttctttaccgcgtgtaagccttgatgtaactccattctttattgtacttgtaccactggctcttctgtgccttcatcttttccc

SEQ ID NO: 92844 - DNA, 350 bp, Zea Mays
gatctcaacatgaggcagagaagatggctagagctgatcaaggattatgacctagaggtacattatcacccaggaaaggccaatgtggtagcagatgccttgagtcggaagttgcaatgcaattgtgttctaatggattctcgtattgacaccttgtgtgatgagttgagcaaaatgcagattgaagtgattccttctggtgctttgtctcacctttctgttgagccagctttgcaagaccagatcatcatggcccagctcagtgacaagggagtgtagattatcaaggagaatctccatcagaaggccgagaagtataaatgtttccgccaagatggaaagggtatatt

SEQ ID NO: 92845 - DNA, 363 bp, Zea Mays
cgacccatcaggttattgagacattagtggaagaggtaggggatacagtggagaggactgtaatgagcgcaagacaaatcctggttaaactggcaaactgcgttgatgttggaagaccagctccgctgtctgctggaattgccctgtcacctgaacagcagcagttcctcaaccagcttaccaagcagatttattgcatcctcccagccccggttgatctgatcctgaagaataatagcaccaaaacacttgctgccactccccggtgcagccgtcatattgcagggatgggggctgaatttgatatccacgacttgcgcttaagattcacacaaaaaatcatgaaggccttgaaattgatca

SEQ ID NO: 92846 - DNA, 677 bp, Zea Mays
gttaacttcactccgggagcttcctcttatgcgagtatttctggagcatatgtgctaccctctgcggatggcagagagcagggagacgtggtgacaggtacgatctcagttgattcgtttgtggcccatgctctttttgactctggcgctagctattcgtttgtttcgaagaattttgtgtcgcgggctggtctttcggtgcagaggttgggtcacccaattatggttagttctgctaatggctccattagtagttgttcagtttgtcagggttgttccgccattcttgctgatgaggtcttttcagctaatcttattgtgatttccttgggggcatttgatgttatcttgggtatggattggttatctcagtatcgcgcagttatatcctgtttttggaagacaatgttattgcaggcgtcgtcgggtagggaggtggtatttttgggaagttctccaaagttcacgtgatccttgttgtcgcaattgctcccggatcatcggtccaggatgttgggaattttttctctatggtggtggtgagtgaggctgctttgcgggtgcaagacatccatgtggtgtgtgactttgccgatgtgtttccagcagagcttccaggcattccatcggagcacgatgcagctttgaaaatcaaactgattccgagtacgcaacct

SEQ ID NO: 92847 - DNA, 483 bp, Zea Mays
ctactagctcctacgacatactccgtatacaattgcctggctacaggtgatttcagattgaactgtattgttggcacttattccaggcaggctctgagcctatctccagcagatccactatttcaaactccaccctgtaagttccgcatctcctattttaccttatctactagagagtctgacatacatagcattattcaataatgcgttttttcaaaaactattattcaagcatggaattccaattattacaaggcaaagcttgtgctttaatttgttcctccaatacaatcgacggtctagagagtagaaactcagataccatcagcacagcagatccgtgttgggcactaggcttcacgggaaagacaaccaagtcttatcttaaaaacaaagggactcgtgtaccgttctgctgattttgctccttcaccagacagcacctaacctggtttcttaacaaggtggcaagccaaccaacaa

SEQ ID NO: 92848 - DNA, 415 bp, Zea Mays
aaagcatatgccggggggagagattgatgggaataacaaacacgggccaacatgtgcttggggcagcggtcattccatagggattgaacccatctgtggccagcacaacatgtacgttacaagcctcttcgtctttctcatagtgaattgcatcaaagtgtttttatgcttcatctaggatgtgtgtaccatcttgttaggattgtatcgtttgctatttttgtgccatgacatctattttgtggattcctcggtcatgtatagacactagatcctcggtatgaatagaagatggtgtaggattgtcacaggtatgtcgagctacctcttttgtccatcacctgagtctacctccatgaaccaagacattttacagtttggacaataattttcctccacgtattatttcgtaaat

SEQ ID NO: 92849 - DNA, 720 bp, Zea Mays
cgtggattgtccgacaagtaagcagggaaggagccactcctgcagcaaagtcacggaccatccagcctaggaccacggaccgtctcccataaatagcaccgtcaggtcgttcatctcagtgtttggtaccagatcgaagccaacactcagccattgcggtggactttgtagggacatacttttcaaggatgctttaattttgagtttaatttcagtcatcaatcggcgcgtgagcttcgtttgcatcacattactctgattagggaatgatgggggacgctagaatcatacatcatatatggagtgaacctagcggtaggtcatttccctgagttgcggtgtggtcaactgcaagttgagcatggcgtgtctgtcctgcaagttgagcacagggcatatgagatgggagtatatcatttcactacacatgcattgtggattttggtgtgtcagctgcattattgatccaattccttggtgcataacatggagaattcctgcctgcattgtggttgtgcagtgcactcttcaaattcagtaaagctgctgcgcttgtatgcgccaccaggcttactttttgttaattaggttgtggcagctagccatggatgcagcactagcagcacctgtgtgcatgactccatctccttcctccgcatgtgtttgttttaacttttaagtctataaaacccaagagggcctgcgtgcctctcagctcag

SEQ ID NO: 92850 - DNA, 597 bp, Zea Mays
ctaattggcggaaggctatggaggaagagttctccgccttactgggtaatcacacatggaatctggttcttcgtccccactctgccaatattgtttctggcaagtggatcttcaaacacaaattcaacgccgacggttctcttgagaggtacaaggcaagattggttctttgcggttgcagctgcagggggcgcacccttaggaggggggaggagtcgcaggcatgatgggcgtgaacggacggaggagtccggacacgaggagcgagcacgacaatggggtggatcagcgcgggggaagcagcaccgggagagggcgtggcttatgcagcggaaggagaaaacatagtacctgataccatgcaagcaatgtaggttgcaagatatagtagatgtattgttgagaaacaatgtacacaaatatataggcaaggacaagggtggctattagaaacagaaccaacctccattatccttgcctaatattactcaatctacaggatcttggatttatagtccaaggaaacctcctgagatatggcaggctgggctacataaggctaagcctatggcccatatgtatataaacttgtctaac

SEQ ID NO: 92851 - DNA, 376 bp, Zea Mays
ggcttatcgattggagttgccagaaaatgcacagatacaccatgtttttcatgtatcttagttaaaggcatttcacccaaaacatactctagtttttgctgagcttcccaaggtggcagatttgtctggtccagggatttggcctgaggaaattgtggacagaaggttggttcggaggggtaatcatgcagtacctcaagtgatgattaaatggataggtttgcctatttcttcagcaacctggaaagatttttatgtggacaaaaataggtttcctgatgccctctcttggggacaagcgagttttgttggggggaaatgtaacgaccgaagcagcggtgagtttggtgtagtagtagatctggagatctatggg

SEQ ID NO: 92852 - DNA, 454 bp, Zea Mays
agacatgagtacatagcattggcattttcattagtaagcatctcaaaagaatttaactttctcatagcaatatgatgtctctcctcacgctcacttctagtcccttcatgtagagcacatatatccatccacaaatcatgagcatttctatggtttcttactctattaaagacatctttgcaaaggcctctaaaaagagtgtttttggccttagcattccatttctcatagttaaactcttctcctacaagatttgtgggatctctaggttcggggaacccttgtgtggcggctttgtagacaccaatgtctatagcctctaaataagcttccatatgaattttccaatatggaaaattgtcaccatcaaaaacgggaggaggtctatccccaccagacatcgttactctagtggttaagctaatctaagagcaacaaggctttgataccaatt

SEQ ID NO: 92853 - DNA, 362 bp, Zea Mays
gatggctagagctgatcaaggactatgacctggaggtacattatcacccaggaaaagccaatgtggtagcagatgccttgagtcggaagttgcaataatgcaactgtgttatgatggattctcgcattaacaccttgtgtgatgagttgagcaaaatgaagattgaagtgattccttctggtgctttgtctcacatttccgttgagccagctttgcaagaccagatcatcatggcccagctcagtgacaagggagtgcaaattattaaggagaatctccatcagaagactgagaagtataaatgtttccgccaagatgaaaagggtatattgtggtttgaaggcagattggtagttcctaaa

SEQ ID NO: 92854 - DNA, 1033 bp, Zea Mays
taattcttgtagaccaatgagggcagacaaagcaggagaaggaatgccactgctttccccactggctatgtagcgccgactgttcttccgaatccgagggatttcatcttcttcttcctcctcatcttcatcagcaacacggacagcacacccattggggtcagcgtcagataggtcacacccattgggatcagcttcagtaaattcaggcacgggcacttcctcagcagcaggagccgaaggaccagcatctcgatccaagctagacactcgccgaagacgtctcttcttctttttctgcccatcagcaggagaagcaggctgattggctcggcaagggcgtttcgggcgaacactgacaggcctctgaatatctaaggctttactagcttctaggagaggcgccaccgccaatgttccagcaggagcggcatcagaagaatcctcggctaacatatcaagcatagcacttatctctgcatcactaggatccaaaggcacctcaaagtgaacctgccgttcatcatcaggaatttcttcaagcaaagcaaccaaagcactaacttctttggcagagggtcgcactctaaggcccaaaccgccatcaccagcaggaggatttgacacgaaatgggtaaaggctttggaaggaggcaagttccaggccgagtaggcaacaggggcaccaacatttgataccttgcctctgagtatcatttcgagccggctcaccaagtccacagcaggaattcttctattggtgacccgggtggagtcagctaggcctcggtacagataggccgagtatgccctgtccttcaatggctgaatattcttgaagacaaagtcagcaaccacagcctctgcagtcagacccctctccttcaacaatccaacttcagctagcagaactcctacctcagccacatcctggtctgtgggggattcggtccagctcggagtgtgaacatccggctgtctccctgaccgtggggggagagaatttccatgattctcaacgataaaccactcc

SEQ ID NO: 92855 - DNA, 530 bp, Zea Mays
gcgcgccagggaagtgaccagacgctgctgtctgcagagcggcagcaaaaaaaaatttgcgcgccagggaagtgaccggacgcagagcggcagcaagcagaaaaaaaatatttctgcgcgcagtgacaggacagagcaaaataaaaaatctgcaggaggaagggaccggtcaagaaaaagtgctgcgagaaaaaaaaaggcaggtgacagacctgcgaccggtcaaaaaggtgctgcgcgactgaaaaaattgcaggtgacagacctgcgcggacaggccggtcagagaccggttcaaccggtccaccaaggcggttcaaccgcttttaaccaggatggtcctggtaaaaacaggttaaaaacagctgagctgaagttcagctgctaagttcagctggcctcctccagctgaactagaaagttcagctggtcaagccagttgagccccaaaagaaatcttagcactaaaatgcattcaaattttaacaatttcaccaagtttttgaaagatcatcacatagctttaaaac

SEQ ID NO: 92856 - DNA, 799 bp, Zea Mays
gttcgttttggcacacagctgttgaagggagaggctcaaatttgatggagaggcgtgcaggtagctcactcctcttcaccgggagtcctgacctgggatgtttttatcagacagtttgaaaggaggttctacccagtcaccttcctagagaagatgaagatagatttgcagtcttttaagtaggataagaagtcagtcacagaatatgaagtgggctttaacaagatggtacgttttgttcctcatgtggcttacaatgaattggaaaaggcgagccagttccgtcagggcctgaaaccctctatcaggcatgctttgggcgcctttccgctggtggattttgtactacggtggagcaggcattgggcgtggagatgcagcatcagtacaccatgcttggaatcttagaagaccttgggggttgatcatcctcgtggccaggacgcgaggaggggcaacattgggggtttaacccacaagaggggaaagtcacaacaccagcgccaccactcctatcgtggcaaaccctctgaatcaggtactttaggagggagtactcagaggtatccggctgttcctaagcctgggttggggttggtgtgtttccgttgtggtgaagcgcatcgccgtgccgagtgtcagtggagtggcaggtgctctatctgcagccaggatcacaaggatgtggtgtgtaggaggaatcccaatgggaaacttaaatgggagctagtgactttttcctcttcgcagggcactgtcaacatgatgtcaagcgctgagcaacaattttctgtaccac

SEQ ID NO: 92857 - DNA, 797 bp, Zea Mays
gggaaatgccgaaggaagctgccgctggctccagccaaagtggcttggtttatctcaagtatacgttccgatacagaagtcaatttgatgagcaaaatgatgactggctagacactatagaggcaacgagtgatgagctactcggagcctactcgaggacagaagacggagccatgacagttgccttcggtgctcgagggaaaaagaggctgaatagggttttcgatgttattgggtttgtttaccctgattactgttttcctgtccgaaggcaagggggaaaatgaaagttgctgcttcgatatcttctggtgtgccaaaggcgaagagagtcaaggtcttgacacataggccgaagcctattggaacggtcgaagtgccgaagcttattgaaagtgcacagactggtctactacagaaacagctcctgtgatgtcaaatgaagctagtgcgggctcggtaaaagagccgagaccaaagaaaacagcagaagatcagccaaaattgctgagttgcccaactgtgacagaattgtcgaaggtatcggctactgcaacaacgactccgaggaagaggaggatggctagtgtcgtggatgctgttttggaatccgtgaaaacgccaactcctgcttctgccgaagcttctggcgagaaaattgaagatgcaagagaagcggtcactgcaagcgcttcttctgttcatgctgaaacgggatcttcagaagctgctccagtaaagttggtgggagaaagtcttccagaaaagcccacgacatctgttcccgaagcacctcc

SEQ ID NO: 92858 - DNA, 640 bp, Zea Mays
gtgggcccaacacttgagaggcaagaggattatggtgcacaacgaggcagtaggtagggactgtagcgtcttgttatgcgtgtcccatccgtgtacagggtaggggtatttataggtaaccaggaggggcagtgggtccccaagtactgttatgcccccggttacccgctacattcctagaatattccccttaacatggtcattacagtggacggagtacaataatccagacatactacgaaatctaccccgcaatgaggcttacaagtgggcccgaaggactacgaggtagagcctgggtctctacgtaatctgtcgtggcctccgcttgtgtgtcacacccttgattccacgaagtcacatcctagccttcgtgggactaggagttcgcatctgggacaaggccttcagggtgcgtctaaggctgtagtgagccccctcctcgtctgacgtggacattcgcctttgcccctatcgaaggaagatgagtggagactgatgcagcctgatccgaagtacccttcgattgatgcacctgtataagaaacgtctggtcgtagccgggttagacagatcaaggttgtgttcgacctccgctccaacagcccgctcatctgtcatgcatatacattgttagtgg

SEQ ID NO: 92859 - DNA, 866 bp, Zea Mays
aaaaaaaatagagatgtgattatagttgcataatataaaaacaacaaaacatactttcaaaaggtcgatctcttgctgcatacaccataccagaaaagcattgtgcagaatcgttaaacatgcaccaaagacaattaattagaaccctaggctgcaggaatacaagagcaattgcaggaaatagtaatattcaccaaaaagagggggaagtgttttaacaagagctgtataacacagtggtactgtggtataaatggttatacaagaagaatgcaaaaaaaatgtattacttccttaaacccagtgttctaaaaaatcaagcagtgaccgcactagtgcatcctgtggtacttgatggcgtatgtggccaagtaagtccgaccgtatgtccgtatggtaaataagcaaacaaaacaactaaagttgttatttcacaagctctggacagatgcatcagatatgctccaaaagtccaaaggacaacatttagacaaggcatacacacagatttcaaaatcatcttcaagtgttaggtgatatatgaaaccaatatcaaaaggatgaaaaaaaaaactcagcgaacttgcaaaattaacaccaacacataaagttctattttagatattatcagtttacacgatacctatacatctgtagcttagatttagaagaaccacgtgtcagcctacacattgcttttatttgctgtcaaaccacctatatgtagttaagtaggcaaaagactaatccatcaattgcagaaaagttgcagaggttcaaaatctcattgttgcttgcaaaggcatataaggctgaagtcactattagtcatggtgtagaaactgcagattttttttctcgtgaac

SEQ ID NO: 92860 - DNA, 483 bp, Zea Mays
ctcccatggaactcattgttcatcttagtgccactgatggtgagcctcttattgatcctacctgctatcgtcatatagttaggagtcttgtttatcatggtgtcactcattctaatatttcttgttttgtgcatattcttagtcagattgtttcggtctctactcaactccactatagtcacatgcttcgtgagactacttgtgtcatctattctttccacgcacaagttctttataactgcagacctactatgatactctccgagctagtgagtcgactaagaagtagacaacagttctagtttgactgttcgagtgagttgcgtgctatggctcttgtgacaaggatgacttggttatagtggtggtttctgtttctatgtcgactcctcttttgacagtcagtacaagtgctattagtattatgattcgttcaagcatgagctattaagcatataggtgttgatgcctattacatgtgtg

SEQ ID NO: 92861 - DNA, 633 bp, Zea Mays
ttaacatgagaataaaaaatctaatatagaatccacaaacttcaaaattcacaatttttgtaccttcaggctgttgtatgcaaggctatccgcaagatcgtccttcgtcatggcacagaggccagcttcgagcttcggaaaccccatactcctggccatttcccggcagatgaataattctttgttgtctgggaggcaatacaagaaatcatcttcatctgtaccattaaacactaaggcccctttcgggtacttcagttctcgggcatagtgtttagcttcaaaaatttcttcttcagataatctttttcccgaagaatgtcgaataatataaccaaggtcttcggaatgtgcttcgggagtgggagaggcagctttttcaggcaaaatctgttctatagcttcttcctctactgccttttcttcaatttccgaggatttcttcttggcaggctctgaaggcccagcttcagcgctagcctagctcattgtagctttggcttcggtcagttttgtttcggttcccattgacacttttgaagccttggcaattttccctggagtagagcttgaagcatttatcgtctccagcacatctagtacactggccatcctttttctcttggggtcgcc

SEQ ID NO: 92862 - DNA, 363 bp, Zea Mays
cggagtccgcacgacgtcgatcatggcttcaccatgccttgcttctacttctgattctcgttgcttttgctgctgttgctggattgctgcagggagtaggaagaggaggaggaggagcctcagcaccagcggcatcacctgcggatgccatccaaatggacgcgcaggtctcgactcactgcggggtgccatacacagcttcactactcgccttcgatcccgtccagcgcctcctcgctgttgcaactctgtgagccccattccaaaccccgccttcacattagtacatcacaaccaaccctaaaccactgccacacaattcattcagttgtaaactagagctttgctaatttatgttctcca

SEQ ID NO: 92863 - DNA, 394 bp, Zea Mays
gtggggaccgctagctaggctgttaagatcttcacagggttgttgggattggtttcccagctcctcttgcgtgtatataagcatcaaccgacccccctgctccatggtctaccgccgtgaggtgagagagcagcaaaaagagggagatccatcgtggttgagtcacatgtacaccatcgacggggtctcgcttttgggtttgggaacatccccgagcttcgcagagaccataccgtgggcatcagaactcagggcgtgaccaattcacagtgaattgctcgccgtagcctgggaaccgccaatcactgtggttgaccctctctccatccccaccgtcggtaagaactcctctgttgagttcgccatcgtctcctttgcatgtagcaccttacga

SEQ ID NO: 92864 - DNA, 429 bp, Zea Mays
cttgggcaaacatattgtaattatgatttgttcacagcaacatattagctatactactataatcatgagatactccatctatatgtgttgtcattatgttcctcagtaatggtgatgtgaatgttaggaggtcacctataccaccttgtttcttctggaacagaactgtcgcaatttgtgagggaagaagccgaggggagactacgggacgacgagcgcagaaggtgggcaagacgatggtgctgccatcacgggcctgtacctgttccgatccaacctatttgggatgcagtactcgcgcaagcgctacttcgtgctcgaggacgtcgcgctccgctgcttcaagttcgcgtcgttctccaagcacgaggtaccctattgccaccactgaataactacatgcccctccaatcttgtttgttgttttcc

SEQ ID NO: 92865 - DNA, 455 bp, Zea Mays
gagagtatatattactgtccatattgtaccacatcacttagagtacttttatactcttgttgctatactcctaaagttcttgcattttctgtatctaattctgctctcttgcatatcccagggggagatttctttttgaggtggatttgctctttttgtgcatctatgcggtacttgctgagtgcatgtatcaacaagcgggagaattttgggagaattttgttgtaggagaaattttcacacccacacaaatcatgttgaggttgcatgcatttctttgtgagattctgagtatttcttcaagggagtttttgaaagatgtgtcttgctagtcgtgttgagtctgttgcctctttctctttctgaagacactacctttgatttcagctcaatggttgccttttactcagttttggccctgatttttgactagcggtgttaagcccactttttgc

SEQ ID NO: 92866 - DNA, 532 bp, Zea Mays
tagtagcacccatgtatccatctatgagggttagttcaattggtgggaggacccaaacagatagattttgccccagtgcaagagttcaaataagggggatagagttccccgctgatatgataataatgggtacctgggatgtacccatagatgtcatcctagggatgaattggctaaccaaatatcaagcaagccttaactgtgacaagaggactgtgaagttagtgtccttatcaggaaaggaagtgttagtggagttggtcttgtctggaccaaggaaaggaaggtgtcaccagatcaccgcccatattgaggaaatcgagccatcagaagctatcaaagtattatcagaatccccggatgtgtttcccgaggatttaccaggcatgccacctgaaagaaaagttgaatttgccatagagcttatacctgacaccgcccctatttccaagagagcctatcgagtgtctagaccagaattggtggaactcaagaagcagattgatgaattgttagagaaaggctacatgag

SEQ ID NO: 92867 - DNA, 329 bp, Zea Mays
ctactacttcatcatccttcggtgttggagtggtttcttctctggcaaaacgaacaagcttcctctcagcttctccaaagtagcctagtttcatcatcatgggcacatcggcttcagacacagtagacttctcaaaatctaggtggctgggttttgacgggatcaaaatgctattatcctcctcttcttcatcagcattttcttccttaatatcagcctgtttagcttcggcagcaagtatatcttcgtcaatgattccctctgtcacaactaaacccgattgtctcatgatttcagaaatcggagtcgtctcggtggcctcggtctcc

SEQ ID NO: 92868 - DNA, 532 bp, Zea Mays
gtcagatcgtcgaggccggcctgagacaagggggcagctgagctgggtactcatcacctagccccatatatgcatgcaatatactgctagctacctcaaatgcagttaaactgatgaagaggacaggacagatgatctgccacataactgtaagctatatatagctaccgcgtatatatagtacggcacaggagattttcactggatctcacatactagcctgcagagagagagagaaagcagaaaaaggttttatagttcaagtcacacctagcagtacgtagtggtaatcaatcccccaacctattagcttgatttcgttggtgagtctgtggccgtgatggattttaattggaagaagaaactgaaagtcaaggccacactcgatgctgttgctgtcgatgcatatatatgctaccttacctggatcagaattcagatgcatgcagatggattaatggagaaattcattgcaaccaccgagccatcgagaatactccctcctaccaccacttgtctcgctcgctttccc

SEQ ID NO: 92869 - DNA, 634 bp, Zea Mays
agaaagagggatgttgttggagcagatccagagagcagggagccgttggacacacggccttagatgaagggactcgtgaaggtccgaaagagtgtgtgaatcttatctttgggtctagatgccctcatgcctagttggatcggagtcttggacaggtgtattgcaactacgtgggacttgggagtatatagttcgttttcagacgcttacagtatgcgtggattcgatttttttgataaaaggcgagacgcagccgcacgcatgaattgtctgaacgactcgtgtgtgcaagactgctagttatatagttgtaccgacacgacagcccaggtctcttcaggcgtccggccggtgtacttagcagaatgcgcctaaccacatgcagaagcagaagcagcgggaacggctcgatcggtcgaccgacccggtttgagatatcccgttcacattcactgtcagctagcgatcccgttcagtttgcctttttttttatttttagtgctggtgatgccgatgcgcaccggccgcacgcaggcgagaaagagttccgatcctcaggtcaatcgcatggacaggtcaagcaaagcgtaaaggagatggcccatcagcaggtctcgcgcctgcaacaatgcaa

SEQ ID NO: 92870 - DNA, 356 bp, Zea Mays
cttgttacaataaaagtacaatacattgtccatttcaaaatgtttttacaataagagctattcctctttaaggattttttcagcaacttcgttcagtaacttgttaacaacttcgtcaacaatagattcagccatattaatgatctccaacgcttcctttgtttctggatcagccaggggatcgaacgattccggtggcagagataattcagctaaagtgggaaaaattaattagtccgaagccacaaaaacaaatgccgaagttgaacatcaaaagatattacctatacgtttttcacgctctgccgcttcttcagcttgtctcgcttctactcgggcgtcataggtgtcctttt

SEQ ID NO: 92871 - DNA, 676 bp, Zea Mays
cagcatagcagctccagtctcctctccctgtgtcttgccttaggtggtagccatgtagaagggtagggagatgtattagtgtgagtttggccctgtgttaagcccagtgaaaacccagaagagctccaattcttgtgagcacttgccatggttgtgtatggcataaactaaactccatgtgttcctgtcgatcctttgacccgctcaccgtgccacacttcccccttacatctcggttaggtcctcaaaccttcctcaaccctcttgttccactgtggtagcctgaacgcgaagggaactttggtagtggtggccaccgtagcaattgttctcggttcaccatagctagcttcctctagtgggtaacactcttggttagctcatgttttaagatccctaagtgaacttgatgctcaccgatctgttcttttgaacactatcgtgccaggctcgtcgaaacatcaccgcacaaccgctgaacaccaccgtgtgggtgtcctcgcgtcgaccggctaaaccaatggcccccaagctaaccaatgtaagaatcacatgtgagatgtgttgtgatgctagccatggcctcggattgaacgctactgcgttgtgggtcaaacccgacctcgctggagtccgtgatgccgttgtcactgtggttagtgacgttgtagagtcc

SEQ ID NO: 92872 - DNA, 289 bp, Zea Mays
acttctttagctgggacacgtggaatacatcttgtacatctgccaggtgatcgggtagttctagttgatatgcaacttctcccactcgctttaagatcaaagaaaggtccaatgaagtgaggggcaacttttctttaactttaaatctcctcataccccggatcagtgacaccttcagatacacgtgatcaccctccttaaactccagtagtctccttctattatcagcatagctcttttgccttgattgtgcaattctcaaattctcccttatcattcaaacttgttc

SEQ ID NO: 92873 - DNA, 682 bp, Zea Mays
ttgtagaaagaacaatggaaagtgaagttgtccaaatgtacctttgccactcgttctatctcctatctagggcacgtgatcagtgaagctagagtgcagacagatcccaacaaagttaatgcagtggtcaattgtccaacaccttctaatgtcaaagaactccgtagtttccttgtccttgcaggatactacaggaaattcatgcatcactttggtattatctccaagattttgacccaactgctcaagaaacatactagatttctttggactcaggaataggacatcgcattccattgtctgaaaaccaaactgagccaagcatcgattttagccttgcccgatttctcataacctttcgtgcttgaaatagatgcttgtgaccagggcatcagagcaatgctaatgcaaggtggccacccactcgcctatgtcagtaaagcactaggaccacaaactagaggcctctcaacatgtgaaaaggaatacctcgccatattaatggtcgttgatcattagagagcttatctgcaacattcacagtttgttattcacatggatcagagaagttaagtccacctgaatgaacagcggatgcatataatttggtaatagaaagttttttataagctattggggctacaatattcagttgcctacaagaaaggtagtgaaaactgtg

SEQ ID NO: 92874 - DNA, 572 bp, Zea Mays
aacgagcaaacagtttgccagtcctccggctcaagggcggattcaaggggtgagcaaggtggactatggccccacctaatttttttgaccccttatacctaggtttagatacacaccaaaataaacaaactttttgtatagttagcgtggacaaatctaatgaaaactaggttttgatctatttttgtctcggcgctgcactgcttagtccactattcacctgagccatttgattctcttccccagcacaagcccgctcactcgcttcttcggtcatcgactgactagtaagtcggtgacctaacccgcccgctgcaacgcaccttgccttctcattactcatcagctcgtcgactcaacgggatcctacacacaatattggtattttgcctcctagtctgcaccagcagatgggcaagctgttggtgggaccgtggcgtcacttgtccctcgctaacttattagggtcccaccgcgtcgtcgcaacacgacaatggctgtcgcttgccgtcacggtcatctatcgctacctcgcctcctgcactcgctcctcccacctgtcgtcgtctcac

SEQ ID NO: 92875 - DNA, 391 bp, Zea Mays
gcacgccgagtctccgcccggtggaggaccaacccacgaatcacaggggtgtgggccaggggaagctcaatttcatcatccttcccgccttcatcatcactcgtagcctcccacgcctgcggatttgtcgcgggtcgggaccgatcggaaggattccgggttgtccgaccgcgagctccttgagacccggaggcctcagcaccttgcatgacatttcctcttcctcgcccacgcttggatctagagcgtgggggagtatctccatgtatttcttggtcatcagaggagtcggattcaaccacggacgggttcctccgacgcaccattctaagaaaaaaaatagaacctatgatgagcaaggatcaaacacgtttgagtagagacgcataag

SEQ ID NO: 92876 - DNA, 856 bp, Zea Mays
tctgaatcggtatgcatccctatccacaggatctgaaagcaacggtcctgattctattacggctacacctcatcacgcccacccgatctcacatcaacgcacagatctgagcaccgcagagatgcaacaagttttaatctcagccctacgctagtcattcaatccagcgaacaagtatgctggatttgatctcatccaccggtcatgcatccgacgactattctacccatcaccctcatctccctcatcttccggactgaagccactacaacgacgcccagctccagtacggacgtgccatggccgagacctagctacacattactgagactgaagcgagtaggtctagggcacacttacccgtagttaggacgctgaggtaccccgaacacgggtgggggcggatttgtggcggcagaactgcaccgtcaagaaattcgtgactgcctggttatcattccctcctgattgagctacgaacttcatcaaggctccccaatggcacacctaggccctccttcgaccccccagacaacacccacaaaggaggaccccggcggcggaccccagacctatacggtggctctgatttctctctggtctaccatctacggccaagggagcatgggcatgaatcttatactcaggttgggaattacaaccactcccaacgacctgcgatttgccagggattttgatgcggatgcatgcgggacgagctcgccactggcccataaccgagccaagcgaggagacgccaccaacaagggcccacgtgcaagagactaggcgatggtagcatgtgcgtggagctgaggctgttgtgtggggcccacgacgtcagtgaccaagggcg

SEQ ID NO: 92877 - DNA, 402 bp, Zea Mays
tggtgggctagatgccttcttcttctggttccttacttctctgatgagagcttcattcccttgattgggatcgatgagtccaaggatggagccagttgtatgctgatgtggttgtggaatcatcggaggtgggcaccaatgttgggtacttgatttcaatcccctgaagacattgaaaataaaggaacacaaattagaaatatgaaccttcattttaactttaacactttttcgaagtgttaatgcgaaggacgaaggtcggcgagggaaaatataagcgagtgtgatgcgtaatggggtgatagtacgaaagagtatgaaaactcatcttcctttgccttagcattttcatttaatctccattatatcagataagtttacaagcatacctttgggtcttta

SEQ ID NO: 92878 - DNA, 502 bp, Zea Mays
ggcaatctttaatgaaatgccctgcttttccacagttatagcaaggatatttggtgtcagtgggagcaggcaaacggggagcttggttatttgtaggtaatgattggcgttgcatattggtgggacgaatgtagataggagttttagcagggtaagtggctgaacggtaaggagtgttggtagagccagctgttctgatgattaccttttgatgcttggctggatcttgggaagatccagttccagatcctttccacaaccttttagcattttgatgcacccgccccttatcttctactgcaattgccacactgactgctctattaaatgtcaagtcataacccattttcttctgcagcttgaaactcaaaccccgcatgaaacaatctcgctttttaacgtcagtgttcacatgatcaacaacatactgggactagtgattgaacttcccaagatatttcatcaccgtgttaggaccttgcttaagcattaaaaattcctc

SEQ ID NO: 92879 - DNA, 2066 bp, Zea Mays
attacattacataatattctgctactccaaaatgtgggatgcgttagcgttagcgtcggatactggcgccggcgcattacataacattctgtgtaaaagttgtttatcttttttaggcgcattgcttcgcagtggcgctgcactttctgtttctagctagcatatatatacgacttacttttgtgatgcttcgctttgcgttagcacagtctactgatctgtgtgccgctgtgctctgcagctgctcatcgagctcttgatgagacttggcagtaaatctctgcatttcaggtgaacgccacagacatggtgactcaaaacctgcaagggaaagttacggccgatacaccatcggcggaggaccttgcaatgcttcagctggataacatggaccagaatacatctccggttcgccgcctcatcatgaataaaatgtaagtttggaagtcagcgactcagcgcagcatatatatatggatactagtctcgacttgcaaatttgttgttgctgttgttgttagtatatatatgcggctgcgcgcctgttgtgagcaagaaatcatgtcactgctgatacatgctagcagttcatccagctacctacttcactgcatttagttcttggaatgctggtcttcatgcttgctaattattactcgcctataatgctttcatattcaattgttacatctgacaaggctgaattcttcattttttcctttctattttgctgatacaacatagttattagtcttatacaactatacaagcatatgatgttgcactgtaatcatgagcatctagctgcagattttacttgtttttattcaattttacttgattaattcctagcccagatacaatttttttagttatatacatatgcttcccattttgattactagtttattttatcactctttattgtacacctttttctgcatgagccagtggtttgaaatttcttcaggaatactaaaggtggtttaaatggagatagtggctatattcttttctttcctttcgcctatgttttctttttcacactgcgcattctgatatttcttttcttctacccagtgaagcatgcctgaaaaagagtgaacggtatcgtaacttccgcccatattttttacgattcccttcaagaatcattgacagcatactctacgaaacagctccccaggtgtgttctttcattctctgccgtgcaaccacaatatatacattatatagcacactagtatcttttattaggtctcaaaatcttgctcttgaataattgaagtacaccctaaataaatctacaaagctgcttctgggagtagagatgatcctcctaggggtagcgcagtggggactaggattttggctggatctaaaaattagagcggcgataccatgttacaaataagggagacttaattggatgatagtattgggcccaatagcgactatatattgagtacatgaaaaacacaggaggaaaaccctaaactatataggaaattatggttgtggtagcaaggacactagggtaccaagagtatcggagaaatatagctagtggagcacgaagtgagtcatggcaccgcagggtatgtctacgaagtccatatataacatactacattaaagatattaaataatgctagtattatttgatcacgtaaagtccaaatattacaataatataaagactctagcctactaaaataaagagattaaacaatatgggcttcattgggctgtgccagcccaagctcggcccatgtattttaggctgtgccgggggcccgatgggccagaatttgaggcccgacccaggtccatcttcggaccgtgctagctagacccatattatttcgtgtcagaccatgctttagactcctatttttggaccatgctcgtgctagtcgaaaaaacccgacccatttttcccaacactatcctaactagagggcatgggtctcggttgacaaagtatgtggtcaggaacttttggcttcctgcggcctatgaagtgtcccgagtgatcaagtactgcaagagctcggggcttagtc

SEQ ID NO: 92880 - DNA, 307 bp, Zea Mays
ggggtttatatagtagaactacattggattccaccccttggtatgcttgccgtaatctacatatgatctaccagaagtgagaagaatagacaaataactatgaaatctcacatcactatagagcttgaatttgaattggacattaatctttccttggtcctcggcgccagaagagccatatgtcttgaccactagactattagtgatggtatttgtgatagaaatatgaagatcttatggagacctgttatgttctccctagtcccggtgactccttcgtacgagagtagtactatctattgttgaa

SEQ ID NO: 92881 - DNA, 454 bp, Zea Mays
tgccaaggcgtccagactgcaccctgaaattggtagcaggcatgggaatcttggtgtaggtgcaagttccaatgtcacagcaccatccttggcagacacagaccacgcacaagacatggaggacgaagtggttatcgatgcattttcagtgagtgttttttatccaatcctcattaatgtccagcctcaaaatagtttgcacatagttgttgtgtactgctctataatttacttgcaattatttagtttgttttatttcttattcaactcgacactagaatggggagcactatgacaaggctaactggaattccgagaacactaatgtgttctgtgacctgtgtgttgaggagatgcgcgctgggaatcatagcaatggttttctaacagcgagagcttacaaaaacatagctgagaagtacttcttgaccacggggttgcgacactctaggca

SEQ ID NO: 92882 - DNA, 283 bp, Zea Mays
aattcgagtagggtcattaccactagtgtacaggtaagcatggtagactctatccttcaaaggctgaatattcttgaaaacaaagttgacaacaacagcttcagcagtcaaacctctatccctcaacacacttatctcgacaagcaataccctggactcagaaagctcgaaatctgtggggacctctatccagctaggcgttcgaacatcgggttgtctccctgatcgagcgggaagtgatttgttatgattttccatagtgaaccactcgaagcgccatccc

SEQ ID NO: 92883 - DNA, 301 bp, Zea Mays
ttttaaaagcttcctgaaggctgggcttcgttttccactgcacaagatgctggctgaagtactgaagacgttcgaaatataccttcatcaacttactcccgaagctttaattaaagtgggggttttcatttgggctatgaggagccaagggctagagccagatgctaggtgcttctgtgatatacatgaattgtcttaccagacaaaggcgactgggaaggaacaatactataacaactttgggtgctacagcttcatgccctgctctgaggcaagttatcccgtgccaacatttcggaag

SEQ ID NO: 92884 - DNA, 663 bp, Zea Mays
tgggatcagctctggccggattacacccattgggttcagcatcatcaaggtcacacccattgggatcagcttcagtaaaaatcggcactcgcacttcctcgatagcaggagcagaagggtcggcatcctgattcaagcatgacactcgccgaagccgtctctttttctttttcttcccctcagcaggagaagttggatgattggttcggcgaggacgcttcgggcgaatattatcagatctttgaatatccaaagttgttccagactctcggatgggtgctacagctagtgtttcagcagggactgaatcagaggaatccttagccaacatgtccagcatggcacttatttctgcgtcgctcggatttaaaggcatctcaaaatgaacctgcctctcatcatcagggatttcaccaagcgaagcaaccaaaacctcaacctcttcgggagagggtcgcactctaaggcccaaaccactgtcaccagcaggaggatttgaaacaaaactgatgaaagccttggaaggaggtagattccaggctgaatatgcaacaggatcaccgatattcgacaccttgcctctaagaatcatctcaagccggcttaccagatccacagcaggaatccttctgttggtaacccgggtcgagtcaatgatgccac

SEQ ID NO: 92885 - DNA, 529 bp, Zea Mays
gagacgactgatactacggttgagggatatcacatgtatactaagcgaatatgaattataatatttaattcggcttaatcatattaacagacaataatcacatgccgagtaaaattactacttagtcccgattagtgtgttgttcgaataaccgttgcttaaatatatatttacttagcgcgagctattctaggtgagatgaatcattagcgtgcgtaaaacgcacgacgacacgtgtgaacagcacgcacaacgcgcgcggacagcacgcgacgatttaatgtgcgatgcgcgggcgatggcgaacgacacgaacgcacacggggtttagacgaggggtagacggggtcgtctaggggtaagcgaacgtcgtattcatactaagcgttaactacactaacaggtatctatagacgcataattaaaatcattacttattaactaaatgaaatctgtgttatgatctagtaatacttttaacgtgtacatgagcaaccctgttgataggctaacgtaacttgaataaaac

SEQ ID NO: 92886 - DNA, 383 bp, Zea Mays
tcagcggtggtctccttcggcatatcccagctttccacaagtagccataccctgaaggctacatgctcttgaatcaaatccctcatgccaatgaaagcacacacaatgctaaaggccttctgacatgcttcaacattgccgtcaatttccaccttcggccttcggaggccgaagcgagaccagatgaggtgctgaatgatttctttgacgtcttcccttgtctttaaattatttttaatgtaaaaccactcctccatccaggccctgggccatattttctcgaatgttggcactaggtggcttgcattggggcgagaaatcaatccataacaatcgaagttgttgtggtactgttctttgccagttgccttcgtctcgtataa

SEQ ID NO: 92887 - DNA, 547 bp, Zea Mays
atcatgttcgatatcatctcctcttgttatagctccaactactatgtatataatgatacatgtcgacggatggccgaactctggccatggctccaccgtgggcgagctcacgtcgccgccatatggtgatcgagtaggggggaaacgtggtctatccattgatctctctatgggcgaacatgattaaaaggatagcataccccttcaggtggttaatcggagccattggtttagcatcgcacggatcagatttgattgcagtatttaaaatattatccaatggatcgggatcggacgccccacatggcataccggtttggttgagtaagcatttaatcctggtcgtccgtaatggatcggatggtcgaaatcgtcttctagctccttcaccatggcaaacttaccaagaagtccctagaattcattagaatcaaccccaactgcacccatgcatagaatttatcgctaaaagggaaatagagttaatcattccctataaatagattttggtgattgacgaccaacacaaaccatatggactgactag

SEQ ID NO: 92888 - DNA, 591 bp, Zea Mays
ccacaccgtctagtatcgctcccaatcttgcaaccgtgagctccaatttcatgttttccccaattctgttctgaaacaccgcatggtcgagctcaccgcggccagcccaattcaggtcggctcatcctctccgctctcttgtttaagtgtgctcatgtgcctatgatactcgtcgacccgcccaattgaattaggagcccactagtcgccgggaacgcgttcatccacccgcaacatccacggtcgccatagccagagcaaaccgggtagctattcatgaaattgtttgaggggaaaccctcgttaggtctcagatttgatctctaccaaagattagcgccggtccttgcgtaaatcgaccggtgtgtgagctcgccggagctctgcagcgccgctcgacgacgaggacttcaccctgcgaataaatagaaaccgagggacttcactgcaaacggtcagcgacacaagaaacagtaaacgaacttgtatccagttagtctataacccgagggcccttctgcaagaatcccaccgcgggcgcgggcgcgcacgtatctttcccctctggactgggccgactgggctgaaacc

SEQ ID NO: 92889 - DNA, 932 bp, Zea Mays
ggcatacatattcggggccaccgtagtatgacctctcagggtatgcatctacacaggaagaagagaaagggtagcaccaaagcaaagcaggaagaatgttaccaggaatgtcgggcataatacacaccttttagagcatctacgtatgacctatccaaaggaagcgtggtcgacaatggctcgccaggtagcatgtgatgtactctactgcgccggcgttgcctattggatgcggcaagcgctgaagggaatgacattatagatctactacctgtgccgacataagcatcactaacaccatattgttttttgctgaagcaatggctgaacaaacatggttgtacgcacgttttccctgtagcgcaggtattggctggttagaggtccccgaaaggttagatgggtctacttcgtcttcaccatgaaaaatgtgatgggcatcagttgtctcaaagactgggcaacctaaagaggatgcgtatttttggcacgcaagagaagtatcgcaaattaggatgggtaccggccatcgcatgcataaacaaagcaacgaacttgtgaggactaaccctgtgcaactacactgtgcctcgggcgcttcacttcatggcatctcgcgacacgcacacatggagaatcaagcatagctctatatatcgcatagtatggaagaacgtcacatacaattggtgaaccaaacgggccgtaacaaacaacacattataaaacagatcaggcgtataggcacaaactcaccgacgatcgaaaacgcaaaatggtgttatgtctcctccaagctgcgacaaaattcccccaagcagcaagtacccagatcactggaaaaaatagcccataagaattagccgaccagtaaggatatatctctatacataggtagaggctagtgcctcttttagagactggcagactgg

SEQ ID NO: 92890 - DNA, 701 bp, Zea Mays
gccagtctgaagatgttaccgttcgagactctgtatggaaggaaatacatgactcctctatattggaccagactggagaaagacagttctttgggcctgaactgattcaagaagcagaagaacaagtccgtataattcgagagaatttgaggactgcctagtcaagacagaagagctatgctgatacccggagaagactgctagagtttaaggagggtgatcatgtctatttgaaagtgtcaccactccgtggtatgagaagatttaaagtcaaagggaagttgtcccctcgctttattggacccttcttaatcttaaagtgagtgggagaggttgcataccaattggagttacctgatcatcttgcggatgttcatgatgtcttgcatgtgtcacaactgaagaagtgtctcagggtacctgaagagtagctaccactggaggaccttagtgttcaagatgatctgacttatgcagagtatcccatcaagattcttgatacactgactcgtgtcacgagaaataaagttataaagatgtgcaaagtgcaatggagtcaccacggagaagatgaagctacttgggagagagaagagcttcgcatagattttccacatcttttccctagatcttcttaaatctcgaggacgagattctttgtaaggggggtaggatttgtaatacttaaaattgtatacaag

SEQ ID NO: 92891 - DNA, 494 bp, Zea Mays
ctctcggttcaccgttaaccaaaactctagtagtagaagagcacaacaactttgccaacaaattacaccaccaagtgccaaaaccaagatgttataagacctccaacagaaaaggccatgaaactgaatcaaaagccttagtgatgtcaaactttaggagcactctcggttccttttgtctgtgcaaagcttaggccatgtattgcacaagaacaaagttatccaaaatgtattcatgtttcatgaacacactttgattaggtgacacaagctgcaataatttccctaataaccgattagccattagcttagtgatgatctgagcgaagctatggatcagacttatgggactaaaatcttttatctcctccatgacaactttcttgggcagaagggtaatatatgcagaattgaggagaaaaagtctactatcatcaccctaaaacagtctattcacagcaaccataaatctactttgataatttctgaagcca

SEQ ID NO: 92892 - DNA, 372 bp, Zea Mays
gaagacgcagacgtgggcgcaaaggagttcagtcgtgccctgtgcatgcgacgcatgggaaatcggcaaacgactcattgatcgtggctggatgcaacgtgacacggataagacagggtcgtggagatcgtgcatccgttcccatttttgtaacttcgattcagtcggcaataagtctgaatagaagacccttacgaggccacttgtaaccgggggagacatcgaacaatttcacgaccagaaaccacaggacacagggtattacgctcacgagtgacccagacctgcacaacttcctatgtttctgacgtgctccgcacgtaccatcgagctgcgatcaactttttcatcctcccaaaagtgctatgtgat

SEQ ID NO: 92893 - DNA, 540 bp, Zea Mays
caaattgaaaggtctcttatgggttttggtgttttggatgacagcacaattaaaggtctaactgaggtgttaagtgttgagcaggtactttgtgaaaagcttacacggatcaacacatgaacacaagtgtgatgatccacgtaggctgagttgactatggattgtggacatcacaagacaagtaaaggatggacattgctatgtggaactctatgtgcatgacttggagtcaactggtcgaaccaaggatggagacaagttgatcttcgaggtattagaccaagggagaaggtcaaaaggacttaggcacctaaagccaaggtgaagaagaggctcttgtagaagtcaatgttgatcagttgaggaaggtcattatgcactgaggatcactacataaggacatgacttgaagccattgagataactcctatgctttatggttcaagtcataaggcttaagatcctacctcaagtaataggacatggtcacaagaaagtggagaagtatcaaagttagaacctagaagggacccaaaagag

SEQ ID NO: 92894 - DNA, 766 bp, Zea Mays
ctcccgcggtagcgtcatggatgatgaagtcgcaaggaggcccgggttatccaacttcaacgccggtcgatgctaaatgatgcagatactaaagcgaacacgtgggggaaggtattaccaaagttcatggttgcggagatgctcgaccccgagagacgtcgtgctggagttccttccgccaggccctagcttcctcgtccatccgtcgatacgggaatgaggagggtgccgaccagtatatatagggacatacgagtctaatctagcgtggaactaggccggacaggtagaagattgagacggacttcagaagtttgttgcgaattcgtaggtgcgcacgcgtactagtgcgattctgttgcagccactggatcggagctcacgcttgaagtagatcctggccaaagtgccccacatgtcattgagcttggctgacatcatcgctgaggtcgtggtgacatcatgcgcggcaagaggaataaagaattcagaaaacaaacgtgggtgggtttgtgcggtgcatttgtacagcatgggctgcgtcgcagtttgagcccaataacaggtaagtttttcctatttttttcttttctatttgttttagttttatattttacttttaaatttcggtttcaatttcaaatatgaatttgtctgcaaaataaaatgcacaaccaaagtaccagtacgaaatgcaccaactaatttatttatttctttattaaatgaacacatctctaaacgaaatctacccactaaaataaat

SEQ ID NO: 92895 - DNA, 1359 bp, Zea Mays
atcattgtttgtcgattcagagtcccgtccgagctcaccgtcgacaacgacaaacagtttgacagccaggacttcagggatttctgcctctccatcggcaccaagcctgccttcgcctcggtatatcacccgcaatccaacggcatcgtcgagcgtgccaacgacaagatttacactgccatcaagaaaagacttatcgacgacaagaagggtaaatgggttgaccaactacctgaagtggtatggaccctaaacacaatcgaatgtcgggcaacaggattcacaccttttcgtctattatatggatcggaggccatgacgccacaggagataaagcacgggtcgccccgaacaagcacatcagcggtccccgacgtcgacgaaccaacgtctaaagacctcatcgacggagactgtgtcctcgccctgcaggccctcaacaaataccaagctcaaaccaaggcctgacgtaacaacgcagtcgtcccaagagagttcaacaaaggagacctcgtactcgtccggaccacccggacaaaatcacagggcaagctagagccgaaatgggagggctcgttcatcgtcaagacgaaggcatcccccagcgcgtacaggctagcaacgccctccggcgaagacttagagcactcctggaacattgacaacctccgcaaatttttcgtcgaaccctcggggcccgcgcgcccttgtaatccatcaaacaatattatttcggcccacactcttttcctcccggggggtgaggtttttaacgagccggagccatgtaatacaccagcaaagcccccgcaaaaacaaaaacacagacgcaacgtgttgaaaaaagaccgcatcgacggtctttggcattcgaccactctgaagtcaccgcgacaggtagcgtagactacccccgcgtgcgacactccgcgcaaaagtcgcctaagggtgcagccggaatagcaagtgcgttaatcgaagtctttcacaaaaaagacactccgagcaaaagacgcctaagggtgcagccggaatagcacaacaagtgcgttaatcgaagtctttcacaaaaaagacactcgagcaaaagacgcctaagggtgcagccggagcagcacaacaagtgcgtcagtcgaagtctcttattaaaaacgctctgtgcgaaagacgcccaagggtgcagccggacaggcaggcgtacgaaaacggccaacaggccacattacaatacaagttatagttacatacacacggcgagggcaccatacactacattggctcaaccttcgggatgatacccatctccctataattgaacagcattatcctcaactcctcaccctcaaaaaaattccgcag

SEQ ID NO: 92896 - DNA, 572 bp, Zea Mays
cggcgagcgacgttaaatggcacagcagcagcagtgcgacagtaggggctagcagaggagagagagttcggaaagcgacggcgcgacgctctgcgagtcgaaatcaatgagctgagcgtgacatggccagaaggaggcagtgtgtgtgcgagcagcagggaaaggatgtgagcagagactcggcgtcgtcgtttaaataggcgagggaggatggaataatggggagaagaaacgtcaccgtaatgaaggtgcgccatgggagagtaaccgacggctggaaggaataatggaggagagaactgccaccgttaatggagaataaactgcagcagttatagctgtggggaaacggacggacggtgcggcgtggcacaggccgacaatggcgtattgcttcgtggaatagagaccggctgctgaaacgtccaggattgaagatgaagaggtgttgacaacgagggggccacatgtcagtgagaatgagaggagggagaagaacggatggctagctagtaaacgttcgattcctttttttgtttttttaatagatgtgtgcgtgcgttttccttttg

SEQ ID NO: 92897 - DNA, 435 bp, Zea Mays
gtatttccatatagagctcgactaggttgagtcctcaagctccaaaccacatatggcagctctcttatccactttcctgcaagcttttcatttttgtcgaacactttcttcctgagtgcttccagtatcattccattggctctttccacctgaccattggctcttggatgcgctactagtgcatacttgatccggatactccgttgttcgcagaaatcgaagaacttagagctggtgaagttggatcctaggtcggttatgatgctatttggtatcccaaacctgaatattatgtcttgtatgaactccactgccttggctgaggttaaagaagcaatagacttgtactctatccatttgatgaacttgtcaatggcaaccagcacgtgagtatagcctccttgagctttcttgaagggtccaatcatgttcagc

SEQ ID NO: 92898 - DNA, 517 bp, Zea Mays
cttcaaaattgtatatgggttcaaacctattgctccgatagatttgttgccccttccattgcaggaaagaactaatatggaagcttccaagcgtgctgcatacataaaaaagatacatgagaagaccaaggaagcaattaagctcaaagcagtgcgcaaggtagcaagcatgaacaagcataggaagaaagtgttatttgaaccgggtgacttggtttggattcacttgcgcaaggagcgttttcctgattagcgcaaatccaaattgatgccacgaggggatggtccatttcgtgttcttaccaagatcaatgataatgcatacaagatagaacttccaccaagctatggcgtgagcaacacgttcaatgttgctgacctcttaccatatacaagtgaagacacttcagagtcgaggacgactccttttcaatgggaggaggatgatatgaccatgccattaagcaatacattacaacccccaaggcatacaacatcaactcaagtacaaccaaca

SEQ ID NO: 92899 - DNA, 329 bp, Zea Mays
gaaggaggcacatgactcagtttactccatccaccctggtagtaccaagatgtaccaggacttgaagcagaagtattagtggtatggactaaagaaggatgttgcttcacatgttgcactatgtgatgtttgccagagggtgaaagcggaacatcaaagacctactgatttgctacacccgcttaagatacctgagtggaaatgggaagaaattggcatggccttcattatgggtctaccccgcacatctgctgggtatgactctatatgggtgattgttgtaacaccccaatgttactcagggtttttccttcagtacccaactggtg

SEQ ID NO: 92900 - DNA, 500 bp, Zea Mays
cttcttaagaaaatttcataacgaaacctcaccaggggagagagccctcctgtcctgggccatttctagttggtgcagcaattcttgagccatctcaaactgcaacttgacacaaccaattgttttgtaactccatttctgcagaccctagcagttgtctgcaacttcttggccaaagtgataagagggcaattccccgtagaaacaaaccccaagcctgcggcactgcctcatgaaaaccatccatttttgcctataaagcttgaaaatggaacatcctttttcctctttcctagtcctgcaaacccaacaacaaagggcaatgattagagtcctgatatgccaaactctgtagcaaacaatctgagaactgcacatcccaatcagctgagcagaacactcgatccaacctaactaatgtggggcgactttggccataagaccaagtgaaattctgaccaagcaaagggagctctttaagagccaaatcaccagtccac

SEQ ID NO: 92901 - DNA, 613 bp, Zea Mays
gtaggccatcacttcttgctctactaaacaaaattgcacaaaagcctttcggttcaactaattttctcaggtctcatcagtaagtaacacaatttttatttgtattaagagtttcgtttttttttgttttgagagaaatatttacctttcttatgagacccaattaccatctatgtttcatgataaattggtgtcacaacagtgaagcttcgcgtgttcatcgttgctgtcctgattgtgatcaacttgggcacctgcatggcaaaggttggatcttacggcacaactgtgtcagcgtcaccgaggcaaatccgagtacttaccgccgcaactgatggaagaaatggacctcccagcaatgatcaccagtgcccgctcgggacctaccccaattgttaagcaatggatgtatcaaaacactgaggaacagctcaaatacgttcacgaaaattacacccgtctgtgctgttaggggagcatgaatatcatgaacatggatagctgtattgccatcccacacagtacttgtttttattcttgtgtacacgtcactctcttatatatacttaagaaagatgtattaaatacattgaattcactactgtaatccggc

SEQ ID NO: 92902 - DNA, 423 bp, Zea Mays
tacacattgtctctatcacctccagccatcgtgaccttcgtccaagagcactggagctgaaaaggctgatgtactggctctgataatcccctgtgtaagcatggcaacacattgtcgtcctagctcatctttttgcagttgtgggtatctatagggcctgacagccaccggttgtgtccctggtcggaggtggatccggtggtcacaatgacgagctgggggaagtccctggggttcgtcaaacataggtgtaaaggatagcagcagctggtccatcatctgtgattctgcgagttgagtagagcatgtggctggttgtgtgatgtcgttgcgtggtgatcccagccccttccaaagaatgtgcctccctcctcgccagaacgccatgtagaggtcgtctaaatcccacaagatagggaccag

SEQ ID NO: 92903 - DNA, 867 bp, Zea Mays
gtgataatggtccaagtggttgggttattacttctagctaacacctggggtgttacatggatatcccctaggtcaccatgcatggatgcgctccatgtgacgcttataaggcccctgatgggtcgtccatagggtgcatcgtgggcctctgcaagatgcaaccgaagccgagtaaagcggtcacacaccgagtcaaggggatcttcgaaggcatgtcccatgcatgcagccgtacacaagcctcgcagggaaccaaccgaacgccggaaaatgcgttgcgtctatagtgaaagtggttagatgcatataggattatgatctatacagggttatctcttcatttggccatataatgctgaaacgggagactccattagactcgtaggctactttcatattctaccttcaacaatcacctataatcttcaaacccagagcaatacaaccactagaaacttacatgacgtaggacattacgcctctaggtggttcaaacctatataatctgctctgttccatcgtgcctggcatgaaccatcaagttttgatcgacatcgctatcctcccaaaagcactacatggtatatcccatagtgcgccattggtaccaaacaccgacaccagtcacaaggtgtttagagaagaaaattgtctgggttagtcggatagatagccatactgtcaagaggagtcaatgacaatttcttatgtgaaacttaatgcctcatagagcttttagatgatgcattagcaagattattaacaattcttctgaattcgtgagttaaaatattttcaaaagcgtgttttggaaagtgggctaagtatcattgtcgtggatcgttcatgctaagaggctagaccatc

SEQ ID NO: 92904 - DNA, 570 bp, Zea Mays
gggagttcaggtttatgagcttcaggagcaggtaggtgtgcaggccatgactattgcaaacttggaagaccagctccatgaccttaaccttaagctggaggaggctaatgatcacattgagatgcaccactaggaacaagtcgagatggaggctaaccttgaagatgttgatatggatgaggaggaggaagacctataggagattgagggtgtttctgagttaaccaccgagagtggagcaccactgccaccagtcaattgagcacacccctcggcagggagtgttatgttagttaataattaggatagattagttagcaacgaatgattggtatgctcctcggagtagccaaattttggttcttggggtgtaactggctaacctagactagagcattcctttgcatggtggtaccctatgttgtaaggcaatttttgtgtaaacagggcctaacaacatggtatgtgcaagcaactgaaaactggttgttgttgttttggaaatcataactggtccgaatcctcagcatactatattggtatttttggtccttgcaatgcgtaccaaat

SEQ ID NO: 92905 - DNA, 528 bp, Zea Mays
gaacaattgttagatgaacgagctcgtttcactgagttactgaaggaacaacttgctgtggctcgtaaagtgttggttcggtggagttcgattccgccggaagatgctacttgggaggactactacgttgttcgcttgtgatttcctcaggccattgcttgggggcaagcaagctcagtggagggggcaggtgtgacaaccggtattgaggagggcgaggcgattactgaagagatgtctgaagaggctgctgcatcagcaaggataagtcttgtcgttgtcgcgagtctttacttgatcgatctcctgaagtcggcggagataggagatagccggccggcggccagggagcgtgaccgtccgattcactccgtggcccgtgggagcgtgaccgtccatacgttgtgtgtagtacgtctacgccagtctggatgagggccctcgatgagaaccgaacgtcgtgggatgagagctgcggagtgacaagatgttgcgggctcttcgcccacggcacgatgccatcggcag

SEQ ID NO: 92906 - DNA, 366 bp, Zea Mays
attgaggaggaggccggcttgaccacaacaacttggggagagatgattcacgatggatttgggacagaggatgcacacatgagagctgagaggcaagggatgaacgcacgcacgacgctagctaaacagtcaaggcggcggcttgaattgggaaggaggatcgtcgcagcttgtgttcgtgctgacgctgaacggggcggtggcagggcgacgatttggaattgggaagaagaaaataactatctagggtttggttcagtaaaagaataggcggcagcttggaattggcctgcttcaggtgggccgcgcttgtgaaattttcgcgccaatggaccaagtgaagcgcgtggaggcaattagtcctga

SEQ ID NO: 92907 - DNA, 669 bp, Zea Mays
ccccattggctaagtattcttgcaccagatctctagtgccgatctgctcagtcacaactctgaattctgccacagcctgttggcatggtgaccccgacgacatacggcacaggggcctggttagcccgaagcttaaactcaacgggctcattatcaacgtattcaatttatctcttttcttctcatcagctttgatatagaacctctcacttttatagccggttggccacttggtgtggtagcttagcaccggggccttcatatccttgcggtaagcgaagttgtaacaaccaaaattctcataaagcccatcttctctggccttcgtctgataatgtagctcatgtactcggcaggaggcttcagcatttggatccattccctggcttcgaagggcccaaatgaagatgctgagcctaacgatagcattaggagtcagctgatgaagataaatttcataattattcaaaacttccccaatcatctcatgaagcggaaatcgcaatccagctttgaaaacgcttttgaaagctactacttcgtcattttttggctctggggtggtttcttcgccgacaaatcgaagaagcttcttctctatctccccgaagtaaccgagcttcatcatcatcggcacatcggcctcagagacagtagatttttcaaaat

SEQ ID NO: 92908 - DNA, 459 bp, Zea Mays
gctgcattattggatgttggaaacaagagctggagtgcatacttgagttgttcacctccgggagcaataaagagaatccctgcccctgctccttgcagtctcagtgagccatcgaagtacatcctccatatttcagtgacctctgggctttctgggacctggtgttcattccactctgatatgaagtagaccagagcctgagtttttaatgtcgtgcgaggtcagaactctatatcatgcgctccgagctcgcacacccacttggctattctcccaacagcctccttgttgtgaagaatatcgcctattggaaatcatgtgactactatgaatttgtggctaccaaaacctgtcaatcgttgagcttttgttgcctcctgttttcctgtgccccatgacctcgaagataacgttgacctccctgtcaacgcacgggaaagctccacccctcccctcttc

SEQ ID NO: 92909 - DNA, 384 bp, Zea Mays
ttcgaatcagatgtgatgtttgtccaccaaacaatattagacatatctttggttcttggttaattggtctagataatagaatgataagtcattttattctagcaatttcggctatatgttgggcaatctggttgagcaggaatgatgcagtgtttgataatgctccaataaaatcttctttgcaggtgttttttcgggctacgcattggcttcgcttctaggctcaattacaacttagacaggatgatcaagaactaataatcaaggcatgttgtagattggaggagttggtgatgcagatttttagacatcatggatggggatctccatttagactttgtctttaatctcgttttgtcgcactatgttttgcttttctccgag

SEQ ID NO: 92910 - DNA, 316 bp, Zea Mays
tttctgataaaggattactccaggctaagctatactttggctctaagagatctctatgccatgatagattaggcagtgaaaaaggtaagtgtttgtgctgagcgtatttctttggatgtagatatatttgtagagacaaaggatattgttcaggcaaagctgtgattactaggaaggatccaggagcggagaaagccgccttttctaagggaatgtgattcgttatacgcttttccttcggtccgagctcaatactcctgtattattcccacgcttctctcttcaatccaattagcacgacctaacatactcttat

SEQ ID NO: 92911 - DNA, 1205 bp, Zea Mays
gcatggcagagcgaccgaccaattccccgtcgagcaagccagcgaggcggtgtgaccgaccaagaatccacacctacgaggaggaaacctaagtccaacggtacgggcccgcatctgtcgtgataagacacatcatcaccacgccacgctagaacgtgcacacattgcacgagacaaaccccgagggagacctcaacatagaagtcccaacagtagcgcacacgtcggtaagcacatgacaatacgccataccaaacgtgagtatcgtgaagggtgggaggagacgcaaggcatgcgacggacagggccacaccgcgtacaaccacatacagggacaaaatcgtgtgacctgccatgcactgccaccaggcttcagcaacatactcgctacaggagctagcgtagacaagagttgtgttatgagtacgaccacacacaggaaaaggggccaattcgatggcccaggcggatgagggatccccctctctctattgtctcgtctctttttctttagcaagggtggggccccattgtaagccttctctcttaagatacaaaagggagaagttcacccttcaggtggcacacaagcacaccggttgtaacatgctccagagcaatactataatcagcacttcactgaactagggcacaagcctgaactagtataattcaccacctcaaatccatcactcgagtcccagcgactaaccattcggagtgagtccgcacaagcatccccgccgaacacaaatcttactgcccctggttttcgaaactacgacaatgtctgcaaactgtttgtgggtgtctacatggcaaaggtcgatgtcacttatttcaatgtggtctcttaggaaatggaagtatacatcaatgtgtttagttttggggtggagtgcatgattcttcgccacactaatcgcactagtgtatcccaaaggagtggaactctctcaaagctcaaaccaaagtccctcaaaggtgtctatcatccataggaactaggaccaacatcgagcagcaacaacatattcagattccattatagattgggctaaaatagagtgtttgcgagaggaccaagacacagtacatacatgtggcttcggtcaaaaacaacggtttgatctctttgtatactcaacttcgatcaaactcgactgttacaagtttaaaatttaaattgttcacttcacaacgtc

SEQ ID NO: 92912 - DNA, 1226 bp, Zea Mays
gtgtgatgcaccagaatcaaatagaataactattgggtaattggcaacaaggaacgtacccatcattaccggctcgccctccagtgttgtagccacttgggtataatatatccgtcctgttttcttgaaattcttacccgttgaagtactagccgtgtttccctttccttgattggagttcctagggttcttttggaagttggttttattttgctttgggtatagacagtccttgatgaagtgtctggactttccacagttaaagcaactagtagaagaactagggagagcagggaaacgagtaccaggggcactcggctgattggtaggagcaagggtagtattgggactaatgaaaacatgctgcttgaagggataggaaggtgggcgaggcgaagaacgattctgattaaaaggtcggatcaccaacctaattctcctctcaggcccttgatttgacctttcacctccaaacccctttgattttccatgcctagcatttttggcttccattgccagtgctgtactgacagccctactgtaggtgagatcccgacatgttgccattttccgttgaagcctgtcattaagtcccctcataaaacaattctttttctttagatcggtatttacttggtcgatggcatactggaatagatggttgaatttgctgagatactgcatgacagtatctcccccttgctttaaccggatgaactcttcttgcttcatatggagcactccctctggaacataatgctcctagaaggctagcttgaattcctcccaagtgatctgatgtccagccggttgaattgctacaaaatttgcccaccatgtactggcaggccctcttagctgttgggcagcaaacaatggcttctgtgtctctgtgcagcgaatcaacccaaacttttgttccatgactcttacccactcatcagcttctagaggttcttctgctttaataaagagcgggggtcgagtctctaagaattccgaatatgtagtatcacgcagtccttggggaggagctctgcctccatgctgctggaactgattacccgacatctcacgcaagaagcgtgtgttatccgcagtggcattgaccagggcagtgatagcctcggccaacgttggtggtactggtggcgggttgggggtatcttcccgaccatgggaagtcctcgcaccatcgtgtgcacgagtccgtgatggcatctgag

SEQ ID NO: 92913 - DNA, 291 bp, Zea Mays
ggggtgtcctgcttgttggccctccaggaactggaaacactcttctagcatgggcagttgcaggagaggctggaattccatttttctatgtttctgctagtaagtttgttgaagcttttgttggaagaggtgttgcccgtgtcagggaattgttcaaggaagccaaagaagctgctccatccatcatttttattgatgaacttgatgttgtgggtggaaatagaggtagaagttttaacgatgtgagggaccaaactctaaaccagctaattgcagaaatggatggttttg

SEQ ID NO: 92914 - DNA, 336 bp, Zea Mays
cacaagaaggaaattgtggttcgctggggaagtatgaaccaaagcctctgtcacatggtccttggccatatggcacacgaccagcatcccgtcgggcatggccaccacgtggtctcactgcctgaggcctagcggcaaaaggcaaaacacatctaggcctcgtatgacgtctctgaacagactgagcatgaacaccatgagaggggcggttcatgtcctttctgctcgactccaaaacctgtagctcatctctcttcctcctaaagcaaaaagaagctggatgtccatccctctcacattattcacaatggtacctcacctctctgttgggttgat

SEQ ID NO: 92915 - DNA, 298 bp, Zea Mays
gacaattcaagggtttcaccttgcagcacgtggactgcgccaggaacgaagaggccgacgcattggccaaagcagcggccagaggcgaagccttgccctccgacgtgttctaccacgtcatcggcacaccatccgttcgtaatccagagggcctacaaataaccaacgacgccgagggccatcgcatcgtcaacctcatcatgaccgaagattggcgggccccaataacctgttcctgcaaggatattaccatccaagtgacatcaacgaggccaagcgcctcaaacaccgaagccgg

SEQ ID NO: 92916 - DNA, 572 bp, Zea Mays
aaagtcgctgtttggtagctgtttggtagaatggacatttgtagatggccacgacagttaatggcaaatggccacgacagttaatggcaaatggccatgtactcataactattaaatctgcaaatggccacgacagttaatggctatatacatggcctctctacgaggagagaccattaattaactgatgaagcatgtaggcacgggtagcagagacttttcttgtcctgaataactaagcagcagtaggcatggtttcataaaatgagtaaccagtactctaaaatcagattcatttttagcgctagctagatggtccttaggtttagtagaggctagagctggattttttttgtgcttttgttggatttgcggatcagacctcttttctaatcagccgggagctgagagtgagtaagtaagcaatcttctagaagtgtaagttttcatctacctgggcaggatatatatatataatataattgctagtgcttgctacaatttatatatcgaccaatgcaagaatgaatatatataggttttagatgatcttcttggttcagttgttcttg

SEQ ID NO: 92917 - DNA, 461 bp, Zea Mays
ttttagaaatgggggcggtaccagggataagctctatggcaaattcgacttttctctcgggtggcatgcccgttagctcctcgggaaacacatccggaaagtccaacacaaccttgatagcctcgagcgagttggtctccttactatcaactgaaatctggtgacaaattccctccgctgatttaggcatctttagctcagccactgcctcctctccggacggggacttcaatgttacggtcctcttgtcacagctgacattcgcttcatacttcattaaccaattcatccctaggatgacatctaccccaggggtgtctattactattaggtcgctggggaaccccatcccctttatttccacccttatatttgagcatattttatctgtttgcaccttgccaccaaccgaattaatcctcatgggcggcatcattgcctctactgagatgttatgcatt

SEQ ID NO: 92918 - DNA, 398 bp, Zea Mays
cagtagctttcctcttcttcccttgcccccgcagcgggtagcggtagtcggggtagacgaagccaagagcgtcaaaaactctattcaatctattcttttctcgacttccgaaggctgtggataatgcattatcttctgccttggaatatgatccaagtagttcatcacttgtaacttcgatgcattttagccagtcatcgtttggttcatcgaatttatccccatatctgaatgtatacttcagccggaccaattcaccttcgctagacttggtgacggtctccttctgcatctcccagctctctacaagcagccatactctgaatgctatgtgctcttgaattaaatctcttgtaccaataaagaagcagacagtaccaaatgccttctggcatgct

SEQ ID NO: 92919 - DNA, 413 bp, Zea Mays
aaaaggtttgaattagatctgaattcaaattgaatttgaaatggggaaaaagaaatggaaaagaaaagaataaaacaaaactaccctagctgggccctgatctcgaattcggcccactatcctttaacacccgcgcggcccatcttccaattttctccgcgcgtcagccgctcattcttcacaacgcgtgtgcgtgtctcctacccgagccactgaccggtgggtccacatcgtcagccgtcttccttctcaaatcggactcactgctagcaacaagatccgcggacgccgcgtgcgtgtgcgatttggttggggatttccgattccgccttggctctgatatcgcgctgtcgttttaaccgatttccccgatcgtagcgcatctgggtgtataaatcgtgggtacctgaccg

SEQ ID NO: 92920 - DNA, 418 bp, Zea Mays
gcgaggtagcaatagatgacggtgacggcaagcgacaaccattgtcgtgttgtgacgacgcggtggaaccctaatgagttagtgaggtacatgtgacgacatgatcccaccaacagcttgttcatctgctggtgcggactaggaggcaaaatatcaatgttgtgtgcaggatcccgacgagtcgatgagctgatgagtaatgagaaggcaaggtacgctgcagcgggcgggttaggtcaccgacttactggtcagtcgatgaccgaagaagcgagtgagccacgagtgggagtgagcttgctctagggaagagaatcaaatgacttaggtgaagagtggactgagcagtgaagcgacgagagaaaaatatatcaaaatctagttttcattagatttgtccacgttaactatacaaaag

SEQ ID NO: 92921 - DNA, 275 bp, Zea Mays
catgaaggttagaatccatattgggctgggagaatgtgctttcaaatttagacatagattgttagtagagcttctctcgggaccaaatggaggcctcatggatattaaagagccaagaccgcatagggtcggttaaggccacatgaaaatagtttgctatcatctctttgtcccaactagtggcaaagatagcagtggtgtagattttgaggaactcaatgaacttagtggtaccattgtacttctctataaggtgtaggtagaactttcatggc

SEQ ID NO: 92922 - DNA, 298 bp, Zea Mays
atagcgcctcagagtttgctggtatcgtgctgattgaatcactgtattcagtcgttcttcttcgagtacgtcaacgtcttctagcctagtagcttcagcttctgctatgttgtcaaagattagccttggtgccccaaacttgagatcggcaggtaacactacctctgaaccatagaccataaagaagggggtatttccatgcagagctcggctgggttgggttctcaggctccaaactacatatggcaactctctgatccattttcctgcgaacttttcattcttgtcgaagactttt

SEQ ID NO: 92923 - DNA, 377 bp, Zea Mays
tacgaaagttgtcgtagtgacagaccgtccacctgcaacgatgactggtgccaaaattcgtcaacagatagatgggctcatggccaatacagaaggtggttttatgggatatggtgagcagcatatgtggacacataagtctggcttgactcggctcccctattatgatgacctgctccttccacacaacattgatgtgatgcacactgaaaagaatgttgccgaggcaatgtgggcaacaattatggacattcctgataagtcaaaggataacgtaaaggcaagagtggatctggcagcgttatgtgatagaccaaacctagagatgaagccgccaagtggcggaaagacgtggagaaggcctaaggccgatttcg

SEQ ID NO: 92924 - DNA, 381 bp, Zea Mays
gttaagaccacctccacttgagaagctagaagtatataagacagagcaatagatagataactgatgcaaccaggcacctaacaactcccaccacaaacaacgcagcttactgccacatagtaatccccacacaaacatgctagaggccgatcgacacaaaggcactggaagccaggaaaacaaaagccacgaaatcgccactaacacatcaagtagtatggtctcagacatagctagataaccccactgagggaaccaggaacaaatgatatgatgcaccataaggagatagcatccactaggcagggcactcaggtaccccccacagccctgatggctggggtaaccagaggagccaccttgcgtccccgcttctttggc

SEQ ID NO: 92925 - DNA, 672 bp, Zea Mays
gcgacagagacccttgacaagagagttgtagacgacaaggtcaggcttcagatcttttgcttgtgcctcattgaagagttctagggccctctcaatgtcaccctcggcacacagtccgttgatcagtgagcaatatgtgacccggtctggtacaaaacctttaaagacagcatctttcagaagctcagtagcttcctgcagcatgccgctcttgcagtagccatcaatgatggtgttgtaggtgaaatcatctggtatgcagccctgattcatcatcctaccaaggtactgtgcagcttcctggaccttggagtccttgcaaaggccacgcatcaatgtgttgtaagtgacaacatctggcgcaacgtaggcacccatcctttccactagcgcaacagcctcttccaacctgccgtcttcacagaggccacggatccatatgttgcaagtgaacttgtttgctgacatgccccgcttgaggaccttggccagtagtgcccccgactccatgacatcccctttctggcaaagagcatgcaaaacattgttgaaagtggcaacgtcagggaagacatccctgccgagcatttcatcgaacaggtgacgcgcattgtaaccgtggccgtgggcataaaggcctcgcacaaccgtgcagtaggcggccggtttggc

SEQ ID NO: 92926 - DNA, 1512 bp, Zea Mays
tactgggccgaatccagcctaggacggcccacgaccagaagaaatgcgcgcgcccgcgcccgctgtggagtttttgcaacagggcccttggggttttaactaattggagatgggtttgattactattttactgtgtcgctgacaacttgcagataagcccttcatgttctatttcttcgcagtgggaggtccacgacaacggccgcgtggaggatgaactccggtgaggttgtgccggcggatttaagcaacggccagtgctcccgagcggtgtacaccggattaaacccttcccgaacgattcccctaacttaatttcacgattggtaagctatcacgccctgtccacgtgaaccgcgaatgatgaggacaatggtacgtgttcccggtgatccctggcggtccggttcaattaaagggttcgaggggtttgcggggtacctaaggaggctagaacaagtggcagagggacttgagctcacctgaattgagctggccacggtgaggtcttctttgcggtggcggaaaccgaattgggggaagtgagcgattctctggctatgggggctaatcggagacgggagtggtggctatggcttcggtatgacctagcgcagctggctgggggctcaatttataggcggagcgagcggtggcacttgaattgatgatggcgcggtggcggccggagaggaggaagaaccttggcgcgcgtggttacgtgtcctatggcgtggcagtaactccggtgatcgatagacagttagagggggtcacggtgatgcggtggcgcggttaagacacgcggcgcatggtcggacggcggcggttcaccggtgagcctatcgctccagtcgcaaagcagaggggaaggcaggggaggccgtcggagtggtgtccagctcaccggcggtgaggatctttaccgagctatgtttatccgatggccacgacgcacgaatcacggcgagcggtgatcaacggtgatggaccaccggcgacgagtagagggataggatcttcttcagttaccctttactgtaccatgggacattcagtttatgacgcctgacagtcatagtttaggctcgattttctcacaaattttcatggcaacatacccaatgatctgtagcaaagttgtagatctacaatccatctataactttactacaatgtgctcccccaaaaagtcactggatcttgcttaaaatcaagccctaagttcatgtcatccttaatctgaatttcagacatcaagcagtctgacagtccaacttcaggctcaattatctcccaacttttcacaagaacatggcttgcactcttaagcaaacttgttgtcctataattgggctataattttgatgtggtgacctaatatgaattctcattattttgaaagctacacagctctaaagttgggcctataaccctgatctcaggcttagcacaagaatcacaattgaggtccttttgcaaataggtccaaaccttagggtttaacttgca

SEQ ID NO: 92927 - DNA, 538 bp, Zea Mays
attcatcattgcagcggtcacacgaccgggatcctaccggctcactcagatggacgacaccgaagtggggaattcatggaattttgagcacctcaagaaattctacccctaacaatgcctcaaaactcttgaggacgagttgtactttgtaagcggaaggtctcatcatcaataaagcttcctttttctaaggcatacaagttcttgatcaacaactgacctaggtcgaactcaactcgaaatcagcacaacacactcagggtgatcgcaataccatactaacggagcaatcggcttaagtcagaaatgccttaagtcagtgtgacatgctcacacttacacaactcagggtgatcactataccctactaacggagcaatcggcttaagtcggaaacaccttaagtcggtgcgacatgctcatgcttacacgactcagggtgatcactatactctactaacggagcaatcggcttaagtcggaaacaccttaagtcggtgcgacatgctcacgcttacacgactcagggtgatcacta

SEQ ID NO: 92928 - DNA, 394 bp, Zea Mays
gtcaaacgactttgggtttggttcaaacttctccagggtgttctagaggtactttggtgccactttgtcaattgggccatttggttttaagtttgggatcaagatgaacatgtttgatctttggaaagggggtggttttggacttaggagaattctgatttttcctttgtgctcaccccttgggtggatcttttggggtttttctaaatactttttggggtcattttctgactatcatttgtggggtatcaagtgtgctacatcttttataattggcccaaatcatgatcttgtggttttcatacccttttgttcatgcttacttctagtgctccacttgtccaaaaggggtttgaattagggcttgggcaattctccccattatatgtgcata

SEQ ID NO: 92929 - DNA, 390 bp, Zea Mays
ccttgagcctggcagcgcgctcagcagaggtcgacatgagtagagaagagaggagtcggccttgagactctcaggtgtctaacctaagctctgataccaaatgttagaggtaaacagagtggttttgccggaggtgctaacctcagccatcattgcttgattatatagaaagatgagatgagtcacattgattacataacagctcattagagcttagctaatcagataggagccttggcagccgcacacacctgttgagctgctcaaggtctttaatgactataattaactagcacaagtaactaggagagtgcttaggaaacaggacttaataacaacatgcgacactttcgatgtgggtttcggtgccgttctccaccagggggccgg

SEQ ID NO: 92930 - DNA, 334 bp, Zea Mays
ttggtaacagtgcacacagcaaagaaaaagtggcgtgcagataagttgtaatatcgcccggtaagtagtacctgaagagtatcttacgaaatcaaaggtatattacaacccgctccgtagcggaaccctcattttctccacacaggcctagctactcatcgccagtaggatcccgctgaaagcgcctggccaccacgtccacaacgtcctgcacgccctcccgagcaacatcttcagcatcggccaccggacccgcgatgactggccctaaggagacagccggatcgtggctccggaagcatgtcaagacgtattctattgccgaccggcaaag

SEQ ID NO: 92931 - DNA, 545 bp, Zea Mays
ctcagatctcaatcaagtcgccttagtcctcttgttcctcttcatgtatcactttcatagcctacaagagcgggagtagtgacgaagaggatgttggtgatgtggtcgtggcttgcagcatcgacaatgttgtagccaaggtagggatgacgttcaaggagtgaagaggatcctcctcatcttgcacaatgtgggtctgctcttttttggaatttgatcggcactcgcgtgcctaatggcacatcatctcatagtgcatgcattgatcgctgaacttgtttgatggctcacctgacaaacagcgcgcccatgggcacacccattaggccttcatctttgccgcatatgtcgccatcgcttgatccaccaccaaaatggttttctgcttcatgcttcttttgtcttgcatcccattcttcctctgtgaggtatagtcttccatcttgctatagcaacgtcagtggtttctcgtttgcatcctctacagtcctaagtcgaccaataaggctcctctatcttttcgcccaagatagctagagttgtga

SEQ ID NO: 92932 - DNA, 2005 bp, Zea Mays
gaaggtctgaccccagggttcgggtgaccagagggatttctaggggtgtagaggggatgccatgtttttccacaaaactagtggctataaatgagtgggatgctcctgaatcaaaaagtacagtagcgggagtaaattcgacaagaaactcaccgagcactactcctggagcttgctgggcctcttgggcatcgacgtggttaactcgtgctctgccctggtactgggtcctgctctgctgactgttggaggggagtgccttggaggcaggtgtcgaggtaatcttggggccattcacctagttggagtaggtaggttcgggtgccttcaactagggacaattattcttgaagtgactggggtcttcgcagtgccaataggcatttgctggcggttggttgcttgcaaccgagggggcctgaaaggagctctgactctgctgactataacgtgacggagtgggtccagctggtctattgaagcttggtcccttgggtggaagcccgaaggatcgagctctctggtgatggtcttgctgctgagctcggagaacctagaatttcctcttgaggtgccctttttcttcctcttttgccctttccacttgtatggctttgttggagaggtgcgagaagttgaggaaatcttggctagcgaggatggtcttgagttctggtcttagccctttcaaaaaacgggccatcttcttggtttcggtgctgacatcgtcaggcgcgtaacgagccaacttgtgaatttgtgcacgtactcactgacagatcttccaccttgagttagttcccggaattcatcttccttgagttgaacgatcccctggggtatatggtgctcatggaaagccgtttcaaattctacccaggtagcgcccctaacggtcgcgctgaaggtatcccaccatgctagggccatcccagaaagttgatgagcagccaattgaacatgctgattttcggggcatctgatggcttccagtttcctcttgatcgtgtgcagccagtcgtcggcatcgaggggattgctggatccagcgaacgtgggaggcttgagtctcagaaattctctcatcctgtcctgtggtcttccaccacctgggcgttggttctccagacttctagtgaggacttcaatgagtcgggtttgattggctagaacttgggccaaatctagtggtagttccggaggtgcggggaggtgggtctcactcccttctcctccagcttctccttctgctcctaggggaaaccctgctccaatcctggaggtggtaggcatggttttatccgaagccatctgccaggggaaaagagttactactatgcacatgccatatttttttaacaagttactttattcattaaacaagttcattacaacattcaattatcataagttcattacacacgagtgctatctagggtactcccgaactccttctctaaagtgtccccaaattccttgagaaggtcatcaaggctggctagggacatttcctcggtgtcggacgagttccctattctggtaggaggtagggctagagggtcttcttccttctgctcggtctggcatccttggcttttggtcttcttgcggatttttcttgcgggggcgagcttctttagcttcttgtcgtaatccatcttcagagtgcggtaggcctcacgggtgttggttcctcgccttccgctatctcgagactctcttgaagggacgccttttcccttgtaagctccctgacttgttgctccaagctttccacccgggagtttaggtgagtgcagtgggaggcaaggtcatcatattagttatcgagagtgtggaggtatccagccatgtagacgatggtggggtcatcctcggtagggtctctccctgacagggcctgaagtcttttcctccaggcgggggtatttttgttgctgggtggaaagtagcgaaggggggtttcaaagattactttgttgtagttctggcatagttgtcggag

SEQ ID NO: 92933 - DNA, 386 bp, Zea Mays
gcagtgaaggatgagcgctaggtcttgaccatgggattggagctataatatctaacacctatggacatgaacaagtgcaaggacatggagaagcagatcgtgttgccaatatggttgaggatcgacgggacacacgtccacgacatgaggaacatgtatggagtacgctacgcacaaacttttggtaattgagccacaaaatctctagtgatagttcacaagttttgccaagtttgggcctcaaacctggtagcacaattatagagggaattagaggtggcatatgacgtcatcgtggagggtgcgtgaaggcgaaccaacttcgtgaagagtgtgtggtcattagatcaatacttcaagagttggtccattttgcccccagatga

SEQ ID NO: 92934 - DNA, 749 bp, Zea Mays
gaatcccaattccatcttgcaaatttccatctttgtacatctgtgtgaggcctacctcggaattcttcctcatttcgtattatggaagtatttgtatcactatcggcctaggctggctaggggcagcaccagctcgttggtggtgcaagtctggagatgtgccacgggaggaagacagaataccttgacattcctctcaaggacaacattaaagggtggcgccttgaatggtttattgtggagaaccacagcaagtctctcccccctcggtcggggagacagccagatgtacgcactccgagttgggttgagtctcctactgccttggaggtgacggaagctaggattctgcttgctgagatctgtctgctaaaggaaagaggtctgactaccgaagctgtggttgctgacttcgttttcaagaatattcagcctttgaaagacagggcgtatccagcttacttgtacagtggtattactgattcaactcgggttaccgacaggaaaattcctactgaggatctagtgagccaactagacatgatcctgaggggcaaggtatcaaatgttggtgctcctgttgcttattctgcttggaatctgccacctcctaggtcatttttcaatttcgtgtccaaccctcctgccagtgatagtggtctaggtcttagagtgcgaccctctcctgaagacattgaggctctggttgctcctcttcgtgatcttcccaatgatgagaggcaagttca

SEQ ID NO: 92935 - DNA, 568 bp, Zea Mays
tttaaatatgggtttttaaattattagtaatgtttatatatttataatatctctcttttatacaacacaaacatacatgagttacagtagtaaaacccaagcactttacaccaagcgagcagagattatcaagcagttcatcattagctactctattaaatccagcaagatgtagcagcctaccacaatctatctatacctctatacaacccaccaatttaaactttgcagaatctacccaaacaaatcacgctcacactcataatcttctctaaatccaccaaacaaattacacccatacataacacgttctcaaaaccaattattcagcttgctgaataaccctctcttctcttacccactcaaatccaatgtacaatgttatttagatcatcatttctgcttacaccgctgcctcccttcctgcaactatattgtcccttccctcgcgccgccgtcggtccctccctccgcaacctcgccgcccttacccctccctatcactcgtgtcgcaaccgccgttgccaacccctctctctctctcgtcgggatgttagcgttagcgact

SEQ ID NO: 92936 - DNA, 339 bp, Zea Mays
acttgagatcagcaggtagcactgcctccgaaccataaaccatgaagaagggagtgtttccatgcaaagctcggctgggttgagttcttaggctccagaccacatacggcaactctccgatccactttcctgcgaacttttcattcttatcgatgactttctttctgagtgcttccaatatcattctgttggctctttctacctgcctgttggctcttgggtgtgccactgatgcatatttgatctggatgcttttttgtccgcagaaatcaaagaacttcgaactagtgaaattggatcctaggtcggttatgatgccgtttggtattctgaacctga

SEQ ID NO: 92937 - DNA, 326 bp, Zea Mays
ggtgtccgcttcaaccacctccatctgatcacctacccattgtactaaaaattgatgcaaagtagatggtacacaaccattagcatgtatccaatctcgccctagcaaaacattatacctccctttcacatccaccacaaaaaaggttgttgggatagttttgctgcccactgtgagttcaacagacataatcccttttgcttgtgatggatcccatgaaaacccactcagattcatcacatccaccacaaaaaaggttgttgggatagttttgctgcccactgtgagttcaacagacataatcccttttgcttgtgatggatccc

SEQ ID NO: 92938 - DNA, 439 bp, Zea Mays
ctcaactcaaaccccagccacccaagcaccctctcctcgccaccagtgctgccattgtcgcttagaagcctcagtgcccgtgttcaggtcacactagagtctccctaaccttcccaccgatgtcaccagacctgccagagctagaggagtctacaacacaacttcttcagagctctaccaacctcgatgatgagcaccatgatgacctgacccccgcagtgccccaccgccatcgacccaaacccctaggcactccctcgacccttagtcaacacctggaggttcaatagcagataccaacctctcacgccccttccatagcctagtagaggcatggtcgtgttgaaggagttcatgaggcttcaacaaggagacctgatggccagtcaataccatgataggtttgtctagttgtcacgatatgtccccaaagaggtgg

SEQ ID NO: 92939 - DNA, 620 bp, Zea Mays
gggatgaaaccttgatggtgaatcctggaagatggcgaatcctggaagatggcgagtgctctatcttggagacttggaagatggcgaatcctggaagaacaagcaaaagtatggtaagattaatggttttaggccaaacattaggccatgttatgttcctacacctagaaggatggatcacggatcataacagccattaggagtaacacctaggtctgttttcatggtgacagatggtacttttgatctacaaaccttttgatgtttcttctcccttgtacggcaggaaacaccttgccgcggtgatagcgccagaacagccgtcgacggcttcaagctcctgcgccagaacagccgtcgttgcgtctgtacccgtcgttgcgtctgtacccgtcgttgcgtctgtaccctgtagcctgtaccctgcattacttgtagccgcgtctgtaccctgtagcctgtaccctgtaccctgtacccttgtagccgcgtctgtaccctgtgatacttgtagccggcgggctgcctgacctagatgcatgtccgtattatgttttcccagaaaacaattattcctataaatctatttcctagtacaaaacgattattatgagttcgtg

SEQ ID NO: 92940 - DNA, 373 bp, Zea Mays
caggtagacttagctctgttaataccctgattttgtaggcttcgaaataatgttttagcttccttgatgccatgaccacgacataggcggtttttttgcatttgagacatgtgggtcttcgactcggtgaggacttcagagacaaaatataccgtagattgaatgggtttgccttcgacttgcttttcctgtacaaggactccactcactgcatgatgtgaggtcgctaaatatcgtagtaacttggctcctggtgttggtctagatagagtggtcaacattgacaagtatgatttgaggtcctcaaacgttgctgcttgtactggcccacaagcgaagtctttggaacccgtaggactttcaggaacatgag

SEQ ID NO: 92941 - DNA, 835 bp, Zea Mays
tggcaatatgatttgtcctagtggcactgatatgcccttctgatggaaattcaaggaagaacacattgttatacagaccactgcttgttgaaaagcagtatgtgcaattgtgtatgcagtttgacatttgcatgagaaaaaggtggtgagtgtaacttgtttggcacttcatgtattaaattattcatactctcaggctggataaaggcattccaggccttcttttttatgctaatatatatggtgtctgaacctgaccattctcaggctgcgtaaagacacatggagaggggtggcggtgcagagtgagcgaagaagaccgaggctgagaagagggaaagggattagggaattgccatactctatttatgtttaagattcaaatggttacatgacccctatatttatggtttcaagaggacttgacctctaagcaatctggacttatcctccatgcaacctgtaggtagtgttcctatagatttggattcttctttcctaaacaaactctattttcttttaattataattcttacctactccggactgctacagggaggaggctgatggctcccctagggccgtcgttcacccacttgttgtgcgcgcgcccagggccgttctttgggcctagccaagggtccgtatttagtccggtgacaatagctttctgtgtaagctgtccctgcatttctgtcttgaacttctgggtcacttcattttctaccacactatattccccaactcttttatgttatctgatgaagcaacatgtatactgtcctgtagggatatgcctatttctcaagcatgagaaacacacggaagaccaaaa

SEQ ID NO: 92942 - DNA, 720 bp, Zea Mays
ccggagttgaagatggtcgcaacgctgaaggtgatgaccatggagctttcgtgaatggacgtcacaccccctacctgcgtgcgccagctgttggtgttttagtcccgactgcgcactacggggtagcccgtgtagtgcttttgggaggacgacaacgtcaatcgctgctcgatggtatgtgtggatacacgtcgaaacacaatttatacaggtttgggtcacatggatgcgtaaataccctacgtcctgtgcggtgtttcatatttgatttgtccgggctcgcagattataggtatttgtggaggtgaacgaaagagttcctattgatctaatggtgagcgagagagtttttggtaggggtacctctgcagccttatatagcttactggagagatatcctcttctacgtatcatttgagtctatataggtctatcatcttctactgcggatgcgcctattattctggtgctcagttgctttgttcctatttatcctctaagtaggttgctatctggtcgtgttcaagtcatgtctcaaaatcccgctcgtccttcagcgataaacgcgcatggatagtgtttacgcgtcgtagcttgtttcttgcttggtgcgtcatcttgcttcacctgaatgcgacccgatagcacacactactaggcgacttatcagagcctattagacggcccatggaacatatccatgctatactgacccatgtg

SEQ ID NO: 92943 - DNA, 375 bp, Zea Mays
gctcatgccttctcatcttagggcgaccactatgccctaccagtcaagcgatgggcataaatcaggaaaaaactccaaaaccagcacgccgcatttacttctgcaattgttcaggatgactattacatcctgacgacagaaacaaaatattgtagttgtcagcaccaaggacacattctagtgccctactcaccgaatatccgaacacaatgatcacacgcacatagagttcacaaatacattcagtatcttctaaaacgtcactacagcgaaacgtctctatttggcaatgtctttcgcaagagcaatcaaggaagaagggcgactcaaggcatcaggcgtagccttgacgtcagtaacaatgtcatcaggaac

SEQ ID NO: 92944 - DNA, 739 bp, Zea Mays
gcaattcgtattgtttggtttggtcaattcattaagaatctgagattaagtgacaaacttgtcgtcttcaaatgttttgacctttgctagctcgaggtgaacatgtcaaagaattccagggtaggtgtaggtcttactttcttgtttatatgagatacacacgtggactgattcctcctgttgttctggtaaattttggttggtagttagcttgctgaaatctagagatgttatcttaaatccttcattctatgattcatctgtcattactagttcctttcaccaatgaatgtagttacccaagtggaaaacactaggctcttgttaaattgggaattctgggactggttactgatcatattaccatatcctatttttaagtatatagttttagggtcttagtgaatagtagtcatactcctgaattttttgtttagtccaatctaggatcttttaggatttaaaaaatttgatggtttcaattaattcttcgccctgcaaagactttgaaccatttattccatcttactatcaatgttatcagatcatatgattgaggctagcagtaagatcaccgatcagaagagtaatcatcgaggttagaaaaagcgttaggcagtttctaggcgatgacccaccgcctagagcctaagcacgcctaggtgttttgtaggcgtttttgccaaatttgcattcaacatgtatagctgaataaattatatatataaagagagaagga

SEQ ID NO: 92945 - DNA, 380 bp, Zea Mays
gcacacactaaaactacccagcgcaaatcaactggacctcatggtgtgcccgacatcagctggcctctaggcatgaaggaagcagtagtggaagcaacaaccccatcggggatttggaggccagagtggatcgactcatatcttaactacgccacgggtgtagggagcgtgcgcgcgatagtcgccgcattgctgaactaccagccgaagttaatcgcctgtagtatgaaatctcggaacacgatacagccattgactgggtcgtgaagtcatactcttttgcatgggattgtgaagccaaagctctagctcgagtagcagaacttagtgcatccctagaaaacttgcaagcatactgcaacaccttgcatgaagaggtg

SEQ ID NO: 92946 - DNA, 641 bp, Zea Mays
ggctccaatctcactgttactgaaagttcagacttaaggtgacctgacagcctgactttggatcaaattttctcaaaatctttcatggcactaaggcttaatccttatagcaaagtttttctccttatatagctctacaagttttatgtgctgacctagggcaaaatcctcataatttggaagatatagggcttcaaagttgatcccattcactaaaattcagacttagtcattggagcacaaatgtggcctttttgcaaataagcccaaaacttatggtttcatttgcaaatctccaaatatgtgaaccatatgacttaagataccttatttccatgatttttgcactaagttccaaaatgtgcacacttttacagataaccccctagggtttcagtccagggttttccaggggtctgtttaaggtttttggcacttctagggtgtggatgctacttaagtccatccatgatgacattttatgatcattacaactaggttttgaagttttctcttagttagactttggttactcttttaagcccagtttagggttaagtactgtatcctaggtttttacccatgaaatgtgatatcaatacaacttgtttgaactttttgcctagtgaatgcattttaag

SEQ ID NO: 92947 - DNA, 296 bp, Zea Mays
tacgcgtgccagcggccctacgatcctagatctatggcgctggacgagcccgggtgaagcgttaccttgttttaatcctgcgcgctcatcagaagatcaacggtgaccgtgcgtcttccttcccacgccgaagccacggcggcaccgcccaggtaacgcatggtggaccatcgccggagatcacgcagtacgcgcacccgagccccaattacccaaccggaaggttaactacgcgaagaaggacagcacgaactcggaagaggcttcctcaccgtgattagtgccatacaactctc

SEQ ID NO: 92948 - DNA, 346 bp, Zea Mays
caaaaaactaagccaatgtcgaaaaagaccgcatcgacggtcttcggcattcgaccacaccaaagtcaccgcgaggggcagcgctaactaccctcgcgtgcggcactccacgcaaaagtcgcctacgggtgcagccggaatagcacaataagtgcgcaaaatcgaagtcttcttcaaaaagactctccgtgcaaaagtcgcctaagggtgcagccggattagcacaacaagtgcgcaacatcgaagtcttcctcaaaagactatccgtgcaaaagtcgcctaagggtgcagccggactagcacaacaagtgcgcaacatcgaagtcttcctcaaaagactatccgt

SEQ ID NO: 92949 - DNA, 567 bp, Zea Mays
tcgacgcagagctcaccctcgggacaaactctgcctcgcccgagcccgacctcggctacctgctaccccgcgaatcctacgaaaggccactccttcaaattgtggcacacgtcatcgaatctgaggatgagctcgatcatgacctcgggtagactttcgcctcgcccgagtttggttcttccctcgacatctatgacagaggacgccccaacatcatcagacacagtggaactgacgcatcccttaagaagatttttcccatactaagcactatgtcaaccactacggtatgggcaacccctcgccaaggggctcgggtacgtggctgagccctcggcctcggctcttagcaggcacaagtcaacgaaaaagtacaaaaccataccatctacaggatataaaatacattccctcacaatatgcagtcgactcccatcctccaggaagcaccccttgagcctataaatagggtactctatgacttctcaagggggaagcgaacacttcacgagtcttctcctccacatggtattggcacctgcctcaatcaacctagggacttgggat

SEQ ID NO: 92950 - DNA, 480 bp, Zea Mays
cccaaagtaacatgatttgtaactacctgccttgtctactattctcttaccatatgtatctaactcagatggtcaataccaggcggggtggtggaattgatttgcctcctaatctacacactctgtggatatatagacgaccccagccacaaccagtagagatgaatccccctaatcctccaccaggcggagtcgacccactgattgcagctcagatgaggatgatgtagcaaatggcggacactatggctgatatgcgggcttagatgcagcaagaacgccaggagatgcgccaggaacgagaagagatacgccaggagttgcgccaggagcgagaagagatacgccaggagagaagggcgcaacagcagctgcaacagcaatttcagcaacaacagcaacaacaacaagtgtcattgcctccaccaccaccactagttccacctcgtgataagcaccggacgtttatgagccataagc

SEQ ID NO: 92951 - DNA, 432 bp, Zea Mays
ttcgtcagaagatttgtcaacccacgagaaagggctccccaattccttctcctccgaagaccacgacccaaaattagagccctccgacacattgccaccaagaaacgttgcattcccatccatcaaaatatcatttgtttcaacgtcatcagggtttgcttgcgcaggcccggacgccggaacctgcgcagcatccgacttcataatcatacaaaatcaaaactatcaaccctaaacccctaatgcatctcttcaacctgcgccggagctgatgccgccgcagggtcttcgccagaacctcctggaggtgctgagagcccttcaactcccgcctccaacgtgccatccatccgggtcattgagcttccaagaccgacgaggtcgtcaacttcttcattcatcatctgcgcagataacacagcaccccacagc

SEQ ID NO: 92952 - DNA, 848 bp, Zea Mays
gtcaccctgagttaagtaagcgtgagcatgttgcaccgtcttaagtcattgccgacttaagccgattgctccgttagcagggcatagtggttaccccgagttaagcgtgagcatgttgcaccatcttaagtcatcgccaacttaagccgattgctccgtcgatagggcatagtggtcaccccgagttaagtaagaatgcaggtcgacaatgaataatttgagcgctcttgaatcctttctattgaagatatatttcccagtttacagagtacattgtcgccccaatagcttttggaataaagctaggggtaaaacttcctgagttgttctatgttccatgagttcccaatttccgtgccatccatctgagtgagacgatatgatcccggccgagtgacttctgctactatgaatggtccttcccatagaggtgacaacttgtgtcgtccctcccctgttagaattcggcggaggacgagatctcctactgcgaaggattgatgtcgcatggtcttatcgtgatagcgcctcagggtttattggtaccgtgctgattgaattaccgcgttcaaccgttcttcttcgagtacatcaacatcctccagcctagtatcctcggcttctgctatgttttcgaagatcaatcttggcgccccaaatttgagatcagcgggtagtactgcgtctgaaccatagaccatgaagaaaggagtatttccatgcagagctcgactgggttgagttcttaggctccaaacgacatagggcaactcccttatccactttcctgtgaacttttcatttttatcgaagacttttttcctgagtgcctccaatatcatcccgtt

SEQ ID NO: 92953 - DNA, 410 bp, Zea Mays
tagcaccatgaatcaactcaatctagtgaacacactccctaactagagggagacctttaggtagctcaaacacccaggaatattgttgaatcaactgttggatgtcagctgggagtccttggagaatagtctgctctttgtccgacaactcctccagactgcatacttggagcactaaagaattcacagcatgtagtgttacactggaaccttgcaatggcaaccttaacctcttatgggatcgatgcaccaccgtagggctacgtcgttcaagccagtccatgcctataatgaggtcatatattggcaagggtaacaccttcagggtagatggaaacgacacaccactgaagtgtaggattatagggaggctacgctagcacaaaacaaaagttcaaccccataaaacc

SEQ ID NO: 92954 - DNA, 551 bp, Zea Mays
tgaagaagacgtttcagatgactgacatgggactgctccggttttatcttggactggaggtggagcaaaatcaagacgggatcaccataagtcagggaagttatgcactaaagattctgcagggagccgggctggcagactgcaatgccagtcacacacccatggagtcaaggctgaaactcagtaagtatagtactgatgattgtgttgacgcaactgagtacagaaggctcattggtgcacttcgctatttggtgaactcgaggccggatctagcgtatgcagttggctatgtctcacggttcatggagaagcccactgttgaacaccttgttgcagtcaagcgcatacttcgttatgttgcagggacagtgcaccttggatgtcattaccagaaggaagcaaagaaggcggatctccttggttacagtgacagcgatcacggtgctgatgtggatggtcgcaggagtactagtggtgttttgttcttcctcggcaaaagtgtgatcacctggcaatctcagaagcagaaagtggtggcactctctagt

SEQ ID NO: 92955 - DNA, 317 bp, Zea Mays
aataggggatgaacctgccacaactgaagaagctgttcaagacccactctagcgtggtgctatgatagaggaactgcagtctatcaaggagaacaagacttggtcacttgtaacattgccaaagggacataggccaataggtctaaaatgggtttacaagctgaagcatgacgaaaaaggagacataatcaagcataaagctagattggtggcaaaagggtatgttcaaaggcatggagtggactttgatgaagtttttgctccagttgctaggatggagtctgtcagagttatactcattcttgcagctcaactaa

SEQ ID NO: 92956 - DNA, 360 bp, Zea Mays
taagtattgtatgaatcaattagttctctgatacgaattttaattttaggatagtgggagtatatataattttagcgcagtatcgaatttaaatatcttccccggacgcagacagtactacacatggttcagtgatgtggtttggtacgagagtttacacgattgcacgatcgactgtccacgcgacgcgacaagagttgacatgaaatgtagttgtcgaccaacaaggatgtttagcgtatgctgtatgccttgatcagacatgtgctagcttgtgcctggagccctctctcccccgtgaaccagcacggcgaactgggcaagcaggaccggccggtacaggcaatgcatgcatgcagc

SEQ ID NO: 92957 - DNA, 432 bp, Zea Mays
gaatatatgaggatatcatcaatgaacaccactacgaacttgtcgagatagtccatgaacacactattcatcaagtacatgaaataagctggcgcattcgttaggccgaatgacatgacagtgaactcatatagtccatacttggtgataaatattgtcttcggtatatccgaaggccagatcctgagctgatggtaacctgatctcagatctatcttcgagaacacactggctgctctcagctggtcgaacatgtcttcaattcttggcagagggtacttgttcttgacagtgagttcattcaaagatatgtaatcaatgcacatcctctttgtcccatctttcttctccacgaacaaaactggagcggcccaaggcgaggtacttggtctgatatagcctttctccaacaactcgtctatccacttcttg

SEQ ID NO: 92958 - DNA, 590 bp, Zea Mays
gttccggcctgctcacggcgagatagatcaattggttggctcggcaagctttaccaagggacgcagaggcggtatacgggaggaattggaaaatggcgcagtgacttacccggtccacgttcgctggtgagcggaagaagtccggcgagggtgattcggggtttccggtgaggttgcgctgggtttgagggctcgaggagattcacgggcctctggcaaagctaatcgaactgcttgcgtagaatgggagcggctgggtgagctgaccacggtggcccaagccatgattccatgtttttcatggtctttttaccaatttcccctttttcacttaattggcttaattagggttattctagggtttgggtattttcctcactttgaggtgcatgatatggttaaggtgtgatccttgagatgaaaaagacttaattaaatctttgctcctcaagtttggtgtcttttgctcaatttgattcacatgagataatggccttgatgtttactgaaaagaaaccctaagtaacacctgggtgttacaaccttcccccttaaaggaatcttgtcccgagattcgagtcggagtcctc

SEQ ID NO: 92959 - DNA, 720 bp, Zea Mays
gacctgcaactacgcctcgcacaacccacagggaggatagaggttaacagtggcaatggtagtggctcgtcatcatctagctcatgtgtgtcatcagatatttcatcagtgctggtgctcggtggatgcaaacggtgttggaggtattgcatggtgagcaaggagctcccaatctgcatcaactgcaagcagccctgctttatcggcttcaacactgaagagaagcatggctagagcaagtgaagggaggctagcaagctagagcttattggacttggtctatttggttcaatagtaggctggctagtagagtctaagcttagtttcctatgtggagtaagttttgttcttttatggggtatggactaggtggttcttaatgttgtggtaataatgattgcagttgtcacagtgccctgattaataagtttttttccaagatttgcttgaaacatgttattttgaatttgaataaatacttgggttcttatgagtgaatttggtgatgccaacctgtcaactcggtccaatgaacatttgacatggcatttaaatgatttttgtcatttaccttctttgaaagaccacctaccaacaacatgatcaaatgcacaataccaggtgagagccattatgtattttttcacttatttccatttcattctactctaaaaggtgatggatttaaaaatagtatacaataccatacctcatcagtag

SEQ ID NO: 92960 - DNA, 392 bp, Zea Mays
cgctccctaggccgaaacccctaccgcgcccccttcccctggccggcagaaccgcttgccgcgcgtgccgttcaacagagaagaagtcaaaagcgaaaccatgcgttggccccacctgtacgccacaatcccacgttgtttgtttttcctttcttgcatgcgtgaggccgtgctttctttcctgcaccacggaaaaggagaacaggcccacatccactccatccgcatgcacgtcgcattcaacctaaaagccaaatgcgcatcagaaaatggtcttccccgcatgcatgtccatgtgctaatttttctattagttattagctaggaaggatcctttatgatgaccctctttgtggtcctcattgtggccattttctagccatagaatcgtg

SEQ ID NO: 92961 - DNA, 565 bp, Zea Mays
cggacccctgcggttggtcccgagccctcagactttttaccttccaccgtcatcgtggtggccggaccaccatcttctcctaggggaactttttgactcccctagggatgttgtgccgtcctttagacgaccagcaccatgctcaccacctctatagccactgaatgtataagtacaacgactcccctggctctagggctaccagtattggtagggacaccaggtgctgcttcaactcttgaaaggcttgttctgcctcgtcggtccaagagaatgggccggacttccgtaatagcttgaagaagggcagcgccctctcggccagtcttgagatgaagcggctaagggcggccagtgaccccgtaagcttctggacgtccttgattcgggccggaggcctcattgtctcaattgctttgatcttctctgggtttgcttcaatgccccagtgtgaaaccaggaatcctagcaacttccctgcagagacaccaaagacacacttttccgggttcagcttcgtgcgtgttgcccgcagcttgtcaaagaccagggttaagtcttccac

SEQ ID NO: 92962 - DNA, 440 bp, Zea Mays
aaaacgattaaaatattccgagcattggctagtccaccattcagccagtgtgcacactgtggtggttcaccttcttctcctgtaggactatataaacagataggttggtgagaagttaccacaacattcattgccattgtattgttgtgcttttgaaaattttaaccgaagccgaagctctctgcattgtggtttcaaacaagcgcttcgtcacttaagatcagcttcatttgaaagaaactgaaaactgaaatggctagagtaagatctactgccagagtgtcccatgagggagatgaaactgaagtgactgagatagcacccatattagaagtgatgaggcgcccaggtctggttgtgcaagagggagctactgccaaagggacccctaatgtcgaagctgaacagactgaggctgaggtcgggagtgacaacgaaag

SEQ ID NO: 92963 - DNA, 1669 bp, Zea Mays
tgtggcctggccaacgtccaccttcgactcctcgcccacctgctgccttgcccccaccactgcacgccctcgtcgccggagctcctggctagtgggcagttcctgctgcggcatatggggcgccccctgcctacgctgatccttctaagcctgcacccgtcttggatcaacacaccctcgctgccaacttccaaattgtcactctcagcagtcgcctcaacaagagtggcattttgatactggtgcctccagtcacatgacatccggcgctggtataatatctcatccctcttcttcccagcatcttcctacccatattatcgttggcaatggtcatctcatccctgtcacctccactggcaccacccaccttccctataatctttctcttcacaatgttttagttccccctccctcattaaggatctgatttatgtccgtcaatttaccactgataataattgctctgttgaatttgatccttttggttattctgtgaatgatctacccactcggcgcgagatcttcagatgtaacagctctggtccgttgtaccccctgcgattcccggcttctgctctccttgcatctaccttatggcaccaatgacttggacatcccggtcatgtcgttttatctcatttagcgcagtcatctgcaatttcttgtaataaaaatactagtactcatccatgtcatgcttgtcaactcggacgccatgttcgtataccatttcctacctcttcctcccgcgccacatgtaactttcaattaattcactgcgatctctggacatcacccatcaccagtgtatctggccacaaatactaccttgttattttggatgactgctcccaatatttatggatatttcctttacgcctcaaatctgacaccctctccaccctaaccaatttctttgcctacgttcgtacgcagttcggtgtcactatccagagcatccagtgcgacaatggtcgcgaatttgacaaccttcaagcccgcaccttcttctcctcccatggagtccatctgcgtatgtcttgcccctatacttcacctcaaaatggtaaggctggacatgttatccactccatcaacaatatcattcgcaccctcctcattcaatctagtgttcccccaatttttgggatgcggctcttggcactgcaacctatctcctcaacatattacccaccaaaacacttgcactctctacaccacactttgctctcttcggccacaacccatcctatgagcaccttcgtgtttttggctgcaaatgctaccccaatctttctgccaccactccacataaattatctcctcgctcaaccccttatgtcttccttggctattctccccaccacaaaggctacctatgctttgatcgccaatccaatcgtaccatcatttcctgtcatgtgttttttgatgaaacctcatttcccttttctgaggattccaatccacccacaccagcggcctttgacttcctcgatgatcactctaaccaggttacagctccttttggactgtcgcctgtgtcttctttttaggtactcgtatggcgctaccaccccccccccccaccggtggcttcctcaccggttgtgccacccgctccatcagaggcggcgcttcagccacctgccgtgttggctggccc

SEQ ID NO: 92964 - DNA, 345 bp, Zea Mays
ttttgatgcaattgggttcgtgtaccccgactaccattatccagtgcgggggcagaaaaggaaaggtacggcttctgcgaaagaaactgcttcagctgctcctagcgagccagcgccgaagagaaaaagagtgaaagttctcacacaccggccacgttacattgaactagccatagtgcctgaattcgacagtgaaacgtcttcggcccccgaagttaaggaatcaaccccgctgccaggagccaaagagctgtcctaagtgccaacaacaaaagaattggaggaaccaaagactctgttaccagaaaccaaagagctggccgaaacgccatcgacaaaaaagat

SEQ ID NO: 92965 - DNA, 844 bp, Zea Mays
tccaggacgagattatttttaaggggtagaatttgtaacacctcaaattactattctgggagttaggacaattctccaaataattcggacaaaaatactttttaagattttttttgttgcctttaatagttgcatttttaggttaagactcctacatgaactagttattcctttggtaagtaatatattttaaactaccctcttaagggaataattttattttttttaaatacgtgaccttgtgggttcgtttaaaagcatttacttagtggaataaatcaataaataaattgggtgaagatttcctttactaatgtacatctagaggtatttatttaaataagagagaagtaaataaactgaaatgttgcatccatgctggagatttttttattgtgcattaaattgaattcctaaaccttcaacttagatttaaatttaaattgaaattaaaacaaaaggaaaagacaaaagaaaagaaaaggggagaaagactcatgtgggccaaatttcacttcggactagcaaaccccacttctcccacactccgcccagcccaactcggtatcccagtgcgtcctagggatgactggctgacttgtggccctagctaggctctccttgttgtgtagatggtcgctggcaggtgggcctactggtttagcgttctgaatttatgctctggtcgtcgctgactggtggaccatttcgtaatcccgtctgctctcgtttggtctcactttcgtgtgggtttggcaacaacctattcttctctacatggagcagagctcacgcgtcggcctaactgatttcccgcaaagcccaagaattgttacgattaggg

SEQ ID NO: 92966 - DNA, 486 bp, Zea Mays
gggagctcatcttgtccgtcataagttgtcactggtgctggtctggagccaacaccggtgacttggagaagccgaaagtgtgtgcggagccagcgcgggtggactgcagcatccgcctgttactgcactggacggttgcaggtgactgcagtagaccctagccaccacaggttggagacaacgggttggagaggggcgtgggcagacttcggtgaggggaggcaagctgtttatgtgactgtagatgggccaaaaaacaataaagcccaatagtaaaccctagccgccactagatgactagaaaccctcaaatcggacgcctaatcaatgatatggacgcttaatcagacgatctagacgtcaagaaagtctgatcgagtcatccggctaatcgaccacttttaggcgaccaacccgactaatcgtgattagtcagacgacttgtaaacagaggtttatagtcgttggaagggcatcaacgtgtct

SEQ ID NO: 92967 - DNA, 1048 bp, Zea Mays
tgcaagcgaagggttctgtagaaactactaactgaactctctcctaggtaaggaccaagcttcccaattcctctgttccaaatttttattcgttcttgcagatgcaagaaacgtgctctcatgattcctgaagcaattaaactcataaccttttctttgtcacatatagaccattcttttttgccgctagttgtctcaagtatcaagatgttcgcaatagctactctttttttttatgtagagaaacatccccttgtaccttgtgatgatttgagatatgttttgaccatttctattttctcatttttattgataaattgacaccattgtgtgttctgtcatatggttaccttatcagttgatcttgttgcatgttgttccttcattcaaataatcaaatgtgtcatctgcttttgtgcaaggacaatgagagtaataaatgccaactgtagtcttatgaaatatgcacatgcttttcttagatggtcacagtggatgcaacaaatacgcatttgctgaatcgtcatcctattgttttctctctatttggtccaggacttccagactgatctgcacgcatcatgaactcgtccatgtctttctcagtccctaagtatgcgtagcattaaaaccccccgcaaacaatggcccaatgtacacagccatcggtgaactaagccgtaaaagtagctccattgcatctgtgtactgatacacaaatttgcttgcttgagctcctatacacattacacacttgctgcttcactataggactatgtctcgcctcttcttgttgttcattggctccgcaccagctgtccctttcctcatcattgccacaaactctgaataatctatccttccgtcctacatgtgcaaaaaggtaaacttaagccttttgatataataggaaactaaaactacatatatattgctcagtacgaagaacagctactatgtcaactgaaatttacacaaagtttgttccttacgttgtcggagtccgcatctgcgatgacctctttgattttgtcggcgtcgtacaacc

SEQ ID NO: 92968 - DNA, 1345 bp, Zea Mays
tgttgtagccacctaggtacaatagactcgtctagttttcttgaagttcttgcccgttgaagtgttggtcgtgttcccctttccatgatttgagttcccagggggctgctgaaagttggatttattttactttggatatgggcagtccttgatgaaatgtccagactttccacagttgaagcacccactggaagaattggaaagggcagggaaacgagtaccaggggcactcggctgattgttaggaacaggggcagtagtgggacgaataaagacgagctgcttgaatggatatgaaggtgggcgaggcgaagaacaattttgattaaaaggtcggatcaccaacctagttctcttttcaggcccttgatatgacctttcacctccaaacccctttgattttccatgtcccgcatttttggcttcaactgccagtgttgtactgacagccttactataggtaaggtccaagcatgttgccattttccgctgaagcctatcattgagccccctcataaaacaattctttttcttcaagtcagtatccacctagtcaatggcatactgagagaggtgattgaatttattgagatactgcatcaccgtatctccttgcctcaactggataaactcttctagtttcatctggagtactccctctagaacataatgttcctggaatgccaacttgaattcttcttaggtaacctgatgcccaacaggctgaattgctgaaaattttgcccaccaggtactggcaggccctcttagctgttgagctgcgaacaggggcttttgcgtctccgtgcatcgaattaacccaaactttcgttccattactctcacccatttatcggcttctaagggttcctccgctttgacgaagagtggcagtcgagtctcagagaattccaaataagtagtatcacgcggtccttgagggggaactctgcctccgtgctattggaattggttgcccgtcatttcacgcaagaatcgtgtattatcagcggtggcattgaccagggcagcgatagcctcggccaaagtcggtggtatggatggtggattaggagtatctttctcatcgcgggatgtccccgcaccatcatgtgcgcgagtctgtgatggcatctaaggcaaagaaacatttgaaacatataacatgccaacatacaccatcatattacattgtcgaaatgtagtaattatacagactcctttatacaactcaacctttcttacttattttacataagtacaatacttagactatactactctagtcttcttcatccttcgttgctccatttcctgctacaggagatcgttcatcagcaaggtt

SEQ ID NO: 92969 - DNA, 507 bp, Zea Mays
agggaaatcgaggatgtgtgtagattacactagtttaaataaggccgtgtttgtttgagcttctctgcagcttgtggccaccagaatccgcgtgggccatccaaacacgctaattcttgagcagcgtttcaccgaagcgcttcgcggagaagctggtccgcaacggtccaagaaaagcagccacaacctcgcttctccagaaagccgagccgcttgtgcgggtaccagtgcttttgttctttgtggattcaatagtgtgaagcatctattcactgtacaaacttcgagctttcttttttttactattcagcatgatgtctcagctcagccgttcatttttcactatttcgtacatgtaagaatgtttttatcaacattactaaccacatcactcacccgaaggtaatatcattgtaatgagttgttgattattgtgtctttgcatgttttctttttcactcagaatctacaatatcagaatctgtgtatcaaacacctagattctaa

SEQ ID NO: 92970 - DNA, 705 bp, Zea Mays
ttcaggtaggaaagaaataatcaggataaaaaaattcaataacatcaaaaactctattcaacctcctttttccgcgagcgctgaaggcaatggtcatagcttcatcctctgccttcgtgtaagctcccagcagctcgttactggtagcttcgacagccttaagccagtcatcattcggctcatcaaactgatttctgaaacggtaggtgttccttatgtaaatcagaccaccttcgctggagccggcagcagtctccttcggcatttcctagtcattcacaagtggccacaccttttaagcaatatgctccggtaccaaatccctggtaccaatgtaagtgcacacagtattgaaagccatcaaacacgcttgcacttcatttccacttgcaattaacgaccttcagatgacgaagcgtgaccatatgggacgcttgataataccctccacatcttccctctcactcagatcattcttcacatagaaccattgtttcgtcaagagcccggacacttctttcggtatgtcggcacagggtacctcacatcagagcggttcacaaagctatagcacccgaagttgttgtgatactgttccttcccagttgcttttatctggtaggataattcatgaatattgcagaaacgcttggcatttggctccagcccttggctcctcatggcccaaatgaaaacccccacttt

SEQ ID NO: 92971 - DNA, 697 bp, Zea Mays
cgtaaggcaagggtaaaaccagtgttctacccagggtaaagccacgtgtactcgtggggcccggggttgcctggatgtctagtatttaccatggcggatggtgcagggatgtgagggtcccaggcgccatcatctaggctatagcaaccactggcctaagtaaactagggctcggcacggctcgtcgcattgcgctctgcaagagatctatgcactcaagcctagctcgatatgtcatgagtgtgtcgtagactgaggggcacgcggaccataaacgcaccatagtacctgggactcataggtcatgagtgctatgtgggccgaggggttcataggtcatgagtgggaagagtaccggcacccacgttgtggctctgtagcagccgtggttaatgtggtcggattatttacggtgggtcagtctagggccaagcgtaggatccactcaagtcgtctccttccgacatacctggccccctgtcatgttccgcgacacccgaccctaggctcggtgctggttggttcgacagggggcgggtttattcagggttgacgcatctgcctcctccagctgaccaatgggccccaacgactagggtcactttccccagcgcactctctgactggcgggccccatagaccgggatcatatcccgaacaatagtccccgagcccccggggtgagtgtctccctgcg

SEQ ID NO: 92972 - DNA, 609 bp, Zea Mays
gttaagagctcttgggcgatatgatgaggatacagataaccgaacttgccgagtcattatgcgcacctgcatgactgtctaaggtccttaagaaaaggacatctgtaggtgggcctaataccatgggaggttccatgacagcgagttggtttcgataaaacgcagggttccttttacaagatgtgcaagccgaaggggtatcaggagaatctgaccgtccgatctcggccaatcggcccagattagaatcatgtgatccaacactctgctacccgccctggccacccgatccggtttcaacgggtgaggaacggccacgccccaacttaatcaaaagcactcatcaccgaaccgacgtcctagatcaaaccccatgaagaggtacacggcacttaatctcgactgttggctacaaatctgacgatcccacgttatcacctaccttcgacgtgaccaaacggtagcaccgcgccacccatgcggcggcaagttcgccagcgcaaacgaacccgatgcctgagctataatcccggacccccgtgacaccgacacgatgcccaagccatcccgagttcattggtctagtaattactaggaataactcaacgc

SEQ ID NO: 92973 - DNA, 280 bp, Zea Mays
ctcgatctctgtcttcatcatttccagagcaatgagtcactcctcgccgcgaagggcagcagcatccacctgttgatggatggtgttgcaacgattcgtgaagtgatggtagatctcgtcgcagcgctcctcgaatcgctttgcaacgccatcacagcgcccagagatcttctcgggaagcctggcttccatcaactgcatttcttcaagcatcctgtacacggtggtgttggcgggttccatagtggtggatcacggatgccgcggcacgatgctaaac

SEQ ID NO: 92974 - DNA, 855 bp, Zea Mays
aagaattgtttttatattaaaaactcatttatgtaattaattaactcattcctcgagtttctggattgggcaccaattttcagaaaggttaggggctaactcgcaaaaactctgagacacaaggaaacttcctagtggacagcgggtttatatatacaaaggacagggactattctataaaacgcacccgtgaaggggtacgggctgaatctggccgtccgatccaaacccaaccgctaggattagatccaagcttttatgacttgatacatcgcccgcaatcgtcggatcgtgatccaacgctcccaggagcggccacgcctacactcgatccaaagcgctcatctatagatctacggttgggaccctatcagacgaaggggtatcccacaatctaatcaacacagtccaacgatggatcaacgacccacgtgtggctcacccgaaggggtattcctcaatcgatcggagtcgttcgtgggaggatcaatggtgtcagccgcgtcttcccttcctccaggggcggagcccgacgacaaccagcggcggcggcatcgccggcccagccaaacctcaatcccgagctcgaaatgtcactcccaaaccgattacacgaggcagaggtaaatgcagagtcgttggagggttactcaccaagaatctggccgtgaaggtgccatgtccactgcgtcaggtgattccgcggcgacttgtaacgacggcaggaaattcctgatgcaccgcaggtccccgcgcccggttaggcctttgcgcgcggtataccctccctttaggtcatctggaaccgcactacgaagcttatggggcggtaatggtggtgattgatggcgtctg

SEQ ID NO: 92975 - DNA, 486 bp, Zea Mays
atcgtctgtgtgacatctccaccaaatcgatagttatctttacctgacggaagatcgggcacccccgttcctatcaagtggtattcaaagacttaggtattactctcaggcttaccctagtttagtttaggtttttcatcctataactccagataattgccatacaaaaaaaatatcccgctgtcctagaacccttgtttagccttgcaatttcgtttcagattgctttgttgagtttgtgtccgtatcgagtcttgttgctggtttaggtcgtgtcgtcatcgtagttcaaccgctccatcgctgttatttgtttccaccgctatcccatccaccttacccagattacaagtcgagacaccacattactctatttgcctcgctagccgccttgtgtgaattctcaccacgctagccctagattaggttgcaagccgcattgcattgcaaccctccttgtttcatcatctggcgcttacctatttc

SEQ ID NO: 92976 - DNA, 388 bp, Zea Mays
cagccaactagccccctgggtcctacttaggctcgtacttgtcgatgttggagactttgaagtttgggggccactggatggcccggagacgtggagtaagcgcggagactctgcatgcgtcttcttgtcgtcgttcataatgtcggtcatgggtaggggagtcggtggtgcgtcgtctcaaccgtccccggattgggccactagttgaggttgcagccgattcaactagggtggcgtgacttcgagccgggatgtcgtggtcccggtcatattcctcctggtgccatatctcgttttcgtgtcatcggtcgcgtgaagcattgatggagctttgcgtgtctcatcaactgttgatggtgtgtcgtaggtcgctcgagggatgagcgat

SEQ ID NO: 92977 - DNA, 747 bp, Zea Mays
cttaactgaagattactggaaacagagatgatggtggttactgtgctcgtcactaatagtgttctaccttggaccaactaggaatgaggttaattaaggaacttaaagggcaaactctgagagcatgtgcatagatccataaaagtgctagcgtatgaagctaagctagattaaccttgcagcaaaaatagtgtttagtctaccttacctttttaagactggtcgtcgttgagagattaaacgggtactatcttattgatgtatgtcaaaccttggtgcatgtagttccagaaaatttgtggccttgtggacatgcttccattgtcaacaaaatattttgtctctcggttactcagtagtatcattggtaggagtattgataaacctgagcgtagatcaatgattctcatagccacatttgcataggtctcactgaaatttgaggttcacaggaactgtgtgtatggctgacaatcttatgtttagctgcatgcggaccactttacatccccattcctcattggcacgttaccaaagttttgtgcagtgtccttcattcaatccttgctaccagtccatcctcaagtatcacattaagcatgcctctgcaaaattaagtcatccccaagtatcacattaagtgaacatttgataaaccagatggataagaagcagctccaacacatggagggatgctaaatcttctgaacattggagtagcatggatgttagaatagggaaagttgg

SEQ ID NO: 92978 - DNA, 972 bp, Zea Mays
gactgcccgccgccgccgacggtacgtgactgtgtcattttcttcctcatcgtcgtctgtcgtaaccgcgtcgtcgtctgagaacaagattagtgattcggcggcggtggtggacctgcagcctaggcatatagtcgaatttggggcctcaaggatttactcgggccacgtgctggagatgcaacaactgggttattttggaaatggagttgagcgggctacaggggctgaagatgtccctaagccagaaggggagttggttgtttttgaggcttttttgttgctggtcttcttttgctggcacatcgtttcgtagttgaagttctatggaggtttgaggtgcaaattcatcaattgacaccgaatgctatggctgcactggcaaagcatgtgtgggtcgtgtcctcatatggtggagaaccgtctgttgaggtcttcataaaaaattattgtctgcactggcagaaaaggaagataggtggcttgattgcttagtttggatcttgcaccttcacgccgaggactggaaagacttcggctgaagtgatcgagattgttccgtatgcgaagaataagtggggtaactggtgggagttctggttttatgtggtgcctggcgcgttgaagggttacctagtttaccccctgctatcttgtgctctcgttgttatgtagcgtttccacagtttaacgtgatgaaaggggatcaggacgagcaagcccttcgctgcgcagcccgtctaagcagtggccgtgatttggtcgaagagttcatcgcttgcggagtgtggcctttggggcacgggtgggtgttaggcgaaattatacctcgccggatgccaaccctggaggataagctggtgcaaagcgcagccttcgctatggacttgcgtgggcgggatgtggccgctttcgtgcgggaagtggatgttgggggcctccgaaggtcctcaaaaacatgattaacaatgt

SEQ ID NO: 92979 - DNA, 330 bp, Zea Mays
aaaagaaaaaaagaaaactgcaatagtgactgggccaaaaccgaccgtgcagcccactaacagcggaggaactggccccgcgccggcgctgtgcaattttgcgcaattaccctcgttgcatcagtcaaccgaataaaggtcctatgtcctatttaattgtttcactgaccttagcactgagatccctgtctttttgcttattcacaaactcaagtccacgatagtgactccggcaaccctaagccgggcacgaggttgcgcgctcacgacaagcccacgccggccatctccggcaaggatttacattcttaaacgtcacctgagcccggc

SEQ ID NO: 92980 - DNA, 595 bp, Zea Mays
tgcagaggcaattctatgtgtgcatctttctgcttgaggtttcgaaattttatcttttcatacaaagtagcgaattccctagagaacccaaaattccaagttctggtcctcgttcatgtgatggtaatggcttgctgcatactctcatttcatgactttttaggcagtggcttgctaggactaatgaattgacagacatgtttatggtaatttgaactgagctaaagcaaagagggatatctttgaaatggaacacttcaaagatggtgagtttatggctggattttattctctaaggatggtgctactaatgtttgtatgttattctgaacatattataaacgataaacgagcactgaagattctagtattattcctcccgtgcagaaagggggtcatcttgtccaaaatctaaaaatccaaaccattttgggtgttgagttgctatcatttcaaggaactcaattgttgggttttgttttggctctttttttttaaaaataaaggaacttaaacaagaacaaacaggcataaatttttaagtaatgcattttcaggtataaactcggaaccagcacatatattctatttttac

SEQ ID NO: 92981 - DNA, 413 bp, Zea Mays
gagaagtggtggctgagttagtctcacctgaaccaaggaaaggaggttgtcatcagatggctattgatagcaaggaggcagattcactcaagactatcaaggttgtgtcatagtttccgaatgtgttcccgaaagatttaccaggtatgcacctgagcggaaagttgagtttgccatagagcttcttcctggaactacccccatctttaaaagagcctacatggtagctggacctgagttggttgagctcaagaagcaaatagatgagctgtcagagaaaggttacgttagaccaagtacctcaccttgggccacccctgtcctgttcgtggagaagaaagatggcaccaggaggatgtgcatcgattatcgagctctgaatgaggtcacaatcaagcacaactaccccttgc

SEQ ID NO: 92982 - DNA, 364 bp, Zea Mays
cacgctcggcagtttgtcaccataataagttgttgtgaagtttgacacctcctctagaatgtatgcctctgcaatggaagcctcgattttgcatttatttctacatttcttttgaatagtctttagacatctctcgattggatagcaccaacgtccctgcacagccccccattcgtgcctcatagggagatgaagaatcaaatgctgcattggattaaagaagccaggtggaaatatcttctcaagcttacacagtaacacgggtgccaatctttccaagtctgtaaccacggtccgagataactcttttgcacaaagctgacggaagaaatagctcaactctgaaagcgctaaccagacatgc

SEQ ID NO: 92983 - DNA, 983 bp, Zea Mays
ctttgctatgtcagcagctcagcttaagcctgaacctgaacccgcttgtgcttgctcatgctgccacctaatctgccatttctcgctgggttcctgctccatctgaccatctatctcgctctccttatctgcatataacaattgcatctcatcctggtgtggctcatggccatggaggcaattgcatgcgacctttgcgtcgactaaacctgttgtcagtgaggcttagcctaaacctagccaccaatccacctactcctggctttgcaaagctgcagatccaccttctctgctgctttcggcacaagcaacgacacagatttgcaagtgacaccagctgcagctgatcctataagtttctttgctcatgacctggcaacacaacacttgagcaattgtacgtgtagaatctctactgattttgggcattccatacagtttcttattttctttttgagaaaagtcagttttacatctgccagcgatgggcttattctaggattgttgcactccattcatttttttataggaaagatagttgcacgtgtgattgtttagaacctaaatcagtttgatatggaatgcagttttgttggtttgacgttgtggaaaagggttagcttactctttagatagtatttgttttgttgtactgttacactttcttttacttataaaaaacttacttagatggtttcaaaatcttaaagccatgcataagttttttaagattcaaatactatttagctgcaaagtgaacttttctctttcattcttcgctttgaatagtaggcgccatgacttatgttttttcatatctataactattaattacagattatattgatagtgtccggctttcctgcgcgcagtacagtcccttgtgtggctgagctattatgtatattgactatgtatgagggaaaaattgcagattgttttggatttttatttggtttgtgacttcgttggtgtgattctgt

SEQ ID NO: 92984 - DNA, 531 bp, Zea Mays
gacaggtgggcccaggaatactaaagtatgaagcgcagagcaacatatagagttggtggaccaaggtcttctcttgtggtgggcatgaatcttttctcttggccaccgtgcggactcctctagcgagactcatcattgtcccatctttgtcagcgtgtgggtgaaggtctagcgtaggctggcttatcgacttgcgtaggggagtaagcagatggtgtcttcatgtccccttcgactgtctcttttcctgcctcttagtatcacatggattactggcgtgacctaggccttgcagactgcacacgccgcctgcatttaatgtggggcgcacgtcgcctgccactaatgtgaacaggtgtgcacgctgctcgcaattaatatgggaagccctccacacaagaggcccacgtcagactacacctgacagcttccatgatatgcatcgggcgacgtagcagcatcgtacctccgatgcgtgaagagcaggggctggaagcgtatgtagacgtggcgcccccagacctcccttgg

SEQ ID NO: 92985 - DNA, 426 bp, Zea Mays
gagcacggatatgacgaattgtaatggccactggtattttatttggcacccatcggatatggtgggtatgagtatgttctctcttgttctgtacacgctagctgttagaaaacccgctaacctatgacatgtgagtctagattattagaaacgttccatataaaataaaatgccaacactcctaattctctacgcgaaaattgtgtaaaaacccgctaacctatgatatgtcgggtccgatgaatttatcatgttggacataaagataatatgctaaagtatgtggcttcaattttttatatttgacacttacttttatgattaaaatgatcatgtctacttgaatgttggtgagtatagatacccactaccgtgatgagcatgagtgtggagtaattttgtactcatgatgggtagtgggtacaa

SEQ ID NO: 92986 - DNA, 797 bp, Zea Mays
aaatgccgacgtattcgcatgggaaccgttgtagatgcctgggatccctagggaggtgattaagcaccatctaaagatccaccctgactccaaaccggtgagtcagaagcctcgaagacagtctgctgagcggctagattttatccatgaggaggtccggaagctgctatatgctggcttcatcgaagaggtccatcacccagtatggctagccaatccagtcatcgttcccaaggcaaacgggaagcttcggatgtgcatcgactacaccagcctcaataaggcctgccccaaggacccatatccacttccacgaatagatcaaatcatggattctacctttgggtgcgacctcttgtccttcctagatgcttactctagttttcatcagatccagatgtctaggcaagataggaagcatactgcttttgtaactgtggatgggctttactattatgttgtaatgccttacggcctgaagaacgccttgccaacatttgtacgggcgatgagtaagacctttggtgacctgattagggacaagatagagatatacgtcgatgacatcgtggtcaagactaagagagggtcgaccctagtggaagacttaaccctggtctttgacaagctgcgagcaacgcgcacgaagctgaacccggaaaagtgcgtctttggtgtctccgcagggaagttgctgggattcttggtttcgcaccggggcattgaagcaaacccagagaagatcaaagcaattgaggcaatgaggcctccagcccaaatcaaggacgtccagaagc

SEQ ID NO: 92987 - DNA, 743 bp, Zea Mays
gacaaatagatattctcaacataggaaagtagaagtagaagtagtagtaatgtcagcataggaaagtagaagtagaagtagtagtaatcatcattgctagtcaacaatggtatcaggatgtaagtaatgtcatcattagcaactgagcacatcacataaagaaagtgagttcaaaactgtagatagttcatcattgctaatagacaatgttctcagcatggaaccggttcttacaaatctatgagcaactgagcacatcacataaaggaactcaaacaaagaaagtgagttcataactagatataattcatcattgctaatagacaatgttctcagcatggaattagatctaacaaatctatgagcaacttagcacagtacataatgaccactatcccctatgtgaggccctattttgtcacatctgttgagcccaattatccttggtagcagaccaggcagcattgtccatgacaaggtcaaagggagctccgtcatgaaattgatttgcagcccatgtgtcttctagtggaacatgttcatcattcccatgacgaagaatccagttgtggaggatacaataggctaggactagctttacttgtgtcttgtatggatggaaaggtttgctgtataatattttgaattgttcttcaaagcaccgaaggccctcccctctctattgtcacccttagtgatgatgtctaaggttgaagagctcttttgggttctatggattcctc

SEQ ID NO: 92988 - DNA, 391 bp, Zea Mays
ccgcaagctcccccactggacaacatcgtttgtgtcgtcaaggtataatcctagacctatgcaatgcaaatgaatgtgcgattaattagaggtgctaaatatgtatattaagacctttatttttgtcgattttttgtggccgactggagttaacttttatgcgattagagttagcttaaatttgttaattgatagtgttattagtcttcatatgactttatacattgtagttgttatttttaattttatgttgcaaatataaactgtgtggcttgatgttattaattaatgaatttgatggtgaatctgatgttatacaaatagtaattgttgcaaatattaattgttgtgaatattgttaattgatgaatgtcatgttatgtaagtattg

SEQ ID NO: 92989 - DNA, 449 bp, Zea Mays
cataaataggtgacctgacgtgatctgtttatttagatcggggttatataaaaattatggggtaaatagacataatatatgtgatctaggtgtgtccatcttctactaaagacaactgcgtacgacgaacacgccatcatggcggcgtcatagctctacggcggcgatcacgtcgatgactagcgtaacgtcgctcaggaactaaaatcagacacggataagtgatacacaaagcgtagaccacgacgaatctataagactgatactcacaaagttttgcagcgtggaaccccttctgcccgcgagaagtcatggctatgtggctgtgctcgtcttcggcgagaaatctctggcttcacgatcgactctgtgctccaggaagctacgcacaaccccctatggtcccggtgatcatcgctccacccctcgatcactaggctgctctcctg

SEQ ID NO: 92990 - DNA, 561 bp, Zea Mays
ctttctcctcttcattgatagccaattcccacatttcttccaccaagtgtagaggaacattgggggaacatctgtgtgcatggccccatctatcaccacacttgaaacacaaccctttagccctcctatacaccttcagagctgataacttgccatcatctcccttgccttggtgtggtccattgcattgacgttcttcggtgttgcctaccgccctgttgcccccattggtgggaagggtagtggcatatgtgctgacttgactgacggccgagctgaataagctctgaattcaagtcttcagctttctcttcgccccgggtgcagtagcacatcctcctgcaataaagcaaggtaacaagccaattgggtggatgtttgataattacaacattttaatctcgtccttcaaggttcatcccagtaccccctgttctggatctgttttgagtgcaatggaattaatttgccacttccttggcttggtctgttttatcttgggtctcagttgtctaccaatgtctcaacataactgcaaaattttgagctggaatgtgcggg

SEQ ID NO: 92991 - DNA, 389 bp, Zea Mays
cgggcacaaggcatgatgtaccacaatatcaagtcatttggtagggaaggtgggtggagcataaacaccttgagttttactttttcgatgatgatcccaatctcgagcatcggtatcgtaagtgccgcgaagaatgtcagtagaaagacaaagatgttattaaactattagttggcatactccatggaaacccgtactctgagcaccttaggagcatgggccatgttgagaaccttgatgactatcatatcacattgaaccttgaccagacgttgaaccagaagacatataacacacctctcacttcagaggtcgctgctgtctggatcaaggggagcgaacggcgaggacagttcagcaagagtgttatgctacatgggaaggatagg

SEQ ID NO: 92992 - DNA, 473 bp, Zea Mays
ctccccttttgagaaagtgtgttgtggtattcttggatgatattttggtttatagtactactttagaagatcacgttggacatttggaacaggtttttggtattcttacccagaatcagttgaaactaaaacagtccaagtgtaagtttgcccaagacaaattggaatttttgggccatgtaatcagtgctgctggtatttctactgaaccagccaaggtggaagtgataaaaaattggccaattccgaaatctgtcaaggaggtgagaagttttttgtgtatggcggggtattaccgacgttttgtggcagggtttggcatcataagtaaacctctgaccaacctgctgaagacagaccaaatgtttgtttggactgacaccacacaaaaatcttttgtggcattgaaagatgctctggtcaaggcaccagttctggtaattctagattttgctaaaacctttgtgattgaa

SEQ ID NO: 92993 - DNA, 333 bp, Zea Mays
tccaccgctcagggttaagcagtagctttgacatttttggcggatagaaacctatgcgagcttagtagtatcattttggactaggcttatgggtaccttcccctgattaaggtaaccctataaacttttgatatctgtgggatctttgtcaccgtgttatcttcatttcgaacccaatattatgattatggcatttttccttccatatgagatgatatcttgtcgttcggaaatgtgagttgggataacaatggcgacaatctctgttttcagatggcagctaggcagcgtcgcgggtagaacgagcaggttcccccgccacctcccccagcc

SEQ ID NO: 92994 - DNA, 347 bp, Zea Mays
atggcgtcaatttgactttgtttaatggtcgactttctgaagatggtatggcttggccgccagggtcggtcttcagaatcttcatccccactttccacatcatagtcatcgctatcgtcagaatcttcacacaaatccgccattatttcctttgtgatcttctctgtatttgtttttgccatagattcgtaaaacccagcaagaaaagggtccacaactttcttctcctcagacatcttcttctcttcaaacatgcaacaaccacttgtgtatatcacgaagctcgaaaatcaagcgagagctgatagcaagagttaaaaatttgagaaaataacgcaagcaacaga

SEQ ID NO: 92995 - DNA, 541 bp, Zea Mays
ggaagtggtagtacacatgaaggtcttgatggtgttggaggcatcgggggtggcggaggacttggtgccgggtatggtggaggttttagcgcaggagcgggtataggaggtggcattggaaaaggtcttggaggtggaggtgggtatggcggcggcttcagagctagtgctagtttcgaaggcagtgttggtggaggcggcggtcattgatagggcagacaaacaagcatggtgttttgtcttgttgtgtttcatgacgtacgtggatcgattgcatgcttgcatgtaatctccagggttcatctctaatttgtctattagtccgtgtttgatatgagatttgttcgtttagagtgatgatattattcaacgtacgtgaactaataagtagtatctgctgattcagggatctcaggtgtgtataagccttaaactgtgctctgcattttgaatctgtagcgaaggaataaaacagtgagatgtgattcactcaccaaactagttcttgaccgcttacaaattgctacacgtgacatacgtc

SEQ ID NO: 92996 - DNA, 430 bp, Zea Mays
gaaagtgacagttatcgcataactcgatcgattttatgttcacatttattttggatattttgactaaagtgattttcataaaacaggctgaaaagcttagtgtttggcagtctgtcgtagcttctgatgaacagaaaccgaaaagaacttaaacaaacagggcctatagcccacaaagcaaagctaaacaatacgtgattttgccttctttaagcagagcgtggaaaatagggtacgcggaactattttactttctttaagctaaacaatacgcgattttgcttagagcccgattccaatttgatctgatgcttacattttatagtgtagatttagagtacattgttacctctaccgggcagctagcacttcaaaacaacatcatcaggttattcaggtcggcaagccataggagcaaaccaaggtgctc

SEQ ID NO: 92997 - DNA, 401 bp, Zea Mays
gattcggtttgtgtatcctgactatttctttcctattcaaagcaaagggcagaagaggaaaagtgctttgaagtcacctttgactgcgccgaagcaaaaaagagtaaaggttttggcaaaacaaccaatatcttattatgatgaaatggtgacaacacttgtgacctctagtagggaagatgctacacaggtcgcgccgagtgacgagttgaaggtttactctcctgcacctactacgatagcgattatttggttttttgattgcttagattgaatgtgtcattatgtttattataatagttttaattatcaatgtagaaggagaagaaggatgaggaggaagttaatgaggtgccaatccaggattaagacaaccagaagcgccagcgaaggcagaggcc

SEQ ID NO: 92998 - DNA, 828 bp, Zea Mays
ctactttattttccatgattaatgacaaacttgtatgatacattcttcacattacagagagatccagaaactggtatagaaccaaccgatctatccctttggatgattactcattgtaaaaatgatgaatggtcggaagaggcttcacgtggcatttatgtgagtaaatcacaaagcttactactaaaacatactttaaaatactcggcatcaattcttatttgaattgagctaacttgaactatattgttcttttcaggagaacgcagctgagaaaattgctgagaaaatatatcaaacagaaagattttatctaacaagagaagaggaaaatgctattttccaaacaacattcaaggaaacaacaggatgtaaggcaaacagacttcatggtcatgggtacctatcaagatatccaacaagaagtcaagtgatggaatcaaagttcctcgaacaagctcgtgccacggttgccaccaaccaaaaaacattgaactcgaaagtcaggtccagttgttaaatgaaaaacttgcgtgtgaggttgcagaacgagaaagaatactctaggaaaaaatgcaagcactgcaagaagaagaagaaaaaaaagacaagtgcttagagaagaaatgaggcaagaaatgtgctgcccttgctgttgtagcacaacaggtataaaatttgatatttgtatttttaccatcattgctattagaaacttttgcaacataaattgtttgatcaattgtttaatgcagagcaaccgtgaaagcaccactccaatcgatccttcttccgttgtccctactaaacctcctgaattcatcccag

SEQ ID NO: 92999 - DNA, 572 bp, Zea Mays
aaggaatcgtgcccttaccacaagggcccggtcaaacactccctcgacaagtgtgacatgctacgacgcttctacaacaagcccgacccctcggctgaaggaggcagtaagaaggctcccgacaacagagacgacgacaagggcgatggcttccccgatgtacatacttgctacatgatcttcaggggagacactatcaacctttcttctaggcagcataagcaagagcgtcgggaggttttctcgatcgaggtagcgaccccagtctacatagattggtcagaccgcgccatcacctttaaccgggacgaccacccaaactatattccaaaccccgggagatccgcttgttgttgaccccatcatcggcaacacatgcctcacaaaggtattcatggatggaggcagcaacctcaatatcatctatgcagacaccttggaactcctgggggtcaggaaatcccagatccggcctgaggccgcaccattccacgagatcaccccggcaagagggtgcatcccctcgggcagatcgacctacccgtctgctttgggacccccgccaactttcg

SEQ ID NO: 93000 - DNA, 413 bp, Zea Mays
gcctgaaaagagaaccaggttggtgatccgaccttttaatcaaaattgttcttcgcctcacccaccttcatatccattcaagcagctagtctttattcgtcccactactgcccccgctcctaacaatcaaccgagtgtccccggtactcgtttccctgctcttccgagttcctctaatggttgtttcaaatgtggaaagtccggacatttcatcaaggacttcccatacccgaagcaacataaatccaacttctagcagccctctaggaactcaaatcaaggaaaggggaacacgaccaacacttcaacgggcaagaatttcaagaaaactggacgggtctattatacgtaggtggctactacaccggaggacgaaccggtgatgatgggtacgttccttgttgccaatcacc

SEQ ID NO: 93001 - DNA, 281 bp, Zea Mays
aacaaactggagtaatttgtaaaagttcccaagggcacccatatggctaactctgaaatcagtgtgaataggccaagtttgtgcccttgtatctcttaatccatggagattttgccccaagtcattcaaacaaaatggtagagctatgttagtagtacaagtttgattaagtgactaagccttggagttacatggaaatgggagagaaatggatctaaagttcggctgtcagtcaccactaaagactgaaacccgactgatggtgtgatctgatgaacttt

SEQ ID NO: 93002 - DNA, 313 bp, Zea Mays
tgcatttccgccatgcgccgtggactgagcccggtgcttgacgacggtagaaattggtaggggaaacgagttcttaacgtcatcaattgggcgaggagcgaagtaattaggagagggaggtctggatggccggaatcgccgcgcgccggaggaatgtcgccgcgggcctctgtttcaccctccctagtcgtccgaggtggaagagcgttcgcacgccgtgggtttggaagtggatggctaggattgaatctggtgagggagacaaccctggatcgttggatgaccttcgaacgatcgggattagggcatcgcg

SEQ ID NO: 93003 - DNA, 447 bp, Zea Mays
caagatattttctcaaatgggaagctctacttcatgtgtcctcaatggcacaacctttctagggacttgtccaaggttagtctcaaccctgggaactactcagctaacatgtacccaccagaggtaccgctcaaggaggcttatgtcacactctattaggaaggttcagccaagactcatagtaaaaccctatctagtcggatcaacccttaccagataccaaagacgacacacgcttgaatctctcatccatggtatacaccatatagtagtggcaccaagtgtctagtttacacataagcatgtccacactattcatcacatcagtagatatcacaaatagtagtaaaagtaattagcaagtgtcggtgtttcgaaccagctccaacaagtaaatttgtttgtgtgctttctaggtccggatggtgtgctcagtgggcgcaagat

SEQ ID NO: 93004 - DNA, 729 bp, Zea Mays
ggattatgaagtctttctttttcagattggcttcgtgattttcaactttttcagccaaatcttgaatgacggcttcgtttttcttttcttccagatcttgttgcatttttagaaccttgcttaataccatgctctgtcgaaacgatcttcgttagaacgtgacctaaaagatagtaataatagtaataaaataacaaaaatatccattaccttgaagttagcataaagcaagcttccggcgatgtggtgtcgttgataacggcacaagtcagtttccagcttcggcaagccaatgcttttggagagggttctaacaattttggcctcggtacggttccgaaggcatcttagtttcccttcgtttgccccaccaaatagcatagcccctgatttatatccgcaagatatggcatgttttttcaactcctctttctcagcgtctgttaactcttgtccaagcaaatcttgaaagttaaaatcttcttcttccgaaatttcatcaatttgctctttccccttttcagttgccgtgctcaccgcagctgcagtagtttcttcttcagccattttcaggagtatattgtcaataacctcaagtgtggtttccaggttcgactcttcggtggtcctggcttcggccccggtagttttggcttcgccggtctcagcttcagtggtttccactccagtagcttcggctgcggcgccttcggcttcggcagtctcggc

SEQ ID NO: 93005 - DNA, 808 bp, Zea Mays
tacatgctctacctcgagcttctcggtcggtacgcggtggctcctgtttacccggagcgcatggagaataaggatatgtaaggaccttactcggttactccacactggcgtccttcacttttggtttggtgtactctattcatgatgcaacttgcacacttgagaattgacaaattgcttattggatatcccggtttaaatctgcgctgtatttgactatttgctgatgcttttgggtgcgtgggcccagcttgatccggctgctgggaggttgcctggtcatttcgattagatgtatctgcgcaggtggaaactaggtagggtggaaacgactgcaaaattcttggtcttggtcttagaaagaaaaggtgcaccatttctaaccttgtgctgtgggccaaagactcaaaggcttcacaagtgtcatttaagctcctttcacattgggtggcttttcaaaagcaacccctacttttttggtataagccactgaataaatatttaaaacatacggttcaattgaccaaactatcttcaactataaattgttccatcaatctgcagctttctgataatggatttttaatctttaaagttctcatactgtggtcaatcacctgtaggcatgcgaaatttactgttagttatttgttaaaataatattttctatttgagtcatagccaaaaaccttacttcataagtgcatatcatataacacagcatagtttgtcaggaaattgcaaactattcctgtgtgtaccaacatcgtcaaagtgtcttattgaaatgtgtgcaaacaccaagggt

SEQ ID NO: 93006 - DNA, 710 bp, Zea Mays
ccatggtaaagatggtcatgtaaaagctttttgctacaaaaagtagaaggtgcataaggctcagactcgttcttcacaacctactagtagtgccagttttagaggttcttaggggagttttgctgattgtcactaaggagatgctgatgctccatcgcattgctgcctctttactgccaggtgctgctagttatgtgaccgtctttgactctatcaggttctgctgctgcttcttagtcttctactaagggaccattcgagtacttgtgcgtggattcttgattctagtgcttcttttcacatgacctcattacatcgatctttcttctatgtgtccttcctcgttcccttattgctcatacaattgatggaccctctctctttgttgctgggtaggacactcttttgttgaaattttttcatgttcctaacgtttcctgtgttccaaacctaactttaggcttatgtccgctagtcaacttattgatcatgattgtcgtgtgttattcttgatcttgattcttggtctaaatatgttggacatgaactaaagaatgaactaacctaatgaataagttaatgggcatgagcgcgagtactcggactggaaattggtatcctcatcactctgttcccctcacttttgggctgatactgtctctactgccacgtatctcactaagatttagctttctttgactctttagggt

SEQ ID NO: 93007 - DNA, 1013 bp, Zea Mays
ccgggcgtacgtgactgggaaaccggagtggcctcctagagcactggcatgaagtgccatgatgaccttggtttgcaattgagaattattatcgagccaaatacgctgcttgtaccgaatgactccatctttgagggtgtagtgcaactgatcagacagcgccagagcagacaacaacttcatcgcacgagggtcagagatgtagccataaattacctcctggaaccaagcgggagaagccactgacaaggaatagaggtgaccagtaggatgtggacgacgcgaaagggcatcaacagctgtattatcagtgcccttcttgtattgaattcgataatgtaatctgagcaacttggtgaacaccttgtgttgccatggggtgtggagtcgctgctctgtaaggtgggaaagactacactgatcagtataaatgacaaattcagtgtgctgcaagtatggtagccactgatccacgaccaacaagattgtgagatactctttttcatatgtggacagtcccaagtttccagggcccaaagccttgctaacaaacgctagaggatggccattttgctgcaacactgctccaatgcctgaacccgaggcgtccgtctcaattgtgaaaggacgagaaaaatctggtaaagccagtaccggtgctgaagttagtgcttgtttaagggccacaaatgctgattcctgcacagatgtccagacaaaaactgaatgcttcttgaggagggaagtaagaggcttggccaaaaggccaaaattgcgcgcaaacttgtgataataacccgcgagaccgagaaaccctcgcaattccttgcatgaggatgacacagaccatgaagaaatagcagccaccttggctgggtctgtggccatgccagcactactgattacatgtcccagataagcgatctgctcgtggccaaaagtgcatttagacaatctgacctaccaattgtcgcgcgcaagcaactgcaacaccaactccaagtgtgccaaat

SEQ ID NO: 93008 - DNA, 486 bp, Zea Mays
acgacgtcggtagtgcccgcccgcttgaggtagcggagggtaggactgaaccggattgaggcgtcgtttgtgttatggctcaaggtcggaattgccggaactggtgttggaggccaccgcttcattgagtggatgtgctggtgaagcactgaagccatgttggaacaacatgaaagcacatcaatgtgcaccaaagctcccacctgtctcgtcgaatgttgtcgatacgacatcaaggtaccaatggtactagagaaatttgtagatttaaagattgagtgaggggcataggctggaggcctgctggatcagggcactgtcacagcaacaagcacacaaacgatttatagaggtttgagccgcgtgtgcgtaataccctatgtcctcattgttgtggatgaattgatggaagcaaagacgaaattacatgctcatacactatctgaactagaggaccgactagcctgccccctactttggttctgg

SEQ ID NO: 93009 - DNA, 853 bp, Zea Mays
gcgacccagaagaaatgcagggttgaacacgggccagagaaaggggcgatccaatcctagctgatttctgcgtctcattcctcacggactgaggcgaaaccggcctggctggggtcagcgacccgaggggcccaagcctagacatcaccgggaggggcgaactcagccctgtcatttccagcgacccagtcactttggactgaggcgaaaacggctgggtggagttcagcggcccaatagtgcatgtccagctgtcagtaggggcctcatcatggagactgtttggcttctctgcaggcaactcattaatgagtatcatcccattatccgaggccatctgctgtaactccggtgcgtcaaagagtggttgttcatgtcccctagatgaatgtgaagtccttccatgtccagacggcgggggaggcccaaggcgaaggtgaacagaccgttgctggggcaagggactgcccaaacgccgaggctcatcattcctctggtcatccatgtcgtccgaaccatcagtctgatcgccatcctccggtggagtcagcagcgagggacctctaataccatcatggcagattgcaagtaccctcacgcttatgttataggctaagcatcttcgttcagagttttgtgggcctggctccagaatatgcagaatcatgtcacggtgcaattgtttcggttgaacgaggatggggatgtttccccatttctatcacccgacagggactaaatctttcccgttttgatccccatggggactaaattgtcctcatactcgtcccctattgggcatgtccggttcataggggtacattccaaagagggctgtcacttgaaccccttg

SEQ ID NO: 93010 - DNA, 705 bp, Zea Mays
ccacatggtgccctatttagttcagttcagcaaacatcaaatcgcgagagggggaatcacaccattattatcgaatcatacgacgcccctgtttatttagttcattgagcgtcgaaccattctctaccttgtttcaacatgtcatattttcatattttagccataacttttaactctagactctagttttgatgatctttgactctttgaaaagataatgaaaagctctacgacttacatatgaagtaatgtccatttgagcatatcaacaatcatgagaaaatttcaaatcatccacctttttgtctctactttagtggcctcaattttgttgatgttttgcatctaggcttctacttcttagtgtcttagaattcttagaatgtcttgtaagtattaaacatggattataatgtcttgattgaggtgttatcattcgaaccatcactttgcctaagtccaattccaccttgcgtccatttgaagtgtaccttgtatactagcaaacaacattattcaaaatggtctagttgttcatcaaacaccaaaaatccaaacttaatgacccatagggtccattttttatagggtgaagttctctctatttagtatcgacatagcatcaaatcattgatcgttagtataatggttggcttgtaggcaacatcggactaatgggctctactattcaccagggaggcccat

SEQ ID NO: 93011 - DNA, 711 bp, Zea Mays
gcttcatttatgatatttgagtccactcgatcccagatattctgagagaggtatgtcctctttagttggggttttctacatgtgggtcaatggatgcgttatatacactttatcttaataatctagaaattcttgatgatgtgggctgctgaaaatgctatctttcaaatgggaaattatattatctcatagtgagcacatcatgtggtatttctcattgtgaaacacttctggctatttttgctgacatgtattgaaaggattgatgttgttttagattataacatgtggatgaggcttccttcttcttgtttgccactcaatgaacaaaagaacttcttcatgccttgagttgcttaagtgagcaaccatattgacttaggatagaattttaattactttctcattgtttgcaacattttttacttgctacgaaaaataccgattatctcctgcgggtggacatgcacttatgatgcttttttcattttagatccatacacagtaagttctaacctgatatcttttattatggcttatatttccttgcatagaataataaatcattgatcacaaccaactatagtcctgagactatgtgcaccttttttctgtttgccaccttgtaatttctgcttgtgcactttgtagcacactgcctttctgaattttaacatattgttgcttatttctctctgtttttacatattg

SEQ ID NO: 93012 - DNA, 732 bp, Zea Mays
gtgaaattccagacatatatacatggaggaattagcagctcgggaaattaaagttgacaggacacctcagtggactgatgatgaagcagagcaaagtgtttgatgaccaaggagaggagattggtatgatgaggaagaatggatctatatttctcctcagaagaaattgcagaatgagaatgaaggtggcaatgaagaagacaattgtggcactgctgaagaacaagagggtggctctgaggaagaacattgtgacactgacaacaaataactgggtggcaatgaggagaagaatgtgacagtgctgatgaacagggtgccaatcatggttcagatgacacttcagacaagaaacctacagacgaggacagttctgcagaggatgaagaagtaatagaattgaggaggtttgcaaagaaattaagaggaacatcaaagctaagaagtttggtctgcatggtagtcagctcagagaaatcaaagagcaagctttggtagtagcagaggttcccaacttagaagacccaggaagtccaatatgtgattcaagtggtgagtattcataggagaacagtgcaggagaaacagagaggtggaagagtcaagaataggtatgacagcaaagcaccaattcctgtttttgctcttgggacagcgttcagatgcagcaggtagtttaagaaagccctgatcaagtatgaactgaagacacatagacacctcaaactcatc

SEQ ID NO: 93013 - DNA, 274 bp, Zea Mays
ccggaagaaacccatgccgggcaatgcgggttacaagccgcatcaagaactcttgttgggaaggcatttagagctagtttctactggccaactgccaagaaagatgcagccgacctagtccagagatgtgaagccgatcagttcttggccaagtagcaacatctactagcacagcacctacagactattccagtcacctgacccttcgcatgctaggggctggatattctagctagggagcacattcggccaatccctctcctcctccctcgtg

SEQ ID NO: 93014 - DNA, 512 bp, Zea Mays
gtttcggtaaaaaaagagaaatccaatcaaaatggcatccaacagactcgtcatctacctctcttctctatctggctcgtcatctactccccctcgttaggcatatttgccgagggcctcccactcgccatctctgcaccatcctaacctcccaccgaccacctttgtgccaattccctgatctcgcttttttctcccgctcacatgccgtacctcgccaccacgaccagctacaggcgtacagggctacagggcgttgatgcatgttgcggcggcagtcttagctacaggcgttcgactcccacctggctagaattgcggctgcgcgtccatagcctgagagtggaactcgcggtggcagtcttcaggtgtccaattcactgctggcaggaactgcggctgtgcgtccatagcctgggagtggaaatcgcggtggcagtcttcaggcctccaattcgctgatggcatgaaactgcagctgcacgtccggcaattcgtttctggtggcgtcg

SEQ ID NO: 93015 - DNA, 284 bp, Zea Mays
agccttaatatgttcacaaccagttttctccaaaattgttgcaaccccacatgcactgacgaaggcacaaaagtccccccgatcgctgagtatttttcttcaaaagcttcgacctcttcgccgatccactggataaccccttcgggatcaccatggataaatttttgctctgacgagtatgctcccacctttgcaaagctatctttcagtttctcgcgcattcaatggatacttcgtagcatttttccttggaatcccgaagttcttctacaccctggctcttt

SEQ ID NO: 93016 - DNA, 555 bp, Zea Mays
cgttgttagcttcaccggcattcaggatacccataacacaccttgacgttaactctaccatcctctacaacctagagtacggtgactcgatatccgccatgcttccttgtcattgtcgagcgcctatggtaccatgcagtctctctctacgccacaaggagcatcgctagaaggtgctaagtcttctccctctctcagttcactcagttacaccttaagtcacattaattgctcgttagagttctacatggccgccgcgagtacccttgccactgttcgtgccctcccaattgctccctcacctccaaccatgcgtagtgagtttactgtggcctgccatggattggtggccaatgttagtcccagttgagctctttgttgcccggtctagaccatgatggtgaactcccgctgcggagcgcatcgccattgtcgcattgccacccgaacactcgttcatttaatctcaaccattcgcgtgtgatctaatggtctccacctgtggatactggtcagtgccaggactgaccgtgctaaccacgaccttttgcaaaa

SEQ ID NO: 93017 - DNA, 1020 bp, Zea Mays
caatattgtccggctgcgcacagaaatttaacatttactattcaatagcgtctaaatttaacatagtatatgtacaacattacaaagaagtatgtaagagaataagagtatcatatttgggagaacttacatggctttgaagaatatgaggtgtgtcctattcatgcggcccaatatgtctcatggggatgtgcttctctgcgccgaccacatctgccgtttttgtgtgctcatcgatatgtccaggtgccctcaatgctgccgggggagtaacggagacaccctctgtgtatggggcgatcgcagacgctacaggatgcatgtccattgaaatagacgtacctgctggcgtatttacagatgctacaagtggcatgtcatcgccagctccggtgctagacattttctcgccgccggcactacctctaacttccgccgccgctaaccgcctccaatacctgagataaagacgtggatgagctaaccttgtatttgtttcctcccgtaactgcgcctttatttacgcgcacgaagagcacgtatttccttatctcaaactggtgggagattttaaatgttgcatggtttacgctatcatgtctcacagcggtatgcaatcgtaaaccggtatgcacatgcaaatattcgttcccgtgattcgtggcagaaacttttccatttatgcatgagttatgcacatttccatatacctttatgcgtgcgtatattggttgcagcgtctcagccgggatacgttgctatcctatgcatggctgacgcaagctggcgtccattgggccgaacgcgacccgatcagcctcctggctgaggcttcgtccactaacggaagcccagggcttccattacctcttccctatatatatatagacacgcgctccctccttccaattaaatcgcaagcgcctttcctgtacatgtaacatacgatgtattctagagattcatacaacactccctctattctaaaattattctaaaataaaattcgtcttggctttt

SEQ ID NO: 93018 - DNA, 330 bp, Zea Mays
cacgaaccaaccacgaagagtttcagctcggtgttcagcagctatgcttgaatgctggaactggaagacgatcccaacggaagggaaggcggcggtgacatgtgaattggaggcgaaggagacgacaacctcaaaaagggactaaacacgagagaaacagggaattcacttacgcttgtcccacactaattgggtgtttggtttgaagattaagctaatccatcttcttctcactatttttgtttggttcgtgactttgtggaatagagtgagttgatccatcaccagctcataggaagaagttattatactaaatttgagaaataaacc

SEQ ID NO: 93019 - DNA, 670 bp, Zea Mays
accgaggggaccaccactgttttcatcttgttgaggaccttcgtcagtcatagaaggagtaatctcctttcgaatcactagaggaggggtatcaagaacatcccacatcacattcatcattcgacgcttcttctaagcgttccctccaccgagtgccgaaggatccttgtttacctctgcttcggcagttctctcaacatttttcttttgtggctgtaataagcttgttagctctgatcctagacgacttagcattgggaaaggtaaggatgcagtcattacatctaaaatttctgtcacaccaatggaagctgctgaaggggtcgcttctgaatgcttgggtggagaaggtctctcttcttctccacggtctgatgacataactttccttttccttggtaccgaaggctttggtgtcaacttcggattctttatcaaccttttcttctcgtccttttcaatagatctctgcgcttgccttttcgacacacttacaaccctttttcttttcaaccccccggcttctttgtcaagtctttcatagtcagggtactcgaagcccaggtcatccatcacccgattcagcctctgtttcttacatgtaccgaaggcaatggccattagctggtcctctttcttcatataatttccaagaatctcattgcacatt

SEQ ID NO: 93020 - DNA, 286 bp, Zea Mays
gcgcgacctagtaaggttgtggctaacagatcgtgcatatggtcgtgcaaaacactattttacgttattttacactgtttacatagtggaagtttgaaatcagggatgagatgagtaagactgctacaggtagcctaagtcaatggcggcgtaaccatatgcccacgcattcgccgggatttgttccacgacccatgcgttggggttgaaaaccataatagggtgatggagaatcgtcaggactcctcacgagtatgccaggggagattccacaagtggactaaac

SEQ ID NO: 93021 - DNA, 531 bp, Zea Mays
ctgaacctcggttgctgcgcaggttccgacgtttgggcctgcgcaagcaaccgctgctgactatactgattttgtggcggcctcaaccatagtgcctgccaatgataatttgtctgtttatatgtctgatgattttgagtccgatggtgaatctgggagtttgtttccttagacggaggagtcctcggatgaaggcttggattattttgttgcgttggatgtggctgcggcggaggcttcatcgtgtatggagggtgccggggatcttcctagtgcgggtggagggcgtatgcggtgaagggtggtggggaaacatagtgtgggtgagttttcgtggagtggcaggcgccgtcgtattgggatggagcgtgaccgtctccgtgtaaaccgggttgataaacgagaattgttgtcctcgtcggctggggcgagcataggcgagggggatcttcgggagctttttgagggtgaggaattgaggataatgctgtttaattacaaggagatgggtatcattccgaaggttgagcc

SEQ ID NO: 93022 - DNA, 273 bp, Zea Mays
ggtttataagtttatggcaaatgcagcatttggatttacggtcaaacttgtgcaatcagagcactgtttgcttttggcatggacatgtgcagcatgtgcatttttctatgtgcattcagctactatagtgatctaactagttttggcatgaatttgtttatctctttaactccagggctccaagcaatattggaagttgattaactcaacatataatggtgcaggtacttgttccacccagtacaaaggcacttaagtggtgctctcagttta

SEQ ID NO: 93023 - DNA, 655 bp, Zea Mays
gcgaaggatcgatgtcgtatagccttatcatgatagcgcctcagggtttgctggtatctagctgactgaattactgtgttcaatcgttcttcttccaatacatcaatatcctctagtctggtagcttctgcctcagctatgttttcgaagaccaaccttggtgccccaaacctgaggtcggcaggtagcactgcctccgaaccatagaccatgaagaagggagtgtttccatgcaaagctcgactaggttgagttcttaggctccaaaccacatacgacaactctctgatccactttcccgtgaacttttcattcttgtcgaagactttcttcctgagtgcttccaatatcattccattagccctttctacctgaccgttggctcttgggtgtgctactggcgcatatttgatctggatgcttctttgctcgcagaaatcaaaaaattcagagctagtgaaattggatcccaagtcagttataatgctattcggtattccgaacctgaatattatatcttgtatgaattccactgccttagctgaagtcagagaagtaatgggtttgtactctatccatttagtgaatttgtcaatggcaaccagcacatgagtatagcctccctgagctttcttgaagggtccaatcatgtcca

SEQ ID NO: 93024 - DNA, 290 bp, Zea Mays
acagcagctgcagaccatacctgtaacatgtccatttgcatgctgggggttggacatgattggacccttgaagaaagctcagggaggctatactcacgtgctggttgccattgacaagttcaccaaatggatagagtacaagcctaatgcttctttaaccatagccaaggcagtggagttcatacaatacataatattcagatttgggataccaaatagcatcataactgacctgggatccaacttcactagctctgaattctttgatttctgcgaacaacggagtatcc

SEQ ID NO: 93025 - DNA, 305 bp, Zea Mays
tcagctcttctatctcagcggcgagatcatcagcggaaggtagtaccttagaagtagtgtcgtcgctggtgccgaccgcgtcctcaccaagtgccatggtgcataagcctcctgcggtgtcggtgatgaagcacaacccgttcagcttgtcctcgacccgcctctcagtctcctcgtcgctcgaggaagatataacatcgtcggagtcgtggtcgaggtcgctgagggaggcgaggaaggcacgctccttgatctttgccttctgaaggtacttcttcttgagcgcctccttgttgaatcctccc

SEQ ID NO: 93026 - DNA, 418 bp, Zea Mays
gcataactcacaacggaatacaggtttattcacgaacacaacaagagttaatcatggtggatatatctaatgaaaaaactacccattaaatgaagacataacctctaaagcacacaatcatgattaagcaagcatggttacgatcttggtgattattaatcattgattgaaaggtactcaacataggtaatcaacaaagcataactgctccaaggacaggtagcacatcaatcagacttaagagcagtactgattatcaacaaagtacttaagatacaagggtaccatcctatggagcgcaagttgcagaatctcattaaggtcctctgcttgaattaccaataatgattaaggacctattcaacttttcacttgagatgaacatgggattagtgtctcacaataattcaaccttggg

SEQ ID NO: 93027 - DNA, 370 bp, Zea Mays
cgataccgaggccacaaatcatatgtcagggtctcgattagtgtttgcgaagctagacaaggaggtgcaaggaactatttgatttagggataacttagtagtggagatcaaaggctgaggtatggtgacattcaagtgaaagaatagggaactaagggaattcatgggcatgtactacattccgtgtttgaaggccaacaacattagtgttgggaatagatgaggctgattacgaagtctgtatcaagggcgatgtaatgaacatcagtgaggtagctggatgactgctcggtgctcgcgagggtgacacgaggaagtaatcgcctctatattctgaaggtgaacttgaagacacccatttgtctctcgg

SEQ ID NO: 93028 - DNA, 569 bp, Zea Mays
tcgaagtacacataacagccgtattaagtaaacgcagttagtgtttatgaacgggtaatgaccacgacattcgtatggataagactatgtattatgcatttatattgagacttgtttgtggatgtaaatgaacaattttgtgtggttaaaactcattcagtgtgagtttttctgatttaagttatcattttccgatcaattccgagatattttgtctagatttatatgttttcggtataccagaatttaccgatcataatccgtttccgactttctcgttttctgatttcgaccgaacaaaaattatacgggtgaaatggcgagagggtttttccgactgttaccaacctttttcacccttagtacgggtcaagttgtttgcgcttattgtttaattcgagtatttcattgtatatgcattgtgctcatatttgctatgccacttgtaacacaagtggttctggaccaatatatatcaaagatcctagttcttcctccaattcgatgtctgtgcttttttcacaactctctcacctctcaactgggcttgagctatgcttggagaactg

SEQ ID NO: 93029 - DNA, 463 bp, Zea Mays
gtggttgtaagtaccatcgctaaacagtcacacccggttttaaggacaaaaccagatgttccactatacatgaaatcagatgagaatcacatgtatagcaacgccacatagtggattatatcaaaacacattgatttattatatcgaaaccagtattaattagataacgactatgcaacaatatcattgacgactatcaatatttgtcaccgtgtgtataataatacgtatattattatcacaaagattatgcaatgtaaaccaaatagtcgacgtgtttatatatacttagagatacatatacctgctactactttcttatttgtaggtaggcacgtactttttgctagtaggtgcttacattagtcttgttgtaaatatttggtggtcacattgcactagtacatagaagctctatattggcagtcttagagatatttacactagcgatttttagtgccgc

SEQ ID NO: 93030 - DNA, 542 bp, Zea Mays
ctccgtttccttcatctttggcatcccccaaccacttgatgttggatacgtctagttggccaggtattcttgcaccaagtccctggtgctgatttgctcggctaccaccctgaattctacctcgggcagctggcatgctgaccctagctgcatgttgcacaggggcctggtcattccgaagtttaaggacagcaggcacatgaccatcgtcatcagtttccccctcttcttctcatcagccttgatataaaaccattcacctttccagccggttggccatttggtgcggtaactgagaactggagccttcgtatccttgcgatacgcaaaattgtagcaaccaaaatttttatgaagaccgtctgccctggccttcgtctggtagtgcaactcgtgcactcggcagaatgcttcggcatctggctcatcccttggcttcggagggcgtagatgaagacgctaagcctaacaatggtgttaggggtcagctgatgaagatatatttctaaatttttcaagacttcccctatcatctcattcag

SEQ ID NO: 93031 - DNA, 852 bp, Zea Mays
cggcagtattaatctttgaatctttttcttcaagaagattttcaagttctttcactctttcttctaagttactgataacaaggtcatttttcctatctttgttttcctgttgcagctttaaagctttgctcaatagtaggctctgttaaaaagccgaagtcacgttagcccgaaactctcaaaatttaaaaattaataagtcaaagaggtaaacattaaagtttatgccttaaaattcgaatagaacaagctcccagtaatatgttgtctcctataattgctgagatctcgttcgagcttcgggaatccgatgctccttgataaagtatagacaattttcgccccagtacggtcagggatgctccctagaatctcctcgtcgacaccaccaaagagcacggatctaggcttgtagccactagcaatatcaaattcttttaacttagagatatcatcttcgaagagttcctgaccgtccaagtgtcgtaggtccaactctctatcctccgaagaagctccttccaattctttcatttttaagggcaaacccctattagtggtcacttcagccatttccctctcagggatcacatcagctataatcctatcaatctctgacattgtggttccaagagggcctctgctattttcagcatcaggggccgcttcatcagcttcggcatcaacatcagctccggcattagcaggggcaacacttttttctgccgagaccggaggcggggtcttatggatagccttcatcatagccatcgtgcgtcatttcttctaaccccctcatttcccatagttgctaaaccagtcttcttcccttccacgcctttttcaaccccc

SEQ ID NO: 93032 - DNA, 517 bp, Zea Mays
atatttatggctgttttagtggagactgcacaggaggtgaagagtctacgcgagtttccaatgaatcattattatcctggagtttcctaagctaataacttcagccatttgaagaggtttgttcacaccttcaaggggtccgtccacacctagctaggagggttgttcctagtataaatacctattgtatctctgtgttaagaaacatttttctattatttgaaaaaccaatacactgtattgcagccgataagcttgaaacttgagagccttgcacctttgttcttgtgagttcattggacttgtgagagatctctctaagatcccctagtttgtgttctagccttctaggccttttgtgtggattagtcccggattgtgggtctacgatcgttcgaaggtcgagttgaatccaaaaggtttcagtttttctttccctgtcgcttggttgcctccaaccattgcaggttaaagctagctatccttattgttcacagctagttatccttgtaattgt

SEQ ID NO: 93033 - DNA, 451 bp, Zea Mays
gtggcatggtgcggtggagcacaacatggagtcaaagaatcaccttttaggctaagacaacgaagacaaggagggaaaattgagaagcccccaagcttagggagtgaaaaggatgaaattgacatacccactccaaatggggacatctacctaagaagcattgtaggcaagaaaatcctttgggacaaattaggcatatacctatttgaaggtacgacgatgtcacatccatcaacgtctcccatgccttaggatggatatgatgatcatgatcacaatgatagtgaaccaggaggcaatccgctaggcaattcatcagatagtcctcctagcatgaacaagacacaataaggaacaatatcgacaacaacacccgacaacactacaccgcctgcaagtgatccgaagggggcaaacgatcatgttcgctcgcaccaaaaaaagatatgac

SEQ ID NO: 93034 - DNA, 430 bp, Zea Mays
atggaattacctgtgataatggatttagaatgcgagcattcttttcacaatgcaaaaaatctactgtggtataaagataaacttgattcatttcagttgttgcatgcttaccattgtatgtttgtcctataacaatttggcactcgattgagtggaaaggttttgccaccctggcccattgccagtgactactgctcaagggtggcaaattatcatgtgcctcaatgattggaaaaggcactgaactcactcggtatatcatatgtctggcatcgtactgcatgctcagtatacttccagcattttgataacgttacggaaaagctttatagagagtaaaaactatatttatatgataaatggagtccatgcacaaagatacagaaaataagagatagagctccacaagttaaaagagtggacaaagaac

SEQ ID NO: 93035 - DNA, 482 bp, Zea Mays
attgttcctctcagcaagttatctttggcatcaaatcaactaaacgatagctggtgaggatcgtaaaaattagacggaactaaatacagtctaaaataccgaagtcaatactattttggttcggtccatttatttctcgcctcgatctaaatcttcaaaagtgaattaatggtacggatttcatctgactttagagtatccgccaaatcaaatcttatctaaatattgaatctgaaattgttttggaaaagcagaaatatctcacgtacgatttatgagaacgttcatctcccttggccttatcctctccatcaagtgtcgtaccactcctttgaacaacgctccagccatctctatcctttattctcacgtattctctcctcatgtctaaaagacatggctccctgtgatattttccagccaccgcttagcttctctttgtaactcatctgctgcgttgactttttttgtctgcgttcgtt

SEQ ID NO: 93036 - DNA, 272 bp, Zea Mays
gctgcttccgcgacctcggggatacgatttctcatggtctgaaatcttttgaggtacgaccggagagtttcgtccccctggcgcttgatggatttgaggtcccatggttgcgccggtttgtcggagagagattggaagttggcggtgaagcgacgactgaagtcgctccagtcgtcgatgcaatgtcggggtaggtgtcacagccattgcagcgcgtcttgcccaaggacaataggcaagtacgcggtcatcacatcttcggttgccccagc

SEQ ID NO: 93037 - DNA, 400 bp, Zea Mays
gtttgcctgaaatattcctatcgctatagaagtcagttcggggagcatgatgatgaatggcttgaggccattgaggctactagtgatgatttgttgggagcttatatgaaagctgaggatgaagctatgaatgtcgccttcggcgcccgtggaaagaaaaggataaatagagtatttgatgtcatcggttttgtctatccgcctgatcactgctttccgactcggaagcaaggggccaaaaggaaaattgcatcaacgaccccctctactgcgccgaaaccaaagaaaatgaaagttgggtttgaagtcgtattttttggagagggcttctttactgcctgctgcagggagttcgaagatagagattattgagtctttcatagatgccttctcagcttcg

SEQ ID NO: 93038 - DNA, 475 bp, Zea Mays
gttttagttgaagttgatgttgtgctattttattttgtcctgtggctgtagctatgccgcctagaagaggtcgtggcagttcgcaagatcataatggggattctatgagtccagcggcaatgttagccgcgatgcaggacatgcagcaggagttggccattctgaggcaagccattccaattgctcctattggtcctgctccgactactggtgctcaaggtgctggtattggaggtgttccaggggcaatgtccctgtgggtgctgctccaggtggtggggctaagatgccttttctagttagtggtctttctctggtgcagtggatgggcatgaagttggatacttttgacggcattgatactccagttgaggcggcagattggctaacttatgtggaagataagggatcatgttcgctttggcacacaactgttgaagggagaggctcagatttagtggagaggcatgcaggc

SEQ ID NO: 93039 - DNA, 333 bp, Zea Mays
ctgggccactatttcagaagagtccagggtctaattcataaatttcaggaccctgctgcaattattttctaacaccagaggatggcgggttcatttgtgaaaagggcaggggctcatgtgcaaatcataacaaccgaaggggtatcggctattctgggacgtaagatctaaaacggacggccatgattaaatctgtcactctatgaaccgttacgccactgagaccgcaggatctgaatccaagggtcggaactcggatctaatcccacccctccatagctaatccaacggtttggagtgctccaaccgaagcggtacaattcaactaatctg

SEQ ID NO: 93040 - DNA, 287 bp, Zea Mays
caagatttcatctagccgaatgggtatgcacgacgaaatctcagccgttaacacagaaatcggtggacataacgcttgcccccaaccttcacctccaccggtcatcagcagacagcagcgccagcatccctacgacggcgccacggtttccccacggtggaagtcgccggagttcttcgggacggtgccccatcgctcccctttacccctcaacaccgagattcgcaacaaggagaaagattttaacccgtcggggatacttaccgccattgaagggctacggaggg

SEQ ID NO: 93041 - DNA, 699 bp, Zea Mays
gttccgggtaatagttcaatagaaaactctatatcacggtcaggtggcatacctggtaattcttccggaaatacgtctgggtattcacacactattctgatgtgctccaaatatttcgcttccaactgatttaccattgtctctgctgttgttggcatactgacattgacttcaattctttctccttgtggactggttaatgtaaccatcctcttggcacaagatattactccatcatacttggtcaagtagtctattccaagtatcacatcgattccacttgactccaaaattatcagatctactagaaagcttaggcctctaatttcaatcttagtctgagggcatgagtgagtggctctaagttcacctcctggtgatcgaattaatagtttcttcttcaagggatagtttggtatattatgtttttccacgaatgactttgttacgaaggagtgagatgctccagaatcaaataaagctgatgcaggtatggagttaataagaaacataccatacaccacatcggcatcttcaggaactgattccgctgtcacatgattgactcttcctctattctggttctgcgaagtcttgttctgtgcagatccacgagcaggtgtgttctggtcagtcctctggttgctgttcttctggggtgtctgttgattatgccttgggcagttgttagcatagtgg

SEQ ID NO: 93042 - DNA, 342 bp, Zea Mays
tgatgacgaagctaggctacttcagagaagccgacaaggggttgattcgctttggtggggaagaaactatcccgaaactagaaaatgatgaagtggtggtctttaagagcttcttcaaagcaggactgagatttcctctacacgggatgattggagatgtcttggaaaattttgagatttaccttcatcagctgacccctaacgccattgttaggctcagcgtgtatatctgggctctctgaagtcaaggggtggagccactcgccgaagccttctgccgagtacacgaacttcattatcagacgaaggctagggaagacggactgcatgagaacttcggct

SEQ ID NO: 93043 - DNA, 360 bp, Zea Mays
gagtacaagcatatagcatgacagtcatatttagcacataccattagtctgatgctgaaggacattgaaaagtggccacctcatgaagcgatgattcaaagcaccgataggatctatagttggatgtacaactcatcaagtttacacagtatgatgtggaaagccatcgaaggtcagttagtgaaatggaatgctactagatttggcactagctacatgttcttggaaagttttatgagaaggaaggataagttcatggtatggtttatgtcaccagaattcaggcactcacgtttcttccaaagtgaaatgggaagatatgctttcgacaacatcaccaatgttgactggtgggagaac

SEQ ID NO: 93044 - DNA, 339 bp, Zea Mays
attttgggaacatctgcaagagtctttggggaccaagctaataagaagttcagcttaccacccgcagactgatggttagaccgagagggtaaatcaaattcttgaagatatgctgagggcttgtgcgatcgattgtggcaagaactgagataagtatctctccttggcagagtttgcttataacaacagttatcaatccagcataaagatggcacctttcgaagccttatatggaagaaggtgtcgaacacccctcaattggtctcagcctgtagaaagagaaatttttggacctgacttagtgactgaagccgaaaggaaagtcaagctaatcaggaa

SEQ ID NO: 93045 - DNA, 537 bp, Zea Mays
agaagccagtgaaccagacaccaggagcctgccgcctgctgatggggttgaaggtaccccgagtcatgctctcgagattattcatgccgatctcccctcatcgagccatgcaccgactcttcctgctttgggtcttcccctgttcctttccaatctttaggtgagtcaacttttttctttttattgttcgtactggcgaattatcttttttgcttatctgcccatgatcacgggattttattggcggtgtatctgcccaactgagatcttgcggcgctactgttcccgatcaagcttcatctctgatgcagtggaaccctctgctgctccaaaaacagatagacgacctgaagccgtcgaatattggttagtgagctcacagtttccctggttgctttcattgcttagcttatctttagtcgtgtgttcttcttctgctgctatatcagatttgactcggcagtgctctgactttgaagagaagtactctcagagtaaggccgacttagctcagacttctactttcctggagagtgc

SEQ ID NO: 93046 - DNA, 381 bp, Zea Mays
cacaacctagagccaatggccaagtggagagagccaacagaatgatactggaagcactcagaaagaaggtattcgataagagtgaaaagcttgcaggaaagtggatcagagaactgccatacgtggtctggagcctacaaactcaacccagtcgagctctgcatggaaataccccgttcttcatggtttacgggttggaagcagtgctgcctgccgatctaatcttcggggagcctaggttgactttcgaaaacatagctgaggcagaagcaaccaggttggaagatattgatgtactagaggaagaacgattgaacatagtaattcagtcggccaggtatcagcagaccttgaggcgctaccacgacaaagctgtgcggc

SEQ ID NO: 93047 - DNA, 318 bp, Zea Mays
gagttgactgttgaggtcgattggcgggatgactggaatagtagcactctgttttctcttcttgggcgccatcgagatctctcaagcgatgcaggcggatacaggaacttaggaagctagaaagtgacagaggaaaaaggaagaactagggttcagaacgcaagtgggatgtcagcagaaatatgggttggcgtgttaagtcgggcgcaaagtggcagactgatgactcgggaaaagttgagatcgcagaaaagcaagcatcactcgggcattacctctaaaatgctaatgaaccatcaaatgctagaacagagcgag

SEQ ID NO: 93048 - DNA, 326 bp, Zea Mays
ctgggtctccatgcatcggatgagtccaaacttctgctcaatgacccgtacccattcgtcagcttcgaggggatcctcagctttgatgaaaagtgggcgacgggtttccgagaaatccaggtacgaagtttcgcggggtccctgcggataagccctcccgccttgttgctgaagttgatgtcccgccatttcacgtaggaagcgggtgttgtcagcggtcgcggtgaccaaggcagcgatagcctcgaccaacgtgggcggtaccagcggtggattgggtgtatcatcttgaccacgggacgttcccgcgctgtcatgtgcacgag

SEQ ID NO: 93049 - DNA, 314 bp, Zea Mays
attcgtcattgcgccatggcagacgcgggcgaacttgagaaaggtgttgattctttttcaacatggcgtagtgctgcatcaggtgagatacaatatgacgtctaccatcattttgtaacgcatgaacaccatcattttgtaaatccatcatattgtgagaccactagttgctgatatgtcttcgacggcgtgcactgcaacatcaatcggtcctgccgggggacgagcagagcatgttgggggttagtgctagcaatgcatcccatgacgtcgctgggaggatctcaggcatcgctaaaccatactggtgcttc

SEQ ID NO: 93050 - DNA, 543 bp, Zea Mays
cgctcgtgcaatgtcgttttctcgccaccttcgcaataaaatattctccgtttcccagcccaaaatatatttgttcttgacttcttgagattatcaaagattatttggttcagctaatttacatatagcagttcgtgtctctttagcccttcctgaatttcataacacatccacaaacacggattgacgaaatcttgtgggctttggcatcgtggagatgcaggacacatcgcttcacaaggtgtctgcgttgtatccttgaaattaaaaggtcaatgaaatgaaggatggaatcgtccttttaagtattgcgacgcaagtgttgatgtaatgggagcccacgcttgtccaccctgttatttccaatacatcacttaatactcccatgttgaccctggtacagctgtattcctacatcttgattaatcaaagaatctgaagttgttcagtatactaatcagcttaggtttcctgtacctgctcatttgtgacacccacataggatggctactagccctctgtgcctccaaaatccagttacgt

SEQ ID NO: 93051 - DNA, 661 bp, Zea Mays
accctatatgaaaagaattagtataagagcaaaagaataattcaaaatttataaacttccaaatatacaattttcgtaccttcagaccgttatatgcgaggctatctgcaagatcgtccttcgtcatagcgcagaggccagcttcaagcttcgggaaccccatacttctagccatctcccggcagacatataattctttattgtctgggaggcagtataagaagtcatcttcatctgtgccattgaacactaaggcccctttcggatacttcagttctcgggcatagtgtttagcttcaaaaatctcttctttagataacctttttcccgaagtgtgtcgtacaatataatcaagtactttagaagatgcttcaggagtaggagtggcagttttttaggcagaatttgttctgcagcttctttttccgtttccttttctccggtttccaaggatttctccttggcgggctctgaaggcccagcttcggtctcggcctggctctttgcagcttcggcttcggttagttttgtctcagtctgtgcttttgaagcttcgacagttttccctagagtagagcttgaagtctttatcgtctccagcacatctagtacgttgaccatccttttcctcttgggggtcgttgtaagacctttttgtgcc

SEQ ID NO: 93052 - DNA, 710 bp, Zea Mays
gctatggaagcaatcgtggatgagcgagtagaagaaggccaactgccaaagtctgctattgaagctgttgctcaagttgtaccaaaacgtaaatttctcaaaaatgtgggcatgatttcatcctccatgaaaagcaattcctcgcaggtacaacagttgctgcactagaatgtttatagattgaagagtaatatagcaagagaaatgctttaaaaaatgctgcactagaatggtttttaagatatcattgtattctttggagtggttgtttctgctttaaaatactatttattgttaggtaaaagatctccaggctgagcttgaaactgagagggaagagaaatctgaactttgacatgtgtggctggactctagctgctatgtacatgtttaacgtgtggctgctctgtgtacacgttcaacttttgggtgacgtgattcttgttaagtaggagaactataaaccttcggtgaaattatgcacacctagtggccttgcaattaccccagaaactgtatgatacacagggcagcagcaacaccttgagacactagtgtttggatcttgcccagccacaggcggcggaggcaagggaagtagctggcccggccgcgtgaaacatggtttggactccatgagaataattttgccattgttttaaccaatctgggccgaaggacttggcgctgggcttactagagcgggccag

SEQ ID NO: 93053 - DNA, 384 bp, Zea Mays
aattcattgatgactctagctcacttacggatgttcttgtgaagcacatcactcatgcctagatggtccatccaaggaatcgggtccaccacaactcgtcgtgggggcatttggtacttcgacatgcatggtttcataagtcaacgtgcatgcagttgatctagttcaagtcctctcgggcttgcttgttctctcttggaagtaatggtgtgagccgatcaaatagtagctttatcatcatgatatttttgtgtagttgttgtgtagagttgatggcctgagaaaccaaccatctagattttttcgtggatggatctaccatattctcatagattctcaactgctcattgatgctctggtgacttggcttgatgactctgcctt

SEQ ID NO: 93054 - DNA, 344 bp, Zea Mays
cagagacgtcggccaagaggtgggccaagaagatggcgctcgtgggctgagaggagaacaactcaggagaagccatagagtgtcgcggcccaacaagcgcttcactagtgaggaatggcgactgtgagggaaggcccatggggcagtgcgagacgtagcctgtaaataaccctggcaattgtgtggggaggggcagacgatatacgaactaggaaccagctgtgtccggaggctggcggctggcggcgcgccgtgtaaagaacctatagctaccttcaatactgagaacttcgagagaggcgacgggtgccgggagcggcgcccaactcatccccatatcagtt

SEQ ID NO: 93055 - DNA, 596 bp, Zea Mays
tggcatgggctcccatcttgaatgggtggattagacatgaactctgaaaaggacctctgcaacaacaaaatgacatgttaagggcactacatatggcagtacaaaaactcttacataccgtcacttaccactgggggaagattccaatcagagtatgaaggaggagcaccaatgttcgaggttttacccctcaacatcgaatcaactcgactcagcacgtcctcctaagatttccacttatcagtaactcgagaagggtcattaacccctgtgtacagataagcccggtagactctatctttcaaaggttgaatgttctggaaaacaaagtcgacaacaatagctttagcagttaggcctctattctttagtatagatatctcggcgagcaaaacccaggcctcagcaagctccaagtcagtcgggacctccgtccaactaggcgttcggacgtcaggttgtctcctcgagcgagcgggtagcgacttgttatgattctccatggtaaaccactcaaaatgccatcccttgatactgtctttcaaaggaatgtcaaggtattcagttgtcctgcctcgtcgaagtttcaaactggc

SEQ ID NO: 93056 - DNA, 634 bp, Zea Mays
gaggaacattatcaccaaacatcacaaccttcaaacaccagaaataacaagttgaaataactttcggttatgatatttgtgcggctttagtaaaatcacatagccttgtgaaagaatcccaggaaatggaatagcacattgacactgtacatcccagttctagtcattgctaggcagatcactaagggtcaaagagatatataggatgctaaataaattaacgttgctaactcaaaacaatagaagcctacagcggggattgcagccccaccctggtgcggattagctcaaagaaaaaacactaaacccagatggctaggtgtggcttaccagacttcaactgagcatacttatatacatgaagaaattaatcctagaagcatcaggatgaacggaatctcacatcaggctttagcactccaccacattgatggcagctaggaatttcaaaatcttgctcccagaacttctcatcaatctcaacatcaccatcaggtcgttgctgcattccaaagcttttgcctgaacctggttgtcctacttccaaactatcgatagcttgagcccactgcagaaacagtaatcgtccgttgtcaggggctacagaatgatcggtttaaatcaaaaaaagaat

SEQ ID NO: 93057 - DNA, 456 bp, Zea Mays
cgaagttgaacttcagttcaacctatcatcctcaaactgatggccaaactgagaggactaaccaagtacttgaggatatgttgagagcttgtgcccttaagcatggagccagttgggacaagagtctaccatatgctgagttctcttataataatagttacaaggccagtctgaagatgtcaccatttgaagctctatatggtagaaagtgcagaactcctctatattaggatcagactggagaaaggcagttttttgggcctgtggttattcaagaggcagaagaacaagtccgtataattcgggagaacttgagggttgcacagacccgacaaaagagttatgctgacaaacaaagaagaatattggaattcgaagagggtgaccacgtgtacctaaaggtgtcacaattcgtggaatgaggagatttaaagttaaaggcaagttatatcctcg

SEQ ID NO: 93058 - DNA, 315 bp, Zea Mays
cttgggttgactagtagatacttggtcataaggaggtggtcctaggacaaaggaggcagatggtgaccatgcactcattgctgggttacttgaggcatttgaggccaaaggcagaattggccttggttcatgcaactgaggctggacatattctggcgggtaggatgaacattatgaggatgtactgaacacctcttttgattgtgaaggttgcgtggctgacgaagcaagctctttctgcttgttgatggtgtgatgacatgttcttgtggtgtaacctttgtcctcgccacaaaacaagtagaatgatttttt

SEQ ID NO: 93059 - DNA, 428 bp, Zea Mays
gcggtggctaatggggtggccgagcaactctaatatgtacaaggcctttatgccctaaaacaggggtcgctgatttttggcagattctggtggacatcttgttatgatgatttccattagatccaagcatattttgacatgggaccagttgggttggaaatattatctccttagctttccaacggtatctagaatgtcgaaaacagagtccgtatgcggcatgggcatccattttcatgagatccactcctgcagtccgaaccggatttgtggatacactggacttcaacttctcctgagcttgggaatatatgattgattgggccttaaccatatagttgacgtccatgtactcatcaccacctctcacgtctcctcctcaccctcacggatgttcttttataaaacctctcattattatcgcctga

SEQ ID NO: 93060 - DNA, 1022 bp, Zea Mays
gtcaccctaagtcgagtaagcatgagcatgttgcaccgtcttaagtcactgccgacttaagccgattgctccgttagtagggtatagtggtcaccctaagttaagtaagcgtgaacatgttacaccgtcttaagtcactgccgacttaagccgattactccgttagtaggatatagtggtcaccctaagttaagtaagcgtgagcatgttgcactatcttaagtcactgccgacttaagtcgattgctccgttagtagggtatagtggtcaccctaagttaattaagcgtgagcatgttgcaccatcttaagttactaccgacttaagtcgattgctccgttagtagggtatagtggtcaccctaagtcgagtaagcatgtagattgataataaatagttcgagtgcccttgagaatgaagtctttttattgatgatgtattttctgattacagaatacaatgctgcccgatagcttttgaaatttagctaggggtaacacttcctgagatgctctatatttcatgaattctctatttccgtgccatccatttgagtaagccgatatgatcctggccgagtgacttctgctaccatgaatggcccttcccatagtggcgacaatttgtgtcgtccttcccctgttagaattcggcgaagtaccaagtctcccactgcgaaggatcgatgtcgtatggccttaccatgatagcgccttagggtttgctggtatctggctgactgaattattgtattcaaccattcttcttccaatacattaatatcttatagtctggtagcttctgcttcagctatgttttcgaagaccagccttggtgccccaaacctgaggtcggcaggtagcactgcctttgagccatagaccatgaagaagggagtgtttccatgcaaagctcgactaggttgagttcttaggctccaaaccacatacgacaactctttgatccactttccttcttgtcgaagactttcttcctgagtgcttcctgagtgcttccaata

SEQ ID NO: 93061 - DNA, 1046 bp, Zea Mays
tggatacaacgtcacattcgagccgaggacaacaataaaaatcacaggtcttggtagactttatagtagattcgacagggccttcggaaccacaccagcttcgcacagagactatttggaccatccactgcgacggtgcatggtgtcaggcgggcgcaggcgttgcatcgattattacatcacccacaggcctcaaatatagatatgttgtgcatctccgtttctttcttgaatcagacaaatacacgaacaatatagcagaatacgaaatcgtcatcctcagactccgcaaactatgagccctaggggtgacaatgtgtataatcaaaactgatttcaagatagtcgctggccaaatcgaaaaggactgctccaccaaagaaccagtcctcatgcaatatctctcaaccatgcaaagcctagaaaaatagttcaaaggattcacattgcagcacatagagcgaaacaagaatgaagaggccgacatgttggcaaaagcagcagcgaaaggtgagccactgccatatgaagtgttcttccacacaatcactacaccagctgtaagaaacctcgaaggcctgcatataacataagaccctgacggccgtagaatcgtacatctgataatgaccgaacactggcgtgcaccatcaccttataccttaaagggcactatcaccctctgaccaaagcgaagccaaaatattgaagcacaaaagtcgtgactctgttgtgataaatggacaactatataagaagagaataagccaaccgatgctcaaatgtatcacaatagtcgaaggcataaaactccttcgcgaggtccatagaggaacatgcgggtcatagtcgggacctagggccctcgccgctaaagtcatgcaacatggtttctactggccagccattgtgtgcatagctaacagagtggtccgctcgtgcgaagcgtgccgaaaattctcacctcgaatgggtgcccctcataatttacaatgctcatcgcccacacatggcactacaacgttggggcctcgatatcatcgaac

SEQ ID NO: 93062 - DNA, 298 bp, Zea Mays
agctgggggagattctggaagaattccagctacaagatagagctgacaaacatgtttggaggtcctccaattctgggctgtttacatctaagttggcttacagagcttttctacattggtgttgtagtgtttgagccttggaagatggtatggaagagctgggcgccccctaaatgcaagttttttatttggctagctatcaataacaagtgctggactgcagacatgctgaaaaaaagagggcttgacttcccggagtgttgcgtgctttgtgatcaagaagaggaaaccgtgcagc

SEQ ID NO: 93063 - DNA, 590 bp, Zea Mays
gtgaacagaaggcaagaggacgggcgctaggctgggaggagacaaagcaatcaagagggatggctcatggtgcaaaatacgataagcataaccatcctcgagcaccctcctagtctactggggggaaaggatggtgcccagaaggcgggggccaccacaaaacaacatgggggaatctgctctttcgaccaagggtcaccttgggagttaggcaaatgtgaccgtgtgactaccaggatcccgtcaccaaggacagagcaccgggaggacgcgccacagaagttgcaccagtaacaagcagggttgttaggcagaccgacacgccatctaggcatgatacggcaaatgggtcgtttcgcgtctgtgatacccggtttgcaaagaggagaagtggaggttattctttttgttctttttcctcattcgggtgatgcgctaagggaatttggaatttgtggaaaatattcacctgtaagacagtagaatttctttggttagttgtttgcgacggggtcaggagctgtcacatgggcgagttgggccttgaaccttgatccggtccattagtcttccctaaccctagctgtccc

SEQ ID NO: 93064 - DNA, 764 bp, Zea Mays
acgtggtagcatgaagattcattatcttctttggttgaaagacaccagctttggcacgtgtagtcatgtggtgctgtgtaatagcaggatgagcaaagcgaaaaacagagggagaagaagtcagagtggaatccaccgtgggacgtgcaggtgtggtcacatcgcgcgaggacgtggatgggagagatgatgttgtacccgcactgtctgtaggatatgggtgtgcgtcagagaggggttgttgactggggactggacctgctgcatgtgaactggggaacgtggtgctacaggaccgcgccgggtattgcgccgaacagggaccaggtcccatcctgagacaggaggatttgttgcgaatgtgtggggtagggaggctgtggccgggtgtgtggcaaatggaaaaatagactcatcaaaaacaacatgccttgagataataattttcatagtgtctaagttcaagcacctgtaacctttgtgctcaaagggatagcctagaaaaacacaacgtgctgagcgaggcgataatttatgaggagtgatggaagaaaggttgggataacacaaacaaccaaacgtgcgaagatgttgataatctggtgaacagccaaaaaggagctggtatggagttcgaaactggaggggctggcagggtcggcgattaagaagatacgtagcagtgtgaagggcttcaacccaataagaacgaggcatggatgcttgttcaagaagagttcggagaatctcattggcaatacgaa

SEQ ID NO: 93065 - DNA, 451 bp, Zea Mays
agtcagagaagtaatgggtttgtactctatccatttagtgaatttatcaatggcaaccaacacgtgagtgtaaccttcttgagattttttgaatggtccaatcatgtccagtccctagcatgcaaatggccatgttacgggtatggtctgcagttgttgtgccggtaagtgttgctgctttgataaatattggcaagcttcacacatctggactagctcggctacatcattctttgttgttggccaatagaaaccagacctgaagaccttcccaactagagtcctggatgttgcgtgtattccgcattgcccggcgtggatctcatctagtagttgcttcccggtagccgagagaatgcacttcatgaggactcctgtcgcgccccttctctatagcatttccccaatgagagtgtagtggactgactgccttgcgatgcgttctgccgta

SEQ ID NO: 93066 - DNA, 630 bp, Zea Mays
cgagctggccacgacgaggcctctttcacagtggcgaaaagcaggtttggaggaaatgagaaattagcgagctctgatgacaattgagggcacggcttggtggcttggtgcttgactaccctatggagctcatgggcgtgatcaatttatagagtcagtgagcggtgttgtttaatttgggcgaatcgtgctggcggccgagaggggaatgagtcacagcggcgatctaccgtggcaaccgcagagcgacggaactacggcagtcattggatagtcacttcggctcatactgacgcgataaacctcctaaggcgtggcgtccaccctgtgaacggcgaacacgcccgtgattgccacacggccatgtcgtcggtgtgcactgatgaaccatcacgcacacagtacattccagcccatccgcggcgagatctttcaccctgtgatcgttatccgtgtttaattcagcgtgactcacagcgatagcacgaattcgcgcgcgtggtcgccggcggcgaggtctctgagctggtgatccaatcctgtcactgtaccatcgcgaagctcattagtaggctttgtttactcccttaagcctattctagggtttcacccatgaaatgtcacatgata

SEQ ID NO: 93067 - DNA, 405 bp, Zea Mays
ctgcaatcatatgaagatctgtttgaagaacctcgtggcctaccaccagcccggcgccatgatcaccacatcagattactacccggcacaatgccaatagcggtgcgaccataccgctacccccagctcttaaaggatgagatcgagaagcaatgtaaggacatgctgcagcaaggaattataagggaatgcacatctgcattctcttccccggtgctactagtaaagaaatcagatggaacatggcgattttgtgtggactaccgggagctcaatgggaagactgtgaaggaccgttaccccataccagtagtggacgagttgctagatgagctccaaggttccagattcttcaccaagctagaccttcggagtgggtaccactagggctgaaaacggtacgga

SEQ ID NO: 93068 - DNA, 281 bp, Zea Mays
aacacgactggccaatttttacctgcgtcaagttgatgcagcacccggtcaacgccacccagtgcttaggggagatgcctctgcgccggcgagaaatctctggcccttccgtagttcccttggctcggattcgctatccctggcttcagtatacaccgatgaacccccctggtacacccccaagagcccaatgcccaagaactccggcaccggatggcggcaacccgcggcttccaagccctctctcttctcccccggctgtgtggtcgatatggcggcgc

SEQ ID NO: 93069 - DNA, 320 bp, Zea Mays
gccgcacaaaagtaggcgcgagcgcaaccccaacccgcttggaccaggatcgcgtgccttcgggcatgagatcaggattgcgcatttccccctaaaggtacatgcaccagcaaacatctccaaatatgacgaatccacaaaccccaatgtatggctgaaggactactgcctcacatgtcgcatggcggcgatcaaggatgattacctaatcatccagttcctcccctacaccacatggaaggggtgagagcctggttcgagcatctgccggccaacaccatacacgactaggcagaccttcggaaggcctttgtcaggaa

SEQ ID NO: 93070 - DNA, 277 bp, Zea Mays
gacaagtctatcttttagctccctatttgcttcacttaatttttcacatttatctttggcatctttaagggaggttttgagctcatttttggtggatgacatagttttattttcttccttcatttcttcactagttttaacagttatgtcatacttggtagttaagaactcattttcatcctttaacttgtcacatttagcttttgactttctaatgatttgagtatattctttaagtaagtcagctaattcatcattggtaggagaagcatactcg

SEQ ID NO: 93071 - DNA, 471 bp, Zea Mays
gtctgcatgctagtaagccaatgtcttgctagcatatttttcccctgctgatcctttgctagtatttaggttctgcagttgcagccctcccatactgcagctcatcatttgtttcttgcctcttccttagttcatttgcattttagtttcatttatgattagtagttcagtgctttggttgatatgcaggccaagcccctggcgccggcatatttgcatttaggcccctagcgctcgtggccgccattgctgtgaagctttgcccccatagcttcttccacacctacgacctatgggtggccgccgttgcgtccaatcgccattcctctccgtcgctgacaacagccgcctgaaacaacctcaattacttccctccagctctgcttcctttttccgcacatggaagtcgaatcttctgcttcttgcgtcgctggtagttcctcttcgtggaggtccggcaggcgtcctggt

SEQ ID NO: 93072 - DNA, 664 bp, Zea Mays
gccgccagtagtcaacgccccagcaagacaaggagcgccacagcaagcaccaggagtccgtggtcaggcctacaaccgtggaaagatgaatcacctggaggccaaagcaatccaggatgctcaggacgtggcagtaggtatgtttccagtcgaatcctacccagcaaaagtattatttgatactggtgtcatgcattcttttgtttctacatcttgggtagaatcacataacatccccatagaaataatgattccacctttaagagttaattcagttaggggaaaagttcagtccgataggatttgtctgaatctaaggattgaaataagggggatagacttccccgctagcctagtagtaatgggaactcaagggttagatatcatcctagggatgaattggctacacagaaatcaagccactgtcagttgtgacaagagaacagttaagttggtgtccccatccggaaaggaagtagtaaccaagctatacttacctgaactagaagaaggagcctatcaccatttatcaatagatgacaaggagtccaatccgattgaagcaattaggattgtgtcagaatttcccgatgtattccctgaggagttaccaggtatgccacctgaaaggaaagttgaatttgccatagagcttatcccaggc

SEQ ID NO: 93073 - DNA, 437 bp, Zea Mays
gagctttcctgtgcattgacagggaggttaacgtcatattcgaaggccatggagcacaagaaagcagaaggcaacaaaagcttcatgatcggcaggtcctggtggccacgaacagtgctctggctccttacccatggttggaacatgcgatcactttcagccgagttgatcaatggcttaacttcgatcaccccgacaaatatccgctactcgtcgatcctgtgatccgagaaagccgggtgaagaaagtgctggtggacggtggcagcagcatcaacgtcaccttcccccgaacgctccaatccctaggggtcgccattgaagacctcactgagtcggatactcctttctttgggaccgaaggggagtacccgcggggacatatctacctgttggtcacctttgggaccgtagagaattacagaactgagtttctg

SEQ ID NO: 93074 - DNA, 332 bp, Zea Mays
aaatgatatggatgaaacccacaatcacctgaagacgaagtttatgatgaagaatttaggtgagacaaaatattgcttaggtttacaacttgaacacctccctcagtaatattagtgcatcgatcaacctatatctagaaaattgaagaaattcaatttgaacaaatcatatccttccaaaaccctgatggttgttcattctcaggaaatggagaaagatccatttagactatgggatattggagaaaagatgttagaacacgaggttccatatctcaatgtcattggagcacttgtttatcttgcaaattgcaccaggcctaatatcgcat

SEQ ID NO: 93075 - DNA, 340 bp, Zea Mays
cctgccacacaaatatattctaagcaaacaatgactaaaacagtgttgtaaaaagatttcagtcaacaattaagaggtatgaaaacaatatactataattatgatctgcgccaaggccaaagcagtagagaacaatatgggtagatagatttttacttgtcaggaagatcaaagaagatgttcttcccggccataatctcgtccacaatccgtgtaccaagttggctaccattgtcgttggtgcacatattagcttcattgcttgtcggctgcaaacctccttgagtcgtcatcataggttaggaaaatagatgctgacaggacagggaacgaaaaaatc

SEQ ID NO: 93076 - DNA, 386 bp, Zea Mays
agaaaccccagttcttcagaatgagagaaggttgaagccagtgaacaccgcttacatgtatgagattgagagccctcgacaagcaaatggaggtacaagtctttaatattacatcctcaacaacttttttagggagaccatttaatccctggagtggtcggtgattccagagagctacagacttgcaaaggacctggtagccatgatggccccaagaagtggcagcttttgagtgagtaggattatgtggtttgagctgaatttgtcgtcgctttctggatagtctacaagaacgtgaaacagcgtccttctgctttgaccaagctaagacacagtgacaccgtaccccagagccttaagtagggcaccaccatcccctttaggcc

SEQ ID NO: 93077 - DNA, 438 bp, Zea Mays
gtggaagagccttccagctctcttcgacctctgatggtactgaaagtccccttgtggctggtggtggcgtcaagagtaatcgatagagaccggaggcactcatgcaggttagtgacagccttaagcagtgtgtccttgtccttgacattgataaccaccccgagctttctcagctgccatagccttccgatgccttccaagtctttgtcactcttcaccctgacattggatagcacctccatgtctgacattttgtcgatcttcccaggaaccaggacatggccgtgggtgcgtggacttggatttctgtttccagcaagcagacgcttcagcttcaggagcaggagatccattgtgcatgacgcaggcacctccgtctgctggatatccagcacctccagctcgcgaaggttgttgatctcatgggggagcttgtca

SEQ ID NO: 93078 - DNA, 530 bp, Zea Mays
agcacggtaccagcagactctaaggcgctatcacgacaaggctgtgcgacagcgatccttctcagtaggagatctcgtcctccgccgaattctgactggggagggacggcacaagttgtcacccttatgggaaggacccttcatagtagcagaagtcacccggccaggatcatatcgtctcactcagatggatggcacagaagtcgggaactcctggaacatagaacacctcaggatgttttatccctagctgtatttcaaaaagctatcggaacgacgatgtactctgtaaagtggaaatatgtcatcaataaaaaagaggtttcaaagatactcagtttgttcacgattgacttgcattcttacttaacttggggtgaccactatgccctgctaatggagcaatcggcttaagtcggcaacgacttaaggcggtgcgacatgctcacgcttacttaactcggggtgaccactatgccctgctaacggagcaatcgactcaagtcggcaactacttaaggcggtgtgac

SEQ ID NO: 93079 - DNA, 526 bp, Zea Mays
aataccggacactgctcccccactccagtcactgttctcgaacaactctggatgggacatgcacacgtctgggcacaaccttaaccccgggagaaaattccgcctcgctcgaaggacggcttcagccttgggagaaaactttgcctcgcccgagctcggcctcggccaaatgccctagcagcagccaccaactccccgcgaatctcgcaggaggccactccgacaactgttctaaacactccctacacgactgcatgcccaggcgcaagtccgagcatggcctcggcctagataacatcgacaaaaggacgcccgacgccaccaacccctccgtagagatagctgacaacgggatggccacagaactgcagggctggtgtcaagtctgttttacaccgtacaggacgaattaccatgtacttttcaccatacttgtcactatttcaacaactacgactcgaacaacatatccacaagataggctcgggtacacgtccaagcccctgatcctggccttggctctttt

SEQ ID NO: 93080 - DNA, 452 bp, Zea Mays
gtcgatgtttttcgaaggacgaatatttgccacccttcttcaaccaaatgaacctaagatctttcttgcaaactgggcatgagaacttactgtgaacacaccaggcgcagaacagcccgctcagcaacttcttcagctctttttgcttcttctgaagcgtcatgagattccttctcatttcttttgatggcttcatcagcgatttcttgtccacccttcagccaaacttcagaataaaaattcccacctagggtagtaactccggctgaagggtttctaatatcatcagctaagaaggcgaagtctggctgagctacagccttagcatgatcacagccaaccttctccaagatggacgtagccccacaggcaccggcgaaggcacaaaagtcccctctgtcgctaagaacttccgaagccatcaagcatcctcgcagcaactccaaagaaaa

SEQ ID NO: 93081 - DNA, 690 bp, Zea Mays
caaactcaaagcatcgaaagcattaagtaggatgatgacacaccgcagcaaggtgggaggaggagaaacagttgaagcacaggcctcggagatccacaatggaccctcgacaaggaaggtgcacactctgggtcttcttcctgcactgaaccacctaccagccaaactcgtcctgatacagtcccataggctgactctgcaccatcgaggacacatcgaccttctccttctccttcacagcctctggagctcttgagcttgtcatggtatgagaaggagcctggattggggtagggaggcgcttggagccagacacgaaggtatctttaaaggagcaaggcacctgggaagaaccaccagacgaggagtcatgaccagcgtcactccaacgttgtgtctttgaacgcccaccttgtcgagcctggtagctgaaaggtccttcaccttgagaggtacgcagggaggttgttggggtggtcgccgagtccgaagtggaagtcagtgagaagccttggctatggttgaaaatggcgttgggaggtgaggggttggaggtggctagaggtgcgttgggaggtgaggggttggagaaaccatggctactgtaacatttgtgccatactaagatgccataacgctttgcagtaaggatctatctaggtgatgtttccttttttccttccattcaaa

SEQ ID NO: 93082 - DNA, 512 bp, Zea Mays
gtctagcacgctagccattctcctcctcttgggagttgtggcgggagcctttgcaaccttcggcaattctacttctaccggtgggctcagaatttctggcagcaccattgttttttctaactctcgctttttggtcgccccatctttggcttcagctggctcgactataggcacctttggcactacagtggattcttcagcgctacgagcggcgggagcaacttgtcccgctttggcagtggaagatttctcttcaccaaatttcggcactatggccgtttcgtatatcttcgccggtgagtgaaaactttgattttcttgcccttcggcatagcagagatggctgaagcggcacttttcctcttttttccctgctttcgcgagggatagccataatcagggtatatgaaatcgatcgcatcaaaaactctgttcaatcttttcttgccccgaccctcgaaggctgaggacaaagcatcatctttggctctggtatatgccccaagtaactc

SEQ ID NO: 93083 - DNA, 495 bp, Zea Mays
atttgtgatgtcttatatgccaaaaaggcttccatgcattatatatcttcaggttacttcaggtaaaactttatgcatgaggaaagagagcacggaattaacttatctgtgttctatattatttcatttactttcccagatttccaagcactatagagcttgatatagttgttatggccacttggcgatatatataaatatatgatgccacacaacacaatcaaataaaatatagagctaaacaaaattatttacgaaggttgcgttatgatgtgacttcaggggcttgaacaacccaccacattctacgcgagtacaagctccagcgtatctggtgtcaattcgtgcgcggccatcagggctacgacaacacaataagccctcacaaaaagcgcaagaagcacaattttggctcggtagtctgggtacacgataagtccactcaatgtgtgcaacaggcgcaattgtggctcgatgatcacggtagacggacag

SEQ ID NO: 93084 - DNA, 963 bp, Zea Mays
ctttgaaggtttcagaacagcgtctagaacgctggccattctcctctcttttctaggagtcaccgctagaacggttgttgtctttgataaccctaccattgctagagtactctgcagcttcggttgctgcttggtcctagaactctctggttctgatttctctagctgagcggtggtagtttcgactgcggcaacaggtattgagctatcagtggtctcctttggtatttcccattcgtaaacaagcggccatactttggaagcgatgtgttcttgaaccaaatccttggtgccattgtagctgcacacaatgttgaaggccaccaggcaagcttgagccatgtcattattcacgatcgaaggccttcggatgccgaagcgagatcgtattgaatgttgaattatatcttttacatcctccctctcaccaaatcattcttaacgtagaaccattgattcatccaagatcctgaccattttttgcgaaacatggaacagggcatctcacatcagagcgatacatgaaggaatagcaaccaaaattgttgtcatattgttccttccctattgcctttgtctgataagacaattcatgtatattacagaaacaatcggcgtccggttccaatccatggctcctcattgcccagatgaaaaccccgattttgatcaaagctttgggggtgagttgatgaagatatatctcgaatcttttaagcacttcgactagcatcttatgcaagggaaaccgaaggccagccttcataaatcctttgaaaaccacaacttcatccgcttcgggaagaggaacattgttctctcctccggccctcactatagttgtgtcatgaaaatatttacccttcatagcttcaatctatcctctcttaacagtggatttgccaaatacaacatgacttggcctccatcgctgatcttcggcgtcatcgttgtcactctcca

SEQ ID NO: 93085 - DNA, 636 bp, Zea Mays
cgcccctgccgtggggctcctaaatggggaacgaggatacgcggtgatggggggcagcaatatatttatctctgttaagtcttttgggacagtgatggggaatttgtttcgagaaaataagagtaaccttcctccaagatttttctcaagatccttagatattacgagatttgtaatcaaactataaattcgaactaatcgtgtcctcctccaactctagttggcagcaacaagccaacgaatgttgttcaaacatataagacttaattgcacaacggtcgttgtcctaatttccatagcctaacaatatggtatttatgagactatgaaataagagtaacctccctactaacaatctggtatcatacttcagtcgttcagtgtagttgttcacacccgataactatgctaagacggatgcaaagaagacgagtccaaaaagcatgttggccggcccaaaagagcaagaaggccgaatctatttgtgactagcccatcgtggcatagctagtcgtatataggaaagatgagaaatcgtatgagactacgaaatttataaagaaactctaaattcaaactaaccgtgtcctcgctcagctcgagtcgtcttcctttgttttcttctccatgtttccg

SEQ ID NO: 93086 - DNA, 595 bp, Zea Mays
gtgtttttgggtggggcaatgggtcaggcatgcgcaccggccgtaataatcttttgaagtgaatgcatgatcgatgtgttcacgtacgtcgaattcacgtaagcttgggcgcgtgaatggtggcgactgttggctggcgatgatttcatgatgatggatgcatggggagccttcaattctccgtgcgtggcgtgccgggccttgttagcggtactacatcttctgctactgggaccattgtggcgcaacgggttagcaggccgactaagaaatctacaaaggtgtatgagccggattgggtgaatgggctgcagctgtgctcgctttgcgaataagtagaacgagagttgcctggtgaagggcatgtaagaattattcactacaacttcttctccaagttctgctgctcgtccgccgccactcttcttcctccttaccttctgctactcctaatcgtcctctgctactcttaattgatgttctcttctactgctaccttgtatccataccgagttgttaacagtggtatcagattcaacgatccttggccgatcctcgcgttctcgcgctggatccttctggtattcattcccat

SEQ ID NO: 93087 - DNA, 456 bp, Zea Mays
cattaaaagaatttgatgcaattgggatagataccttggaatgtgcagaacattggtcttcctccatagcttgagtggcaagatccatacctcccagtgaaatggaattttcagcagagatgtgccctttagaaacatctgtaggccagatagcagtgatgacaggatctgcaaaagagacctttttgttctttatcttgggaatccagcgccctggctgccccatccccatccccctatgccggaaaggagtggatggcctgtatcttccactcgagttgtagcagtcctccacaccaccacggcatcgcgaggaacgcgcccacccagagaggctacgctgccgacgagtgccctgatgcctatgctggtgaaaatcttcatcatcatcatggtcccagtcccgacgcatggtctccctgcctctgaactcctctgaacgctcccgcttttcac

SEQ ID NO: 93088 - DNA, 344 bp, Zea Mays
ccgagagggaagacctaaaacaatatagagaaaggaagatgaagctctctgaggacatgttcaagcttcagcagcaggagcgcgatgatcggattatgaatatggattttgacaaggtcgctccatacgcaagaaattactacttgtccatgcagaaggccattttgtctaggttgccaccacctgaggaatgatctggagatagacgtgttgctaaagagccgctggatgtaataagacttatttatttgcgttttagtgagtttaattcggcatagacttctttgtttgcttcagttgtgtgtgacattcagcggcgttgtcgaagtaataagacttatgga

SEQ ID NO: 93089 - DNA, 453 bp, Zea Mays
ctgttgattgtggattagtggtggtggtggtggcaactggggccaggaagctggggagtgtcttgtcaaagcaacagaagccataggtagttgattacctacgtattctggggtgtatggggaataacacgaagcagtgtggaggacttgcttcggctgactcagcctcgcttcagcttcggcaatttccttctgcttctgaattgtaacctgacatgttcttgttgtgtggcccttgtcctcgccacaaaaaagacattacggctttctgggttgattgccaaatcatcctccactgaaacatcttcctccgctacccctcggagccggtggtctaaaagaagtctgttgcatgcttgaagactgagaactgtgatggctatgttgaacattgctggccctttcatcattggcattggaattgtgaattgatcgaacatgcctcgaatgaag

SEQ ID NO: 93090 - DNA, 360 bp, Zea Mays
gctgaagaggatgagccgaggaccttcgagcaggcgcagcgcagcaacatgactgctggaggctcgccatgctggatgagtcgatgagatgacatccatcgaggcgaatggcacctgggaactggtggattcgccaccacatcaccgtccgatcgggctcaagtgggtgtacaaggcaaagaagaatgccatggggattgtcacgaagcacaaggctcgtctcgtcgcaaaggggtatgtgcagcgtcaaggcattgactttgaagatgcgtttgccccagtggtacgacttgagtccgtaagactcttgttagcgctggcggcgagcgaaggatggactgtccaccatatggacgtgaa

SEQ ID NO: 93091 - DNA, 409 bp, Zea Mays
cggaggagcgaggccgagaggcgagtcgacgaactctgtaggcaatctgatcggatgaaatctgcagctgaccacctctctctgccttctcagctgctctatccaaacgccgtttcttgcagccttcctgctgctccaagtagacggtcttccccttgacctgcctgaaggggcgaggagggtcctcgtcgtctcctccccctggcgctgacacattcttcgtgtgcaccatcctgacctgaagactgcatatgagagagaaaaactaagcaccagaagagagtagaggaaatgattatgactgaggtgataaatacctagaaatcccacgagggagaatctaggcaggacaggtgacgggctcacgagcaagcgaggtcactgaaatgacagaagaggtgagcatgta

SEQ ID NO: 93092 - DNA, 457 bp, Zea Mays
gtttaatgtcgcactgttttaattaagtccatgggacgcctcagcaatagtagccttttgttaatgtgacgccgcatcaatcaactaattaaatcccttaaccatcggtctcattgtcaccggcatcacctaaacaccaaatcacggctctacgagcaacgtacagaacagtaaactaatggcctgatctgctgggctagtagggccacaacaacactagttgaacttacgtatgcagcggctgtggcagcggcattagtaactcaagcgagcacgttggacctttttgtggttgcaaaggtggagacatatctaggaatcccaatccactttagaaaactaagaaattcatatcggagaaaggtccaagaacggttcgagaagaggctcagtagcgtccccaccaagtctcacaatagaaacatcataaaaagtcttcgctatcctcagaatcgtc

SEQ ID NO: 93093 - DNA, 660 bp, Zea Mays
ccggtagtgtctatgttgcagatcacctccccttgggggaacaacgtcaccatggtgttagggtgcgaatcaaaataatgtttgagcttccgcaaagtaataagaatgatgtaaagagattttgtaactggggtggtggttctttgcgcccgtgaagtcctcacttatgaagtaaacggggcactagagcgggtgtgtgtttccctcctctcggttcttgacgatgggcaccgaactgactacctgggcagtccctgccatgtagagaagaagcggttccttgtcctctagtgggactaggacgggggcctgggtcaagagagtcttgaggctattgagggcctcctgtttttccattgtccattcaaagcggtcagtcttccacataagcttatagagaagcaatccacgctctccaaggtgtgaaatgaagtggttgagggaggccaggcatctcatgacacgttgaactcctttaaggtcccttatgggccccatgttagtgatggccatgaccttctcaaggttggcctcaatcccttgctcggaaactaagaaaccaagcaacatgccccccaggacagggaagagacattttttggggtttaacttgatctcatttgcttttagcctttcaaacattagcctgagattagttat

SEQ ID NO: 93094 - DNA, 1072 bp, Zea Mays
tgataagcggtgctgaaatttagcttggtgcccatagctttctaaaggcttgtccagaatttggaggtgaactgggttcccctgtctgacactatctttcttgtgatgccatggagtctgactatctctttaagataaattcgggcaagggtggctcctccaaaggtagttttcactggaatgaaatgggctaccttggtgaggcaatctattattacccagatagagtcattccctttttgcatccggggtagtccggttacaaaatccatgcctatttcttcccacttccattcaggtactgggaggggttgcaataggcctgcaggtttttggtgctcggccttcgttcgttggaaggtgtcacaccgggccacatactgtgctatctctttcttcatccctctccaccaatatctggttttgaggtctaggtacatcttggtagttcctgggtggatggagtaggttgagttgtgagcttcctcgagcaggacttcttgtgcctccccttttggtacacacagacgatttttgaaccaaagggctccttattcatctgtcctgaggtccgggagttgttccttgcgggctttctccacaagtcttgttgtctctgagtctaggcgttgagctttgcatatgaggtcttctagcattggtttgacttcgagactgccactgtttcccaaacatgtattcagttgagctgattctttcttccaatcttctaaaaagttggttccctttatttcgaatggttttcgactgagggtgtctgctaccacgttggcctttccggggtgataatgaatctcaaggtcataatccttgatcagctccaaccatcttcgttgacggagattgagatttggttgagtgaagatgtacctcagactcttgtgatcggtgaaaatgtgacatttgttcccgattaggtaatgcctccatatcttcaaagtatgcactatggctgccaattccaaatcgtgggtggggtaattctgctcatgcgacttaagtaggcatgatgcataagcaatgactttctcgttttgcatcagcacacccc

SEQ ID NO: 93095 - DNA, 598 bp, Zea Mays
agcacaccgaagggccccttcgtccctatcatccttcgccacctcaaacggcgggaacgccacataacagtgggagcacatcacggccgctgggagtcctaggaggtcttcgacttcgcctcccgacacataaaaccaaaattcataccagttgccccacttgttgcgggcgcagggaactagttccacaacttccgccgaagtcttgacagtcctcggcgtaaaggtgcacaatccaaactgtgcaatcttgctcccaatttttctcttctgtcagtgcagacaataattcttggtgaagacctctacggagggctgatcaccatacgaagtcaccgcctagacatacttcgccagggccaccatggcattaggtgtcaattggtggatctgcacgtcatacctctgcaagacctccgccacaaaacgatgcgcaggtaggcgaaggccagcgataaaaaatgcctcgaacacaactatctcaccctccgactcaggaatctcttccgcccctggaactcatccaactccattcccaaaataccccaactgctgcatatcttgcacgtgaaccgaggagatcctcgaaacgccgaac

SEQ ID NO: 93096 - DNA, 377 bp, Zea Mays
gttttatgtatgcaccaagtgtagatgttatttactgtctagtcattgcaccgttgccggtcaaaccgatgtgatcaaatacatgttacaaaactcgattatgagtggtagaattggtaaatgggcttatgcactcatagaatatgacttggcctatgaaccattgaaatctctgaaaggccaggtcatagcggattttattgtagaacatcggattgatgatactcataaactggacatatcatacctcactgttactccccgaactttatattttgatggatcggttcgcaatgaaggacaaggaattgacatcatgcttgtttcaccaagtaatgtctccttcgacttctctagccgattagaaacttattgca

SEQ ID NO: 93097 - DNA, 594 bp, Zea Mays
tccaaactgagatggtacaggagtggtcggtgcaggagtgggcgcggccaggaactgagggaaacctagcataggcaagaactgaggagtaccgggcatataaaaccgctgctgagggggtcgtacagaaaattgttgctcagcggttgtcatcatgttgacagtgccctgcaaagaggaggaagtcaccggctcccatttaagcttcccattgggattcctcctacacaccacatccttgtgatcctggctgcagatagagaacctgccactccactgacactcggaacggcaatgcgcttcaccacaatagaaacacaccaaccctagcccaggcttaggaacagcccgatacctctgagtactccctcctgaagtacccgacagaggacttgccacgataggggtggcggcgctggtgttgagactttccccccttgtgggctggaccccgagtgttgcccctcctcgcgtcctggccacgaggctgatcaacacctgaagacttctgagattccattatgtactgatgctgcatctccatgcctaatgcctgctctaccgtagtacgaaaatccagcagtggaaatacgc

SEQ ID NO: 93098 - DNA, 427 bp, Zea Mays
cggacatcgggctgtgtccccgatcgaggagggagggacttgttgtggttctctatggtaaaccactcaaggcgccatcctttaatatgttgtccttcagggggatatcaagatactctattttcctgccccgatgaagctttaagctggcaccaccaacatgttgatgctgtcctccggccatcccaggccgacagtggtagagatatttctagagcccgaaatgaggaagaattccaaggaaagctttgcagaggtgcacaaaatgacaatttgaagaatagaattggggtttaagtgtgtgagattcagatcgtaaaaatcaagaaggccgcggaaaaggggagaagctggaagggcaagccctcggatgaggaaaggcacgaagatgatagcttcgtgagtgtcctctgtcggaacggttacc

SEQ ID NO: 93099 - DNA, 398 bp, Zea Mays
agatattcctgcaccaggtccctggtactgatttgctcagccaccactctaaactctacttcggcctactgacatggtgaccccagttgcatattacataggggtctggtcattccgaagttcaaagacagtggactcatgaccatggtcatcagcttctccctctttttctcatcagccttcatataaaaccattcattcttccagtcggttggccacttcatgcggtagctgaggactggtgccttcgtatctttttgatacgcaaaattgtaacatccaaaattttcgtgaaggccatctgctctggccttcgtttgatagtgcagctcgtgcactcgacagaaagcttcagcatctgggctcatcccttggcttcggagggcccagataaaaac

SEQ ID NO: 93100 - DNA, 518 bp, Zea Mays
tccttggaatcttgcaaatgcttatcctttttatatgcctacctttatatcccaacgtctatttaaaacatttagctcacatgcccttgaccacctttatttcttgatgatccatgagccatcattttatttcgcacatccttggtgatcttgttattccttgtaacttcctttggtaatgaatttttacttcaactcttctgccggaaccacacttatcttatccttgattgttttctccacttcatcattttgcgtgtcttgccttaactctgtccatggacaatgcttttcatcattatcacctttattctcatcaactctatatcttaccttgatgtttatcttataccgacctttaaaatctcccccttttccatctcaatctgagcgtcgtactttacctacttttcccttggttgtatcctcttctttgttacatgcgagtttttaactctatcctttgttgtgtttttgtttattatttcctttacccttctcatcactctatcctacct

SEQ ID NO: 93101 - DNA, 311 bp, Zea Mays
ttgttcgccatatatccctgagtatgtgggcaaccagcaacccacaacatcagttgcttcggcaagtcactctcaagctgcatggcctcagctaccaccaccaccacctatggcaccaaccttgattcacaatcagcagccagaagggcatcgccaagcgcagcaacagcgcgacacatgggaggagtccgaagctcgcacagttaacaacattgtgcccgaatcgggacatatttactaaagcaatacaggggctcgaccagaaagtttccaagttcaatgtattttttacttttctgtctttatatttc

SEQ ID NO: 93102 - DNA, 727 bp, Zea Mays
ccgagttaagtaagcgtgagcatgttgcaccgccttaagtcgttgtcgacttaaaccgattgctccattagcagggcatagtggtcaccccaagttaagtaagaatgcaagtcaatcgtgaacaaactgagtatctttgaagcccttttttattgatgacatatttccattttacagagtacatcgtcgtcccgatagcttttgaaatacagctagggataaaacttcctgaggtgttctatgttccaggagttcctgacttctgtgccgtccatctgagtgagacgatatgatcctggccaagtgacttctgctactatgaagggtccttcccataagggcgataacttgtgccgtccctcccctgttagaattcggcggaggacgagatctcctactgagaaggatcactgtcgcacggccttgtcatgatagcgccttagagtctgctggtaccgtgctgattggattactgcattcagccgttcttcctcgagtatatcgatgtcctccatcctagtagcttcggcttctgctatgctttcgaagatcaaccttggcgccccgaacttgatatcggcgggtaacactgcctccgacccatagaccatgaagaaaggagtgtttccatgcagagctcggctaggttgggttcttaggctccagacgacatagggcaattcccttatccattttcctgcgaacttttcattcttatcgaagacct

SEQ ID NO: 93103 - DNA, 483 bp, Zea Mays
cataaccagacccaaaagcctctcgttctattttatacacataagcagggagcctaggcgacgcctaagaagtgggcccctaggccgcacatggagatctaccgcaccagggtgctgttacctcaggagctgggtggaaggtggtacgttttttgcaggacacgaacctgtaagtgcatctagcccttttgtggatttcggtgaattgaatgacaacacagtttaaggactgacaagtttgctgagtgttgaacaggaaattgagtatattgaatacacttgaataatgtataatgagtagtatgcaaatgttcaacaacaagttaaacttgatgatattctattaaagaaggaaccaagagtgaataagtgaggaaataccaatcaaaggtcaaatgacaaaggagacaatatacaatgggtataacatggtctctactttgttttgcttatatggacaaagatttggaaaatcaccttgca

SEQ ID NO: 93104 - DNA, 313 bp, Zea Mays
ctttgatattatggtgcaccttatggtgcacttggtaccacaaatagaggcattgggtcctatgtacttgcatgaaatgttaacgtatgagtgtttcatgtcaatactgaatggctatgtatcaacctgtgctcgtcccaaggcatccatgatagaggggtactgtaccgaagaggccattgagtccgaaggtccattctgcaatagtatcctaaaagactaggttgcaataggtttgcctccgtcacgacacgagggtagactgtatggaagcgataggatgggacggaaatccttcatcccaccggattac

SEQ ID NO: 93105 - DNA, 354 bp, Zea Mays
gaacgggaccccacacagcccgtctctcgggacgaggcgttcgaagcgggggaaaccctaaacgaggggacgttctacgaacagcggaactcccgacgatgagaccgttgccttgtctaggatcgcgagcgagaactggcagagcacagcgccagacatcgacatgaccacctgcctcttccgcaaaacctgatgctcaattttgctcgagccatgcaaacaccgagcaaagttggcggagtcctgacttagatcgctaatggtctgcaccgcatgccagacacggagggttaccgataagtcctcacccgagcggcaaaccacctcctccctcttgtgcatccagaagatgac

SEQ ID NO: 93106 - DNA, 531 bp, Zea Mays
ccgaggggtcagttgacccagcaggtgcaaagtacatggcccaaagtctggagaactgggcagctcttttcctctcctcaaacatctgaaacacagggtcaggttgccatccctgattgaccatgaaattcatctctaaattctggaaatggttattatttggatccccaacttgggcctaatgcggcaaatcagcaataccagggacagggtccacttgaagcgccgggccatcaacctcctgaggcccattgaatgcagcaatattgacagcaagcccatcccctggcaaaataggaccattctcaacaacatggccattctgtagaggtgcaacttgaccagcgccaaaggaactatccgacgacaagcctgagtgctgattactgagttgaagctcatccggttgaatgggttgcaaatcaggctgaaagggctgcagaatctgttgattgggttgaacattttcgatccactagtcccaatccccatgggcattgtcatcctgaagagccggcaaatcaccacccg

SEQ ID NO: 93107 - DNA, 489 bp, Zea Mays
gacgacttcgtcttgacgataaatggtccttcccacttcggttccagcttaccccgtgactctgtccgggttgtgcggacaagtacatggtctccttcgttgaattctcttgggacgaccgcgtggtcgcgcaaggccttcgtttgggcttgatatttgtcgagggcctgcagggtgaagacacggtctccgtcaatgaggtctttggaagttggctcgtcgacgttgggtactgctgaagcgcttgtccgcggggacccatgtttgatttcctgcggggtcatggcctccgatccgtatagcaggcgaaagggagtgaatccggttgcccggcactcggtcgtgttcagtgcctagactgcttcaggtagcaggtcggcccattttcccttcttgtcgtcgaggatcattttcttgatcgctgtgaaaatcttgcctttggcgcgctccacgacgccgttggattgtgggtggtacactgaggcgaag

SEQ ID NO: 93108 - DNA, 472 bp, Zea Mays
caaatatcctcccatttccaagatggtatgggaaggggttgcaaagtgcctgctaccttcaaatgactggccttgactctctggcaggtgtcacactcggatatatacttagcaatttccctcttcattctggtccaccagtatagggatctgagatcatgatacatcttgttactgccggggtgcatggagaatttcgaaaggtgagcttcttccaatatcttctttctgagctcagggttcttgggaacaaccaatctgcctccaaaccatagggttcctttgctgtcctgacagaagcatttgtatttgtccaccttttgtttgatcatttccttaatgactttaacacccttgtctccaatctgtgccatgactatttgctcttgtaatgtgggctccactgaaatataacttaaagcaccggaggaaatgacttctaggttcagcttgcacaactcatcacataggg

SEQ ID NO: 93109 - DNA, 389 bp, Zea Mays
acagagctttactatttggtaaatatgcaagaggaacaacctggcatattgttaaatgcaatcacattagagagagagagagagagagatgagggatgacccattccattgtcaacactatgacagagagctccatttgacttctcacgtgcggcagccgggcgcccgggcccaagtccatacatgtcggcatgcatgtcctcgaatcagtagattagaatcttaagtcatgcaccgtgcatttaagagattaaaaggatcatgttggctgcccaccttgggaaatggttttaaatattcaactgctactacactgtggaaaagggtttcaaatttagggcctgtttgacacaagagctaatcactagttagctgaaaactagtttaaa

SEQ ID NO: 93110 - DNA, 979 bp, Zea Mays
ttgtgttttagattataagttttgagaacgcagttgtttcaggtagtatgatgtacttgggttttttgggttcgatttgtgttcaagagaattcacttggtaccatgtcagttcaaaaaaaaattatgccaatacactgattcactgcccagaagtttaactgtttataacttgtcaaccaatttgttgatcctgtactgaattgcttattttgagctgttgcagccgttgcaacacaatgcatgtggcctagcacctatgtcctaagtcctaactgtgtccctatgttttccttgttccattgttgctcagggtcaggagttggtgtatccagatgttgatgcgtagaggaatacgagagcatgacttctgacaatagcatcaaggtgcatcttcttcagaaatcgaatgtatcattgctccggatacagtgaggttttggtagtaggttcgattgttgatctttcagtttgagaaattgagaactgctgaaagcattacatggaaacaatgttggatcaattttgcacagttcagaactgttgaaagcattacatggaaacaatgctggatcaattttgcacagtgacattggttgtaattgctacctttctgtttggtgaatactgatacatactggtgttttatgaactgaaagtcgcagctctacgaccttttctcgatttaccgtcaggaaatgagaggaaaataatgctgaaaaaacacgattactagacagatagtgcacatttttagaacgtgtaatctgtgctgtcttttgagacaaacaagtacacagttgatgtcaggcgaccaaatgataacttgttgcttttacaagcacaactacaatttgctacccaaagatacaatttacaggaacaactaaacctgcacgtgcagctgatcagcaggaagaatcgcaataagtttgcagcaggaattgcaacaagtgagaacggagcaatgtgagcatggc

SEQ ID NO: 93111 - DNA, 317 bp, Zea Mays
ttgttccacattcacatacatattgtgcctgtcctacagctccacatactatatcttttgatcaatacagatttgaccttgcaatcgcggtttcactacctcttggtaagtatcacgaaccagcctccgattgtaccatcctttgctttgtatttcgtcagacacttgtaagagcttggtaagatataatagagcgtgttcctgtgttccacctgagaggagcgtgtagtgaaaatactagggataacctccactgtttgtttcctgtttttgtgtttcgatggcaggcgacgaagaagaagcaaggatccctacag

SEQ ID NO: 93112 - DNA, 374 bp, Zea Mays
aaggcagcttcgtgatctttaactttattttcaaggtcttgaatgacgaagtcctttttcttcaaagcagcttcgtaactttcgactttattttctagatctttgattgtagcttcgtttttctcgtcttcaagatcttgttgcatcctcagcactttacttagtaatatactctggcaaaacaattttcgtcagaaaacatcttaattcataaaataataaaaagttaagagttttaccttaaaattagcgtagaacaagctaccggcgatatgctgtcgctggtacctgcagaggtccgcctcaatctttggcaagccaacattcttcaagaaagtcctaacgactttggcctcggttcgattccgaaggca

SEQ ID NO: 93113 - DNA, 405 bp, Zea Mays
cagaagacaggccccacatgcttcaagtgtagttagattgggcactatgcaaatgcttgtccgatggggaattccagcacaccagctccgaacaagcaacagactcctggcaagggattcaacattgtcagagttaaccaagtcagtgccaacgccactactgatggagtggacatcactatcgatatgttttacattaatgcaactccagcagccatattatttgattctggagctacacattcatttatttcttctctctatgccaccacaaatgaattaccacttcaaattatgaaaacaccaatggtagtaattacccctaaagggcatgttgaagcaaactatatgacacacagattaacactgacaattatgggaagggaattctggtctacacctata

SEQ ID NO: 93114 - DNA, 543 bp, Zea Mays
cacaagaaatcttatgaatgttttgcataattgcattacatccacaagcacgtcaccagcacttcctgaaatttaaccacgtccacgttggaaacatgaggatcagtatagtgatgttctatgagtggtggttgagggtaaatggattcatctcgttattctggcagcttggtctattatagttagatatgacattaattaagagttcgaaggatccttggcagttctatgaagtcgataaaagaagatgacattttgaggtaatcgtgtctaccattttggagcatatacaagacaagatcatgacccatggcagactgcatcaaagagaagtgtgtgtctatataattaaggcctgatctatctctccacgtgctccttcgccttcccaaggcctcaacattagatccactctggccagcacaaacgcggcgacatgcacggacgtggttcgctagatcaacacccgaagggcgcatgctatgcataattcgctaatcggatcatggcgcccgcaagaggaagaggagaggacgacaaagc

SEQ ID NO: 93115 - DNA, 399 bp, Zea Mays
ttgatcgtgacgatgaaacatgctctatgcacttatctgtgatggaacgagtaaagtgaaaagtgttgaagttaaagtttaaagtgaacgataagatcaaggcggagaatgttggattgatctccaccaagatgggcccaacggacatcttgggcctttgatcgcgccctgatcgggggcgtccaaccctatatggttggtgggcccctgtcacactgcgctataaataaaagggtgggcgccggcggctcagatgacgcagttcgctagagcagtactccctaccgacaaaccctaacaccgatctgagagagggtgcgtagccagtgacaggaagacaccgccgcaacctcgctgcaccgaacttcatcaacaaacctgatgttggacggatctaca

SEQ ID NO: 93116 - DNA, 544 bp, Zea Mays
gaacgcataggtgcgagaacatggcagagaagatcgtgtcgtcgacgccatcgaggactagtggggcacgtgtccaggacgtggtggacgcacatacggtgtgctactcacggtggtttcagtggttgagcctcaaaacctcctagcactatggagggctggattcaatgagtttgggcctcaaaatcaacgttgtggttccagtgggaaccagaggcgacacatggcatcatcgctaagggtgcgtcaatgcaaagtaacttcatgtggagtgtgtggtcgtcagatgaaaaacctaggagttggtttattttgcccccggttaagtggatgagctttatgtatcaaggatctaggggtagttgagacttgtgggggacagatatcccccgggtccactagaaagcgaaaggtccttgtgcgaggcctcgggcccgttaccccgcaaggccatctcttcgtgggccgggcaaaagctaccggtggaatggaccgatccgagaagtcgatggatccgagcctagatggtctgtcgaatcgtgcg

SEQ ID NO: 93117 - DNA, 611 bp, Zea Mays
gaatagttcttgcttggtaaaaaccttgtgcgtcattatttgttctcccataaatatctggttgtgcctcttcaagactttctggtgaagcgtgccggcgatgatagtccgagcatcattattacttcttctacccacctctatctgtattggcccttggtcttcgtaccctgacctccggcttcacttcatcgtcatgtgtgcttcgtagggcatctggggactcatgcctagagcccgtaggtcatcaaagggaggcagactggctctttcctatgtcgcggctcggtgtcaggcgtagttaatgtgacatgcacagtattgatggcgagagcagttctatagccagacgcagaatccactcaagtggctccctggcgattcatctgacctccttgctaggctttgtctggtccaaccctagacatggtgcgcagtggtcatccgatttacttggatgtgcttctccctatcttctctctggctcatgacccctcgatttacctggacgtgcttctccctatcttctctctagctcatgacccgtgggctcgggtatctgatccctgacaatgtcatgtccctagctaaaaaattaattttagcggcta

SEQ ID NO: 93118 - DNA, 736 bp, Zea Mays
aaaggatttaaaatggaatttctaggaattaaacaaattctgaaattattttacattaaaaatcattaattcccttggttttcatactgctatggtccacgcacattaatactcaggagtttgggggctaattcataattgttccaagactcagagctaacccacagccatgctcatcggaccgcgggttcatttcgcggttcaccagggactcatgtgctaattgccagggccgaagaggtacggggcaatcacagccgttggattgagaacgtgagcaccagattagatcggtctcccccaaagcggtacactccatcggccacacgattaggatccaacagctaggatttgcgtaaaccggagcccttggatcgttgatcggcgcacacgatttaattcatcgaagagttacgatcggtctaatcgcgactgttggtcaaagatccaacggttcccatgccacgggggcatcagcggcctagatccaatcccagccatacatctccgtttcaacggcccacgtcctttcccccaaactctcctctccctgtcaacaaagcggcggcgccactcacgagcacggcggaggccctcgccggccacagcattccccgcatccccgttctaaactccgatccgaggtgttcactacgcagcagatacatgggcgaactggatggggaatttcttaccgcgaattgccgcgacgactgacccagtcacggtacgatgt

SEQ ID NO: 93119 - DNA, 457 bp, Zea Mays
gagccgatgtagcgagtttgctgccctcgctctcgtgttgcggtagtgagtgaaaacgctgccctcccccggctcacaatagagaaggagggcaacaagatgtgatttgtattatttttgcagtgtggccgacaaccctttgttgtgtgtatgtaaactatgaggacatttcttgttgtgaaatgggatggggacctcactttcagtggcgatgttggacgcttatgacgcgtacctggttgcgtcttaggtggtttttgttcgaccgtgtcagataaaagagacttcgcacctttaaggtgatcatacttgacatttgtgccattagggtgatgtcgcacatttgtgcatgtccggctgcacccttaggcggcttttgctcggatgtcttatagtagatacttcatatcgcgcacttgttgttcatatccggctgcacccttaggcggcttttgct

SEQ ID NO: 93120 - DNA, 547 bp, Zea Mays
ccaaaacctgacccaggtgtgaccgctggatatcacgcaccccaagccgtcggtgttccacaaggtattctctaaccacatccctcaccgccgggaaagtaatctcatggccaggtaaaggttgaatgttgataatagcccagtcctcatgcaatggcggaagacgccgagaaactgacctcgccataatttcccggtgaaggaccactgtagcgctgaagcccggcgggagaaagggttcgggatcaacgcgcctaaacgccatcggagcaggaagcgaggatcgacaaccagcagacgaagacgaagcaggttggggttttgttgaagtgacgcccaaagaaagcgtcagggactgaaggggtgccgattcagatttttttaatacttctcgggcgaactcctcgaagcaactgaatatgggcggtccaccgatcagagacgcaaccggtgagcgaaaccaggtactgtgatcaggagaaatttggtttcccaccaaaagggcccgactcccaaaggcagggaacgaagtcagaggagaaccgaa

SEQ ID NO: 93121 - DNA, 493 bp, Zea Mays
gcattgccgcgtttccttcacccttttcctctgtccgtatggttgccgcagtgacgccgacgcccttgctccgtcctcaaggttccgcgtcgtcccaaccatcgcgtctgcatcttcgtaaggtacggtctacctggaatcgttacccaccccgctgcgtgatgtcgtgttgctagggttcatcctcgatcccgcgacaccccttcccctcatgtccagtaggtccactgtcatcaaccacgtaataacagaacatttttcttcaattccgcctacagattgtcgtatcacttcgagttcaaggtgttcggttccaagatcatctgggattcgaggacttcggttgcaacctccagttaagcaaaggtaccgtgccactcaatttgttgatgaattatttgtcaccatacatgctgtgtatttgttccaataacgtggatccatggcttgttttagttcattctttgtcagtacacctgaacaatgagtcgac

SEQ ID NO: 93122 - DNA, 1194 bp, Zea Mays
tgggcaaatattgtgcagccgtccgaaagctcgaggacaaattcgaaggtttggagttccatcacgtggaacgagagtgcaacgcagtggcagacgcgttgtcaaaactagggtccggtcgggcccaggtcccatccgggatctttgtccaaggaaatatcacgcccgagtattctcttagatctggtagaagaatgcaacaccctgagccaacctgagtcggaccccaatgactggagggagcccatcatcaggtacataaagaatgaaagaagaaccgaatgataaagtagcagcggaacgcgttgcaagacaatcagcccactacaccctcaatggggacacgctgtacagaagaggtgcgacaggggtcctcatgaagtgcattcactcgactattgggaagcaactattggaggaaatctatgcttgggcaatgtggagtacatgttgcatccagaactctggttgggaaagttttcagatctggtttctactggccaacagcgaagaatgacgccgtcgagttagtacagagatgcgaagcttgtcaattcttgtcaaaacaacaacatttacctgcacagcagttgcagaccatccccgtaacatggccatttgcgtgctgggggctggacatgatcggacccttcaagaaggctcagggaggctatactcatgtgctagatgccattgacaaattcaccaaatggtagaatacaagcccatcgcttctttaaccgcagccaaggcagtggagttcatacaagacataaattcaggtttgggataccaaatagcatcataactgacctaggatccaacttcaccagctctgaattcttcaacttctgtaagcaacaaagtatccagatcaagtacgcatcagtagtgcatccaagagccaatggccaggtggaaagggccaatgggatgatactagaggcactcaggaagaaagtgttcgacaaaaatgaaaagcttgaaggaaaatggatcaaagagctaccatatgtggtttggagtttaagaactcaacctagtcgagctctgcatggaaatactccgctattcatggtttatggttcagaagcaatgctacccactgacctcatgttcggggcaccaaggttggtcttcgaaaacatagctgaagcagaagctactaggctagaggatattgatgtgctggaa

SEQ ID NO: 93123 - DNA, 351 bp, Zea Mays
cctgccaaacccagaaaacttcgaatctgcctcacggtagtcgggggtttccaatccatcacctcctgcaccttctcaggatcaactgatatcccatcctgagaaattgtgtgacccaagaatttgatcttctccagccagaactcacatttagacaacttagcataaagatgatgatcgcgcagtcgctgaagcacgatgtgcaggtgctccgtatgttcgtctttatttttggaatagaccagaatatcatcaatgaaaacgaccacgaacttatccaactctggcataaacactgagttcatcaagtacatgaaataagtcggggcattggtcagcccaaaagacatc

SEQ ID NO: 93124 - DNA, 431 bp, Zea Mays
gcctttttgtctttgttttgtgctaacaatgacaggaccaaagaatcaaatggacaaggacaaggggtctaagcttaacaacgatgagtgtgtctctcagatggaattgaaggagatgatgcgcgcgatgactaaagcttttaaaaaataccaggactcagcggcaacatcctatgagtactttgatcgacgagttgctgaacttgttacacgcatggacgtactggaggctcgtcccccaccaccaactccagccccagctcactgtcctgtggacgacgacgacgatgacgacgatgtttatgcactgctgcgacatcgcctcgcacgtaatcgacaaggtatgggaggcaatggtagacgtcgtcataatcctgaaccagaccatgatccatttgctaagattaagttctctattccaccgttcatgg

SEQ ID NO: 93125 - DNA, 389 bp, Zea Mays
caaagacactacgcacagagtcgcccacgggcgcaaccggaccaacacaagcgtacaaatacggccaacaggccgcatcaccatacaaattacaattacatacacacggcgagggcatcacaaattacatcggctcaaccttcgggatgatacccatctccctgtaatgaaacaacattatcctcaattcctcaccctcaaaaaacttccgaagatccccctcgcctatgcccaccccaatcggcgaggacaacaattctcgtttaccaacccggtctactcggagacggccacgctccatccccaaaatcgtgaaaattcacccacactatgttttcccaccacccttcgccgcctacacctagtactcgcaccaggaagatcctcag

SEQ ID NO: 93126 - DNA, 291 bp, Zea Mays
aggtaaattgtgatcctctatccgaaacgatcttcttaggtacattgtgtagagacataatccaaaccacatatactctaccaattgagataccttataagttgtcttgaccggaatgaaatgagccactttggtcagtctatccacaataacccatatagaatcgtatcctttcgaggtgcgaggcaatccagtaatgaaatccttaccaatctcttcccactcccactcaggtatctttagtgggtgcagtagtccagttggcctctcgtgtttagccttaactctttg

SEQ ID NO: 93127 - DNA, 635 bp, Zea Mays
gagaaaaaagagagagatcagaggatcgcagaggcagggattttagtcgtcgtgactgggaccatgatgatgatgaggactttcagcagaatagacgtcatggcacccgtaggcaccgcagtctatctggctgggcgcgttcttcgtggtgccgcggcggtccagaggattgcttcagctcatgcggaagacgcaggccgtccaccccattcagacgttctgggctggcgacggggccggctgggcgctggattccaaaggtaaaaaccaagtcagtctctttcgctgacccattaatctctgttgtttggcccccagctgctatggaagagctggaaggtggaaaaggtgttattttggctgatgattggaatcctggcgaccagacagcacaacagcctcagcttgctgctcctaccaaggttcgcgttgccgagcatttaagtttctcagatgttgtgttaagccctaaatctatagagattgcatatcctaatcctgttacaactatgagtactttgcaacttatagacacaacttgggtggcagcagccccaaattcaataaatcagctgttggatgtagaacctcaagcacttccacattcaaaccttaattgtgcatctgtcatgccg

SEQ ID NO: 93128 - DNA, 656 bp, Zea Mays
gtaagaaatgagctgacttggtcaatctatccacaatgacccaaatggaatcatggtgtcgggaggtgttgggcagtcccacgataaagtccatgcaaatgtcctcccatttccaagatggtatgggaaggggttgcaaagggcctgctgccttcaaatgactggctttaatcctttggcaggtgtcacactcggatatgtacttggcaatttccctcttcattctggtccaccagtataaggatctgagatcatggtacatcttgttactaccggggtgcatggagaatttagaaaggtgagcttcatccaatatcttctttctgagctctgggtccttgggaacaaccaatcgatctccaaaccatagaattaccttgctatcctgacgaaaacacttgtatttctctgccttctacttgatcatgcccttgataacctgaacacccttatctccaatctgtgcctggattatttgctcttgcagggtgggctccaccgagatatagttcaaatcaccggaaggaacgacttccaggttcagcttgcacaattcatcacacagggtggtaactctcgcatccatgctcatacaattgcactgggccttcctgctcaaggcatctgccacaacattggccttgccgggatggtaa

SEQ ID NO: 93129 - DNA, 298 bp, Zea Mays
cgcaacatgtcttccaaaacctgatttatcctttctgtctggccatctgtttggggatggtaggctgagcttcgtatgacttgggtcccaagggattcctgcaattgctcccaaaatcgtgccacaaatggtgctcctctatccgagactatagtccttggtatcccatgcagacgaactatttggtcaatgtagatctccgcatacttttctgtcctgtgggtggtgtgcactggtaagaaatgcgcagtctttgtcaatctgtccacaataacccaaatagaatcatggtgcctgg

SEQ ID NO: 93130 - DNA, 290 bp, Zea Mays
ctttctcacaagacgacgcccaagacttagggggagaatgatggaataagtcttgagcatctagaggacagcagtcgcttttgactgtcatctgtagtcctttagcatctagaggacaacttgactgtcctctgtagtctctttagtatctagaggacaacaatcgctttttgactgtcctctgtagtctctttagcatctagaggacagcagtcgcttttgactgtcctctgtagtctctttagcatctagaggacaatcatgttgtgtagtgtgtgtgagaaggtgtg

SEQ ID NO: 93131 - DNA, 936 bp, Zea Mays
aaatctcaacatgcagaacagaacagatgatagaaaaaaacacatgaaaccctgttacctctcaacagctttttcatatggtgcttcattctcccaatcaaatgaaataaaagttgttggctctagcctagcgtcttcatgtttagtggattctagtgaacttgaactggtgttcccgcttatgacattctcttcaagctctgattcaccatcactgtcagactcacgggttcgcttcatacaaaactttcccttggattgatgcaaagagacttcggatttatctgttatagaagactcggatactcgatgaagattagactgcatctgtatccaccggttcaaggttggatatctacaaacaacttattggattgttaaaacatgaaataggttagcatgtgatagtttaaaatgcctaatcattacctctctgattgctcaagagcaaattcaaaaaatgatctctcagtttctggagcttgtgttgaatctttcacatgagtaaaagatgattcattgtccccagatagtatgctgcttccaaatacacaggccaaaactgctcttactgaagataactgggctaaatgcttcactaaatttaattggagaggatagaggggttcttgacgagaagacaaggacgaatcatgtgcactccatccttgagcaggagaagacttggtgcatagtctgttttctgaactaatattacaaatggtaggtatgacaggaatgcaagcccatccttgtcctgttcgtggaggtaaaacaggtggcacacatgctgatataatctcatgcacaaaatcaacactcattgtgtcagcaacctttgctgctgcatcagtgcttccacgctcaaaaaccagacgagttaatagctgcatgccaaaacaaacttgttagagaactgacactgtatgcataaag

SEQ ID NO: 93132 - DNA, 392 bp, Zea Mays
gcaaagtgggccatggtccccctcaattttatacacccatttatacctaatgattatttagtattaagtgtacaaaaaaatcgaagttttagatagtacgaagccttgttctaaatctctaaaactaataactagttgctaaaattatccaagaggtttagaatggatcaactaattgttagttatacccctcaaataagtattagttgttagatgccccaacccagctaaaatcagttaacaattagctctataggtttagaacatggtctaaaacaaccatgttatgagcctgctcgccggatcctctcgatccagtccttgcatctaccagtctgactctaatcttcccgacagcacctaaaccagtctgctcgctgcctcatttctgc

SEQ ID NO: 93133 - DNA, 446 bp, Zea Mays
tgaagattataacttagacccagacacatatgatggagagttcttccaagaagatgggctagaagagcgatttgagatagacttaaccgaagctatcagaatggacataaatattgaaatggttgttgatgaggaggatgatgagatgcaaaatgagaatgacttagtaatccttgaaggcaatgacattaatgacgaacctgcgcctttagatggtgttgactatgaaatggttgatagtgatgatgagagttatgatccggctaaccccgacacatatgaagattatttttaatcgatgtaatactataggttttttattttgcacctgtttttaaatatatctttttatatgtgcttatttgtttactcttaattgcaggttgttggacaaagatggtgggcgcttggctaagaaggagaagagggaggaggagcaggacggc

SEQ ID NO: 93134 - DNA, 309 bp, Zea Mays
gttgcttttgtcctactggagtagaagcataccctcttggtggagtagaagcaacatcacttctatagtgatttattaatgcaaatcgcttgtcctcttggctcctgtcgccggaaaaataaatcaaggcacatggaactaagctagaaggacagtaggaaaataaaagggcagcaaaccaggctcatttagctgtgatggcccatgtaggatgtttcaaaaatattagggtgtttttatttagcagtctgctgtgagattaatatttttttacgaatcttttttttcagcagtccccaatacgagatt

SEQ ID NO: 93135 - DNA, 372 bp, Zea Mays
cgcaaagccaaacttcatctgaaccccaaaaagtgtatattcggtgtccgacaaggaagaatactgggttatctagtatcccaaagaggcatagaagcaaaccaggccaaaggctagcagggagactcgtcgcactaaacagattcatctcacgatcagcagagcggagtctctccttcatcaaaacactgcacgggacgaaagactttgcctagggcccaaagcaagtcgtagcctttgaatcattgaaccagtacctgttcgagttaacaactttgaccagcccagactcggccttcccctcctcttatacattgcatcctcccacaatgcagtcagcacagctctggttcaagaaagaacaaaaaagac

SEQ ID NO: 93136 - DNA, 456 bp, Zea Mays
cggcgggtgcagtagaagcaacggtgggcttaatttatcaaaaagaagaaaaaaagatcctaaattaatcgctgagaatttattaaagaggtaggcgttaaacatgatcctccagaccccccaccaggcacagaataatgaccagggaggcacaggcgcagcgcaggccacctaattaataataatgttgaacaccaaaaagtggctgagggtccagccaagggtcgcgacggtctaccacctgtgattatattaactcagatgattatatttatctcgtacgtaattatctatttaattacgtgaaatttgttagctatcatctagaaattggtgtatatatatatgggtagtcgattgataaccctcgaacacgaatcaatttactttctttaccatttttatcctggaagtatatgtagtgtaatcctagttatagctttccgtatattcaca

SEQ ID NO: 93137 - DNA, 427 bp, Zea Mays
ccggtttctccgagagatggcaggaaactagatccaccagcaaggaggtcgaggtcagaatcaggctcctagagacactacttatatggaattctcgaaaactcgtccccctgtcttcgttaaagcggaagaacttttggaggcgaatgagtggatccacgtgatggaagaaaaatttggactgatccgttgcacagagacttagaaacccatgtttgttgctcaacaaatgtgaggccccgctagtacatggtgggaaaacttcgtagccattcatcctgaaggtcatctcatcacgtgggcaaagtttaagcaagtgttcagggagcattacattctagatgtcattcttcagatgtagcttgaagagtttgttcgtctgaagcaaggcagtgactctgtaatgcagtaccttgccaagttcaac

SEQ ID NO: 93138 - DNA, 362 bp, Zea Mays
atgcatgcatgctctgctgtctgctcgacgatctagctaccaggagaagaagaagaaggtgcatgtggagcgagtcatgcatgtatggccgatccagccaaccatgctcttcacgcatctaccgtgaggtgacacctacacagtgcaagttttaatggcgaacccgacgatgcatggaagcctgtggaatgaagagatagctagcttggcagtggcagctcgccattgagcggtgcgctctgcacccgtggctgcccgcctgtgtctctgcattgccgatcgatgacgacgacgacgattgagagagcttgtttggcagacagaggagaggaatggaagggcctaaaattctcttactattc

SEQ ID NO: 93139 - DNA, 644 bp, Zea Mays
ctcattaagaagacattccgcacaaaagtcgcccaggggtgcagccggatcagcacaagcatatgaatacgaccaacaggccacatcatacaaattacagttacatacactcggcgagggcatcatatattacattggctcaaccttcaggatgatacccatctccctgtaattgaacaacattatcctcaattcctcaccctcaaaaagatttcgcaaatccccttcacctatgctcgccccaatcggcgaggatagcaattctcgtttaccaatccggtctactcgaagacggccacgctccatccccatacgacggcgcctaccacttcgcgaaaattcacccacactatgtttcgacaccaccctttgctgcctatacccagcactcgcactagggaaatccccggcaccctccacacatggcgaagactccgctgtagccacatctaacgctacaaaataatccaagccttcattcgaggactcctccgtccaggaaaacaaactcccagattcaccatcagactcaaaacactaagacacagagccaaataaattatcatcggcaggcactacagttgaggccgccacaaaatcagtattgccagcagcggttgcttgcgcaggcccaaacgtcggaa

SEQ ID NO: 93140 - DNA, 278 bp, Zea Mays
gttgttccttacgggctttctctacaagccttgccgtctctgggtctagacgttgagctttgccgatgaggtctgctagcattggtttgacttcgagactgtcgttgtttcccagacatgcatttagttgtgctgattctttcttccagtcttctagaaagttggttccctttattccgaatggttttcgactgagggcgtcggctaccacgttggcctttccggggtgatagtgaatttctaggtcataatccttgatcagttctaaccatcttcgc

SEQ ID NO: 93141 - DNA, 454 bp, Zea Mays
gccagtcggagcgaactatccaaaccttggaagatatgttgcgtgcttgtgttctatcttggaagggtagctgggaggatcatctcgctttggccgagttcgcttataacaacagctaccaggctagcatcaagatggcaccatatgaggctttatatggcaggcggtgtatctcccctctgtgctgggagaccatgggagagagatctctggttggtcctgattgggttcagcagacatctgagaaggttcggaaaattcgttagaatattttggccgctcagagccgtcagaagagttatgctgatgtgaggaggcgggacttggaatttgcagtgggtgaccaagtccttctcagggtatcacctactaaaggagttgttcggatcgatgtctccggaaagcttagaccaagatacattggaccgttcactatcttggcccaagtgggcag

SEQ ID NO: 93142 - DNA, 512 bp, Zea Mays
gccaattactctattagtagggcatagtgatcaccttagggtcaagtaagcgtgagcatgtcgcaccgacttaaggcatttctgacttaagccgattgctttgtttgtagggcataatgatcaccctaagtcaagtaagcgtgagcatgtcacaccgacttaaggcatttccgacttaagccgattgctccgttagtagggcatagtgatcaccctaagtcaagtcatgccgatttcgagtcaagcccaatcgaagtcagttgtcaatcaagagtttgaacgcctttggaaaatgaaagctttattgatgatgaaatcttctggttatagagtacaacttttcttcaagagtttttgaggcatcgctaagggtagaactttctgaggtgttctatgttccacaaattccccacttctgtgccgtccatctgagtaagtcgatatgatcccggctgtgtgacctctgctacgatgaacggtccttcccatggtggtgatagcttgtgtcgccc

SEQ ID NO: 93143 - DNA, 352 bp, Zea Mays
aggggatggatgaatagatatactcgcacacggacgacgaggccaaaagacctggaggttgaagccaaggcacgaaccaacgcgacgtccaagatttagcatagaactccagtcccgtagtgttggtgttttgacccgagggtcctaaccaactagtgaatcagtactgtgttcccagatccatatggtgatgcaagaagacacaagttttatcctggttcgggcaagagaaggtcctacttccagtagagggggatgacacttatattatcttgcacctaagtgcttgtagtaggggtacaagcaggccgggagagggagtggatcccaagtccctggtagtgattgagtc

SEQ ID NO: 93144 - DNA, 490 bp, Zea Mays
caattggtgagccttggcgcgttgacaaggatcacatactctagatgactgacgcggtgtacacgctaacttattggacttgacaataaagtcgacgacgctaaaggatggatgaccaagctgacagtgccacagatcagaggaaactgagtggctagacagagcagcatggtgggacacatgtgatgaagacttagagcatggcaccgcgtacagaccattgaagcttttaccgcgtagaagggttctccgtgatttttgatccttgatacagaaaaaggatgggtgaagttccacaaacgcatcattatcatgagctaatttttgaatggacagaagattcttacgaacactaggaacatgtaaaatagtgtgaagatagagtggacgtgaggaaccaggtatcaacgagtgaccaatatgagcaatagacaaacctgatccgttagccacctgaactgtgtctttgccagtgtaacgttcatgcaga

SEQ ID NO: 93145 - DNA, 373 bp, Zea Mays
tcccattcttgaacaatgtggaccagtggcataccgacttcaactgccagaaacgttgtctgcagtgcataatgtgttccatatatctcaattaaagaagtgccttcgggttcccgatagaaccatcgatgtggtagatgttgccttggaaccagatttgacttattcagaacatcccattcgagttttagaccagaaggacaggatcacccgaaaaaggactcttaaattctataaggtacaaaggaaccatcatacggaagatgaagctacctaggagactcaagactttttggaaaagaattttcctaggtttttagcttcatgtaacctataagatatgtacattagttgtaaagttggaatatatccc

SEQ ID NO: 93146 - DNA, 684 bp, Zea Mays
taccccccttaaaaataatctcgtcctcgagatttaggaaggactagggaaaagatggggaaaatctatgcgaagctcttcttctctttcccaagtagcttcatcttcaccatggtgactccattgtaccttgcacatctttatcaccttatttcttgtaactcgagtcaaagtgtccaaaatcttgatgggatactctgcataagtcaggtcatcttgaacactcagatcttccattggcagttgctcctcaggtaccctgaggcacttcttcagctgagacacatggaacacatcatgtacatctgacaggtgatcgggtaactccagttgatatgcaacttctcccactcgctttaagatcaagaaaggtccaatgaagcgaggggacaactttcctttaactttaaatctcctcataccccggatcggtgacaccttcagatacacgtgatcaccctccttaaactccagtagtcttctcctattatcagcatagctcttttgtcttgattgtgcaattctcaaattctcccttatcattcgaacttgttcctctgcctcttgaataagttcaggcccaaagaactgtctttctccagtttgatcccaatacagtggtgtcctgcattttctaccatatagagcttcaaatggtgacatcttcaaactggcctgatagct

SEQ ID NO: 93147 - DNA, 433 bp, Zea Mays
tggaagtgggaagaaattggtatggatttcattgtcgggttgcctcataccccgaaaggatacggttccatctgggtgattgtggacaggctaaccaaagtacctcacttcattccagtcaagactacttataaaggatctcagttggcagagttatacatggctctgattgtgtgtttacacggtgtaccaaagaagattgtttctgatagaggctcacggtttacctccagattctagaaaagctttcatgagaatatggatacaaagttgagtttcagttcggcctatcatcctcaaactgatggccagactgaaaaaactaattaggtactggaggatatgttgagagcttgtgcccttcagcatggaggtagttgggacaagagtctaccatatgctgaattctcgtataataatagttaccaggcca

SEQ ID NO: 93148 - DNA, 520 bp, Zea Mays
gtcggctcataatgggtcggtctttttccttttgtaatggtttctaacctcttaatgaatggaatttgttcactgctcctttgctgttgcgtgccacgttcttttgcctcgcaaactaattccagagaacttgattcatgagtttagctttcgagagtactcaagaaatgcccaatcagagatattgtccaacttgtttcactctgttatgccaaaactcgcctgagctaccagcctgtcacgctgtgcctgacttaatgcaccaacctatatttttgtcaacgttttcttggcccatgaaccctaggttctgtttttcctccactgctttctagcttcccgagctcccacaccttctcgcctttgttcttgagtcactctgtctgagggatcacgatggcgcccaggaagaggaaacaggatgctgctacgcctgttatcactctgattgatccttgtagccaactccctttctgcggtaaccatgtttttgtttttttctgaagctgatctcttccac

SEQ ID NO: 93149 - DNA, 414 bp, Zea Mays
tgaatatcgaaccaaggttcgaacatatatgtaaactttatatagtagtagcgatgggctacatacgtgtggtttggttatttatttgtgaaaccaaactaatatcatcggtatcctagcatctttcgtgctgtaatattactcttctttgtcgattttgaccaaacttaaattgtttggtctaagataaactttaggtccgtaataattaagccatctcatctacgtgcgttggtctccaaagttcaagacggaaagataccacaacgcaacttaactggacaagacaagtctcaggagggacggattcaggcctatggccattagagtccaggtcctactcttgggccgagttattatctaatagcagtccaaaaaaaaaacatgaacaataacagtccaactacagtttcc

SEQ ID NO: 93150 - DNA, 962 bp, Zea Mays
gttttgacaatcctcttcaaagtgccccttcttgtcacatttatagcgtccttttgttctttgttcttttctatcaatgttgaatagaatgtcttcaacttggatgggcacacccatgaggttcaacttatggatcaacctcatagccttcctaactattttggttgtaccttcatcaacttctgatgataaggtgtatgcttgatcttcatcatcacaagcatcatctttatcttcacttgaggagcttgaggtttcaacttgcatgttgcccttcattttcttgcgctcttcgcatatgagagttatgcctttgctttatgaagtggattcttcttgacccatctttcgtggcatttcaaataccacaatcttgtcaatgacaagtcctagagtcatttcactcaagttctccatgttgcgaaggatagtggtgatgcttgcataattgttataagatagcacaaagattatcttcctcatagtgttcgcataacctaacttcattaagataatagagttaagctcattttttattagatttaaatgagaatatatggctttagcaagcttattttctttcatttgaaatgaatcataactctatttagatagataatatttttgctcacggacatatcttgtgttatcatggagctcatgtaactttaaccaaatttcattagcttttgtaatataaagacttggttaaatatttccatgctagaagatcaaacaagcaattcttagcctagcattaagatgatgtttttcatcactcactgttggtttataggattctttaagggtttcatcccatcacaattgacttgccaaacacctagatcaactgtttatatgtagcaataaattctagcactataatattggaagttactgatgtcaaagtgtggaggcatagaggaatatgttccaaccactataaatagtgtcgactcaac

SEQ ID NO: 93151 - DNA, 521 bp, Zea Mays
caaaagcttcttgttgtgctggtcccaacgaaacgacactccattgtttgtcaactcatggagaggtgccgcaatggtgctgaaatcccgcacaaatcgcctgtagaatcctgcaagatcaagaaaacttcgaacctgcgtgaccgtggtcggaagtggccagctcgtgatggcaacaatttttgcctcatccatctcaatgccctgcgatgtcacaacatatctaagaaaagacacatgatcaaagttgaaggtgcacttctcaaggttaccaaataaacgtgcatcacgcaaaacatcaaaaacagcacgtaagtgttcaatatgatcatcatgagacttactatagataagaatatcatcgaaatataccaccacaaatttaccaatgaaagcacgtaaaacctcgttcatcaatcttatgaaagtgctaggcgcattagttaacccaaaaggcatgactaaccactcataaagactgaacatagttttaattgcagttttccattcatcacctaaag

SEQ ID NO: 93152 - DNA, 454 bp, Zea Mays
atcgacggagaccgtgtcttcgccctgcaggccctcaacaaataccaagctcaaacaaaagcatggcgcgaccacacagtcgtcccgagagaattcaacgaaggagacctcatactcgtccggacaactcggacagagtcacggggcaagctggagccaaagtgggagggtcccttcatcgtcaagacgaaggcgtcccccagcgcgtacaggctaacaacgccatccggcgaagacttagatcattcatggaatattgacaatcttcgtaatttttttgtttgaatcctcagggctaacacgcccttgtaattcaccaaacagttttattccggcccgcactcttttcctcccgtggggtgaggtttttaatgaggcggagccatgtaatatacacgcaaaaatccctcgcaaaaaattaaaacaatgtcgaaaaagactgcatcgacggtct

SEQ ID NO: 93153 - DNA, 521 bp, Zea Mays
cacacccaagagccaacgggcaggtagaaagagccaacgaaatgatattggaagcactcagaaaagaaagtcttcgacaagaatgaaaggttcgcaggaaagtggatcagagagttgccgtatgtgatctggagcctaagaactcaacccagccgagctttgcatggaaacactcctttctttatggtttatggttcggaggcagtgctacctgctgatctcaagtttgaggcgccaagattgatcttcgaaaacatagttgaagctgaggctactagactggtggatgttgatatactagaagaagaacgattgaatacagtgattcagtcagccaggtatcagcaaactctgaggcactatcattataaggccatacgacatcgatcctttgcagcgggaaatcttgtcctccgccgaattctaacgggggagggacgacacaaattgtcgccactatgggaaggaccattcatagtagcagaagtcactcggcctggatcatatcgtcttactcaaat

SEQ ID NO: 93154 - DNA, 1060 bp, Zea Mays
ttgcaccgaggcccctccctttctatttcttcgcaaggcgagatccccgaccatggacggcggagcagtggctctggcgagcctataccggccggaaaatgcaatgactcggcccctccgctgctcaacacctaattctaccctcggcgacactaatccctcaaccaattgcggagttctagctcaaaatctctctgtccacggtgatggtgcgaactgaggacaaaccgaggtgttcccggctatctaacatggtatagttcaattggttgggctgaaaagcatccatagcacacaagggtgctgaaacgagggcaaggagtgtatgaatggacctgcagacgtctggccacggcgagctcactcacggcggcgcggagaactgaattgggggaaatgagaaattgaggggctctagtggatgatctgaggcaaggactggtgcgttggatgcgtaaatacctagcggaacacacaggggcagcaatttatagagttctacggtggtggcgtccaatttgaaggatttgtggtggctgccggaaagaggagaagtcactggcgcaagtgctattgtggcttttaccggggcagtggcttaggcgatgaacaagctacctagagcggtctattgcgatgtggtaaggcgtcgaggcacatagcctagccggataacggcgaactccgatgatgccagcgcgattaaccatggcgggacacgacggccggtccggccagagaccggattcaccccgcactagatattttcatcacgccccgacgttatctactcttaccgtggcacgaatctcccaggcgggcgcgaattgtggtggcggatcaccggcgtcgagtgcacggcaccggagatctttatggtcactgtaccatggcgatcatgttcagtcattctgacagcgcaatttgaggagctttgttctccattttccatgtgacaacttatcaatcttcctatatcaaagttattttcctataaaccagctttaactttgttatagtaaccatacccaatcaaccactggatcctactccaattcga

SEQ ID NO: 93155 - DNA, 1210 bp, Zea Mays
cccctggcgatgagggagacgaggaccgcccgaccactacagcttcatcagtagtcctgataggatgggacgccgcacatggtaggaccggaggaaacaccgaatgtaatgcataacgacgaaagagctcgtagtagatgaccaaccagaacggatcttcaccttctttgtaaaacccccaaacatttataaataaagtgtgttgtcaagaatgctctttgcgacgaacatcataagcaggggagagagcctcaatcggaccttggtctctcctctcccgactcttcttttttcgttcccttctgctcgtttgtcgttggtgacttttaggacacatgaagcataagaggaaccgaatgaggtgggacgaacgaacaacagactgagtggagtgccgagtgaaaactccaatcatgaaaccaactatgtcattttcccttttctataacaacgtgctttgagtctttacaactttccatcgaagagtcctaggcaaaacacaacatcgcaccgctcgtgattcccagggcactcttgatgggaaggagacctcagaacaacataaccagagacccccatggtcgaaccttggggaaagcatcgagcaggacgacttcaaccccatcttcacttgaaatggacctatggggtaggcaacatgaacggaaggacctgacaaggaagctggtcgagactgcggatacctgcgcctcgaaggctacaataatggtcaccagtggaactcgagggacccaaaaaatgtgaacacccgtcccgcgtggaacggtcgctagcgaagacgaacgataagtgcagcgccaagggccctaatgacttttattacaacatatccttgttcttacaataccctacaaaaaaacttatttctttatttttccttctctaggaaactcgaaaaatgagtgaccgcagggtgagcgtcgtacaatgggtcctgccaatgcccttaggtctttagagcttgccatgtgaccaaccgaaggcacatccgaggcaggctcaacccctcttagccgagtcttcactgagaggacaagtgacgaccaaggcatagaggactcgagccgaaatgcagtggtgtccagttcatgaatgcaactggagacgagcgccatccggggagtacaggcggacacttcccccaaatgcaaaacaccaaggtggtcgcatacgaggtcgatggccacgg

SEQ ID NO: 93156 - DNA, 374 bp, Zea Mays
cttgaaccccatccactagaatcacacatgtctcctttcacatggttccacatgtcgatgtggtcgtccctgagtatcgactgaagagatcgtattgtcactctctactaacgtgcacaatagtagttgttgagtatcaatggaagagatcgtattgtcactctctactaacgttcacaatagcagttgttggggcatgtacacgttgttattgtgcctctgtaaggtcccaaagtgcaaagatggccccaccatgttgctccgattgggcacgtaacaattgtcagggacgatatatcagcaaaaaagtcatcgtcctcatcgttgttctcatttacaacgagcttaaaggtgaaataatccctatgcccaat

SEQ ID NO: 93157 - DNA, 406 bp, Zea Mays
acaacaaagaaagctaccgacccactaaccgatgtttgaggcttttagatcatctatttgcctctggagcaggagaggattccactgcagcaaggacaaaacctgatcgggaacaggggcaccacaagatctcaattgggccgacacagagtttagaacattctacaaacacaaaagttagcaaaggagtctgtttgacgacataagtaaagcagggcaaaggtcagcacacctaaacgttagaaaggaacaaagaaaatcctagagccgaaggcatcggcatgctatcagacggtggagcactgacagaagcaatattgagagcagactcgagccccaagggaggatcagagctcacgcccaaggcaacacttagagagacctcagctccgatagcaggtagcgg

SEQ ID NO: 93158 - DNA, 338 bp, Zea Mays
caaactatgagggacgtgatctaccgaaaatgaaaacgaaaacaaggcgaggagagatggcagtgcactgtggattccacggtggcggccaccggcgaggtctgaccccgacgctccaagcttggcttctatcttgagtgggcgcaaaacaaagccaaggatacaacgaaccaactcaaggtgactcaccagcggtcgatgcaatttagcagacttctcgtcgccgtgcggcttggcggcaacaatgaactccggcaagccattccccctgcttgctgtggactttcccatgatcagggtgagaccacatgccgggcctatttggttcgtggctaaat

SEQ ID NO: 93159 - DNA, 500 bp, Zea Mays
aaattgcattgtctgtagagtgaaatttaaaataaagtatgcgataggttgaagactcatcatactcacaaagatttttgaagcacgagcataagcctaactacactattaatatctggcctatcatactctcacaaagattcttcaagcacgaacataagccggctgtaaagtttcccttgtttctcgtatccttatctctaaatataatataaaacgtacgtggcatcttagaccggctccagcgagaacctataaaaggtcatgtcctctaaatatagaggtttgtcagatccgttatccctccaacaagagactctaaaaggtcctctaaaatttagaggacggcatgcctgcgctatgtatacagggtgtacggtagtcctctatacactactgtgtgtctgcgttcacgtgctgacgagcggtaataaataatatagaatgctaaatctggtaacactgttgatatagaggatgaaatttagagaatattactg

SEQ ID NO: 93160 - DNA, 457 bp, Zea Mays
ctggattagatagtggtccatggtgcataatgaggatcgaggatgaggagcaatcattgttcaagacatgatgcaaagctagaaaactttgattgtggccgtcctaattgtgaagtttaggccggggggaacttcatgaaccctatcgaagcttaattagttcttttttgttgttagccatgtttgtattgtagttaaggtgaacaacatgacgccgcacccgcgatctcagggctcgtccccacacaggagggcacgtcgtcgtcttcgccgccgagcatcagagattcagagcacatacacgcacatctcaagcaaacggagtagtacgtcctactcctacgtacatacctagccgacgacctttatgtgcacaccaccactgctctgctgcccggcctctccgtcgtccgttcatcaccagcttgtcgggtccttcagtttgcatgcgtcgctc

SEQ ID NO: 93161 - DNA, 536 bp, Zea Mays
tagaagcctccagactttttgaaagaattcatactcatcgctgacctggcaataaagaagcaaagtgacaaatagttgccgcagctggttgggacttgcccaagaagctgcttcatcaaaggcacttaaccattctttgtcatcatcaagaagtccacgtgctttgcatgcttctttaaatgaagagtagacaatgttgttataagttcgtagacattcatagctaaaggctcctttgactattaataacaacattctaaggtagtacctatcaccagccaatggatggacataatacaaacgccctatccttttctctcgactttttctaggaagccaagatctacttttgtcatcccacctccattttgttgggaaatcaggataagtgaggttcctagcatcaggattttgcaaatttgtggcaaaccattcagttaacatagttcttcgaaggtatgtttgtgaaagtacatcgaccatgttagctccagcactatatgtgatgtaattctcattgggtaggtgaacaggca

SEQ ID NO: 93162 - DNA, 343 bp, Zea Mays
tgataaaaaaatgtgaactgctgcgtatcagaattgcaaacatgaagttaaatccctcatgtgcattatgttttctcccctctaatatattgtaaacggggaatgtccctgtttggaaactacacatcttggcatgttcgtttatgatgaacattcttgtttgtgctggtggaacattttcatcggtatgctgaaacaacagtggaaactcagtatctgaatgatcgaaggcgcaggggtggagagtaatcctttactcaaggcaaataaaagagatggagctaagccagaagcaactgacagaacagtccatccgatgttacatctaacacctccaggccag

SEQ ID NO: 93163 - DNA, 692 bp, Zea Mays
ctcggcgagcgcaagtttcctgtacctcatgacctgttcaattcagcgtcagccccaactgctccttactcccaccacgttcttggtagccccgtaaccccttcaagcagcaccccttacatcgacgactctcgttgaccttatttgtgcgcgcgcgtgcctgtcttgttttctccagaggctgggaactataaagaggaatagggtccagatttggataattgtttagatgtaatgcacatgctcagtcaggtatgagcttattgttcagtgttttcccctacaatgtagaagtttcctgatcttttgtttgccctgttttttgtctaatgaaagactgaaactcatgtattttcatgggctttcctgaccattaaaaaagaatatgcagtcatgaattggtaatctatttgtatttttggtgtagttttttccttatgtatgaccttggtggttttaaaaggattctactatactattttgctactatgaatgaaaacatatgacatcattttaccttaataatgtttattacttgccagttaatctgataaatccatatccagcgttatgtttgaaaaaggtaaatcagagagggagaagagaaccaggaaagggaagatcttcattagcgaagtactgtccactttatagtaatgcttagtgcacaacacatctgatattttgggata

SEQ ID NO: 93164 - DNA, 396 bp, Zea Mays
ttgggaaggacaaaaggcacgaactctccagtggcaagttcaccggggtggatggcgccggcgcaaatcctttcaccgaacgctggcacatcccatccaagcaggcggtataccatgtcgagcactcactcagtctaggcatgctcgagatgaacttgcaaggccatggtaaactatggcgacacaaagcagaaaccttgaaggcaaaggggcgcagagagctcgaaggcgaaagggcaccgcgagtgggagagaagcaaggcatggctgctactcgagggatgaacccctctttaaaggcagactcccccgctcccgcctcgaaacgtcgcgagaagtctcccccgatgcacaccggggtatccatcatatgacacggaggcccggtcccacaag

SEQ ID NO: 93165 - DNA, 584 bp, Zea Mays
tacgatacgatagatcaatccatcacagaaaatcggtcgtaaagggtcttgaagttatgttgttaggctctggtcgggcacgatggtagtaaactgaaaacgctttcagttatcaggcgcagggaggtcgagctagccgacgccgttctttctgcaccatgattggcgtgagagttgagattggtgctcgcctaagtaaggatcgcaggggtatttagtgtgcgtttcctgcgctgttctgatgagatcgctgtcatgggggttcatcgtgtccctacgctcgggcacgcagctgcctgcttcatcacacatgtggcacgagcaggaggtggcaacgtctcagtgactgacccctaatggaagcaactagtgggtacctcattcgcccattctgatcgttccacagttcgtgcgccgccgcgccgttgtggtcaaaattcatgccaaagttttactcttgtccaattgcttgtcaccacagttaaaccagtccctcacgtcctgtttgcaccctactgtaccccgtgactttcaccagaaaccccgtatcacgtgttttcttctcctggccggtgaacgccgcc

SEQ ID NO: 93166 - DNA, 339 bp, Zea Mays
gcatactgtacagaagaggtgcggcaggagtcctcatgaagtgcattcactcggctattgggaagcaactgttagatgaaattcatgtcgggcagtgcggagtacatgcagcgtccacaactctggccgggaaggctttcagatctggtttctattggccaacagtgaagagtgatgctgctgagttagtctagagatgtgaagcttgccaattcttatcaaagcaacaacatttacctgcacagcagctgcagacccttcctgtaacatggccatttgcatgctgggggctggacatgatcggacctttcaagaaagctcagggaggctatactcacg

SEQ ID NO: 93167 - DNA, 346 bp, Zea Mays
agcagggcctcgcaactgatgcgccgcaaataagggcttctgagtctccatgcattggagaagcccaaacttttgttcgataacccagatccattcatccgcttcaagaggatcttcagccttgacaaatagcgggggacgcgtttctgagaaatccaaatatgaagtttcacggcgtccttgcggatacgctctcccgccttgctgttgtatttgctgccctgccatttcgcgaagaaagcgggtgttatcggctgttgcattgactaaggcaacgatagcctcagccaaggttggggttactggtggcgggttaggagtagtctccctcccacgggaggttccc

SEQ ID NO: 93168 - DNA, 498 bp, Zea Mays
gtgatctcttgtagtctttctttgcgtcccatttgttcctacaatgtgtatggccgttgggtccttcaaacctcggttggtcataagctctctcatgatccgaggggcactatacgtgtgactttttcccattcaacatacccatgcgaggcgagccccgagcaaataatcgatgctgagatccatctggggggtcatcccatccttttgctttactctcctctgcctatcccttccacaacaatgaggggaggtgagcccaaccgcacattcctcattggtctagcaatggtgctcggtgagctgcaaacgggtaatccgagtgaggccctaggtcctttcacaggatccaaatgcagggtccgctaggggatcgtcctcatactcttaggcaccgactcatatagttgcagactccgttcgactggactcaatgactcattgcctctcttcacgataaaccatgagtcagacaataccaagactcgaacacaagct

SEQ ID NO: 93169 - DNA, 367 bp, Zea Mays
tgtacagcgtcgaattacgctgttttgataacacaattacgcataattcgtatacagtttacaaaaccttccatttcatgcagtacatcattattacttatactttgtgaatatcgactggtaccagcttttttaaattcatccatatttgtaataacaagtatggcactacattacatttgtcataaaatatgaaatcatctactccccactagatgaatcattgtctgtgataccaccgtgatgtttttttgaagtgcaagtctcattccaatttggagcattagatgaacccttgttcctagaacctaggggctgccctctctttcgaccagtaaggctggccaaccgaagcctattctcctcc

SEQ ID NO: 93170 - DNA, 359 bp, Zea Mays
tactttaaatatactatgtctttcttcttaagatttatgaaactcttccttaaattgtcttaaagcttcatcacatggggctaggttgcttattggtgaagtatttgcatatggatcgacttcctaactcttaataggggtcttaggaggatttggcaatgccatattatgaatagaagagacatgcggtgctactatatcgccatccacatggtattagatgatggctacaattaggtaactattgataaagtagtactagacctctctaaattgtccacattgattttagttatggaattggataatttaggttggttagacgttgaatggctcacctgtctttaaaaaagtcaaac

SEQ ID NO: 93171 - DNA, 570 bp, Zea Mays
cggcgagctcggcggggtttggcgacgccgccgtctagctagaaggagatggggggagaatcgtgtgggccgtggataggccaatgtatggtcgtgattgaaccgcgcgcctatcctcatcggccggtgatcggctattggacgatcagttagaccctaaatgcagtgccctcacgtgtaatatatgccctccgatcgggatctgatggttagggttagggcgctcttcaataaaatacggatcgttggatggggatcggacggctagggtcacgtactgcttcggttcgagcatgctctaatttgcgtcgcagatttccaatccaacggctgtgattgaagcataccccttcgccgtgacttttagctaaatagaccctaccttatttcggaatcaacccccaatcctttcctaggtgtagttgagtcttgagaatttttacaaatcaaaccccgagttcctctgtttttatgcgcgcaactagggaacagataagtttagaatttaaatatagaaattgatttttagtacacaaataaatcatgaaacttgtgaaattcatatttaat

SEQ ID NO: 93172 - DNA, 1097 bp, Zea Mays
ttttcctggtccgagtgctgggcgtaggcggcgaagggcggtggcgaagcgtagagtgagtgaggtggagggtgggcgtcttcgtgtggatagggctggcaagcgggaattgttgtcctcgccagctggggcgagtgtaggtgagggggagttgcgaagtctctttgagggtgaggagctaaggataatgttgtttaactactgggagatgggtatcatcccgaaggttgaaccaatgtaaggtgtgatgcccttgctgtatgtgtgtaactttaattggtatgatgatttgtatgatgaggctgtgtgcatttgctgatctggcggtgcccgtgggggacttgtgcacttgatctagcgtgtttgttatgtcggtccggctgcacctgcttttgagggagacttcgaatttgagcacttgttgtgctagtccggctgcatccttaggcgacttttgcacggatagtctttttggggaagtccttggttttgcgcccctgtgctagtccagctgcacccttagacgacttttgcacggatagtcttttggggaagaccttagttttgcgcacttgttgtgctaatccggctgcacccttaggcgacttttgcacggatagtcttttggggtagacttcgattttgcgcacttgttgtgctagtccggctgcacccttgggcgacttttgcttggatttatgaagaagacctcggttttgcgcactcgatgtgctagtccggctgcaccctaaggcgacttttgcgcggagtgtcgcacgcgagggtagccagcgctgcccctcgcggtgactttgttgtggtcgaataccgaagaccgtcgatgcggtcttttttgacgtaatttttgtgggggattttttgcgtgtatattacatggctccgcctcatcaaaaacctcaccccccccccgggaggaaaagagtgcgggccggaataaagctgttttgcgaattacaagggcgagctggccctgaggagtcaaacaaaaaatttgcggagattgtcaatgttccaagagtgctctaggtcttcgccggatggcgttgtgagcctgtgtaacaccccactgatcccac

SEQ ID NO: 93173 - DNA, 998 bp, Zea Mays
tgatctgggacatacatacatgaatagccatgtggaatgtggttaggcagatcgttgaagatttggcaatcttcaggaccaccacccgtcttgtaaacaacatacgctagcgaggtaggcggatgtgcctctagggcgacaactaaatatggcaatggtggcctaatctagaatggaatttccactttgtgacttcctagagctaggcctatcgaagagtattaatgcttcatgatctcttcaatgacgtggatggccacgcatttgaaggcattcatcaagctctcagagtggtgatgcaacgaatgagccactatgtagttgacttcctggcatagagccctagtgcgctcctccatggcaccgaaagatccacttcatcgagggcaccttccggtgagaaccccttccaccggttgtcgtggttacaagtactctcaaaagagccgatgaggttggcttcgaagagtgccttaatttgatcatactttgattggtgctctcgaggcagctcttcatatgtgatgggcctatcttgcactggtcgagacgtatttgcctgagtgttcaccattcgggcaactgatgttgaagatgtttatatagacggtcccactaggcatgccagaatgtgttgccacccgaaacccacctgtgggaggcggcagacaacatgaggggctaggaggcctctgggatggctggtgggcctcgatccctcggtcaacgactcaactcttggcgtacggcctaacttcgatgttcacctgacgcgccacctgacctatacccaatcaggagggtgtggacgtgctccgagttggtttcctacatacacaaacacgcgcaaacatcagtttgagccatgttcgctgcttgggtcatatcggttgtaaaaagtcgattgcttctccatactcgcattggatcgatgcgttggtgacacatagagacgatggctcttgagaccctcttgtttgcttcgtgtggacccaaac

SEQ ID NO: 93174 - DNA, 466 bp, Zea Mays
ttgcatgactggagcttggcaaggtatcgtagatgcacagactcaactcacccaaagagaagtattctcacactagcccgcccttaaccagaagaatgagaagctcgagactaaggaatatcaagggggtcggagggcttatttcacttgtacaagatggatagcaacactgaagaacactagcaagagcattgtagcacaggccgccagccaataactaactcatacgaaattaatggagcatagtagcgttttcccctgtgcatcactcacatcaactatcaactctttatctatgtcaattcttgattgaaagacaagaaggagtaggcgacagtggtgaaagtgtaggaatggatccccctagatgtgtgcatgatatatccaattgaagagttcacacacataatatacacataatatatcagagttttggcgtagatcttcctacaatcatggtcatcga

SEQ ID NO: 93175 - DNA, 574 bp, Zea Mays
ggcagatcttctatgccacctcaaatgctccaaagtcatgattcttttaagtggggtagtgttcttgtcatacttagccatcttgccatcccatggaatttatgtgatcttagggatgggttggttgaccaagcataatggcatcataagttgtgcagataagaccattcttctcactgaccaccaaggaaagttagtttcatgtccggctcagccacccgcccaagatccaatggtgtttaatctagcagcagaaagcatatctgtagtagaagaattcatggatgtattcccagaagaattgccaggaatgccgccagaaagagaggtagagttctacattgatctaattcccgacaccgcaccaatcgcaaaaagaccgtaccgcacggctcccaccgaattagcagaactaaaactccagatcgcagaacttcaacagaaagggtacatttgtcccagctcatctccttggggagcaccagttctgttcgtcaccaaaaaggatggaagtatgaggatgtgcattgactatcgatccttaaatgaagtcacaataaaaaacaagtaccca

SEQ ID NO: 93176 - DNA, 351 bp, Zea Mays
cagagtcggaaaaagagttacgctgacaacagaaggagagaactcagtttcgaggaagaagattttgtctacctcaaggtctccccaatgcgtggagtcaaaagattccaagcaaaagggaagctagctccgcgattcgttggcccctatcctatcattggaagaataggaccagcagcttaccgccttcagttaccagagtccatgttagatatccataatgtatttcatgtatcttagctccaaaaatgcataaaagtaccagagagtcacatcgtagaagagttagttcaaattcagaaagatctgcagtaccgagaaaagccagtgaagattcacgattcagccatt

SEQ ID NO: 93177 - DNA, 544 bp, Zea Mays
aaaaattaatctccctttagcacttttttagcagctttgtgtaacagcctgtcgacaacttcgttaatgactttattagcaaccttcattatatccaaagcttctttcataatcgggtcggcttcggaattgtacggctccagtggtggtgaacggccggatgtagtgaagaatatgttggtgaattttgaagctagaaacgaacaatgaagcaaaactttaaaaaagtacctataatcatggcgcgttcagcagcttcttcaacttgtttagcctcctcttgggcatcgtgagattctttctcattctttttaatggcttcatcagccatctcacgaccgcccttcatccaaacatcagaataaaacctcccgcctagcaaagaggcttcggtcgagcggtccttagtgtcatctgctgagaaaatagattccggctaggctgcggccttgacatgttcacaaccggctttttccaaaatggctgtgacccctcgtgcaccggcgaaagcgcagaattctccacgatcgctgagtatttcatc

SEQ ID NO: 93178 - DNA, 644 bp, Zea Mays
ctaaatctcactttttcctctgccgcttcttcgttttctgaattttcgagcccactcgttctgcacgagagattgtgatggctcccaagcggaagagacaaagcgtcgttgtttcgatcattttgcccattgaccccaacaaccagcttccatttgccggcaaccacatgtcggtaatttctgaatcagatcttctgcattttgtgttggggttttgccgccgaaggaattgtgttcttggcgactctggcgtggggtgactattccgacagaggacacccacgaggccatcgtttttgtgctgttcctcatcagagggcttgcccttcctgtttctccattcttccgcggtctccttgatttctacgatttaaatcttacacatttaaatcccaactccattcttcaagttgccattttcgtgcacctgtgcgaggcctttcttggaatcctaccccactttgggctctggaggtatgtttaccactgtcgacccggtatggccgggggacatcaacttgtcggtggtgccagtttggagcttcgctgggggaggaaagtataataacttgatatccccctcaaggacaacatcaagggattgcgcctcgagtggttcaccatggagaatcacaaacaagtcc

SEQ ID NO: 93179 - DNA, 285 bp, Zea Mays
ccaaagttttcatgtaagccgtctgccctggccttcgtttggtagtgcaactcgtgcactcgacagaatgcttcggcatctgggtccatcccttggcttcgaagggcccaaatgaagatgttgagcctaacgatggcgttaggggtcagctgatgaagataaatctcaaaaaatttcaggacttctcctatcatctcgttcagaggaaatcgcaatcctgctctgaaaaaactcttaaaaatcactatttcatcatccttcggcgttggggtggtttcttctccg

SEQ ID NO: 93180 - DNA, 941 bp, Zea Mays
cgcggtgttcgccaagctccgccagacagcgtcgtcggaatggaacatcagcggcgacccctgcaccggcatcgccacggacggcaccgtcatcgaagacaacggcaacttcaacccgggcatcaagtgcgagtgctccgaccagaacaacatcaccgtctgccacgtcaccaagctgtaagtgcttgtgctcctctctagacgcgcgccaggtgctcgatgaaatgctcgccttagccttggccgctcgcgttgggcctgtcgcatgccgtgaatgcgcatatctttccaccttttgcgaatgaacactggtctctgcaaaagccaaatacttgttggaggtttcgattcgtgcgtgttgttgggtttctatctgacgaacagcggtcatggctgaggctgacttgagatggcatgagctgatgcctgatgggtacttttgtgttgccaatgtaggaagatatacgcgctcaatgccgttggccccataccacaggaactgcagaatcttacgcgcttgatcaatctgtatgtgctcttagcctcttaactttcttgcatgaaattgtctgggaaccaaaacatctatctctatctcaagcgccctattgttaaaactgttcactcgtggttgattggaatgtatataacctgcctgatgcgtgtcgcataattttatgctcccattttctcgttgtccattatggatttcgcagattgtagatctcatactaccaccttagtatttctctagcatgacatttctgatagagattagtacagacttcctttgacgattgccgttaactgtcattgtgtctgatattcctcataagctttggcagtaacttaagatgatatgagttcacagtggtccaatatactcttcaggttattggctgcttaatgaaaaacgggccaagccagacaacagaaaaact

SEQ ID NO: 93181 - DNA, 576 bp, Zea Mays
atacatacaaaagattacagaactaaaggtcaatatatactgccatacatgaactaaactaaatattggtaacttgccttgaccatttttctttcttgaataaactggctaaatagggagttctagattgcagcactataaattcatttttttggatattataggttactaaaaataattggattccaaattgtactcattatttttattttccatatagtaatatggaggcataacataaaacaaagggtctcagctcttggcttgcaatgcatacgaacagggctttttcactaaaactctgttgtttccatttcgatatattcatactcctatgtagccatcctatgtggttttgatagccacaagctcacaaggcaaaaacaagattttttagttatgttatgaagattttagggtttctcattcttcaaaatgacaactacagatgttctaaagttactatgattagtcatcatgctcctgcatggatatacacacactcagctctactaggaccaatgcatcaccatgcaatcaggtctacttttttatgttcaatgtgtaatttccttc

SEQ ID NO: 93182 - DNA, 343 bp, Zea Mays
ttttcactgaaataagcaaccggttttccttcttgtaacaaaacagcacctaacccaataccactagcatcacattcaagttcaaacactttctgcaagtcgagcaattgtagagtggagcatgggttaacttatctttcaaagtgttgaacgcctcttcttgtggggggtcccaagcaaaagacacacctttctttgtgagttcgtgcaaaggggcagcgatggagctaaaatcacgcacaaaacgatggtaaaaccctgcaagtcctagaaaactccaaatttgggtgatcatcgttggtgtaggccagtcctgaatggcttcaaccttgctgctatccac

SEQ ID NO: 93183 - DNA, 592 bp, Zea Mays
gtaagggaagagttaatcacgtgacagcagaatcagttcctgaggatgccgacgtggtgtatggtatgtttcttattaactccatacctgtatcagttttatttgattctggagcatctcactccttcgtaacaaagtcatttgtggaaaagcataaaatactaaactatcccttgaagaagaaattattaattcgatcaccgggaggtgaacttagagccactcactcatgccctcagactaagattgaaattagaggcctaagctttctagtagagctaataatttttggaatcgagtggaatcaatgggatacttggaatagactacttaaccaagtatgatggagtaatatcttgtgctaagaggatggttacattaaccagtccgcaaggagaaagaattgaagtcaatgtcagtatgccagcaacagcagaagcaatggtaaatcaattggaggagaaatctttggagcacattagaatagtatgtgaatacctagacgtatttctggaagaattaccaggtatgccacctgatcgtgatatagagttttctattgaagtattacccggaacaacaccgatttcaa

SEQ ID NO: 93184 - DNA, 429 bp, Zea Mays
agtcggctacaatgccgaaggtacctttggttaagctagctgaaccgaagtctgacaaagataaaactgaagggccaaaaattgtagagatgccaagaatgctagtagttttaagctcttcaatagagatgccaagaaccaccgcaactcctaaaaggagaagaatggcgaacgtgctagatgttatactagaaacaacaagaaccttgaatcctactcctaccagaaaaattgccgaaactttcaaggcgcaacccgaagctgaaacgaaacagccataagtcgaggctataataattcaaactgaaaccgaagctgagccttcagagcccacttagataaagcctgccggaattgaagaaaaagcaacagaagaaaaggccacagatcaaatttcgtctgaaaatgttgcaactcctgctcctgaag

SEQ ID NO: 93185 - DNA, 526 bp, Zea Mays
caccatttccaatttctgtcatcatagccacaaagaagaatgccctaactttatcacaaaactacagaggaagagaggactaaggtctcatagggtcactcttggccaaccataaccatctcattcgaagggctcagcctaacttctttaaactaaaaatgcacagccctccaaactccaccggtcgacaaacttaccccaggccaccaaacagtgccccctttagcttcttttcttcacgccaaagaaagccttttcaaattttatcaatagcctttagagcccacgctggcaaatccacaaacatttcagataaatcatcattcctgatagcaccacttgaactagaactttgtgccctaccctagtcatcaaatctgccttccaactaggaagctaatctgaaatcttgaatatgcctcaatatacatgaattgagagcaaaacgaacaatctcttatatggatacggtataatagtttatatatccatgcggatatgaataagcttaatccgatctatgtgc

SEQ ID NO: 93186 - DNA, 305 bp, Zea Mays
ttaaaatagcacaaaagtagcataagatactttaagtacacgctagcgaattaaacactaagtagcaagacatcacaagcaaccacacacactagcgttagctaactacatatcatcgagcgcgcaacgttaacaccactaaaagacgacaaacattttgtatatttacgcaacacaagtacgatcccataagtacaagcgtttatttaatttgctacggttttcattagttcttctatttatcacacaaaagcgtccaacacaagtttaaccgatgacataggcatcaatgtctatggaaattc

SEQ ID NO: 93187 - DNA, 344 bp, Zea Mays
tcttggagaaggcaagatgcgaacacgtgaagattctagcccaagccaaagttgctttctctattgatgatacgaaggatccctcggccgaagcaagcttagttggcggaaaattctttactgacatttgggaaaatggcggccgagggatagcccatgagataataaaaaagagcgaaaaagatactcacgatacaagagaagcagcgaaggcagctgagaaagctgcggaactcaaaagacggataggtattggctaattgtttttaactttatgttttatttttgtgacttcaaacttatttacgttttgcatcgcagctgaactgtctcctcctccagag

SEQ ID NO: 93188 - DNA, 344 bp, Zea Mays
agcacgagcaggccgacgtggccacatggcgaatgacaaggaatacgaggaggtggtcgacattgaatcgctgcactgttgatgatgaagatatagggacagacatagcagagaggattcgtccatggaagctcttccgtaaagacgcgttatggagctggtaacctcaagatctgatgccgatgatgtggaggggatggtttgggtaatgtactttccgccattctttttccaacgtcttcccctcctaaaatgcttgatgacaatttggttgagttaatgtatgtatagcgccacaataatcaaaattcaacactcgccaaatcctcccctaccctcatttt

SEQ ID NO: 93189 - DNA, 382 bp, Zea Mays
tagatgtggtaaatttaataaagcgtaaagcatgcttggtggtttccgcagtcggctaatgagttagtctaagataattatattttatgtattcatcattggtgtaggttagagtgggttaaaatataaattatgcgacatgttattggtgtttgaagacgagatgtgcaaagaatcagtttggtgtttcacccgtctagtagataaatgttgttataaataattgcgctaaaatttggtcataagagtgcagtgggcacatggtgtggttggatgtgataagtaaattggaagtgtgggtttgtctgagcccgatgttgtcaaacgtatatgtcgaaatgcgttgtagtagtgattgcgttaaattaaacagaaatgtctc

SEQ ID NO: 93190 - DNA, 327 bp, Zea Mays
cttggtcgcctgttctacctcgaaggtttgctcggctagggcttggtcgtttgccccgcctcgctaagtttttcggtaaggacttggtcattcgctccgcctcgcaggttgcttggatgggacttggtcatacgctccgcctcgcagggttgctcgactgggacttggtcgtttgctccgcctcgtagggttcctcggttgggacttggtcggcttagatgggtcatttaaggatcatgggcttactttaggtaccccgttcctgggtatccatcaacatgccacatttgtggaactaaaaccttatcttgaagattttagaactac

SEQ ID NO: 93191 - DNA, 594 bp, Zea Mays
tttaatcggagttgtagcttgctagtcaatgaatatgttgagtgttcagtttgcattcaagcttgttctatgtcagctcgtgagttcagtttgcattcgaggctttggtgtgtgttcagttaggtttgagggcgatgcagggcctttggcctatcaataaccggttctgtgtcagtttgtatttggatcatatcttctggatgttcatattttatacatcatgagattgaagataaatgtttgcaaatgcacatggaggttgaagacaaggatagagcaaacgtcaatgcactcctcaaccaaacacagaacggagcggctctgctctaatacgctctccaaccaaacaaaaaacagagtggctccattctgcttaccaaacatagaatagatcgattccgttctcagaaattagaatggagctattccattctagttggctccccaaccaaacacatcctaaaaggcagttggtttcagcagctcctatatacgagctcgaaagatacggaaaggagggagagtaccctagatttggggggtatggcagtatggagaggggatgcccgtttttcgcatcgacgtctgcaactt

SEQ ID NO: 93192 - DNA, 679 bp, Zea Mays
attttttcaacaaacacaccactaaccataaatctcatacatattgattgaagttcattgtccatatattagtatgtcataaatttacaatcacattacaataatacaagggtttgggtaatttggataattcgggtaaatcgggtacccaaactcataaaccaaattacccaaacttatatcgggtttttagacttgctatccaaattagtgatcgggtaattcaggttcgggtagatcgggttcagattcgggtaaatcgggtttggataatggattgcgggtttttgcctagccctagaaagaagagaggtagtttacaattggtctatccaaaatttgatgaaaccactaacaaaggcttcgttcagtgatagttaagcatcatttccttcttgaacatctccttgcaactggcttctgtgggcggaatgttctcaaagatccacccatttctacttttccatatgcactaaaccattgttataatgacttccttacaatagggtgtttttatttgtcttttgatcgggctaacattagtatgtgtgttcgaaggggggtggtgccataatacctatttacgtccaacatcttttcacaaaattgcaccttagaaataagtgagatattgtttattctttatgtagaatatagttttttgcatttataggagtcc

SEQ ID NO: 93193 - DNA, 607 bp, Zea Mays
gggcgcatcacgaccgcaaagatatgcgtagctcgtcacgaaggattagcgtcgctaaaatttggggcagatttacgatatctgttggacctcagtttttatgtttcccttcctaaaaaacatattagcggtcagattaatagccttttggagatgctaacctaatcacctcaatcacatgcatgcatatcgtgagtaactacccgccctaatcagacggacgcggatagctatggcacacgccatacttgttctagcccatggccttggctcacgctggccaaagcattcctcttctccgcttcgctgcaggtcatagtttgtgtgtgaggctaaacagccttatcaacagcttctatgtgagttccccgttgtctcgcttctccgtaggctgtcgctcgcccgctctaccctctgctggactgccactcacgtttgcgcccgctgcttgactctgcgtttcgtgcctatgcctccgggactgcagggggaggagaaagatgtcgtcggtagctaaaaagtacagggcacgacaacacagttatctactagcttatctttcccttccccggtttggcagtttatctgacccctcatccactactgc

SEQ ID NO: 93194 - DNA, 319 bp, Zea Mays
ctgtgttgctaacctactagaatgcccctggaatgaactattgagcttgaatgcagctgagacacatatggtagcaatttggagccactagaaatttgtactgattatacctgacacttaactgagaagggttccttctggaagaacgtatttcagtatgtgcatgctttgattgttgaacccattttagtttctttttctggaatcatgatttcagtgtcaaatttctgtattagttacattaattttttattacagcagtaaagcacagataatttgaatcatgagtaaggtaaggtcaattcccctcctttttttc

SEQ ID NO: 93195 - DNA, 587 bp, Zea Mays
tcccgaaccggtatgcgctcacaacctgaggatcccgatctgacggtggtggttttaaagagataaggagggttctgaaccgcccaatcaaaatccaaaggccatcgctgatactgtgccaagctacacccagattgaatctgcaccactcatcaacaaatccacggttcccactgtcctaacctttcatctaatcttgaccgcaagccatgagatcaacggcccaaacactctcccctaccttccgctatttaccaggtcacggcaacccatgaccgcacgcggaggtcacggcgacgcatgccggagcaccggattccaacccaccgtgccccactcccaggcctgaatagtacgacgcaaagcggaggcaacaaccattcaccagaggaggtactcaccgtgaatcaccccgcacaaagacctgcccacggcagaacgccggcaccaaggtctggtgcacgattgcttgagttccgcccagccgttcctcaaattggtggtggagaaagcttccccaagactcggcgatcaatcctatacccacactggacaccgaatggcccccagatagcgtgacgatggtg

SEQ ID NO: 93196 - DNA, 658 bp, Zea Mays
gcatttttacactctgactggtatactcctaaagctcctgcaccttctccattttctactctcttttgcatttctacattttctcagggcgagttctcttgttaaggggaaaattttctttctacccttgtttgtgcttgatgagttcatttgtcaacaagggggagagattttgagatttccatgttcctctatcaagggggagaaattaggactttcgtggactttcgggcttcctctcatccaaggggacagatgtgttgattctaattatttggaactacttgtctttgggagagatttttgggagtattgtgacagggggaggagatttgagcttttgctagttgtgttgagccatttgcctctttctggagggactagctttaatttcagcttttgtgctgattttatactctgaattggtttttatgctccgatgaaactttttgtgctctgatgagttttgggcttctggctagtggtgttgagcctgcttttgcctcttattgagtgctatcctttcctctcttggtcatgttgagtcgtttcccatttctttggggaccaagttttgcttactctaaatgacttgtttggcttttatctggcttttggtcatttgagtgagtttctcttcttcttcttcctctttttg

SEQ ID NO: 93197 - DNA, 1340 bp, Zea Mays
agagctagtattcctataaaaaatgattttctctaagtaaccaaataaagaaatagctagaacaattaaacatacatgggcaatggacatgtagtgcttactagatgagtgcacaacatctgtcgatggctgagactgagagccaatgatggtgatgtcacaatttggtggtggtgcttgtgcgtccattggtgaccgtccgcaatcagtaatagagagaccaatgctgcaatgcacaccacacaggcacacaacgatatgagcagcagcaggctggcatgtcatagaaaaagatgacaagagaggaggggagacaaggagagaagaactcacagggaagctgcgggatagactcatcagctgacaaagcagagggagacgcggcgacgccactcttgggccaaaatggcgagggctcaagacaatgagatacgttggctgatcagcggcaggtccttgcctccttggagtcttggagacgaagactgctggccgagtgggattgtctgtctggctgctaggttatctgtctggctgctggagtgctggctgggccatttgggctggacgactggttgggctgctagttagatggctggacgctggatggccgaatgggctagttgaagccggtaattatcgacggtaaattaccgaccaaatgtggtaattttcgaaaacggtcggtaaagcctgaaaccgtttttgctaccgtttttgaaatttttttgtcgttttttatttcgaattgtcggataccatttccattttcgtttatccctaaattccgataaaatatcaaaaacgattctcgataatcggcaattatcgctttcactttcatccctagctgaaggtacctcagtcacttccatgggagcagggcaatccaaaccagcttcctgaccctcaagaccgcgctccaaggtcgatgaggcgcggaacgctgcccgggatgaccctaacccggcatcgagcacaccagcacaaacatccatcacgccaccatctgccggttctgataacagatcttctggaaccatgtcttcaagagtttgatcaaagttcgccagagataattcttgcagaccaatgagggcatacaaggcaggagaaggaacaccactactttccccactagctatgtaacgccggctgttcttccgaatcagagggatttcgtcctcttcttcatcatcctcatcaacaacatggacagcacacccattggggtcagcgtcagacggatcacacccattgggatcagcttcagtaaattcaggcactggcacttcctcagcaacaggagcagaaggaccagcaccctgatccaagctaga

SEQ ID NO: 93198 - DNA, 341 bp, Zea Mays
ccgaagagccaaaggtggaagaaacaatgaaaatgccagaaattctgagccctccagcagaggcaaaactgccgaaggtgcaaaaggctcctgccgcaactcccaagaggaagagaatggccagcgtgctggatgttgtgctggagaccacaaaggccttgagccccgctcctactaggaaaattgcttaagctgccaaagtccaagccgaaaccgaagctaggccctcagcgcccactgagacaaaggctgtcgcgcctgaggacaaggctgatcagcaaacttcagggcaaagtatggcagaaaaagcaaaatcccctgcccccgaagctccagtcaaa

SEQ ID NO: 93199 - DNA, 839 bp, Zea Mays
tttttttttccttttcccaagggacggaatactacataggagtatagtctagtacagtacgagtaaacagcaggcacaattgggagtacagtacaggcggcaagtattccttgccggcttgtgcttggacacaagacggcagcagtgaggtgactctgctcccatcacgtcaattcaaacgttgcacgtctgttcagttcaggtctccttctctgctggtcacgttatctacagtaccgtggtatcccgtacacgcctctctgcacgccgtgtctcctggatgttctcccaggatttgtagctcaagtgaagtgacagatcaatctattcatctgccagtgccaccgcggcaaatccttgtggcggttgcaagtaaccactctgcaaacagcctcgcaggtcacggccagcagggacagccgctgcaaattattgtgatagttggtctcatcacttgtagcactatcagggaagaacgcgcgcgataatctttctgatgatttcttttttagcttaccatttggctccctttctatgtgccgtgctgacactgacaggacagagagagctggtgacgaaatagtacactagtttggtgcatagcgcagcagctgctctttccatgtcgattatacatcaatccctttgtccgttgcatatcatggtgtccaccgcgaggcgcattacatctcctttgctgcctgcctgcatgctcatctaagacgatggcagtaacaaacaaacagcaggtatttgctgccagtttttatattgctgtagaaaagaaaaccctgccgttttctttcgatgcgtcgtccgttgctttgctccggtctggc

SEQ ID NO: 93200 - DNA, 509 bp, Zea Mays
cagtcgtcattaggttcgtcaaaccggtctctgtatctgaaggtatatttcaaacgaattaatccaccttcactggacccggcaacagtctccttcggtatctcccagttatccacaagtggccataccctataggctatgtgctcttggatcagatctcttgtgccaatgaaagcacaggcattgctgaaagccttttgacatgcttcggcatcattatcaatcgccacggtcggccttcgaaggccgaagcgagaccagatggggcgttggatgatccccttgatgtcctccctttcaatcagattattcttaacatagaaccactcctccatccaggacccaggccaccttttccaaaatgttggaaccgggtagcttgcattagagcaagcaatgaatccataacaaacgaagttgttgtgatactgctctttgccagtggccttcgtctcgtacaacagttcgtgcatgctgcaaaaacacttcgcgctcggttccagcccttg

SEQ ID NO: 93201 - DNA, 302 bp, Zea Mays
ggcgaggcgacagcgggagactgacgacaacctccgtcgccaggcctcttccatgggtatgccttttgctcctcgctcgcctgatgtgcccctccatcctcctccgctagagattaatgaatggcaccagcaagcctatggggttccattcatgtcagcagaagatgaagaaggagaagaggaagaatttttttgatgacagagagcagtatgtcccgcctccccaccaaggggatccgggtccatcttcttcatatcctcctccccaggatccatctggcagctatccccctccagctcag

SEQ ID NO: 93202 - DNA, 1310 bp, Zea Mays
gcctaacagttgtatgttgttttttcagttagcatgcagagatttccctcatccacgacatctatgcgctgccttgccattcagcagcagttctcatgcaagtcattgtagcatggtcagtatgagctccatttcctctgtttgcaagtgaatcttagtctactcctgcaggctgtatcatggacacattttcattggtgtgcttatctcttatgcagtgccattgttatgtctgtgattgtcctgctccctgtgccctatgggacaagcattgtcatgctacggacaaggatagaaagtggaagagacttagggaaatatccaaaaataaaagccagccaaatcctaaacgaagaataccccagcatttcaaacgctcagtcacgacaggaccatcatcctcacagtattccgcaaatatgactggttttactggaagatttcctgcttcgggtactgcgaaccaaattcaacaggtggatatctctgttatggttgcacaggatatggtgaggggtatcagtctgccgagtgcaccatctcctacgccaagaactaaaaatcggagctatggatccaaaggtgcccagattgctcctccaatttatacattctcaaatgataatcatttccagccttctgttcctagctatggtctggtgcggcctcatgcatctaaaactgcacatgtttcatcaggaggtcatgttagcgctaagacttttcagagtaacccatctcagttttgtgttcgtgcaccaatgggatctcatggacacaggtaccgaccaccatcatatcctcagcctcctcctaacacagttgttggcactggtgtgcccctctcacggtgcgcctcgctgaacgctgaggctcagggaacacaacgcccacaagttccgccggcaggtacaatatcgaaggaatcacttgcaaatttggcacgtcggctgggattaccttattacaatactaatcagccattaggtcagcagtcaacgagcacatctcaatttctgcatatgcatcctcacgagatgctacctgctcaaggtgctcaaaacacgacctggcaagcttacgttaagaaaagtgtggcaacaacttcacaaatcgtgccttctagtgaacataattcgtcaattcatgcacctgggagcactgttcttccatctggttcagttcagatccagcagcctttgcgccaattcaaatcgggcactgttctatcatctggtgcagcccagatccaccagcagcctctgcgccaactcgattctcagagcagtgttactccgagtgaaaccgtt

SEQ ID NO: 93203 - DNA, 530 bp, Zea Mays
gggttttgggtcaaaaatcatggctcatactggggccatgaattgttgtgggtcgggctaggtttttttttccgagcgggtcgggctaggtttttttttccagagcgggtcgggtggcccatgattagattcatatgcacacaaaatgttaaattcatatatttttagatgcactttgaactcaatttttatgacatatgcatagtttcaagttattcagaaatccataatcatgtttttcatgtttttctcgtacacacaggagagctgcacatcattatattaagaagaaaaaagggtccaacatagatcgatacaaaataaaaaggccttatgatgactgtgggggacatatatccccgggtccactagaaggttagaaggcctcgcgaaagactttgagcccattattttgcaaagccatcccttcgtgggccagagaaggaaccgatggtagaatggattgatgcaagactggatagactcgagcccagacgactcattgggtttatgcattatccacagtgttg

SEQ ID NO: 93204 - DNA, 303 bp, Zea Mays
cactaaacagctccaaagtcaggagaaaaatactgaaccaaatccacagtgactgattcaggtttgcatttccatgcctgatagacatagttcgaacacctttttctctctattccaaacaaggatagctcaagcattcctgaacaaatttgttccccaaccatggctcttcaggtttactataaaaatccaggacccaaaatatgtagatcacaagttatgtggatctgaagttggccatacatcactgaaacatagtttcagtcctctgaatttactgaatcagccaacactgctcccttg

SEQ ID NO: 93205 - DNA, 549 bp, Zea Mays
ggggttctccaatatacttgatatgagagttgatgcgcttggtaatagatctcagttatgttggctgatggaaaagcttgatcataatgatatgacaattcgagctggcccagggaaggagctgaaaattacaaaggacacaatgcatcttatactagggctaccaaatgtcggtggtggaaagccattaggcattgatgaagttgttgctacaaataatttgagggctaagcttggtttatccaaagaagaattcggtgttgtagctctataagatcgactaaggaaaggaggcgacgatgatctaagcatcagatctttctttctgatattgttcaatcggttgttgttctctactgcaagctggagaataactaaccatgaggttcttttgactgaataaatggatcgtttccacgagatggactggtgccagctcatattcaatcacttatgccaaacggccaagaagtggcacaccaggagcatcaccaatgtttctacaaccatatacggctcctccatcgtcattcttgtaagcatatcacg

SEQ ID NO: 93206 - DNA, 866 bp, Zea Mays
acagagacgacgacaaaggctacaggcgacgctcagacgacagctagcgaagaaccatggagagcgtcaatccgccaatgagtctaggaagctgctcgagcatgactttcccccttttcttggcccagcgaagcacccgagcaatctaactgcgatatcagcacgatagcccgccccgacgacaatccctcaacgatgacgcttggttccggccaccatctagctcgtccttcggggtagcttcatcggaaagggttgcggccaagttttatatagcgccatgacgagtccgtggtgagaatatatcgcttggtttttacggcttaggaggttgagcgtaggaaaatctcaccccgtcgagtatatcctactgcttgggattggagttgagtccgaccaaggggccacaggttagtgggaaaccgggtggttgagcgaacgcaggaagcttgatcgtggttgtaattcatagccagggagacattaatgtaactaatccaacggatgacatggacgtgatgtcgtagtgattagtgaagccttcatcggctagggggaaaaagaaccggaaggaaatatggttgtgcacacatgaagtggactgatgggtctgtaacttggcccaagcgcaggtaaaaattcctcttttgtttttttctacttcctattttcagttttattatctattccaattcacaaattacatacttaattgtaattgagttttaatatccatgtcgatatgcaacaaccaaaaatatccatcatgatatgcaagtcatatatatgtgtgtgtgttaattttttttatccattttgataaatgcttcaaatatgtagtgcaataaagggatcacttaattcac

SEQ ID NO: 93207 - DNA, 405 bp, Zea Mays
tattgataggggttgcaaggcaccagctgattttaagtggcttgcctttatcctctgacatgtgtcacattccgatacgtaatgagctatttccctcttcattctggtccaccaatataggggcttcagatcatggtacatcttggtgcttcccggatgcatggagaatttggagagatgagcctcatccaatattttcttcttgagatctttatttttaggaaccatcaatctgtcttcaaaccacaatatccccttgttgtcttggcgaaaacacttatactttttcaccttctgatgaagattctccttgatgatttgcattcccttgtcactaagctgggccataattatctggtcttacaaggttggctcaacggagatgtgagacaaggtaccagaagg

SEQ ID NO: 93208 - DNA, 365 bp, Zea Mays
tgaacactgagaaatttttatttcaaaaatgtagaagctagattttaatgtgagtggagtaagcttgagaagaccagataacgcaaagccaaagggcagaacaatcagtgatacagaaaaaagagttattaagttgggcgcaaaaggagtcaagaagaagaacagaaagtgccaaaggtgtggcattgctgatggtcacaacagtcgcacttgtctatctgtggaggagaatatgcttcggttggccagccttactggtcggaagagagggcggcccctaggttctaggaacaagggttcatttgatgctccaagttggaatgagacatgcacttcaaaaaaacatcacgggtgtatcacagaca

SEQ ID NO: 93209 - DNA, 570 bp, Zea Mays
aggcagtcagactatccggaccacacgaccatctcctctcctctggaaatcaggcgataatcctcttcgtcttagaaagaaaatgatgctgaagacgacagcagcaacaccatctggcaatgctgagaagctcctccgaattctcagactagacatgccgaaagcgaaagcaaacaaaccacacgcgcctttgtacctgcaccattgctcccatcccatcatgagcagatgcacagcagcagcacgattcaacaattcaaggtggcgctcaagtgcaggtgcagtgcaatgcagtgcaggtgcaggacgaatcgtgtctggattcagcggggcaggcagggaggggcatcgtctttcctttgctcctggatatttgccttgttgtgctgtccacattggattatgctttgctcacctcttgtgcagtgcaaagtgtgcgtgccactttacttcaaagtggattctcttttgtcctgtgctgtgctgtggcctgtgccccgtgtgtagtagtgccagactgccagtgctctcaacactccactacggtacctcagcaacaatgaactgctt

SEQ ID NO: 93210 - DNA, 378 bp, Zea Mays
caatcaaccccttcttcttcacctccatggctcctcggatggggtcatcaacctccacgcctccccgtgcttctcaggtgtgttccacacttcccattctagacttctcatgcaatctgcatgaaatcaaatgtttgtgtgctcccttgtatgcttttcattgcgcagaaaataattttactctgccagccacagcctgccttatgctcctgattggcacttcctcatcttgctcccagcagaaagatgaataaaaaataaaatagcagccgctaactcatgtgtttaatctaagtttaatcttcctaggtgctaggcagtggtatagggcctacctagcgcgtacacagtgcaagataacaaggttggagcatcaga

SEQ ID NO: 93211 - DNA, 390 bp, Zea Mays
ctgaaggccagtgaagctaggctcgatgcacaaaccgaagctcacaaggtcgaaattgaaaacttaaagaagcaactcgcagaaacaagtgagaaatttgaagtcgcaatggtaaaacatgaaataagcgaaattgagaaatccagagcgcaaaagaatgtttaagagctctggaattgtaaatagaaatgctacaaaatatccttatggtgcgccaagactctaaaggacagttttgcaaaagtgggagcgtactctttagagcagaaattcatccgcggtgaccctaatggtgtcgtgcaatggatcaacagggaagtcaaagcctttgaggaaatcttaagcgatcgaggagacttctgtgcgtttgctggcacccgaggggtcgcc

SEQ ID NO: 93212 - DNA, 394 bp, Zea Mays
gcggcgtagaaagcaccaccagcgcccccctgtccatgaggtccgacaacggcgtgactgaatggcttgtttgcgtcgaggttagccctaggtcatgctgccggactgcggaattttccaggatctgttctaagctgccacctgtgaatttgcacttcaatgtcttatatgccaaattcaacatctacaataccagctcaaatgaatatatgcagtgtcaagtacattaaatcttattatggaaattgggtatttgttgtcctcattttctcaggtagtccacgacctctgttcacgaactctccaaaacagaagcacaatatttctcagcttagttctgtatcattggacccctgaaataaataagaaaacaaccactataaaacagtttgtc

SEQ ID NO: 93213 - DNA, 987 bp, Zea Mays
gaaaaagggaggagaagagaagcgtggttgccctaacacctatctgttgcattcggtcggtcaattttttatttcgtcacccggttctagaaattatgggcgctctctgatagtagctgctgaagagatgctcgattgcattgtgagacaaaaaataaataaaaaatgtcatgcgcctagcactatcatgtatgcgtcacctgttttttggagtcttccatagctgacaaaggcattgtaacttgatgtttaaaaaaagtaaagaaaaagctatccgttcaaatgaaatctaatggacaacatgaaaaaggtgacatggccaccttggttgagctccctggtgcagcgctttaatatataggaactagtgcattgtgcgcgcgcttgcacgtgtgttggaccattctcacacgcaggatcttgatcggacagactagatcaaaccggctaaaatgctacacgacttctaatcctagccattgaagtcctagggaacatctgactcatggtttatcgtgaagggaggcagcgagctatcggaccctatcgaacggcgctgacaactatatgactcaaaacctaggagtatgaggacggtccccagcgaaccccacgcctggatcctgtggaaggaactagggcctcactcggatttacccgtttggagttcatcgagtgccatgaactcgaccatcgaagggagcatggtacaacccactcttccccttccgacgaatggaatgtgtaggaaggataatgaacaaatgaggcacccccagacagatcccatgtagcgaacaggggactcgggggctcgttccataaaaaggaggactcattcgtttgaatttcttcgcaaggatggacgagtagtcctcttaggaggacttagattttttgttgcgttggatattgtgtccgatgcaaaagctggagcgaatgagggaccctcgaatggggccctgatacccatgataaagggcaaaa

SEQ ID NO: 93214 - DNA, 288 bp, Zea Mays
atgggctattctgcgtctggtatgttcacggtaagttcccatgcccagtttgcaaggaagctcttaggttcatttggttgaagaagggtgacaaatattcatcgttcgataaacatcgacaatttctccctcctgaccatccattccacctagacatcaagaactttacgaaaggtgtcgtagtgacagaccgcccacctaaaatgatgactggtgcagaaattcatcaacagatagatgggctcgtggccaatccagaaggtggttttgtgagatatggtgagcaac

SEQ ID NO: 93215 - DNA, 783 bp, Zea Mays
aagttattgctgctctgcacaacagtgccgtgggggggcattcagggttcccagttacataccgtcgcgtgaaacagctgtttgcttggcaaggaatgaaatcaacaattcgcaatttcgttcaatcctgtgatatctgcgcacgtgccaaacctgataggtccaagtatcctggcctgttgcagccccttcaggttccttctcacgcttggcaagtgatctcgatggactttattgagggactgcctaaatcgggaagatatgactgtatcctggtagtcgtcgacaagttttctaagttcgcacatttccttgcattggcgcatccatttactgctctgaaaatcgcccagctgttcatggattctgtttaccgcttacatggtctaccagaggcaatcatctctgaccgtgacagaatttttaccagtacattttggaaggagctgttccggctgtctggcacagtgctgcgcatgagttcctcctatcacccacagtcggatggccagaccgagcgggttaatcaatgtctggaaaccttccttcgctgttttgcaagctctcacccacatcagtggcgtaagtggctgccgctggcggaatattggtataacacttcatgtcattcttccctgggcacttcaccatttgaagtattatatgggcgttcaccccgcagtctgggagtgtccacctcggacgccgttcctcatgctgatcttcatgaatggttatcacaccgccagctcatgacacaaactgttcggcagcacttgctcc

SEQ ID NO: 93216 - DNA, 557 bp, Zea Mays
ctttttccttttgggtaacgagcgagtgtggttttgtcggggattgggcctatggcaccctttcttctgcctcttcctgaggatgtcatcatcaaggcagagcggaagcgaaagagagaggctgaggtggaggctttggtggtgccacaaaagcgtctctagatgaacaagaaagagaataaggtcatgtacctcgcccgtgtggagcctaggaggagtattactccatccagcaacacagaggacctgacctctactatgtctaggggatggaggtccttgtgtcggagggtgccttgtcctatcacagggacaccgaggtaagatccaatgttctggcccagggtgaggagctagcgtcggaccctatcacgatcgtggtatcctccaagcaccgcatggatggcaccgcattcggtgatgacgagggggagtgacactggtggcgtcgcacactcctgcgcccttggtgccatcaggatgcgttgtggggatggagccagcgtcaattctccccttgcatcccaagcaacaactatgccttgagtggcgcctca

SEQ ID NO: 93217 - DNA, 728 bp, Zea Mays
atagcccgccccaacgcaagctacccggtaccaacataccagaaaagatggcccggggcctggatggaggaatggctttacgtgaagaatgacttgaaggcaagataagatattaaggaagttattatgcgccccatttggtcccgcttcggcctccgaaggccgaaggttgaaattgacgaagccgccgaagcatgtcagaaggcatttggtactatctgcttctttattggtacgagagatttggttcaagagcacatagcatacagagtagggccgcttatagagagctcggaaatgccgaaggaggccatcaccgaatctagtgaaggtgaactggtccggctaaagtacacatttagatacggggataaattcgatgaaccaaacgatgactggctaaaatgcatcgaagttaccagtgatgaactgcttggatcatattccaaggcggaagacaatgcactatccacagccttcggaggccgaggaaaaaatagattgaacagagtttttgacgctattggcttcgtttacccggactatcgttgtccacttcgaggtcagggaaggaagaggaaaactgctgcttcggccactccagatgagcctgcaccgaagggcaaaaagttgaaggtccttacgcaccgaccactctatattgaaccgaccgtggtgcctgagtttggcggggaggcttcttcagctgctgaatcaagaaaaactgc

SEQ ID NO: 93218 - DNA, 320 bp, Zea Mays
ctgatatgccacccatgttttgatgatggaaggagaatgtcacaatcaatagttttctcccatttctcaagcacatgcaagctacaccaagataggacaattgtccacttactaattagtgtttgtgctagtacaaatattgctagaggttaaagtgaggagctatcctagaaatgcctcacaaagatggacaaaaataacaatctaaaatatttaaatggggttcaaatgggaaagcattatcttgtaataagatagcaaaccacacacaaatggccataagggaaaacttaatcactccttaaagtaccaaagaaata

SEQ ID NO: 93219 - DNA, 623 bp, Zea Mays
caccatagggttgagggaacacagaaggagcatatggaggagcgacatacgatccataaggaaaagtaatgtatggatatccgtacgggtatggaggaggatacggataaacaaaaggttgtggaggaggagcgtcggtggaaggggcttcagtggtaggaggagaagcgtcggtcgttggaggcttagtaggaggagcatggatatggaggatgatgcgaataaggaaagtaaggttgtagagttaaggaacagggacgagtagtaacatcatcaaccaataatagatgggagaaagaccatagaataagacttgcccacatagacacatcaggatctcaagacgtcgagattgcttgttgagcaagtccgtcaacgtatcaaagtttggagtccactttagatccacatcggaacgaagagtagaaagctataagtggaggagaagcttgtgaatcgaaatggagagtggagagctatacatgaatggatgagagggcttatgaattggagatgaatgtatgtgaataaactcaagcacatccactatttatacggtggattcatgcatttttatttttttattcaaacacttgaagttgtgtcaaccaattaggtgacgc

SEQ ID NO: 93220 - DNA, 608 bp, Zea Mays
tttaatgcattatattatatacatcttcgagttacttcaggtaaatctttatgcatgagatgggagcaaataattaacttatctatgtttcattgtatttcaatttaatttcccagattttctaagcactatagagcttgatatagttgttatggacacttggcgatatatataaatatttgatgccacacaacacaatcaaataaaatatagagttaaacaaaattgtttacgaaggttgtgctatgttgtgacttcaggggctcgaataatccaccacattccacacgagtacaaactccgacgtatctggcgtcaacacgtgtgcgaccatcagggctacgacaacaaataagcctctgtaacaagcgcaacaggcgcaattatggctcgttagtcggggtacaggataagtccacgcaacgtgcgcaacaggcacaactatggctcgctgatcacggcagacgaaccgtgcctacaagacatgcgaaaaatacacgactcggcgatggcggtccgactcaacgggagtggtcctactatgcaagagtgcgacatagcaatcatatgacgcaaccaagttcgtacgacacaaatactgcgtcgtg

SEQ ID NO: 93221 - DNA, 377 bp, Zea Mays
caccgccatccaacatccttgtgatccacacttgcacgccacaagctaacaaacatggttgcacaaccaaatatgctcacaccctagttagtccatgacttaacccgagacgctacccgttgacaaccacccatcatcaacccaaacctgttgacaagttaaccttgtgtttgaaatcttccccttgatgagtgcattatcacaccaccatcaaacatatatcaacaaaaagggaagaagagaaattcacctaaatgaccaaaaacgatataaaagcaaaagcaggtcatctagagtgagcaacttggtccccaaagaaatgggcaacgactcaacacgaccaagcgaaggaacctagtcctcaagatcaacaccac

SEQ ID NO: 93222 - DNA, 488 bp, Zea Mays
gagcaacagaggatcccctggcgaaggtggggaaagagttgctagcttaatcttatagttcttcagctcttcaaaagcttgttgctgagaaggtccctactaaaatcttctcttgatttcaagactttgaagaatggcaagcttcgctctacagatctcgaaataaacctgttcagggaagcaagtcttactgctagcctctaagctccttttcttgactttgatggctccatctaaagtacggctccaagacatcccagaaattttccttttttactccaaacacacacttttcagggattaattttaagcccgcccttcaaaagttagtaaaggtttcatggacgtctgagatgtggctttattgcttcatgcttctcatgatgatatcgtcaacgtaagttaagacattcctatcaagctaagaactcaacaccttggttttcattctactgaagcttctgctagcattcttgagcccctcatgc

SEQ ID NO: 93223 - DNA, 396 bp, Zea Mays
cggctcgtgtctctattacggtttggactaggaccagcacaacaccattgtagaatgtttattcaacttgttgtggctaacgtggtactagctattccttggaactattgaaattgcagctacctataaatccacaaaaatttctacaacaccaccaggttgtgctagctgccaccgttgttgttgttcttgctgtttgccggcacctcctgtattgcatggtgagaatttgtaagaacttgcttaacaagtttgagaatgagagattacaacaatgattcctagtagtttataggatcaaatatatttttattgttttcttgtctttactaaacatggcaggtgatatggagatttttgagccaactgaacattatattcaaggcatcattcgac

SEQ ID NO: 93224 - DNA, 417 bp, Zea Mays
tggacaccattcagccccatactttaatgcttttgctgattggacttgtgctttggtaaccgcatttggacttcctcccgtttcagccgatcttccctttttgtcgtggcatattcattgcgtatattttgcaggtatcaccacttcaacaaatcttgaagagtccgagtggtacccaatgggtgtgcccaaagggtgtctgctctacgaaaggtgtttatcgtgttgtcctaaagcagtaacttgatgcgacagaggggtgtaatcatttgcctgagcggttgaattgaattcaacaggtgccgtgttacacgaaacggcgccagacgcctgactcatttttaggcggtttgaattgcttattgaattcttgcgactgttcggtgagcggggtaggaagtggacggtcactccttg

SEQ ID NO: 93225 - DNA, 589 bp, Zea Mays
cgacgatcgacccaccaacgatggctaaccacatttgcaggtttgagtcaacaccgacaccatcgttcaatcacttttgagtcttcagattttgagtcctggacttgaaatgcaactcatagcagttgctcacaaatttaaatgcagaacaaaaaaagtctggttgcaactgttgatggtcagcaaaagtgaaaaatagatgtgattcttcaaacagtgatatatgtacacagtgactgtgttttttgggcgtcctcaaactcagattcttctatttcttgcaagttgtatgtgggtctgttagtcgaactgtgatatacacacattagctaatagatcaactttgtattctcttagcttctatggcctatgggttaacacctgtactttatttgtgtgttctcagatttcaatgtgtaatttgtttttgtttattaactaattccgttcttagataaataggcatatatttcatctgcttagtatttgattattctttgcaaaatggttatcatctcactgagtgtattgtttagctggcaaagcattgtggccatgccttgatgcataatagtaatactaatctact

SEQ ID NO: 93226 - DNA, 626 bp, Zea Mays
agattattttattcgcaatatatgtagcactgtttcatcttgatggattcttcagacaagacaaatgaaatacccgtcgattatagctaattggacaagcattcaaaagttgataatgaatcacccctcgatgcaaaaatagatgagcataccagacttcctatacatcccaatgaagaagatatatctagaacaaagataaattatctagcgctaatagatgaatacaaatttgcattacagcacaataaaccaaaaaaggacatgtcaagtgtaattgttcaagaaggtattacaattgtgtattagttatctctactattactatttgatcagttcgtatgttttaaactaataaaattcgaccattctatgtatgattggtttttagattatatgtgtaatcaaggtgatttggcccttatcgaatcaattaaaaacattccttatgcgacaatggatgtataacttgtatgcgttggctctcaggaaatttatggcatgtatattttaatcagattcttattttgaggatgaggtaatatattttttggtacgcgggcacaaacaaatttatgtattttaactaaatatagtttttgtacatgtatttgcaggtcataaat

SEQ ID NO: 93227 - DNA, 300 bp, Zea Mays
gcacagggccgctgaaagtgttctgaaacttgaaccggtatggcaaccgaacaagctcaaattttttcccttcttccttcttcattgacatcccccacccaccagatgttagaaaggttttgttagctagatattcttgcaccaaatcttgagtactaaagtgctctaccatgactctgaatttcactttagctaattggcatggggagccgagctgcatcttacacaatggccttgtcatgccaatgcttaatttcaaaggactcattaccatgctcataagtttttcccttttcttct

SEQ ID NO: 93228 - DNA, 343 bp, Zea Mays
tcactgtaatgacgtttctagcgagttgcttgtttgcttttcttgccttgatccaaagaacttatttcgcggttttgatatagagaaacttgttcgacttggtactctatatgataaggatttttcacttattgaatgtgcaatgttaagagagcaacttgagacatacattgtccacgtgcgaaggcatgcttcttttggtacttgtgaagatattgcatctcaatctattaagatggttaaaactaaaaaacatcttgtgttccctttggttttcaagctaattgagttggccttgttattacccgtctcaacagcaagtgttgagagaatattttcggca

SEQ ID NO: 93229 - DNA, 496 bp, Zea Mays
ccaaggaccatatcacagcaaggcaatggaatcgcgtcgaaggttgactggaaatgaaaatcctgaagagactagtcaacatctaatagctcttgtgaacactggataacactgtcattagcaactcgaaccagtaagggtggatccagtgtagtaagcccgctcaatggaggactatgaacatcattgaggaaatagtgggagctacctgagtccaataacataatgactgaaattccttgaatacacccaattagtctaaacattgttgacgctgttttgggaacacaagcctcctgagataacatgatcatgaattgctccgctgaatctttgtactctccttctaactcaagaacgtctggagccaatatgtcccatggttattgaatggcatgaagttgcatggtgggtgcacacttatgccccttttcccactttttagcgcagtattggcacatgcctcacgcgtgcacgccaataagcatgtagagat

SEQ ID NO: 93230 - DNA, 374 bp, Zea Mays
cctgaatcccccctgaacaatcattgctcaatctaatcccatccatccgaaggagaccggacaaccacaactctttctcctttctccgacgtcaagcagcggcggcgcacgacatctatggtggcaccatcaccggccctcaccacttctttgattcctccgtctaaactcaaacccgaagagcgctacgtgaagcagagtaaaggtaagagtatagaaggatcactcaccgagaatcagacagacaagacttctagccacaatgttgggtggatccacgacggcgagcctgtgccggcgagaaattcagtctgccctgacagctatcccttttcgatgcagcaacgagcacgttccagggaactatgtgaagc

SEQ ID NO: 93231 - DNA, 623 bp, Zea Mays
taaaagtgcagtagcagaatgaacatacaaaaccaggcaaaattttagcgcttctgaataatgatttggaatacctcatatataaacggatatcaacttgatacatgccaccagaaagtcactgctctagtacacaattaacaagaaggaaaattgcatgccatttcatcaacaagaagaaatagtacaaaattgggggggggaggtacttcctccaaaaacaccgcatatacaatgggaaagaaaaatatacaccagctcaaccacatgaactgactcagcccattaatgatttaggatgagcaaagtcactgttttagtaatataccattaccattgaaaggaactggtgagctgcaatatcaacagaaactgctctgtttttaccacttcgtccattaccattgctatttttgtcttctgctttaccacactgtttgatttgaaatacaccctgtaaggtttagctaccacattttctgcgaagtcaggtcaaagtagtagtttcagcccaagcattggccactcgctgcttggtgacgcagcttgtgatttgacagggcgaagacaacctcaacctccatatgccctctgtgattgagtccatttcatgacagaagaat

SEQ ID NO: 93232 - DNA, 370 bp, Zea Mays
acaggtgcacaaataacatagcaaaatacgaagccgttatcctgggccttcgcaagctgaaagcactcggcgtgaccacctgcataaatcaaagacagactccaaagtcgtgctggccagatcgaaaagactattcagcaaaagaccctacacttctgcagtatcttacggccgttcgcagtcttgagaaacaattcaagggtttcaccctgcagcatgtggaccacgctaggaatgaagaagccgatgcgttagccaaagcagcagccagaggcgaagccctgccctccgacgtgttctaccacgtcattggcacaccagccgtccgcaacccagagggtctgcaaataaccaccaacgccgagggcca

SEQ ID NO: 93233 - DNA, 288 bp, Zea Mays
agaatgggaagcagcaaccattttgcatgatgacaagggtgacaaacaatacgtttctcaaattttaatttaggtaatccatggatgaggtcaagtgagctcaaacaacacgaaagatcgaagctcaagtgacctagcctcctataccacttccaaagagaagaggaagatcctaccaaaaaatatcgagaagggccagaagaatgtgaaaaatcagcactgaaaactcgaccaaaatggaaaatctagcaaacaagatcaccatgggcatccaaaacccgagacaag

SEQ ID NO: 93234 - DNA, 1229 bp, Zea Mays
cctgaatcaaaaagtacagtagcgggagtaaattcaacaaggaactcaccgagcactactcccggagcttgctgagcctcttgagcatcgacgtggtttcttcgtgccctgccatgatactgggccttgctctgctggctgatggaggagggtgccttggaggcgggtgctggggtattcttggggccattcaccgagttagagtaagtaggtcctgatgccttcaaatgggggcagttattcttgaagtgactggggtctccgcagtgccaacatgcattagctggtggttggttgcttgcgactgagggggcctgaaaagagctctgactctgctgactgaaacatgacggagtgggtccagctggtctattgaagcttggtcccttgggtggaaatccaaaggatcgagttctctggtgccggtcttgttgctgagctcggaggacttggaatttcctcttgaggtgacctttttcttcttgccttgccctttccacttgtatggccttgtctgagaggtgcgagaagatgaggaaatcttggccagcaaggatggtcttgagttctagtcttagccctttcagaaagcgggccatcttcttggcttctgtgctgacgtcgtcagacgcgtagtgagctaattctgtgaatttgtgcacgtactcactgacagatcttccaccttgagttagttaccgaaattcatcttccttgagctgaacgatcccttggggcacatgatgttctcggaaagcagtttcaaattctgcccaggtagcatctctgacggcagtgctgaaggtatcccaccatgatagggccatctcggaaagttgatgagcaaccaattgaacacgctgattctcagggcatccaatggcttctaacttcctttttatcgtgtgcaaccagtcattagcatcgaggggattgctggatccagcgaatgtgggaggcttgagccttagaaaatctcccatcctgtcttgtggtcttccaccattcgggcgctgattctccagacttctagtgaggacttcaatcagtcgggtttggttggctagaacttgggctaaatctaatggcagctccggaggtgcagggaggtgggtctcactcccttctccaccggcttctccttcagctcttaggggaaccctgctccaatcccggaggcgataggcgtggttttatccgaagccatctaccagggggagagaattact

SEQ ID NO: 93235 - DNA, 656 bp, Zea Mays
ccggacactacactgtgcactgtccggtggttcaccggacagctactgtgcgcaagatccccttctcctgtgcgttgtccagtggttcactggacaactactgtgcgctgtccagtgtgcaccggacaggcactgtagattgtccgttgcacccataattggtttttaaaaaatccttcccccgcccgagcccgaggcagggaaccatttctctgtcactcacctctgctcttctctatctctggtgattcctcccctctagcgactctcccctcgccggcggccgtgcttcggtggctctgctccagctggtgctcggccctctcccctcttctctcttctctctctgttcaaagcccagtgagcacacctcttccccacctttgattccctatatcaaatctgtgaattttctatgaatctaagtgttggatgtggttcctttgtgtcccattgaattccctgcaggttcctagctccttcgggagggtttccctacctccaatagccatttcattcaaaacctaaatccccgcacatcacatgttcgatgaaatgcccaaaccagtcaaaaatgctccaatcgatcccaaatttttcaggcaccttcacaacacctttagtaacatattcgcgcaatttcacgccaatccgat

SEQ ID NO: 93236 - DNA, 438 bp, Zea Mays
cccactacctcggattgaagatttatttgaccagatgaagggagctaagatattctcgaagatagatctgagatcgggatatcaccagttaaagattcgagcagaagatgtacccaagacagccttcacgacaagatatgaattatatgagtttttggtcatgtcgtttggactgactaatgcaccagcatactttatgaacttgatgaataaagtattcatggaatatctggattagtttgtggtcgtattcgttgacgacatactgatatattctccgaatgaagaaacacatgaagatcatctaaggctagtcctacaaaagcttcgtgacaaccaactatatgcgaagttctcgaggtgtgatttttggcttaaggaagttgctttcttaggcatatcattaccgatggtggaattaaagtggacccaggaaag

SEQ ID NO: 93237 - DNA, 974 bp, Zea Mays
cttaagtcgttgccgactttaagccgattgctccgttagcagggcatagtggtcaccccgagttaagtaagcgtgagcatgttgcaccgtcttaagtcgttgccgacttaagccgattgctccgttagcaggtcatagtggtcaccccgagttaagtaagcgtgagcatgttgcaccgtcttaagtctttgccgacttaagccgattgctccgttagcagggcatagtggtcaccccgagttaagtaagaatgtaggtcgatcatgaacaaactgagtattcttgaaatcttgtttattgaagacgtatttcccattttacagagtatattgtcgtcccagtagcttttgaaatacagctagggataaaatttcttgaggtgttctatattccaggagttcccaatctctgtgtcgtccatctgagtgagacggtatgatcccggtcgagtgacttctgctactatgaatggtccttgccataggggtgacaacttgtgtcgtccctcccccgttagaattcggcggaggacgaggtctcccactgcaaagaatcatcgtcgcacggccttgtcgtgatagcgtctcagagtctgctggtatcgtgctgattgaattactgtgttcagccgttcttctttgagcacatcaatatcctccagcctagtagcttcggcttctactatgctttcaaagactaaccttggcgccccaaacttgagatcaacgggtaatactgcctctgacccatagaccatgaagaaaggagtgtttccatgcagagctcggctaggttgagttcttaggctccaaacaacgtagggcaattcccttatccattttcctgcgaacttttcatttttatcgaagacctttttcctgagcgcctccaatatcatcccgttagctcgttcaacctgcccgttggccctctggtgtgctaccgaagcatacttgatctgaatgctcttttgc

SEQ ID NO: 93238 - DNA, 872 bp, Zea Mays
ggctctagagctaccagtattggtagggacacaaggtgctgcttcaactcttgaaaggctcgttctgcctcctcggtccaagagaatggggccgaacttccgtaatagcttgaagaagggtagcgccctctcggccagtcttgagatgaagcggctaagggcggccagtgaccccgtaagcttctggacgtccttgattcgggccagaggcctcattgtctcaattgtttgatcttctctaggtttgcttcaatgccccggtacgaaaccaggaatcccagcaacttccctacggagacaccaaagacgcacttttccgggttcaacctcgtgtgtgttgcccgcagcttgtcaaagaccagggttaagtcttccactagggtcgaccctctcttagtcttgaccacgatgtcatcaacatatacctctatcctgtccctaattaggtcaccaaatgttttactcatcgcccgtacaaatgttggcaaggcattttttagaccgtaaggcattacaacataactgtaaagtccatccacagttacaaaagtggtatgcttcctatcttgcctagacatctggatctgatcgaaaccagagtaagcatctaggaaggacaggagatcgcacccagaggtagaatccacgatttgatctattcgtggaagtggatatgggtccttgggacatgccttattgaggttggtgtagtcgatgcacatccgaagcttcccgttagccttaggaacgatgactggattggccagccatactgggtgatggacctcttcaatgaagccagcgtgcagcagcttccggacctcctcatggatgaaatcctgccgcttaatggactatctccgaggcttctg

SEQ ID NO: 93239 - DNA, 328 bp, Zea Mays
gtagaaatgtgtgaggaattgctcctacatctaccccattgatgtgatggatttgggctagagggatgtgtactagcttaatgtgtgttctgatgacaatagagaaaagagtcgaacctttatgtgtttaggtgatgctggtagtccgaattgatccttgtattgactcatgtgtttgatggtgctggtgtcgttgctactactaaatttggaaaaaccaggcaccttgattttcgatgaggtgacatttggtcaaactcctccagataaggctttgcataggtgatcacctttcacttgggcaggatcccaaattgatctttcaggt

SEQ ID NO: 93240 - DNA, 925 bp, Zea Mays
catgtcgacgctccaaagagcgtggttccatcatgcaaggtacacccactgaaggccatgcgctctaagaagtgcaaggccaagcttgccgcagacctagtgaagtcagtgcagacttcataggtggtggtgcccaatgagcaagaggttgtcgtggcactagactccaaaggatcgttagccgctgaaggcctactacttaggtgtcaatgccacatggctcttcgccaccaggggagcttttggagactgactttgagatggtacactttttcgatgtggagatttaggcggtggtgagatttttgttgattatacttttattgcttttgtgctttgcgtgcgtttatgtatgctttcatgttatttgtttttgttgtttgtttttgtggtagaaggtggcaacaaagagaaagtgatgatggtgactacataaacattccacatgagatttgagtgtgtgggcgcattttgtgcctctattgaggtgggggaggagttgccaaggatgggggcacaactgaggtggcgaatgccgctatcgaggcagcgagaccaccaccaagaccttgttcggttgggtctaaatcaaaggggattgaaccagcttgtttggttgtgttcgaaggggattggaggggactacatctcagcttcattatgtaagttaattttatgcatgtttatgcttgttgattgtgttgggggttatggttgtttctaaaaatgattgatgatgcagcatggggacttgactgacaatgtggtttttggggaggagatcaaagttgccatgttctaagtggagtctgaaaaagaggctctatctacagaactggagcaactcctggttaaggccaccgaccgagagagaaatcatgaggcgactgagaatgagagacatcacctagcaacatttgtgaag

SEQ ID NO: 93241 - DNA, 520 bp, Zea Mays
gtggccgccaaagtaaccttacatttggtctttaggttagggattcatgaacacaaaccgacggcgtgaccaaataactctatattaatctgttcgacgatagatgcgtttagggtgattcagacgacaagcaaatcaatacggtccatacattgctggccacattattttagttactgttcttgtcttagcagcataattatatggttactactactattacaaatatcacatttctaggaacttctatgtcatattcgtatgcaacttttgaggacatcatttattttgtctcccacatgtcctgttcttaacactagagtatgtttcctgctacaaagtattatctaaatgtacaagtttcaaaataaccgatgcaacaattcgttgtacagcttaagcacatcatgtgcaaatagtcctgacttgtgtgtccctcttgttgtaaacaaatcatgagttgtccatttactttgtaacttgcttattaggctcttcatgttttcaaagttgtccaatt

SEQ ID NO: 93242 - DNA, 497 bp, Zea Mays
tttttgcttctccattggcaccaagcttgccttcgcctcagtctatcatccgcagtccaacggagttgtggaacgcgccaatggaaaaatcttcacagctgtcaaaaagatgctcctcgatgaaaaaagggcagatggaccgatttgttacccgaggcagtatgggcactaaacacgactgagtgcagggcgactgggtttactcctttccgccttctatacggatcggaggccatgaccccacaagaaataaaacatgggtccccgcgaacagtttcgtcagccgtccccgacgtggacgagccaacttcaaaggatctcattgatggagaccgagtcttcgctctacaagccctaaacaaataccaagcccagacaaaagcatggcgcgaccacgcagtcatcccgagggaatttagcgaaggggacctcgtactcgtccgaacagctcggaccgagtccaggggcaagctggagcccaagtgggagggcccctt

SEQ ID NO: 93243 - DNA, 617 bp, Zea Mays
agcattcagagtatggtcgcttgtagagagctgggaaatgccgaaggagaccatcaccgaatctagtgaaggtgaactggtccgactgaagtacacattcagatatggggataaattcgatgaaccaaacgatgattggcttaaatgcatcgaagttacaagtgatgatttgcttggatcatattccaaggcagaagataatgcattatccacaaccttcggaagttgaggaagaagagattgaacagagtttttgacgttattggcttcatctaccccgactaccgctacccgctgcgggggcaagggaagaagaggaaagctactgctgtggccgcctcggctgaacctgtgctgaaggctgcgagcaaaaagatgaagatacttacccaccggccccgctatattgaaccggccgtggtgcctgagtttggcgaggaggcctctttagctgctggattaagagaaactgctcctcctgcgcaaaggactgaagagccaagtacaatgccgaagctacccttagctgagctagacgggacgaagactgataagggtaaagctgaagagtcaaatattggagaaacaaaagtgttagaaattttaagcccttcatc

SEQ ID NO: 93244 - DNA, 615 bp, Zea Mays
ctcttcacaagggaggataagaacacaaagaatgaactggtgggcggatatggaagcagaaacaatcatgagaacaaatttatggttctcaagcggattgggcaaagtagacaattatataccattcaaggcctgacctgatgtcattcaaactttatagtgaaacaagcaacaagcgggttaatcaaatctcaaacggtcagtgcaaccgaaccatcatagtgacaaatcaagaaccgaagtgtaggaagtcagagaagtacacaaaccagataccttctgcattcatccagttttcgtacatctaaaaggagtgaacagactcaactgcaaaataccactagcactacattaccactaccactacattgccattaccactaccactacactacactactactaaactactacactactactaccactaaattatactacctacgccggtggcacattgcaccaccctcaccgctgccaccgttgtcgccctcgctgctgccatcacccttgctgcttcctcccttgctcttgccatcatcgtcgccttggtccttatcgccgtcctcgctgtcactagactcctcttcctcgtctgactcattatagtcgacg

SEQ ID NO: 93245 - DNA, 609 bp, Zea Mays
ctttacctaattggtgtagggtagttaccgcggcgccatggtaaaaaaggcatggtcatcatgatgccgcatggcatgggcggcctgatgggacgcgagtcggtccatccattaatctatatgttggtggtgtgtcagcacgggtaactatctcgccatttaattgtgtgctctctatagtgcgtccttgtggcaccttgtcctaggtggcatagaccctgcaaaatgcacattcctccctgcttggcgaccgaggtggctcgcaattgggggcgacggattcctcgatgcttgttagccgtgggcccacctttcaggcaccgcttgggctccatgtgccctcacataagtagagaaaaaggatgctctaggttgattgtgcttactgtttcctcgcacagtcgcacttgagcgcttgctttcttccttccgccagaagcttcctgttagtttgttgccccttgtgtcctcgcgcctgcctcactagttccgtgcgaatggtgtcattcccaacctgcttgatccgagatagtcgccaccttggcctggagaagaaagggttcctccctccaaggggatctcgtagtggagattggagaaggaaggtga

SEQ ID NO: 93246 - DNA, 582 bp, Zea Mays
tggagaaatgctctatggcagtctacctgggagaaagccgaaactatctgaaccatccttctttccaagtcacttttaccggataccgcttcccagatagctgccggaatgttgcccgaacagccctccggcaactatgccagaactacagcaaagtaatctttgaaactccccttcgctactttccacccagcaacaagaatacccccacctggaggaaaagactttaggccctgtcaggtagagaccctgtcgaggatgaccccaccatcgtctacatggctggatacctccacaccctcgataaccaatacgatgaccttgccctccactgcactcacctaacctcccaggtggaaagcctggagcaaaaagtcagggaactttcaagggaaaaggtgtcccttcaagagagcctcgaaatagcagaaggcgaggaaaccaatacctgtgaggcctaccgcactctgaagatggattatgacaagaaactaaagaagctcgcccccacaagaagaattcgcaagaagaccaaaagccaaggatgtcagactgagcagaaggaggaagcccctccatccc

SEQ ID NO: 93247 - DNA, 434 bp, Zea Mays
cacctgtaggtctttttccaccaactctgaggacaaatcgaccacgaagtcctctcggctgtcaagggtgagcttagtggtctgagcgaggttagcaagatgtgccatagcgttgctctatagggcctataggcggtacagtgtgctcatgcactgaacagtgatcctcccaaccaagtcgggatacatagcccacacgtccttcacatggctcacacggttgcaccacatggggccatccctcttctcagcgaggaagagtcctagtgggtgcatcaccatctccaggggatggtagccatagaaagtcgttagagtcttcatagctgccgcctcagtggagtcaagggaacgccaacccggctgaagggggtgtgcctccatggtcagccagacttggcaacatggcacccgatactcctcgtacagctaca

SEQ ID NO: 93248 - DNA, 319 bp, Zea Mays
atcgttttgtcgagttgtctaaactcacttttgtaaaacccctcgtaaggaaatgtttataagaatcaagagtaagtcggccagtaacccctaatcatcattctagccatgcctcgatcgcctcacatgtgcttttccaacatgtgtgatcaggtcgagccgtgctaagtatttgatgaaatgggttggtcgcgaagtcaacatcaacggatctcttcattgatattttctcgagtctctatcatttttcttgaacttagattttctggctaacacgagttaactgtgatgttatttgacattcacactcgtctcgtgt

SEQ ID NO: 93249 - DNA, 310 bp, Zea Mays
tttccagtcaagttccatcctgcaaaagtgttatttgatactagagcaacacattcatttattactgcatcatgggtagaagcgcataatcttccaataaccaccatgtaaacactaattcaaattgattcagttggtggaaaagtctgagtcgatagtgtatgcttgaatgtaagtgtggaaataagggggatagagtttcccgctaacctcatagtgatgggtactcagagaatagatgttatccaagggataaattggctagataagtaccaagaagttattagctgtgataagaggacagtgaagt

SEQ ID NO: 93250 - DNA, 365 bp, Zea Mays
cctccatccccatccccatcttccaccctcccttgctcactcatccacacaccccacgcttgcaatttgcaattcccttgtttggggtaacaagccaagcaagcaaacctcctgctggctgctgtccaacagcaacatgcaacaacccaagcaaatcaaagcttcaccatcaccatcaccgccgaggtcaggtcacctcagctttgctcagctccctagccagcagtaactgcccagtggaagtgcagagtggcctgtgagtactggcagtacaaatcacctcatctccagtcctgcccggctcgcctgccatgcagtccggctacggcggcgtgtccgagttccagcagttcatcatggacggc

SEQ ID NO: 93251 - DNA, 665 bp, Zea Mays
tcaggggtctgtttgtaaagtccaggtacctatgtgtaactataacagtaaagatgagggctcaagtgtaaatttgacctccctagatggtgggtatgatttttcaagagctcaggggctaaaccaaaaatgctaggacatgtttgtaattattttaacataacattggacttcaggaagattcataggtttcctaggaactcttttacaaaaccgtgcggctgttataacgcgttccgcgtctgagccattggatctttgatccacgtctctggttaaccatttgaagggatatatgctcgctctaatctaggttgccctttctagatccaagggactggatttaattcgaatcacctacaggacctacctatatgcaaaagatattctaccttatcaaagttattgactcctatatgcatttttggatttgaaccacctacaggacctaccttaccaaagtcatagctagttcttttgtaaactaataaccaagctataaatgttgttggattgacaatatattccatggttggtcctctgaggaaggttatgcttagtgtgtgcatatgtattgacaatacttggccttttgctgccaggcatatgtcaagggcgtcggaccctagggtagctggccctcgactacggagattgtagtctcg

SEQ ID NO: 93252 - DNA, 353 bp, Zea Mays
ctttaagagcacaagttggtagatccactgccatggataaatatattaccatccctgtgagaattgattggatatgaattttccttctagctttggtcatcagatcagccttccaccctggcaattgatttgcaattttgtcaacagtcggttatacttgatctctagtaagtttcttaatagctatcggtaagcctaggtagcggcacgggaaatcaaccatttcacaaggcatcatatcttgcaacaaagctaattctttctctccacaccatatgggataggcactactcttctggacgttagtgcacaaatcttatgcctgcccaaataactaaagaatattcaaaaca

SEQ ID NO: 93253 - DNA, 409 bp, Zea Mays
gacgggttgatttcttgattctacagggtctctttataaagattactggccgaaggggtatcctgaaatcagggccactcagatctaatcctacggcacagattaaaccatacaacttaatgtataggtacactctcgggttccgtggatacgagatccatggatgagggagttccacatcaacgactcgaccaagccctcagatctacaatccacggctaggattttatctacgaagcggtacaccgtacacggttttctaatcttgtacacacatcaagatcgaatggtcaatactcatccaagtgaaagggtatgcgggatatgatcgccaccgtcggtctaggatcaacggctaccaacgcttctcccaaccccagccaactgggcacggcggcgcacgggctca

SEQ ID NO: 93254 - DNA, 296 bp, Zea Mays
tacacttatctcttatttatgcgcagacttaacaccttttgggataaacgtcactataaacaccttacacataattgcattaccaaccgacttgttctctcggaaacatctagtcgaagcaatgaacccaaccgtacactatgtgcgaggtgaaattcgaggaacgcgtaaggtgtactggctcgacttataattatagagaaagcgatgactactttggcatgtcaccacctctctatttaagccaagtcaatttctactatcgactaagagttctaagtattaaaccattatta

SEQ ID NO: 93255 - DNA, 354 bp, Zea Mays
gccatcttatagcaatcttaagtctgctcgggaaaagaacagtaacactctacagtcatccactgttccataatccaatgtgaatcacatgctaagtttcaagccatctcccatttgctacttgcccatttactgaggattctgatgagaatgcaccaattctgtctgtgcagccattatgacagagaaaaacagtgttttaccactaaggctatccgcagtgcagattactccatatctttactctatataactattcatagactagtcatcaagattccttaatctatattataatcctccgcactcatatccctctatatattccctctatattaactactacatattcta

SEQ ID NO: 93256 - DNA, 294 bp, Zea Mays
aaagccttgtaatgtacatgaaagaaacggaacggatggcgcgctacaatctgagctcgccattgccgcatatatctgctttaagagagcattgcgctgccttgcctaatcgaaacgaaacgacacgaaatgttgcctgcaagtttttgaacgtgtgggtgagtaaatcgcacggttgggtaccagtactgcgaggaaataataatgcagccagccagtcagtgcaaatccggcgccttccattttccaacgaacccaccacatcccgcaagccgacgacgatctagatcgcag

SEQ ID NO: 93257 - DNA, 832 bp, Zea Mays
gagtatctttgaagccttctttattgatgacatatctcccgttttacagagtacatcgttgtcctgatagcttttgaaatatagctaaggataaaacttcctaaggtgttctatattccaggaattcccaatttctatgccgtccatttgagtgagacgatatgatcccagccgagtgacttctgctactatgaatggtccttcccataagggcgacaacttgtgccgtccctccccagttagaattcggcggaggacgagatctcccactgagaaggatcgttgtcgcacggccttgtcgtgatagcatctcagagtctgctggtatcgtgctgattgaattactgcattcagccgttcttcttcgagtacatcaatgtcctccagcctagtagcttcggcttctgctatgctttcgaagaccaacctcggcgccccgaacttgagatcggcgggtaatactgcctctgacccatagaccatgaagaaaggagtgtttccatgtagagctcggctaggttgggttcttaagctccaaacgacctagggaaattcccttatccactttcctgcgaacttttcattcttttcgaagacccttttcctgagtgcctccagtatcatcccgttagctcgctcaacctgcccgttggccctcgggtgtgctaccgaagcatacttgatctgaatgctcttttgctcatagaaatcaaagaattctgaacttgtgaagttggatcctaagtcagttatgatattgtttggtattccgaatctgaatattatgtcttgtatgagttccacggccttagccgaggttaaagaagcaatg

SEQ ID NO: 93258 - DNA, 325 bp, Zea Mays
gggaaaacagtgcaaccatgagtgtgatatgggacacccatggccaagtaattagggaagtcttacgttcggtgttagttttggtcattggggacggaggcatatgttatggctcctatattatcgctcagggatctaggtacgggtgtcgtcccacaacattttcctgagggcagagggtataggtttgggtacgtcagatggtctctatgcagtggttatttccaacattcgcatagtgaagaccctagggaaaagccacgtagtgaaaccttgcctactcaccttggaagtgtttaagggtccgtacaacccttggcaaaag

SEQ ID NO: 93259 - DNA, 530 bp, Zea Mays
gttttgcacatgccacaaacacaatcgatgtattgtgtttgggaatactctgcctagtgcgattggcatagcagggtcttgatctgaaatagataaatttacataacgtcatgcaagccaatatgatatcatatagtacgtgccataataattacgagccatttattacaacatacctgtcaacatcactcgtggtccgtcacatcccatgcatgttttgaacgtattgaagacccactcgaagggagacaactgtctcgtctcctagtaaagcaaacccaaatattgtgcattgtaggtggtggttcgagccaacaaacatgcctaatggcttatcgtacatattagtcttatgtgtagtatcaaatgtaactgcatcaccaaaatcaatgtactcggcttgctggctagcatgggaccaaaatatgcttaaaattttcccttctttgtcaagttgaaagtctgaaaaaaatgtggattatctttcttgcataatgaaaaaaagataacagctttgacacatcatttgc

SEQ ID NO: 93260 - DNA, 590 bp, Zea Mays
gatcctagcatcacaaatacgtaatttaggattttggaagcggatgtcctagagaagggcagaccctccgctggcagtgaaatcagtgacaggctcatttgcagatcgacaagcctccgcccagtgaagaaccaacccccggataatgggtgtgttggcagaggggagatcaacttcatcatccttgcctccatcatcatcgctagttggctcccatgattgtggattggctgtgggtcgagatcgaccggagggattccgggccgttcgaccgcgagcaccatgagaccctgaggcctcaccaccttgcatcacatttccggatcctcgcccgcgcttggatctgaaatgcggaggagtttcttcacgaatttcttgatcatcatcggagtcagattcaactactgacgggttcctacgacgcaccatccttaagataaaaaggagaacatatggtgagcgaggaaatagatgttcaaggattttaacaaacacgtttgagtaaagacacgtatgatattgagcatgcacttcaaccgttcatgtgagcggttcaactacaacgaacaataccaaactactaaactcaa

SEQ ID NO: 93261 - DNA, 390 bp, Zea Mays
caagaacccctgccgctttttatcaatagccttgatgaaccacttcgggagatccaatgctataagcaaataaataggaacagcagtgagaaccactttcactagcacaagatgcccagccctattcatcaaagaagctttccacccaggaaggtaatccgccaccttatccacaaaggccagcaacacctctttagtaggcttactgattgtgagaggaggccccaaataagtgcaaggaaaagccttaaccgaacaagagagagtttccacagtaagaactagctcatcatcggaacaatgaataggggagaccgagctcttagccaggttggtccggaggcctgaggcatgaccaaataattcaaggatgcgtctgaccgcaatcag

SEQ ID NO: 93262 - DNA, 421 bp, Zea Mays
tcacgctccgttttattcgtttctatggttgtgcgcggggcgacgatctgtgcaatgtcggagagaggggctggccgctgcgggtggtgcacagcctgggaggcttgaggttgaagaaggacggtggatcattgatctcatcttcaacagtcacgattagatggatagttgagagtgtgggagccatagatattagatggacggcttaaatcgaatcctggtgtaccccttcgagtcattaaatcagggccttgaattccagatccgacggctagggttgaacgcggatgtgtaactcgcctggatctaatctggcgcgtccgtttcggatcaggcggccaggacttcgcgataccccttcgcgactgcagttttgtaaaagaacccctctattattatgtaatcaacccgcgctccatcc

SEQ ID NO: 93263 - DNA, 771 bp, Zea Mays
cctgatctacgcagcctcgattgcgatggcgtcaaaacacggtgaggcacttcattatccttgcgtgctttgtgttcgatgaaatgccaaaccaataaatcgatgtcgttgtttgtagctagctattgattcatgcctcgcgcaccatgtgttcgacgaaatgtccaagccaagtggacatgcatgtgcgactcgagttgatttcgccaggttgtgtagttgtgatttattctccctgtgtttggtcgatgtcatgcatatacatgtatgtatgtgtgtcaatcaaattacgtagaaaagaaagtgaagtaaaaagggactcatatgtttcttatgttgttggaattgcggattcaagtgatgaatgcttttggtaggcatgtatgttatgtatggttgtattgatgatgtgctagatagagttagtatttcaaatgcgtacccgagaggttctgtcactattgcttgtgatgatttaattttatgatgaagtgatgctctacttgttagatcaaattaaaggtggtattttatttcgctttgtgtgctatccaatttaatctagaaaaatgcttaagaaaaagcctgttaatttgcttctaatcatgttttgagttgtaggtgtcccaaaaaggttgagactatttttgttagtcttccagtattatgcttagctaaggaacatgtaagacttatatatggtgtagtgtcttcttgttgtatgaactaagtcctaataaataggaaacaagtgatgaatgcacttgttac

SEQ ID NO: 93264 - DNA, 516 bp, Zea Mays
ctagagtgccgaagcttgctgaggggacttcttcctcttttaagccggaataccccgcccctgctggtgccaagggagaattggctgaagtgccgaaagcaatggtgatagcggaacatgagaaagccgagatagtcgaagtgtcgaagcgtcctgccgaagctaaggaaaagacggtcgaagaactagaactaaaggagtcggcagggcagtcaaaaaccctgagcccgccaccagagccggagttaccgaaggtgtccgaaattcatgcaataactcccaagaggaggagaatggccagcgtgccagacgctgtcatagaatcgacaaaggtacaaactcctgcttcaaagcttgataaagaaggcgacattccaaagaaatctgacgaagctaggatatcactggatactgccgaagccggaccgccaacttgttctgaagcaaaaccttcgagagctactttgattttggaaaaagaaggcgcactcgagaagattaaatctcctacccccg

SEQ ID NO: 93265 - DNA, 288 bp, Zea Mays
ctgcaggaggctcgtgatggtgttgaaccccgattcattgacgtttacatggagggacaccgaggtccagatccagagcatccaaaagttttatgtgatgacagcgcgacagaaaagctggtaggtgtaaataataactatctattcttaattaacttttgactaatttataattaacataaattgttttgtagactcgttatgccgaggaggttaggaggaaagcaggagacgatgatctagattggagggaggcacctttcaatccggatgcaacatatgttgctg

SEQ ID NO: 93266 - DNA, 403 bp, Zea Mays
ctttttcgctcttctttattatctcgtgagccatccctcggccgccattttcccatatgtcagtaaagaattttccaccaactaaacttgcttcggccgaggggtccttcgtataatcaatagataaagtagcttcggcttgggccaaagctttcacatgatcgcaacctgatttttccaagatagccgcaattccccttgcacccgagaaggcgtagacgtccccacggtcatttagaatctcctcaaaggcttcagcctcgctgctgatccattcaactggcccctcgggatcaccccgtacgaagttgtcttcacttgaatatgcgccaacattggcgaagctagtttttatttttcccacacattctatggatttttcataacatctttcttttgaaga

SEQ ID NO: 93267 - DNA, 786 bp, Zea Mays
aaaagaagctctaagccaatatttttgagggttacatggaaaatcattccttcagcagctccccaaaatattttggaaaagtagcagagcccgaaaacatcccttggcgaccctcatttgtgccggaggtgggaaggcccccaatctttttttccgcgcacacatctagcttctcccgggctgctattttggtccctgactttcctggcttcttgctcctctgccatcctactttctatctgtcatctctacctcttgacgttgtcagttgttgcttgtcctccctgcgtgcagaagcaaatggataagacgagtcaagcagcactcctctcctcctctagtgttggcgcggatctcgtcggtgatgaacatacgacaggtacgtgcacctattcccttcatccagtgtgaaatcaaacccccaaaccttgatatatatgtatttggatctagatctggccatggtttctccaaaactttgattaggaattggtactgcttcagatttgtgcctttaattacatatgtttcagatggtgtttcagtctactcagacgtggcagagtgctaagtagtagatgccatcgattatttagttgttagataaaactattagcactgccaggatgatgtttttaggctgggtcggcatgtgatctgcacttctacagcaagaggtttcacttcgtgctgcccaagaggcgagataaaaccattagcttttgtttgaagtttgaacatatatattacattatgttgtattaggattgaaacttaacattcagg

SEQ ID NO: 93268 - DNA, 477 bp, Zea Mays
atcagttttgacggtcgtcatgtgtcacgtgtgaagcgcatagttctattcacccctatcagtgtgtcattagtcgttacctcaaagataggcgatcaataacactaaagcccctgttagtgggtcgtcaagctcaacacaacatgaccctactagtgggcttctaccccatagaaggttgataagaaatcatccaagcccaataggataggttgccccacgcaatgcaacactcccacataataccatcccgctagcagaaggaggacaaacaactgagcgagctataaaaaaggggttaggctccttttcaactcatacctttctaggccgtttagctaagcttaagtgtaatatttgttcttgtgcgccatcgcgccgcacgggcattgtaatagtagtgcattataaacctccacgtacatgttgtagtctcatttggtgctctatccaatgtcgcattcggtgttgtatccg

SEQ ID NO: 93269 - DNA, 468 bp, Zea Mays
accatgtgaaagcctctaaatagttctagtagcttgtattttagtctatgttgataaaaatgggctactaatcaacaaggtaaaatacaactaacaagagttatcaatcaaatgcaattgccactacttacaatctacacaaggctagttaagcaaatatcattcaacaaaataagtgtagcgagcaaaccataaggggcaagacatggcacacaatatatccctaaggttttgtttgcttttcgcaacctactccttattttggcgagcctattctaggtggttcacatgttaattgacatcacatgctaagcctcaattagggtgtcataagaaccacactagttaggcgctccaacaagccacaattttatcggagttgctcttcacaaatctttcttagggaatggacaaagagcccctcataattgttgatcaaagctaacaacaatctctaatagccactca

SEQ ID NO: 93270 - DNA, 421 bp, Zea Mays
ccggattcggcagtatcttgtgatatcctagcttcatgagattttatccttgattgttttccccacttcgttactttgcgagtcttgccttaactttgtccatggattatgcttttcatcatcatcacttttatccttatcacctatatatcttaccttgatgtttatcttataccggccctttaaaatctcctcttttcatctcaatctgagtgttgtactttatctattttcccttggtcgtatccccttccttgtcgcatgcgagtttttaactccatcctttgttgtgctctggttgggtattacttttacctttctcatctctcgatcttaccttggtgattacactatgtccgttctctaaaatctccaatctcatatctcaatatgagagcggtgttttacttacctcactctt

SEQ ID NO: 93271 - DNA, 1198 bp, Zea Mays
gggaaatccgagaaaagatggctggaacaggaactaaagcagtcttcggagagcctgttttcaaagttggactgaaacgaaatctcgagttcaaatttaagaggcaaaggacatttgaaactcccaatttgcacaaaatccagctgatactgatcagtgggagtaccctaaagaatgagcttcgacttcctctttatggctgacctgagaaatcccttgtccattcgacctgagggaccatgtttctttcttggtgagtcttgcaccaaattcttagaaatggagaccaattttaaagaacgacaacttctgcgtttaacaactgtccatttttcatcctccttttttgcaccaaagagcatattcctttctccaatttggactcccatttctccaaagagcgaaatagacatcaaagcttgtagagatgatgcgttttagagccaggaccatgaagccaactttcttagaggcgatggaaaaacgaaaatggcggtctgattcttcaacaacatggaaacccgccggagagccaccaagaaccgaatacaaagccaaactgaccgattcagcctaaagacgaaaagtgtaatgatgaaaaactgcgatcaaaagaaatgagcccgatggcgaagaggaggcatgctggactgaggatccatatctccgaagaaccgagagttggaaagctttaccagacaagcagtccaaagaatttgcgagcagttttcccctatcatcccaaacaaatggagaagccattgcggggaggccgcccgacaacaccaggagggggaaaggggaggtctaggaggggaagactagacccacgatgacgctaggatagacgcatggtggtaggcgaatgacggtggacggcggcggtgggaacggtggtggaggagagcgcgagagcgagcgtggcagatagcaaaagaccaccactattttttattctattatataattaaggtgtcgcctcgtcttacgctttaccgcctaaaaggtaaaaagagggtcgtgccttatgtcgccttacctccttaataactacagttctcgctatcttggcttgtttatctctactgacacgtacttggaaacggaatgctgctaccacaagcttatgttgagagagaacacactcatgtatcaccttgcaatccaaacattctcatttgtcctctcttgtgaggat

SEQ ID NO: 93272 - DNA, 702 bp, Zea Mays
agccacctgtaattctacgcgtacggatactaaacgtgctcaagtacaacttgtctaatgcatctatatgctggatacaggattgacatgattacataatgctgttatgcaacattctcccctctaatcttgtcaatcttcagtcttccactctgatgattccgagttgccttctcagttcaatgaaccgaattctcccaagaggcttagtcagcatatctgctaactgatcttcagagctgacatgttcaattttcagtaccccattgcttacacactcacgaatgtaatgataccgagtgtcaatgtgcttgcttctctcgtggtacacaggattcttgcttaattcttgagcagaccggttatcaattagcagcctgaaactcttctgttcagtacccagcaggtcccctagcagtctgttcagccaaacaccctggcaagcagctgttgcagcagctatgtattcagattcacaagaggagagagatactactctttgcttctgagagctccaggtcacaatgttctttcccagaaagaaagcaaccccactagtgcttttcctcttttcaagatcacctgcatgatcgctatctgagaaaccaatcaggtctgcaattgctccttgtacatacttgcagccgaactgtttagtgcctgcaacatatctgatgatccttttaatggcagcccagtgtt

SEQ ID NO: 93273 - DNA, 538 bp, Zea Mays
gtttaacacaaattagcaggtgattaggagagcatgtgtatcttttatgtctagccatctattaggcaatatgagatttggttagagcaaggatagatgatggtaagaagatcttggtaaggaaagactccatccaaggtggtgaatcttgaatcatctcgagatctgatttgactgctatttttccatgtcgaggttgatctccatcttaagtctaatctagggaccatcgatctttgtgttagatgctattatcggaattgggataacaattgtgggtacatgtgttaggtatgttaaatagagttctacttgcttttgggtccatcaacatggatctggtttttggcacggatacatgcacctgtagcatatcggcgtttcagtaacaaactccagctgatacggcgtgcggaccgctccgcttgggcataaaaagctccaagcacatcgcatatccatcgaagtcgtcgtcggaggggcaacaggacgcggagagctcgccattagcatctgtgaggaaaacaatgatattgag

SEQ ID NO: 93274 - DNA, 801 bp, Zea Mays
gacctgggtaacgaggacctagtgggccttccatcaggcgcaataggtctacctttcggtcctgactacatcgttatcctagatgagggtataataatatgtgtaattagaatctaggtcacattatcctatagttacactgttgtatagtatattctaaggatgtagcaggtaacaagggcatgcatttagtttaggcccctaccccttggtcaccttgaaaacacccttgtttggaacgagaagaagtcacacttgataagacattgagaaccattgttcttttttgtctcattgttttgctctaattgcttctaaggttttggttcttatctattagaatccaacatttggtgcccatcgagtctgctttgaaaaccaagcccacgatgcctcccaagaagatgtatacctgattgcacgcaactcccacgtcctcggcggcgaaggcagtctccgacgacaacacacaaaagacaaaagtcacctccgctgaccaaattccactagctcatacaaaagacaacccccatttatcaccaatgaatcaacaagagagagatccccttcccccaccacaaacatccattaaccaacccaatccttaaagggagcgttgacacaagaagcttggaaacccctcaccacgctccatttaacccctagtgccacccctaccaagcaaagtctataatgacttgtctaaaggacaaccatccaactcacgctcagtcgaagacccattcaagtcttcattccttagactcttagttgcactcgtggccattcactttgaagttc

SEQ ID NO: 93275 - DNA, 590 bp, Zea Mays
caacggtggaaaggtaaaccacttggaggccaaagcaatccaggacgcactagatgtggcagtaggtatgttctcagtcgaatctcatcccgcaaaagtgctatttgataccggtgcaactcattcatttgtcactacaatatggatagaaatgcataacatctcagtagaggcaatgatgccgcccatgaggattaattcggttggtggcaaggtgcaaacagataaaatatgctcaaatataagggtggaaataagggggatagggttccccagtgacctaatagtaatagacacccctggggtagatgtcatcctagggatgaattggttaatgaagtatgaagcgaacgtcagctgtgataggaggaccgtaacattgacgtccccgtccggagaggaggtagtggctgagctaaagatgcctaaatcagcggagggaatttgtcaccagatttcagttgatagtaaggagaccaacccgctcgaggctatcaaggttgtgtcggactttccggatgtgtttcccgaggagttaacgggcatgccacccgagagaaaagtcgaatttgccatagagcttatccctg

SEQ ID NO: 93276 - DNA, 315 bp, Zea Mays
tgatgcaccaaaattgaagagaataactgttgggtaattggcaacaaggaacgtatccatcgttaccggctcgccattcggtgttgtagccacttgggtataataaatccgtcctgttttcttgaaattcttgccattaggtgttataggtgccagtaacaccaggggtgttacagtgtcgtgctagggatgcggaaagcggtagttactgtttcagaagccgcattagggaggggagaggcgagggcatggatgtggtctacactaatgttttaatagttagtagagaatatacttaaagcatcagtttcaacg

SEQ ID NO: 93277 - DNA, 572 bp, Zea Mays
cgaaggcaatattcatggctttgtcttcggcttttgtataagcccccaacaaatcatcaatggtcgcctcaatgtcctcgagccattcgtcatctggctccccgaactgatttctgtagcggcatgtatatttcaaataaattagaccaccttcgcttgaactatcagtggtctccttcggcatctcccatccactaacaaggggccataccctgaaagatatgtgctcttggaccaagtctctagtgctaatgtagatgcacacattgttgaaggctaccaggaaggcttgagccttatcactattcacaatcgagggacttcggatgctgaaaagtgattgtattggacgctgaattatatcttttacatcctccctctcaaccaaatcattcttaacataaaaacattgtctcatccaagatcatggccatttcttctgaaacgtggggacatggcgtctcgcatcagagcgatatacgaaggaatagcaaccaaaattgttatgatattgctccttccccatcgccttcgtttggtaagataattcatgtatattgcagaagcagtcg

SEQ ID NO: 93278 - DNA, 462 bp, Zea Mays
gatttttcttctttttcttgccactattctaagcagcggcacccaagtcgctcgtctgagcaaccccggtttgttgtgtcaagtgtcatgctcggtccttggcggccttggcacattagtcggccagagcgaagagcgtgctgacactttctacatcatgtggcttttccaacatcttctcatcacgtaccccctgttggaaaccagtggtaatggaagcatcgaaaatacaaggtatggttcctcataccttggtgaagtgggagatgaaggcccagagggtttcctcgggttcctgcctcactgcatggagctgggcctctaagccatgctactgataagcgctagcgaagttggcggtgaaccacacatagaactcttcctaggagtagatcgatcctaaggtgaggttcatgagcccagtccgggccagcccggtcagggcaacatggaagtagcttg

SEQ ID NO: 93279 - DNA, 768 bp, Zea Mays
tttagttgttatacaaaattaaagaaactattgcccaaagttgctctgtcagactttgtgctaaatggctgaaactgaatttgaagactgaaatggtcacaggggattggagctaagttggacgtgctatatctttagattcgctcgattttgacccaaatatcatatagtaagcttgaagacggttgataggtgaacaaactttattaatgaagattgttctgtccctcacaagaatcaagagattgagaggatggaaggtggtcggttcagaagaacactgaagatcaaactctgaaaaatatctgatgaacgcgataaagatcaggggcactgttgaacaggatgtgctcgcgtgatccagtggtgggaatcgatcgcggggaggatagcgtcgaacgtggcaccatctcgcaagctgagccgggcgtggccggagttattcaccgacggccaccgtgactcagtcaattccaccgcggtgtcacccatgtcttgctcctccctcactgtatctcttccctacgtggtaaccatgcactaacgaagttatccgtggccgtggatagctagccggaccgccgtagctataaataacaccatgaaccacgacggggtattcacatctccaccaagtgagtttgattgaagcccaaaattcgcactacctctgccacctcttcccaaattgagtgtgcacggtgaaactatagttccttacggccgtgtagccccaatctcacctcccaatttcacccagagccgtcg

SEQ ID NO: 93280 - DNA, 735 bp, Zea Mays
ccacagacttggagatagctgaggccagggttctgcttgccgaagttggtttgttgaaggagagaggtctgactgctgaagctgtagttgcagactttgtttttaagaacattcagccactgaaggacagagcatacctggcttatttgtatagtggtgtcactgactcaacccgggttgccaacaggaggattcctgctatggatttggtaagccgactagagatgatccttagaggcaaagtgtcaaatattggtgctccttcctggaatctgccaccttccaagacttttttctgttttgtgtccaatcctcctgctagcgatagtggcctgggtcttagagtgcgaccctctcccgaagaagtcgaggctctggttgcttcacttggtgatctccccaacgatgaaaggcaagttcactttgaaatgcttataaactcgagtgatgcagagataagtgctatgctggacatgatggctgaggattcatctgactccgtccctgctaaaaccatagctattgcaactgtccccgagcctgaaaagaccttgactactcaaaaatctgatggtgctcgcccaaagcgccttcgcccggccagtcatccaactgctcctgccgagcgaaagaagaagaaaaagaggaggcttcgacgagtgtcatgtttgattcaggatgccggcccttctgctcctgctgctgaggaagtgccagtggaactttttactggag

SEQ ID NO: 93281 - DNA, 1307 bp, Zea Mays
tttggggccattcgagacggagccttatgaatgggctgcgtacccggaatcagcttaatctcaaaagctacatcgcactcaggaggaatgcctagaagctctgccggaaacacgtcagcaaagtcacacaccacccagatgtcctgcgcccacaaggcagcctcaccctccaccaccatggagaaaaagattcctgacttcctggaccggtgatccggaagcaattgcgctaacaaggataacgtgaacttaggggaacttcccaagaataccacctccctacctaatggcgcttgcaataacactgtcttccaaaaacaggatataactgcgcgatactgggataaccaatccatacccaagataacatcgaatgcccccaaggaaatcacaaccagattggccgaaaagacctcatcagcaagaatgacagaacacccctaacaaactgaacagctactaatggtgccattagcagaactaaccaaaattcggtgacccaacctctgcaccgaaagaccagcccgcgacacaaatcctctgaaacaaacgaatagctagagccagagtcaaaaagagcatgggccacaaatgaatcaactgaaattgtacctgtcaccacatctcctttctctctgccatccgcagcgggtagcacataagccccagaaatacccgcagaagaggaagctcccggagtgaaattaatagaagaaccccactgagccgggtgaggcagacgcggagctccaaactgagacggcataggagtagtcggtgcaggagtaggcgcagccagatactgaggaaaaccctgcatcggcacgaactgagaaatctcaggcacataaaactgctgcggaggaagtggaactaaaaactgctgctcaacacttgacatcatgttgatagtgccctgagaagaggaggaagtcaccggctcccatttgagcttcccattaggattcctcttacacaccacatccttgtggtcttgactgtagatagaacacctgccactccactggcactctgcacggcgatgcgcatcaccacaacggaaacacaccagccccagcccgggcttaggaatagcccgaaacctctgagtacttcctcccgatgtacccgagtcagaagatttgccacagtaaggatggtggtgctgatgctgagacttgcccctcttgtgggctagacctccagtgttgcccctcctcgcgtcctggccacgaggctgatcaacaccagaagacttctgcgactccatggtatactaatgctgcatctccacacccagtgtctgc

SEQ ID NO: 93282 - DNA, 295 bp, Zea Mays
gttcttgatagtgacttcattcagaacttggtaatctatgcacatcctcttcatctcatctttcttctccacaaataacactagggtggcccaaggcaaggtgttgggtctgatgtaacccttctccaacaactcgtctatttgcttcttgagttccaacaattctggtctggacactcgataggctctcttagaaataggggtggtgccagggataagctctatggaaaattcaacctttctctcaggtggcatgcctggtaaatcctcaggaaacacatcaggagattctggt

SEQ ID NO: 93283 - DNA, 882 bp, Zea Mays
ccaaactattagaatagctttcattctgtatcctatactttaataagaatcattcctttaactaaccctctccttcgactataaaaggaggggtaaagcacctcacaggggggagaagaggatatagccaccaacaaattgggtgtagagcattatctcacgcgagagtctgaactagtataaatctctatgttcttgtgcttttacttttagttcttacatattgcgaacacccacatacaaattcactatggagaaatcttcgacactacacatgtctccaacaaagcatgtatggtgatgtggtaaaagaacattaactttccctaccctaaatctattgaatctttcttctctcagtatttgtttgggcgtccacatgcatgctctgataggagtaagtttagtttgtgctcgcttccttatgtagtgacctattttccgtgtatatatttgtgggctattggaaacgaccttagctggttatgaatttcagtttgttgatcgttgcctcacggtagctcatcgctgctatttgtatgtgattttcaggtcgagacctggacacttctttgcgaaagaaaacatatacatgctaggtgtcagtatttttattttattcaatatttttataataatctagcctaaaatatattttagatctaacatttttggttgtgtcagcgccactagtgtgaatcctactttatcacactacataaatcgatataataagggacgccacagtggtgatgacctttggtgtggtcctacgtcacataaggtgggtcttatcgtgttgtggtgatgactcaagcttgacagacctaccgcgccaaggtgggctagcacgataggatatatataggtcgcgagcctgac

SEQ ID NO: 93284 - DNA, 533 bp, Zea Mays
aagcagaacgaccacccaggtcccaaccaagatagagaagcaaggtggaaaccaagtcaaacgtcgcaaagtccacgccaactaagacaagacatgacatcccgggtcatggcgagtcatcggaaaggtaggccgcgcgcacgcgcgagtgtccgctatcgtcatgacagcacctccccaagtacgttcctcaaacgcgctcccatagcctcaagggaccgaacaaccctatacataaagtacctcagcatcggagcttctacattgacccgaatatcgggtagtgcgcaatagatacaccataccgagtgtacgcctacacacgccaacgagtgacgcaggcttgtgacgactgacaaggctgcacagtgcatggctactctatacgactgacctacaggacccccacgcactaccacaagaatgtcattagaagatcgcacggacaggacaacacaccatgatgggagtacggctacgcacgaccccgcgaacaacatcagagaaaacacgctacccaaaggccatcgacc

SEQ ID NO: 93285 - DNA, 383 bp, Zea Mays
agtctcgatcagtgagctgatcctgcagacggcggatgtggcttcttaattcgtttattctatcgccatccgcgacccatatgttcgtcctgcgttgaagctctacttgaagctgatttacttgggcttcaagatccccaattggatcgttactcccgctactactatcgtcatgtctgggagcgagttgatgacggggtacaccaattgggccagttgacttgcgcgcggttttcctcgtgcgcggcgacatttctctaagggggaaattttattagtatggttcttagcatgatgcatgtataattacagaaccaaccttagttgattcataccttctatacattgcactcctcctatctggtctttcatatagattcttc

SEQ ID NO: 93286 - DNA, 293 bp, Zea Mays
atgttttcttagcttgttctttaaaagtagaagttgtgcagctttttgtattagccttctttgactacagttgttttgtaactttctgttgcttagttatgtaaaatatgtttttgtatttatttgagtacttattttggttgttatttaattaggtatagttgattttgttatgcaacaagttttaattagaaccacacatttaattagattcgtcttagatctttaaagttttgtgaataatctatcattattgcatttggctgctcagtgtttaacgactactccatccg

SEQ ID NO: 93287 - DNA, 484 bp, Zea Mays
attcgaaaggcttatggcaaaaaattattgccagtaaatacattaagggaaaacaccttattttagttaagcaaaaacaaagtgattctcatttctagggaaaaaattttgagtttacgtgacaatttttacaaatactgtaaaactgaagttggtaatggcttgaagactagtttttggaaaagtaattggattggtaatcaacctctgtcttaccagtttcctgttctttttgacttgacctatgacaaagatgtttctgttaatgatgttttcacatcgaattttgagtctcttactttcagaagaaggattgtgggtaatttgaggatattattcgatgaaatgataagttgttgtaatcaggtaatactatctgatcaagaggataaaattgtgtggaatctggggaaaaaggcttctcagttaattctttgtacaaaaagaaaatggaagatcaaattttgattccatataagttctt

SEQ ID NO: 93288 - DNA, 786 bp, Zea Mays
taccacctgcagtgctggtaagaacgttgtaagagcggggtaagacgcttcataatttgtataccaccaccaccctgagagatagttgtacggttcacattgtttgttgcctttttgtctctgttttgtgctaacaatgacaggaccaaagaatcaaatggacaaggacaaggggcctaagcttaacgatgatgagtgtgtctctcagctggaattgaaggagatgatgcgcgcgatgactgaagcttttaaaaaatactaggactctgcctcgatatcctatgagcagcttgatcgacgagttgatgaacttgttacacgcatggacgtactggaggctcgtcccccaccaccaactctagccccatctcactctcctgtggacgacaacgacgatgacgatgatgtttatgcaccgctgccacaacgcttcgcacgtaatcgacaaggtatgggaggtaatggtagacatcgtcatcataatcctcaaccagaccataatccatttgctaagattaagttctctattccaccgttcatgggttcttatgatgctgaagcttacttagactgggagatgacagtagaacaaaaatttaattctcatcttgttcctgagcagcatagggttagacaagccactagtgaatttagagattttgctatcatttggtggaatgaactagttaacacacgtgctgcaccacaaacatggaatgcgttaaaagaggagatgcgagctcactttgttcccccttcttatagatgtgatcttcgaaaaaaatt

SEQ ID NO: 93289 - DNA, 686 bp, Zea Mays
tcttcatgttcccactgctcataaacaacttgtttctattcatggttcactcttgataacaatacttttattgagcttcacccccattttttcttgatcaaggatcaggtaagcaagcaggttctagtacagggaccttgtaaaggtggcatctatcccctacaatcgatctcccccaccattcagaagctcatcctctccgcaataaagccgtcctctcaacggtggcatcttcatttaggtcatccatctcgagatattgtacttcgtgctatcaagaataatagtttatcatgttctcgtgtcggctcttcagaatcagtttgtgatgcatgtcttcaagccaaagctcaccagctaccatactccaagtctaaaagtcagtctactacccctcttcaactagtcttctctgatgtctgggggcctgcaaccgattcctttggcaataagaaatactacgtcagctttattgatgattatagtaagttcacttggatttatttgcttcgttacaaatccgaagttttttagttctttaaagaatttcagtgccttgttgaatgtctatttgatcgtaaaatcatatctatacaaacagattggggtggtgaatatgagcgtcttaattcctttttcgcactatcggcatcacccatcatgtgtcctgcccacatgcacaccaa

SEQ ID NO: 93290 - DNA, 476 bp, Zea Mays
ttcagcaactgaagaggcctccccgccaaactcaggcaccacggccggctcaatatagcgtggctggtgggtaaggaccttcaatgttttgcccttcggtgcaggctcgtctagagtggccgaagcagcaggtttcctcttctttccctggcctcgcagtggataacggtagtccgggtaaacaaagccaatagcatcaaaaactctattcaatctcttctttcctcggcctccaaaggctgtagataatgcattatcttctgccttggaatatgacccaagcagctcatcactggtaacttcaatgcattttagccagtcatcgttcggttcatcgaatttatccccgtatctgaatgtgtactttagccggaccagatcaccttcactagatttggtgatagtttcctttggcatttcccagctctctataagcggccatactctgtatgctatgttctcttgtaccaaatctc

SEQ ID NO: 93291 - DNA, 569 bp, Zea Mays
cggtgatcaccggtgagcttgccacggtaaatgccaccaatcgcttgcgccagtgcacccccttctctccgaccgccaccgcgcgagctcaaattcacgggccaccgctcaagggtcctataaattgagcacacccttggctccgctatgtaattgtgcactcaacacacccacctgtgcctccaattattcaccagaacccccgaattgctcagttcccccaaatcagttttctgtcgccatgaacaagctctcaccgtggccagtgcactccagttctgatcttgtcctctgctctcttgtttcagcacccttacatgcccctgatgcttcttgacccgaccgattaggctagaaccccttagatcaccgggaacacttcatgttgtccattgtggccgctgtcaccatgaatagggtgatgtagagctcaaatccagcaattaagtgagggaaaatagtcgcgtagggttgaattcggtgtccagcaaaggggagggctagttgttgcttagtctggccagtacaagctcgtcggagctcggcctggcgccgttcgccgtcgagga

SEQ ID NO: 93292 - DNA, 644 bp, Zea Mays
acttcttggtctccaatacaaggttgtgtataagaaaggtactgaaaactgtgtagctgatgctctctcgcgacgaccccatcctgaattgtcagctatttcatctgcaactccagcatggttgtctgatgtgtcttccagctatgcaaatgacccaagagcgcaagacctgttgacagctctgtcggttaaaccagattcaataccacatttttccctgcggcaagggttactgcgttacaaggataagatctatgttggggcagttccctcccttcatacgcagattgtgtcagctttccatgacacggctgttgggggccatagtggtataccagtaactcttcgccgtatccgacagttattcttctggcctggtatgaaatccagtgttgcttcttttgtcaaaacttgtaccacttgtcaacaagtcaaaccagaccgctctcgctacccaggcctgttgcagccccttgaaattccaccagcagcttggcacaccatcactatggatttcgtcacaggcctgcctaaatctggccacgccgactgtgttcttgtggtcgtcgacaagttctcaaaatacggccatttcttaccattgcatcacccatacactgctgtttcggtagctcgtttatttc

SEQ ID NO: 93293 - DNA, 319 bp, Zea Mays
attcttgattcataaccaagatgtcttttcttggttagtgaatgaattatgtcaagttgatagaagtatcatggagcattatctaaatattgacccaagtagtagaccaagaaagcaaaagcttcgtaaaatgtcagaagacaagtccgaaggtgcaaaggccgaagtcaaaagattactcactgctgatgtgataacataagttgcatatccagaatggctagccaatacaatcatggtcaagaaatcaaacgataagtggaggatgtgtatagatttcactaacctcaataaagcatgccccaaggatgagtttcca

SEQ ID NO: 93294 - DNA, 612 bp, Zea Mays
gcgcaacttctggaaaaggtgatacttcggttgctctaagtgaggctacaccaaagaggaaaagggtgaaggtccttactcaccgaccacgcttcatcgaaccggcctcggtgcccaaatttggtggtgagacccctactgctactgaagccaaagaaccttctcttactcagaagaatgaagagctggctatattgccgaaggccgataatagtaaagaaatagagaccgcgaaaacaaagatagtggaagttacaagccctccggcaggaatgacagtgctgaaggcgcaaaaagacctcacggcgactccgaagagaaaaaggatggtcaatatactagatgtgttagagacgataaagtcttcaagctctactccgaagaaaattgccgaagctccaaaagcgcaaattgagacgacggcctctgaagccgaagctacaaagcaccaggctaagactgaagctgggccttcggagcccgccaaggggaaatccttagaaaccagaggaaaagaaacagaagcggtggaacaaattttggctgaagaaactggcactgccacccctgaagcattctttgaagctctcaattatattttacgacatgctt

SEQ ID NO: 93295 - DNA, 324 bp, Zea Mays
ctttttggcaacaagtaccaaaaacgaagagagagacatggatacatgaatcaatatcctccaggaggaggataggacgaaggatatgatggagggtatgatgtgtagtcagggaagagggtcctcatcacgtcttcctcgaatgaggagtccctaggtagctcatcagccgcagaaaaaacagatgccgaagatgtacgatgatgaggaggtggagggtggtgatggtaaccagagccggatggcctagggtcaccgggagtgggtccctgacccgagtagggaggcggagggtgagaggatgattgacccggatccccatgg

SEQ ID NO: 93296 - DNA, 272 bp, Zea Mays
gtgtcagcgaggttggtcagttggttacattgtcgtgaaaagtgcaggatgtaaaagtaccttgggtttcctaggcatatgtatgtgccctataagtttccaatgaaacttcctcaaggtttgcctagttctggatgctctcgggcctgaggtttttgagccatggtcacgccgattccgccagataaagggggaggttctggatcatgaagtcatcgcaatttgcccctcccgcctgacatgcaagccggtagtcccctagacgaagacag

SEQ ID NO: 93297 - DNA, 553 bp, Zea Mays
tctaggctgaatccgacccgaaccagcccagctaggtcagaacgcgcccgcgcgcgcgctcgcgtgtagactttgcacagagacccctgttgttttaaatatcccaaactgagtttcaccgcactatttctatgagtcgctaatagttacagttagacccctgaacttctaattcttcatagcgcttggtccacgacggtggacggcgacacaccactctccggcgagcctgtacctgccggatcatgcaaagaccgacgctcccgagcggcagacaccaaattggaccccgcccaatcattttcccccacttaattttactaacaaggctctgaatcatccggttcacggagacagtgcggacaatcaaaggaactaacgtgttcccgggaatccagggcagcctaacccgattgaattggtcgaggagctttaggaagacttaaggatgctagaacaagagagcaggagtacgaacagaactggaatatgctgaccacggggagggctctttcacggtggtggagaacagatttggggcgaatgagaaatt

SEQ ID NO: 93298 - DNA, 385 bp, Zea Mays
agctcttctcttcttagaagtcaccaccttcggctcaggactagattttctcttcttcagagttttttcgtcctctttcaacattctagcagcctgcctgctcagaacactgacaaccctttttctctttgtcccttcggcacccttgctgagtcgatcataattagggtattcaaaatttaaagcgtccattacccgattcaaccttctttttggtcgggtgtcgaaggctgtagtcattagttgatcttctttttttgggtataattgcccaaaatctcattgcacatagtctcaatcatctccagcctttcttggcagggctctttgaactgtttctcaaacttaaaccgataaggtagtcgaacaagttcattcttcttct

SEQ ID NO: 93299 - DNA, 615 bp, Zea Mays
gataaggtgtctatgcctttggagactttgacgattggcattggtgtgtggtagtggcagtgagacgacatacttcccctcactaattatgttagataatgtcgctaaccgcgttagataatgccaaccactagaatgactaaaatcaggaccatatctttaatatcggaggaggttgctataggaataggagacatcgcttttgacatctgagttgatgaatgatggtgatgacgtcgagggtgtagaggcgacgacttttaccgtggtttgtgggaatgaggaggtaccaatcaatgttggttcatgtgacaaccttgtccctttttcaggtacatcgtgtcactaatccgggcatgagggatagatcagtcttagtgctcagatcgagtttggtttgagatcaaccaaaactctctcccttaatttcatgcttacttgcttatacttagaacttaatttcttatctgcttaatttcttagcttacaatctctactccttaacgaattagtacaccaaggccaagacattacatcaccaacctcaatgctgagaatttattcttaagggagatggttgcaccaatgatctcttaatctaaaacacaagtactc

SEQ ID NO: 93300 - DNA, 364 bp, Zea Mays
gcgttggttatggtccacaacatgtagaaacatatcaacttgttcttcaacaaagctatgtatgctatctctcaacaacattcgagtcctcaacaagtttcaaagttcaaaaaaggagctctcctcatgcgcatcatgtttacacatcctacatcgttgctcttgtagattttgttcaaataagtttgccgcatacatcataggctaacatacatgctcagatgttcaaataagatccaatacccatacaccataggctaacatatatgctcagatttaataggatatgtgcataacgtgcacaacaaattcataagctctattaaagagcatgtccggaacttgatgcaaaagtagatctttt

SEQ ID NO: 93301 - DNA, 824 bp, Zea Mays
tcagaaattcttacttgagttatggcattgttgaacttcagccatcctagtttggttagagactgttggttgatccaccattagggatgtagagtcaaccgattcaacaacattttgtacctccaaaaggcaactcttagtgggaagttcaaataagtcatcattcttgtcatcatctagattaaatggatttttgacagaagatgcttgattcattagtaaagtatcatgtttctgactggtagaaaactgatcttctgtacggatctcagggacaatatgcttgttgcagacttcctctttagtgaacccattagtcttctgtatggaaaaaaaatcttctaaagtatctgtttgtggcctctctgcaaaggtgaattctacatcatcgacattagtaacaggagtatcatccatcttggtaacaggaagatcatcctgaaaaccagcaatgggacatctcaaagttttcttgctagaattctcaacaggttgactatcatcaggtacatcctcaacactccagttctatctggggagctccatggaacaatctgtaacagtattatcagtgcaaacaacattcagatcactcccaattgacatagcattagtgccaggattggttattgtttccaactgaacattatctgatcctactactaataatcttggtgatgcttcaggcatggtatgaagaatattctatcttccataaaaccttctacatttcttgagcatgtagactctgattctggttccaaaattaccaggcggggttcctgaagggttgaagcattcaagcagccaatcatcgcagtatt

SEQ ID NO: 93302 - DNA, 373 bp, Zea Mays
cctcatttctgcttgcgacgacaatgtcgtcaatgtaggtaaagacgttttgcctaggtgcttttcaagtactgacttggttagccgcgagaaggtggaaccggagttcttatggccttcgggcatgcgcacaaaacaatatgcgccgaagggtgttataaaagttgtttgtctttgccttgtcttcctccttcatgtatatctggtggtagcctgggaatcaatctagcagtgacatgacatggcatcctgctgctgaattgacaatcttatcgattctaggaaggggaaattgtcttttgggcatgctttattgagggctagtgaaatctatacacgttcaccacttgccgctcttcttcttaaccatgac

SEQ ID NO: 93303 - DNA, 351 bp, Zea Mays
gatggatttggctccaaaaaactgattcttctaaaccttggactgatttgcctttccaatcaaaccggttcttggatagcttgtgctctttggcaatggcctccatagtgggtgatagaccgtccactcttttttggcatgacagatggctcttggattagaggattgtagacttggcccctcatgtttttagtttggttcctaaaaggctggtgaagagaaggacagtggctgatgctctacgtagctcttcatggattggggatttgaggggagtggtaacgtgggaggtcattgctgacttcattaatccgacagatgttgtggctgatgttgatcttcaaccgggag

SEQ ID NO: 93304 - DNA, 641 bp, Zea Mays
cttcggtggaagattccacccgaggtatgtccgaagcattcacaacccagagtcaagagaagacaacctagtctcacggataaccaatctagcaacagtagtcaaacactcagcagcattcctcctaaagcaccttccacccatcaactccgcgagggggaagaggaggctgaagctttggtggtagatttaatgcacaaccaaggaagtcgttttgtctcttttgtggcgaagataaaggccacacaataaggaccttctagcacaccatccataagcaaaaggggattgctgctgtggctgctcagtcatctcagtcgaaggaggtgtttagtactccacaatatgtccaaccctaggagcccaggttgcaatagccttcgcttcaaatgcttcaagcaaccctatgatgagtgcatggtcgccatctgcttctttcattctagggccacctccctatgatcaggtccctgctagtcatcccaagttcctagtgcgggacatgcaacaacgggacagaagggaggccttcgaagcccgcacggtcaacataattgtcccagagacaaaacacatatactgagaccccaaggggctaggtgagtagactcgaagctatctaaatactcttgatcattttt

SEQ ID NO: 93305 - DNA, 430 bp, Zea Mays
cacttaaacctaaattagtgcattagaccaactcaaccgtgagcataagagctaacccaaccaatagtgtcatgatagattgcataatctgtctatccccacctaacctcaaacaaacttttgacctacatcatgtagtctatctcacccatatctatcttcactatatcacccaactccgatgatatacactaacctcaaattaaagagaccaagactggagaagaaaaaaatcaacctcgtcaaggaaggagagaagtcaaactcaatcttcagaagcattaccacccaacacggagtttttccacatcataaaccttcttacccttggctattcttgccctaacttatccatctcttatatcctacagaataagtagctggatacctatgctctcctaatcacccactactgactataaaaaatgag

SEQ ID NO: 93306 - DNA, 1141 bp, Zea Mays
acaacctacaccaaggcctgcgcctgtgttcctattagacggggcaagaggatgccaggagcctacacaacgaccaagaggagatacgcacccagaagatgtagcaccgccagctctacttgatgcctcatgcttcgtattatagtaactcctaggcccacctgtcggggcccagctcccttgtagtgtgcccccttggagtataaaagggagggcacttgcgatacagagggtatcagtgcttaggtcctgactgcgcactacggggtaacccacgtagtgcttttgggagggcggcatcgctgatcgtgactcgatggtacctacatgagcacgtcggtacacaaaggaattatacaggttcgggccgtctgaatgcgtaataccctacatcatgtttgatgctgagtattgagtttgctggtagtgcacggattacatacgatttgtgggtgatgatggatgagacctatcagtctaatggtggcatggttgcgacgagaggaatgtcgagagagttttgtaggggtaccctctgagccttatataaccagctgaggagacgtccctttacagatcgtgagatcttatctggatctatctacttttgctactattgcgtgacgactcttccagtggttattcccttcgagttttggcatcatgtgatctgctatccgtttgcatgcagggcgtgttacacggaattccgttggctcctctgtgatatatgtgcatagataacatctttatgtcgtgctcttaggaatctttctagctaaacatgtcatcctctcggtagcacctgtttttcccgaaggtcggcctaatagcacatcttggcgatgacttatcgggggtctgttcaagcgacccatggaacgtgtccatgtgacaatgacccatggtatatccatctcccatagaaggggattgattcacattcagacccacaacacccaagctctccagcaatacaactcatagtggatgtagggtattacactccggtggctagaaccactctaaacccttgtatttcttatgttcatccattcggtcagccaaatctataggccccctcctcatcttaggattagggtgggtgcattccatcactctactggaggatttcccctcc

SEQ ID NO: 93307 - DNA, 374 bp, Zea Mays
gataaagctaaaacaaaaacttgacgctgacagactaggtgcaactgttaagagaaagcgaagttatatttgatgaaccaataaagccatgtgatgatatgaatggatcatatcatctacgaatgatcatgccaagtgttgatttgttttaattacacgtggttttggcggaggttggatgcttgtgtgtcatcaccgacggatgagatgaaatagaacacacaagacaaagatatatttgtagatagttgtatttcaccaatcaaatcttgcatagagaagtatatgatagaatttaaagcaggtaaccatactattaagagaggcaatcatgtttatacattagtcatctagtggcacttgaccaatctagc

SEQ ID NO: 93308 - DNA, 280 bp, Zea Mays
ggcccaattgtgatggtgagtgaccatatagtaccagaaaaggagatttgcccaatgaagaatggtagcaggtgttataccaaaactccgcgagaggcaaccacattggccattgtcgtggacacgactgaacaaagcaacggagatacgtttcaagacattgattcaccctctccgtctgttcatcagactggggatgataggaactgctaaggcataactgagtacctgtcaacttgaatagttcttgccagagccaactggtgaaaatgggatcacg

SEQ ID NO: 93309 - DNA, 495 bp, Zea Mays
ccaaatatccatgattttggaaattcctgtccttgcaagttttgtgattacatgaactagttcaaagatgccaaatgattcaactactgattgttatcagtataatccataagcagttcggatgcatttccatacaaaattagcatagtttattgcttttcttgtctgttcatcaactacaaattaaactatataagaacagtgatggattttcaggtgagagtacattgatctgcatttggtccaatcaactaacccatacattttttgtttgtggtcccagtaatcactagtttactagcaaagcactgaagcatcatagtggatttccttattgaacgacattatatgacaggacaatactacaaccacaggagaagcatgagaaatgaagcactgacttccagttctagaggcattactttggtgtttcagtaatagaatgacagatacagtcatctacagatgatagtatgcaaaaccattcagttacaa

SEQ ID NO: 93310 - DNA, 328 bp, Zea Mays
aaaagtaggaccattgaaagtttaaattagtatcgttgttacaagtttacccaactttgagtataagagagcacagtcagcccctcgtctatcacttgtatgtaaggtgaactgttttgtttttctactgcccgaccaatgtgcctctaagcatattcccaacaggttaaaaataaaattaaactgcaaaacacccttttaaattcttatagatttgcgacatatcgtgaatgcattagtcagtgtggtaccaggctttaacatattgaaaaacgtaaacatattttcccccctagctcattttgtacacctgtttgtcaggttgaag

SEQ ID NO: 93311 - DNA, 645 bp, Zea Mays
ggaggaatagctagacatttggatgaaatcatagaagaaggcaaccagctcaattcaatacattccacacttcaaattgtaaacactgagatgtccaagttaaaagatcgtatgcaacttcctctccatgttcccatgatcaagccaatagctcccacaaccttgccatcatctgtaccatccaaatgggttcacgcaaaagtttcagagcagtggaaaaggctagagattgagaggaaaatccttgagagctcaaccatttctaacttgcaggttagctatgataatcttgatctgcaactgaagttgtgcttgttatgcttctctgtcttcccagaaaattctatcatcagcaagagggccatgatccattggtggattggcgaggggttagtagcagccacaagaagtcagacagccgaagatgtcggaaaggcatgctttgagaagctgattgctctagagatgattgaaccggtgtatcagaaatgcaggtatggggtaaaccaatgcaagttacacccctggattcgtcgtatgttgattaaagttgcaaagcaagcacggttttttgaatttgattcagatggcaatgcaacatgggactgttcagctactcaccgtgcttgtctagttgaagagcac

SEQ ID NO: 93312 - DNA, 370 bp, Zea Mays
atatcacaaagagaagcaaccaagacttcaataacttcaggagagggtcgcactctaagacccagaccactatcaccagcaggaggattggacacgaaactgaaaaaggacttaggaggtggaaaattccaagcagagtaggcaacatgagcaccaacatttgatactttgcctctcaagatcatgtctagctagctcaccaaatcctcagcaggaattctcctattagtaacccgagttgagtcggtaacaccactgtacaagtaagctgggtatgctctgtccttcaagggctggatgttcttaaaaacaaagtcagcaaccacagcctcagcggtcagacctctttccttcagcagacagacttcag

SEQ ID NO: 93313 - DNA, 1786 bp, Zea Mays
gtactctttcagttccaaattatatttcacatgcatgtcgctagccgggatgctacttcagtgagacattgaagcccatatcagaagaggtgcgcaatctcgatgttgtactatctagatttcatttcaaggagcaccagtacagtagttccaaaatttaatttctgcatgaatctgatggtttgtttgaattgcaatttggaccgaggcgaaatctactatctcatgccaaggtgacactggtgtttgaggttcagtaacttgagttattgctaaaggtcatgtgattatgattgtcccagattactaattgcaaatagtataccatatgtacatgatagggattagatttacagagaatgatagaaaattttctagctgttaatttttttacttgtgccaatttgtatatacgtagaatttacagactgattaaaaattacaggttactagactatgaaataaaaacctacagaacctttagtcaaatatatatgaaaaaaaactttagtacaaatatatatatgaaaaaatgggatagagaaactggtaattcgagttactgaactctttgttgttttggaatagcagcaccaggcaagagttggagaactaggagtcttcggttgtcgctacggccttcggattgctcctgtattcttcaatggacaatccttgacacggtcacataagcacaacaagaggagaaccccaaccacagttcccagtccaagggcgacgatggcggatttgcttttattgctgaacaatgggaaccctctgtgggtgaccgcttgctcgagccattatttgaattcaagctcctcatctgtgtgaagctaacaggtagcttaccgctgaaagaattgtttgagagatcaatgttgaagcagttgtctagcttccccagccatggcaggatattcccatctaacttgttacatgaaatttccagcacattgaggcttcccaagctctgcagccacgggggaattacgccgatgagtagatagtttgtcaggatgagcacctgcattgtctcaccaccgcggaaattcctggtcagcaccaagcttgtcaggttgggcaggtgttgcaagacctgcaatgtctatgccaggttgtgaaactattcctggtcagcgagaggtacgacagggatctcaactccttgaagctctccggtatcccccacgagcttgttccttgtaagatttagtgtcctcaacttggtgcacacactgatgccaggagctatagcaccactcagatagttggttccaacatcaaaagtattaagcttcggcagcaagctggagtcgatagcaatctcactagagagcgagttgttcctcaagctgattaccctcagcagtggagaactttacagggaagcgggcaactcaccatccagcctattggtggccaggtttacggactctagcctcctcatctctccaaagacatcagggatggagcctgtgaacttgttataggacaagtcaagttgcatgatctgagagaggttaccaaggtcactgccgaggttgtcagtgaactgattttcatgtaagctcactctcctcaggttgggcaacgtgtacaggtcgtcgggatcccggtgaaatagttgtcgtcgagggagagctctgtgagcaccctgcaccgacatcagagatgcaggatgtacatcgatacatgtgtgttggttttttgtttaaccttctttataatatttgcaagttgctttaaaattgagtgctcataagatgcatcaaaatgtttc

SEQ ID NO: 93314 - DNA, 622 bp, Zea Mays
ttttttttaaaaaaaaaacatgtcaataaagtcgatcgatactaatcagatcatctaaggcattggtcggttttgatcgatgaatatcgatatgtccgagtttaacgtggttgatatcaattggaccgaccacatactggtcaactttaaattgaccaacttaaaaattgctcaatagataatgaccgattcacagagcacatactccctctgttccctaactttttaaattaaagaaattataagcctaccactatcggagtgatcagtgccagtgccattgtaccccgacgaccaatccactatgggtcccacaaacgatcaaaacccaaaagcgacctcgaccctatcgatcgccccaacaggcctgaaagccgactcgctctcactcattcaccaccagtcacagctcatgtaatcaatccaacccaccgctggcggactcggcgagacggctgtgtgcctgtgttttgccgagagactactatcctactggctgctgtcgtctcgtccatacaccacacacgactacacgaggacaggacagcgcgccccatggacaaatatcgttaaaacttgaagccgcggcatgggcgcgagcgtgacttgtccgttgcgcgcc

SEQ ID NO: 93315 - DNA, 471 bp, Zea Mays
tgctgggacattggtggtggcgcccctcccagaggctggtacgaccttggatattcagaagcctgctagtactcgcccgaggcgcccttgccgagccaatcaacctgatccttctgctgatgagtagaaaaagaaaaagagacgcctccggcgagtatccagtttggatcgggacattggtacttcggttcctgctgctgaagaagtgcctgtgtctgaatttattgacgctgacctcaatgggtgtgcccaatctgctgctgatcccaatgtgggtgctccatctgttgctgatcccaatgggggtgctgcctgtgttgctaatgaagacgatggggaggaagaggatgaagttcctttgactcggaagaacagtcggcagttcatcgctagtggtgaaagtagtggagttccttctcctgctttgtctgctctcattggtctgcaagaattgtccctggcaaattttga

SEQ ID NO: 93316 - DNA, 554 bp, Zea Mays
gccgcattatttgatgctggatataatagctggagtgcatacttgagtttctcacctctaggagcaatgaagagaatccctgcacctgctccctgcaacttcagtgagtcatcaaagtacattctccatacttcggtagtctccgggttgtctgggacctgatgctcagtccactttgatacaaagtcaactagtgcttgagtctttattgccgtgcgaggtcagaactctatgtcgtgagctcccaactcacatgcccacttggctatccttccgatagcttctttgttgtggagaatgtcccctattggaaatcatgtgactactatgactttgtggtcgtcaaagtagtgacggagcttgcgagtggttagaagtaccgtgtatagcagtttctgaacttggggatacttcatctttgagggcccgagaacttcgctgatgaagtagaccggatgctgcacagggtatgtatgtccttcctccatccgctcgactactaacgtggtgcttaccacgtgagtcgtgcaggatatgtataacaacagatcttc

SEQ ID NO: 93317 - DNA, 365 bp, Zea Mays
tttatgtcacgcgactagatagacaacacaacagtcaaggccagttagcacctacgggcctatggaacaaaccaatacagtaataatatcgggtattggcccactaagataaaatcctatctccattctccatcgagttatgtatatatccttgtcgcgttagactttggttatttgcattcctgatcggaggatttggaagaaattaggaagaattttaacttgctaggaatttaaacccgctcaatctcctctaatttatatagattgagattaaaaaaaagaggccctttgatggaatgatgtgaaatgtagcatccactagagatggcaacagatcgaatattataagtattcgctctata

SEQ ID NO: 93318 - DNA, 609 bp, Zea Mays
ctaagttaagtaagtgtgagcatgttgcaccatcttaagtcactgccgacttaagccgattgctccattagtagggtatagtggtcaccctaagttaagtaagcgtgagcatgttgcaccattttaagtcactgtcgacttaagccgattgctccgttagtagggtatagtggtcaccctaagtcaagtaagcatgcagatcgaaaacagttcgagtgcctttgagaatgaagtctttttattgatgatgtattttccgattacagaatacaatgctgccccgatagcttttgaaatctagctaggggtaaaacttcctgagatgctctatattccatgaattccctatttcggtgccatccatttgagtcagtcgatatgatcctagccgagtgacttctgctaccatgaatgacccttcccatagtggcgacaatttgtgccatccttcccccgttagaattcggcgaaggaccagatctcccactgcgaaggatcgatgttgtatgaccttatcatgatagcgcctcagagtttgctggtacctagctgactgaattactgtattcaatcgttcttcttccaatatatcaatatcctccagtctag

SEQ ID NO: 93319 - DNA, 908 bp, Zea Mays
ttaacttgcgctaatatctctttaatcaagcttgttggaatttagtgttgaattttacaggatcacctattcacccccccccccccctctaggtgctctcaggagtgggaccaatggatcgaaaatatacaacctgaacagcagattcctcagcccattcaaccagatgagcaacagatcagtaaccggcactctggtttatcgttgaacaactccattggtctcaactagggcgcgcctcttcagattggccacattttagaggatcatcctatggttgggcctgttgtgccagggaatgtgcctgttgtccttgccttaaatgatgctcctattaatgggccacaagaagttgatggcccagttattcagttggatcctcttgctgtgaatgatggtcagccaccagaagcccaggagggggcataataataaccatttctttcacaatgtggaaatgaacttcatgttcgctcaggagtggcaaccagatccagtgttttagatgcacatggagaggatttgggccaattattttgcacccgtggggaacccaaatatttcagtgaagattcccgaaaaatggtcgccctttttcctttcgaatttgcttcagccagaatcatttaactggtccaagtccttcttgtcgttagagtttccctcaacattgctggagtcggagcttgagtccttgtcttttgccattcccaacagttgcacaaaggataaattcctagatgatgttctctcggaggatccacagccaacaaactccgagcaggaagagaacaattctagtgtccctggtccgaccattgtggaattagagctcagaaggagtaagcgcctgaaagactccagagctgggttcagacagggttcttgcccaaaaaggaactgtctga

SEQ ID NO: 93320 - DNA, 318 bp, Zea Mays
attgaattgaatatacttttcaatcgagcggtgcattggcttgcaaaattaaaacatctctccttaagagttctcagtgcttcactgagcttcatgttcttctcagcctcaaccttgagtgtcattttcaaagcttccgattcacagttgaatcggctagagttttcttccaaaagtgtctgagcctctgccagctctttgcccaatttcttattctgagcttgcgcttcgacaagcgatcctttggctgagcacaacaactcatctttttgttttagagaatcctcaagtttcttgatcttatcttctaaacccttg

SEQ ID NO: 93321 - DNA, 337 bp, Zea Mays
tcccgcggcgcctcatccccgtcaggtttgtctcttctcttttggatcgcttcgtttaattgattccaccttcgatcacgttagccgtccatcacaggctttgtcttccactcttttggatcacgatgatttctagcaccatttcagtgctatgtctatgataaccgatacaatatattttgctagcacggctcacttaatttacaggactttttcccctcacatgccatgccactcacggcactagctggatcgaacgttcagatttttgttcagctaggcctaaatccagggttgccctgtttttatttttcaatgtttttgactgccctccctc

SEQ ID NO: 93322 - DNA, 666 bp, Zea Mays
gaacagagcttgtgtagtgaaaggcttggattgaaaaccttggaagctggtaaggagcatttccttaagcttcggccttgagctaacagtccttggtcagagtgacgagtaccaagtctaggcaacacttcgaaccgccatgacgaaggattttgccatggctactgagtttccaccatacgatgatatagtggcttcatagctcatgaggaactacttcgggttagtcaagccatcatagataggtagcgtaggaggcctgtacagtggtagccatggtgtagcttgcagctctgttgttagtggggaagcttcatcatagaggaaatcttaggtattgtacacctcatgacgaagattgtcatgacctcgcccatcatagtcttgatccctaaagttgtttaggttttcatgcgctttgatattgcctatttatttagtcgcttcgtcaatctttctttggatttctgaaagatgaagcatcttctccccgctcttctctacttgctggtgaatggcttcaaggttgctggtttcttcatcaaggtcttctcatgagggggtgagctaatggccttcttctagatccttgcctctgtgatgagagcttcattctcttgattcggatcgatcggagcaaggatggagctagttgccgctgctttc

SEQ ID NO: 93323 - DNA, 548 bp, Zea Mays
cgggtcgccgtggcctcgcggtattccgaccacgtgcatcgacaacgtggccgtgcggccgtcgccggagtttgcgtcctccgccgcgattgtgccacgcttccggtcagtgaccacgtcgccgtaaaccataatcattccccagtgactgttgaggcttctcatcccgtgaactgccacgaatcaccatgccggtgactcacttcctctgaccgccaccgcgctccacccaaattcccggccaccgctatcgtcccctataaaattgaagccaccgtgagctccgcaaggtcatcacgcacccagccaccatgaatcagcctcaatcattcactgagagccgcgaatctggagttctccccaaattgttttccgccgccgtgaaacccacccccccccaccgtggccagaccactctggtaaggttccgcgcctctcaagtattgttttagcatctgtgtaggcatgtaaagctcaccgtagcatccgtttgcccaatccgggcctgtataattgggaacatgggatcgacgccgcggttctcgccg

SEQ ID NO: 93324 - DNA, 485 bp, Zea Mays
gctattgatagcaaggaggcagattcactcgagactatcaaggttgtgtcagagtttccggatgtgttcccgaaagatttaccaggtatgccacctgagcagaaagttgagtttgccatagagcttcttcctggcaccgccccatttctaaaagaccttacagggtatctgggcccgagttggttgagctcaagaagcaaattgatgagctgtcagagaaaggttacatcagaccaagtacctcaccttcggctgcccatgtcctattcgtggagaagaaagatggcactaggaggatgtgcatcgattatcgagctctaatagaagtcacaatcaagaacaagtacccctttcccagaatagaagatctgttcaatcagctgagaggagccaacgtgttctcaaagatagatctgaggtcaggttatcaccagcttaggattcgaccttcagacattccgaagacgacattcattaccaagtat

SEQ ID NO: 93325 - DNA, 1388 bp, Zea Mays
atttcctggcgcattattaatcaacatgtcgactataggcataggatattcatctttatgagtttctctatttaaattacagaaatcaatgcacactctgagcttacctgattctttcttctccactggcacaatattggagacccactctacgtatctgcaatgtctaataaaattagcttctaaaagccggtggatttcgtcctttatccgtgggagtaagcctcgacgaaatgatctgggtttctacttgaaaggcctgaaaccagacttaataggcagtcgatgttctactatctctcggcttaatcctggcatcttagtgtaactccaagcaaagcaatcagaatattcttttaacagaccgatcattcatctcttgtatcggcctccagggtcttgtttacaaaagttggcctcagagttttaccatctcctatgtcaatctcctccaaaggaccagccgacttaaacccttgtcctaacttgtcgagatccctaaattcctctatcatacctccctcagaggaattaggtgttctttgcgtagctgcggaccgtctagcctcgaaggccaaaccgtccgcgacaccggatccgtgctatagcggctgcctggccttaagggtcgaactgccctagaaaagaccgggtcgtccagccccaggggccaaactatccgcgacctgggctgaaccctgagaatctttttgcctttcctcatttaaactttacttgggatttagcagattttccatcaactttagaattacaaggatgaagactttcatatctatacttatgaattgataatcagaaaagtcaactcatgtgggacatagcggtctcataggtccaaagtataggggaatcagccacaacaatgtaggtcgatgcatcagcatgcactggttctacatcatcgcctacccattatagcaacatttgatgtaaagtagaaggtacacattgattaatatgaatccaatatctacctaagattagactataatttcattctacatcagcgacgaagaatgcggtagcaagtgtcttggtaccgatggttaattcaacagacgtgacttccttagctttgatagacagtcccaacaccgttgagcgcatattggtcttgactagttcgtcatcttgctttactattttctgtacaatgtgtaaggcattaaatttatggtcgcccctccatctaccaacatcttagcaatcgatattccatcaatatgaccgcgcacgaagagcgactttaaatggttgatcgattattttggcttagtgaaggcagccgctttaggaccaaaatcgaattgagcaacgacaggttcattgtcaccgataatagtacaatcggctgaaatcataaaaac

SEQ ID NO: 93326 - DNA, 350 bp, Zea Mays
cgggagcgagagtagtggaagctggtgtggtggaggtagtgggtgcaacaggtgtggcggaaggctcaagagtggctgaagctgacatagtggaagatggagtggagactgggtctgagggagcggatcgagcaggggtggagcaagcccaagacgagaggcaacagacttggaaggcaatctggtcggaggtgatcctcaactaacctccctgctctacctgatctgctgctgcggcggcaactgctgcacggatggctttgtccaaccatctctttttcttgcccactgatgctcaaggtagactgccttgcccttgtcctttcggaaggggcgaggagggtcctggt

SEQ ID NO: 93327 - DNA, 396 bp, Zea Mays
tttagaagtaacaaccgagtgataatgggccacgtcggtgttttataaataacgaccgagcggttactggcgatgtcggtgttttagaagtaacggccgagtcctttggagccacgtcgccgctttaggaataacagctgagtgactactagcgatgtcggcgttttagaagtaacagccgagttacaatgaaccacgtcggccgctttggaaacggcggccgagtgaagtctgataacgttagcgtttttagaaatagcagttgagttatattgggccgcgtcggccgttttggaaataacggtcgagtgatgacatggcacgccagcgttttagaaataacagctgggtgatgactgggcacttttttagaaatggcgtctggcccaggaaaac

SEQ ID NO: 93328 - DNA, 304 bp, Zea Mays
gtggtgccctcgcttgtatatgtgtgaaggcttgtatgatgaggttgtgtgccctcgtttgtctgagcctgcgaaggcgttgtgtacttggtctggtgtgttttgttatgctatgctggtgcgcgtatagtcggtcttggcgcggacagtttggtgttgtcgtttttgcttttattgtgctagtccggctgcacccttaggcgtcttctgcacggatagtctacgtggtggacttcggttttttcgcacttgttgtgctagtccggctgcacccttaggcgacttctgcgcggatagtcttcgc

SEQ ID NO: 93329 - DNA, 758 bp, Zea Mays
cgacgcgtcaaaactttaaccttttttgaccttgacgcactagaagtcgccgaggtagcagctttcctcttcttcccttgctttcgcgaaggataatagtagtctggatacacaaacctgatcacatcaaataccctattcaacctctttttgccccgagctccgaaggcagttgtcatggcttcatcttcggcctttgaatatgctccaagcaactcatcactagtcgcctctatgacatctagccagtcatcattcggttcatcaaactggctcctatatcgaaaggtacacttcagatacaccaaatcattttggctggagccagcggcagcctccttcggcatctcccatccatgagcaaatggccacactctgtaagcaatatgctcttggaccaagtctcttgtgccaatgtaagtacacactgtattaaaagctgtctggcatgcttgcacgtcgtttccaactgcaatggccggtctcctgatgccgaagtgagaccatatagggcgctgaatgacccctttttatatcttccctctcacttagatcaaccttcacataaaaccattcttgcatctaggagcctggccactttttccgaaatgtcagcacaagatagctggcctcggcgcgatgtacgaagttgtagcagccaaaattgttgtgatattgctctttccaagttgccttcgtctgatataatagctcgtgcatattgcagaagcacctggcatctggctctaacccttggc

SEQ ID NO: 93330 - DNA, 555 bp, Zea Mays
ccgctgcagtgggtcgaggaggcggtggtgccgccaactctacttccatcggcactgttgccgacgattctgtatctcccatcggcatcgacggtgatgggagcacgatgggaaggccacattcaacaactagcagtggtaccaccgctgtccaaccgtgaatcacacaaaaatgcatgttgtgcacttgaacatggcgtgctggtatgacgttcgccggtgggagcaccgcttgttacccagcgatgtatgcctccaacaacgcatcatcgatgacatggagaacttcacgcatattgtggatgcaaagagaaacaatttgctccataccattttttagataatggaaatatcatctgaccttggcctcaaatgaggttacggccaattattacatctagcgtcagcatagtgccaagacccctcctatgactataccaaagaacaccaactatggagccaaagctactacaaagataaacgcaacgaagacccccatccaaagttgctgaagaactgtagtagcaccctttccacattacgacatgaagactt

SEQ ID NO: 93331 - DNA, 377 bp, Zea Mays
tgggaaggagagcttacttggacaccctcgggggctgggttgtagctcgcgccacccacgagagccggatcattaccggcaacaccctcgggggctgggtcgtagctcgcgttacccaccagggccggatcactaccggcgacaccctcgggggctgggtaactgccagcaccaccctcggaggctgggttttctgcaacagccacctctaaggctgaaggatcctcaatcacctccatgagagtcaagcaatcttgaccaacttcttgacatcgaagactgccctccaaagttgacgatgcgcgagatactactcgggatacctctaatcccacgtctagaatttcagagcaaacatccatcatgtcaccagcagt

SEQ ID NO: 93332 - DNA, 325 bp, Zea Mays
atcaacacatcaaagtaggacgttagaagagtcgttggaaatctatcaaaatcatacaagagtctaggtacaagatgaaagaatcacaaacgattaacatgaaggaacgaaaaaaacatgatgtaaagtacatcggaggtgatacatcggatattgctccaaacaagagcagtgcttgtactgaagaatggaccggaaactgactatacaggacacacaaacatgtacaccgaacaccacgtgggatagggcacccaataaggtctgcaatgtgtacgcgtgattttacaatgcaccgaatgtgtcaggtagcacaccgaacccc

SEQ ID NO: 93333 - DNA, 784 bp, Zea Mays
taaagttcttgcgacatgggtaatgttgtggattgattttggtggagatagactctttggaccactacgtgcgccctcacagtgcagttctttgtcgtgatctgagttgattctcatttgagtttgttttgagaaaaccccaacaaaaccccatttctctcgggttttctgaactatgcttcgattttaggtttgtttggttcatagttgaccagtaaacatcttctacccagtgcaaactttcagagaagtttgagaatttccttggcatttttcattgtctggctctaccgcccgtgtatgtggcactgccggacccccacactgtcagacctaaggccaacactacctctctgacttccttgcttttcttgctctgatttttgacaggaagttgggtctgctatttctgaggccatcaccatggatgagcttttcagcaagctcaagtccaccgagattgaccaccagactcgggccaagattgagaaccctggtgcacccaccatggcctagatctttggatgtggttcctcctctaactctcacctgttatgtttgctttgtcttctttgttgtctatcacagaggagcaagtggagagcctcagagatgaggagctagcgctaatggccagtcagttcacgttgttccacaacaatcgccagaaccaacagcgtggcgcatcgaaggatggatgctttaactgcggcaaccttgaccaccttgtcgccatttttcccaagaagggaaagtctgaggctggcccgtgcgaacaccactc

SEQ ID NO: 93334 - DNA, 484 bp, Zea Mays
gcaaaatagcatttaacatggaacttgcttttctcctgtgcaccacttacgacatgtgtttttgttgatttaaacacctgtacggagtgcagtgaggaatattatagcatgttacgatctttagcctttgttcttggaagaagcaaggctcttccctatccagtttgcaaggcaaatccggcgtggggatttctttatccgcatcttaactttcgattaggtcgggactctaggcacctgacttacctaagtgtatgtatgctaatgacgagacacacatgcatgaactagacccacaatgcatggcctgagtttagcatacagatatacaaacagacgccagctaacttatctgtgatgcaagggctgatttcgaatacatgtatataccgacccatgatggctaactgatttacaatgcatcatggcattagatgtggcagttgctagctttgtgcagaagacgctaactagctatcaaaac

SEQ ID NO: 93335 - DNA, 455 bp, Zea Mays
gacataccttggtgaaacaagtacgatgccaattccttgcccttcattgcaaacagatccatcaaaatataaagtccaaggagtaatagtgaggcatgacatgtctagtttatgagtatcattaatccgatgttctacaataaaatccgctacgacctggcctctcatagatttcaatggttcataggccaagtcatattctatgagtgcataagcccacttaccaattctaccagtcataattgggttatgcaacatgtatttgatcacatcggcttgaccagaaacagtacaatgactagacagtaaataacatctatacttggtgcatgcataaaacaagcataagcataacttctcaataaaagtgtacctcgtttcagcatccaccaacctccgacttagatatgtcaccacatgctcctttccttcagtttcttgtgtcagaacagccc

SEQ ID NO: 93336 - DNA, 393 bp, Zea Mays
gttttcatatctcccacggctctcaaatgactgcctctagattgcgcagtatgtactagcagtttgattctaaccgctatagcacaatgattagatgctctttggtctaacgctctttgttttgacgatccttgaactatagtcacacgttctaatgccctatagtaagctccccaagagctatcaggcattgtcatactagtccaatgaccatcgttggactatagtcccaccttctcgtcttccaaaatggtcaatggaccctttagtgaacagtgtatctgtttggttcgacattatccagatcactgttctgatggtcgtgtaatgtcttatgctcttcttttctttgtgacctttgagtttggttgggttccatctcgtgtgttggac

SEQ ID NO: 93337 - DNA, 1243 bp, Zea Mays
ttgcggagctgagacacatggaacacattgtgaatatctgacatggattctggtagctcaagacggtatgctgcgggtcccactcggctaatgacggggtagggaccgacgaaacgtggtgctagctttcctttcatttggaaccttttgacaccacgcatcggggagaccttgagataaacaaaatctccttcctcaaatctgagttctcttcgtctgttgtctgcgtaactcttttgtcgactctgagcttcaagtaacctcctgcggatcaaggcaactttctcttcggcttctttaacaaagtcaggtccttcaagtgtcctttcccctacattggaccacattaggggagtctggcattttcttccatacagtgcttcgaatggtgacattttgatgctggcttgatggctgttgttgtacgagaattcggcgtacggcaaactggactcccaatccctgtcgaaagttaacacacaggctcttagcaaatcttcgaggatcttgttgactctttctgtttgtccatctgactgggggtggtaagcggtgctgaaatctagctttgtgcccattgcttgctggaggcccttccaaaattttgaagtgaactgcattcctctatctgacactatcttccacggagtgccatggagcctgactatctccttaaggtatattcgggcaagggcggctcctccaaaagtggtttttactgggacgaagtgggccaccttggtgagacgatcgattattacccagatagaatcatttcctttctgcgttcgggtcagtccggtcacgaagtccatgcctatttcttcccacttccattcaggcactgggaggggttgtagcaggcctgcgggcttctgatgttcggtcttcgttcgctgacaggtgtcacaccgggctacatactgtgctatttcctttttcatccctttccaccaatatctggctttgaggtccaggtacatcttggtggttcctgggtggatggagtaagctgagttgtgggcttcattgagcaggacttcccgtgcctctcccattggtacacacaggcggttcttgaaccagaggactccttgctcatctgtcctaagatccggaagttgctccttgcgagctgtctccataagtctggctgtctctgcgtccagacgttgagccttgcgtatgagatcttctagaattggcttgacttccaggctaccgttgtctcccagacatgcat

SEQ ID NO: 93338 - DNA, 524 bp, Zea Mays
ttcgggtcgtggtcggagtctacggctgcttggcgttcggtaagaacccctccattgaattcgccatactctccgctctgcgtagcctgcgtttaaatcgaagttgggcatcggggtcgtctctcggcatgctccggccatggcgccacctctcagcttgggggcgccgccgccttacgctctggtgaggggagagatgagagtgggatgggggaatatgtgcgggccgttggatgttgagtgtgcggctatgattgaatcctgagcgtaccccttcggctaaagtcgatctcggccattaggtgttgatccaacggctctggcgtgggcgggattattgatctaatctggtcctttgaaaacagatccaacggcctggattgggtaccggttcgatttagttaacttctaatctgggccactggttttggatcggacggaccacagtgcctcgtaccccttcagcgcgactgttttacaaaagagaccctacgcttgggtataatcaaccctcagtacacatg

SEQ ID NO: 93339 - DNA, 523 bp, Zea Mays
tctatctgcttcttgagttccaccaattctggtccagacacccgataggctcttttggagatgggggcggttccagggataagctctatggcaaattcgacttttctctcgggtggcatgcccgttagctcctcgggaaacacatccggaaagtccgacacaaccttgataacctcgagcgggttggtctccttgctatcaactgaaatctggtgacagactccctccgctgatttaggcatccttagctcagccactacctcctctccggacggggacttcaatgttacggtcctcttgtcacagctaacattcgcttcatacttcattaaccaattcatccctaggatgacatctatcccaggggtgtctattactattaggtcactggggaatcctatcccccttatttccacccttatatttgagcatattttatctgtttgcaccttgccaccaaccgaattaatcctcatgggcggcatcattgcctctactgagatgttatgcatttctacccagg

SEQ ID NO: 93340 - DNA, 452 bp, Zea Mays
aaattacctgaaggttggagaagaatgaaggaaatcccaaatcatgagaagccaggtggtggctcgacgaaggaatatcaaccggggcaatctgaagagcatcaccagggatcaactcaacatcaccagcaggcatcaaaactctagcatccggtgcgccgatctctaaggcgacttcctcatttgaagcatgcaatgtcactatgccatcagaatgtggtggagaagacccgaggtggacatccatggaggtatgagaaggggagctcgcattgtccatcggagccggatcaccaccggcaacaccctcgggggctaggttgcagcttgcgctacccacccgagccggatcattaccggcaacaccctcgggggctgggcaaccgctggcactatccttgaggactgggttctccacaacagccacctctaaggctgaaggactctcagtc

SEQ ID NO: 93341 - DNA, 438 bp, Zea Mays
gtggtgggaggaaaaggaaaactggctctgttaccaagttggaatgagaggaaaccctaaccctaatccagggttgggtgagtgttatatagatcgttagatgggccaagcccattacacaggggtagtcaggtaaatacaagagggcacaagccaaaccctaaacaggagtctaacatagacggtttgataacattgcacttggatgcttacaaaaacacacgtcactgacaaaaaggatatcataaccaaggggatcagtctaccaaccaaaacttaaggttctggggcaaacaagcacctgccatgcaacataaactacaatcacaatccactattttcaggagttcctgaatgcttgccaaaactccctcaaaacacacagacattcctatgtttccgcttcttcttaatataatggtatgcagctctcctgca

SEQ ID NO: 93342 - DNA, 310 bp, Zea Mays
cgctttagttatctacacattatcgacgttccacattaacaccattaaatgacggcaaatattttatgtatttatgcaacaccactacgacaccacaagtacgcgcattttatttatttggacacggcttttcattagttctctagtgatcacacaaaaacatcccaaacacaagtttaaccgatgacataggcatcaatgtctatggaaattccatatcacaatcaactaaagaagaaacatataaaacaatacacacatgtcatctctagcttagctatggcaagtctatattacttaagagcaaacc

SEQ ID NO: 93343 - DNA, 371 bp, Zea Mays
aacaaggagatagtagcgctccccctcgaccggatgagcagagactattctaccgacttgtccacccatatctcatttcctccgttgccatactttgcccttaccgctctgccaagtgtaccactcagggaagacacgatacaggatgccccgagcctcctcgtgtagcctatttgtctcaaaatatgctgtgagcattgacctatcagcacctggacggttgacgactcgctcgaccatttggcgctcgtgaaacgccaccatgtgcatgtttggaagatggagctgcaactgcatcacaggtggagagttctgactaagctcaaagccgtatatcctccataaggcctctagaggggtcaccaccttgc

SEQ ID NO: 93344 - DNA, 298 bp, Zea Mays
tagttctaagtgtcaatggagttgattaatgtgtagattagcatcgatgtatgcaagtttagagagagcacatcttatattatgatattagaataaaatttgattacatctaggactgaggcaataacttatagtagtgtaaagcaaggagcaaattgtgcagttcgggacatggaattaattgcttcgtggcccaatgagaacaggaaatatcccgatgtccctccaaaagtagaggggaaactcgagtgtttcaacaagcatggaatggaatggatgctcttgattgtcttgtctc

SEQ ID NO: 93345 - DNA, 496 bp, Zea Mays
aatagataaagggcactgaagtttgtcaggaccgacacttgaaatcgttagcccaaggaatacgagtgcgcacttttaaatgtagttttcttgaatcagtgtataaacaaaatccaacactcctattctgcaggcggttttgaatattttccctgtttataaacacagaaaacgagctgcaagaagaagtggagaagtgacatgtacttattacaggacgtcagtgctgagatctggctgctgcagccccgttcctttggtccttgagcttggcttcgacttcagagagagccttcttcacgtcctcgttctccggcagttcttggatcagcacctggtagtctctcaaggacgcttcccatctctccagctgaggaacacacacgacaataacaaaacacaacggcaaaaatgagatgacccgattgcgctttcggcgaaaatacttcccgcaccgcacgggggagactgcagttgccgaacagctcaacagcag

SEQ ID NO: 93346 - DNA, 627 bp, Zea Mays
ggccaatagaaaccttgacgtatgactttagcaacaagggcccttggtcccgaatgtgatccacatataccactgtggacttcatggagaagttctatgccttcggcttcagttatgcatttcaacatgggttgacatgggttgacttatcccctttttgtagagatgtccgttgactatagcgaagtctctgcttctgtgttttaatcttttggcttcgctttggtcagaggggtggtagtggccttgaagataaagggtgattggtgcccactagtcttcggccattatcaaattgactatccgatgcccatcgacgtcttgtgttatttgcagatcctcggggtttcgtacggctggtgtgccgactatgggataaaatacatcggatggcaagggtttgcccttcgctgctgctttagctaatgtgtcgacttcttcgttcttgttccgctcaatatgttgtaatgtgaaacctttgaattgtttttctaggcttcgaatagcggcgagatactgcattaatatgagctctttggcggagtaatgtttttcaatctggccggcgacgaccttggaatcagttttgataatgcaggtggtcactctgagggctcacagtttgag

SEQ ID NO: 93347 - DNA, 415 bp, Zea Mays
attcccttgctcaggtcaggtcaggtcaggtccatgcgtgtgttcttgttcaattagcagctcaacattctgttggcgccacaatccagtcagtcagaggctttcataagtgacgctggtcagtatacgggcttctgtgggtacatgactactgactacatacatgcttgatactgcatgcctgttcatcgtcttccatgtatgtatgcacctgcactgcacggccatggcagttgcacttactcttcatctgcatccattcatgttaccactgcatctcatctctcgtctgcactcaaccactcactcacccactgataatccatgttgcttgcaaaccatccaatccaagccaagctagtgctacctctgcatgctagagcagctaggagacgacgtagacacctttggttcc

SEQ ID NO: 93348 - DNA, 400 bp, Zea Mays
cttgggtgttacaatttccaaccccttaaaagagacttgacctcgagattaggatggagtaggaaaaagatggggaaattcagcttgcagttcatcctctctctcccaggtagctttatcttccgcatgatgactccactacaccttgcacattttgacaactttgtttctggtgactcgggtcagggtatcgatgatcttgatagggtactccgtgtagcttagatcaccctgcagtctgagttcttccattggtagtttctcttctaggacttgcagacccttttcaactgggatacatgaaacacatcatgcacatcagctaggtgactaggtaactccagctggtaagctacctacccaactcactttaggatcataaagcgaggcgacaacttcc

SEQ ID NO: 93349 - DNA, 379 bp, Zea Mays
aaacgaatcagccgtccccgatatcgacgaaccgacctccaaagatctcattgacggagaccgcgtcctcgcccctgcaggccctcaacaagtatcaggtctagaccaaagcatggcgtgacaacactgtcgtcccaagggaattcaacgaaggggacctagtacttgtaaggaccaccaggacagagtcccggggcaagctagagccgaagtgggaagggccgtacatagtcaagacaaaggcatccccaaatgcttacagactagcaacgtcatccggcgaagacctagaacactcatggaacatcaacaatctccgaaaatttttcatttaagatccaaggcccaagcgcctttgtaattcttcaaacaatatcat

SEQ ID NO: 93350 - DNA, 545 bp, Zea Mays
tgaggaagaggaggaggaaatccccttaattcggaagaacagtcggcgctacatagccagcggggagagtagtggtgttccttctccagctttgtctgctctcgttggtctgcaggaagtctctggcaaattttgatcagactcttgaagacatgatcccagaagatctgttgtctgagcccacagatggtggaatgatggaagtttgcgctgatgtgcttggtgccgggttagagttatcccgagcagcgtctcgtgcctcgtcgaccttggagcgcggtcttaagagtcgagaggctgatctagattgctccattcccatggaagtggttgaaagtccttcagccttagaggtggctgttacatagaactcggtccccaaggatgatgcttgcgtttacccagcccccgagggtgttgccggtgatgatccggctcgggtgggcagcgtgagctatgacccagcccccgagggtgtccgagcgggttctctttctcatacttccatggatgttcacgttgggtcttctcctccacattctggt

SEQ ID NO: 93351 - DNA, 485 bp, Zea Mays
aaggaaaaatctaaacatgaagaaaaagggaaaagaataaagaagggtagaatggcgcattgggcccaaatcccacgtattcggcccacaactgctttccccgcgtgctagacatttccagtcattgtgccgtgggccactccagtcagcctctgcttaatctagcgtacccgtttcactggttcgtggggtccacatgtcattccactgcttcgtgggacccatcctgcaggcgcagctctcttcttccccgtgcttctcggtgcggtagttgaccaacggatttccccgtggtgctcggctcgcgggagatgtggtggtgggtggttgacctagtataaatcagtgcctcgctcggtcgccttggtcttcgtgacctagaacccacgcagccatagtcgaacaccgccacctcattgttccaccgccgccgcaggcgaatacacgccggcagtacctcattagcagcaagaaccgacgcggtc

SEQ ID NO: 93352 - DNA, 534 bp, Zea Mays
tgcttgcaaaatccttgtagatgcccctaaccataaccttcttgtcttttgggattctttcctctttcgtcattaccttgctaccattggacaaatctctactcccttgaaattgacatgctcgtacccctagattcttcaatactcttgtttccaatacttaccttagaaaaactctgttgcctatttaaacattccagattatatgttcttaacctccttgtcttttgagatcccttcctattccattgttagatcattatctcttagcaatttatattcccttgaacttagtatgctcatatccttggagtcttgcatacccttatatttgttatgtatgcttatcttcataccccaatgtctatttaagacgtttcagttaacatgccattgaccaccaatgtttctcgatgatccattagcgatcattttatttcgcatatcctaggtgatctcgttgtttcgttataacttcccttggtaatgaatttttacttcaaccattcggttggaaccttacctatcttaccc

SEQ ID NO: 93353 - DNA, 401 bp, Zea Mays
gttgattgcacctatgacaatgccttgggtttcattttatattgttttatgattgttgtcaaggtgtattgttttctttgataaattagtctgagttagaggttgtttcgggaaaaactttttttcaagatggcatcaatgctactagtatattatatgagtctatttagtgagtttgcttgagttttaccgttggcgaatgtcttgatttgtataaatggcagaattcgagaacgaattcttttaagggggtagaatgtaacgccctaaaaattaaaccatatttataatccaaatatggtgtgtccaatggatgatcggaggccatagatgtatagatctcatcaagatgattccgatcaatcactagtttgccttgtttggagtccggatgggtcttt

SEQ ID NO: 93354 - DNA, 337 bp, Zea Mays
cttacaggttggagctcccacattccaaatggacttaattcggttgggatctatctctatgttatgttcataaatgatgaatactaagaacttaccagacgacactctaaaagcacatttatgcgggtttatttttaaaccataccgacacattttatcaaaggctttgcgcaaattagctatatgagaaccaaacttagccaatttgactacaatatcatcaatgtaaacttccatagtgtttctcaacaactcatgaaagatcaagttcatagccctctgataagtggcaccgacattttttaaccaaatatctaaacaacccattcaaataaac

SEQ ID NO: 93355 - DNA, 283 bp, Zea Mays
agagatttgagctgcttaacaaaattggcgcatacggtgttggcatctgcggtgttggaacggagtatccccaggagatggctgtggctgatgcacaaggcctgcgtgagcctcctgctacggacggagaacggctgcgggacgcccagaatgacgcccatttcccctgccatgccatgcggccctatcttcatcacaagctgaaagagggcagcaaacacagctgatcaaaaaagaatcaagaacgccactgcaatttgacgttattgtgtggtgtttgaat

SEQ ID NO: 93356 - DNA, 770 bp, Zea Mays
gttcatactgctaggtgccctggtgcaccgggagcatataatgtcgagtgtctcagggcacgagtggccctaaagacttaatttgttgggtgcctcgttgtgtaaggagccccggggttagacaggcatgcatcctagggcgcgaggggttgtggtgcttacttatgtacgccacgccatgtggcctcacaggctaagctagtgatacccttgtataagtcgtagtcagtgtcgaagtcttccatttaggggtcgtggtgcttacttatgtacgccacgccatgtggcctcacaggctaagctagtgatacccttgtataagtcgtagtcagtgtcgaagtcttccatttcttgagatcaggagaggtcccgagagcggtgacttccatcatggaccttgaagcagtcttctggacagggattattgagcgcgtcatggtagcagtcgagggtatgttctttctgtggggaaagatacgctgttcttgtgtgttacatgcaaggggagtgggtgatggtgagttaaaaatagtgagcacacggtgatgctaataagttatttccctgctatttttcctgcaatgttttttggtggtagattatcgttacaatctccttatttccctgctatttttcctgtgattttcagcacgatgacacatcttggtggtaatgcatccaccgccagcatagacaatgatgtgctggacagaagcagaaacttttacgagagaagaagggaaggcaagaagatggtagcggtagctatt

SEQ ID NO: 93357 - DNA, 1070 bp, Zea Mays
cttggggcacgtctcgtactccggtcatctcccccacgggtagagcggccggtgtagccgtcggtattgttcccgcgaccacgctagtgccaaggcggtccactccttttcaccaagtgatctgagtccacacacgggtgggtgaggtggacagaggagtttgccgcgacaggggcataacttcagtcggtcggaccgcatgtgttgttatggtcctgggcccacccgacgcgggcgcaatcctgcgtggggtgtaggttggttgaggtgttcgtaccttcgagtttgtcagggttgttccatctgagatcgagtgggacgagcctgcctctgcgatcggtgccctcgaagaaggcctcttcttggaaggaaccatgatgcggtgcacaacatcttctcgatccgcgatgcaggagagggatctaaagcggaaaacctccccagcgttgaagataatcggagtattgaagatgatagccatggagttgttgggaatcaatgtcgcaccccctacctagcgcgctagctgtcggcgtttatgacccaactgcgcaccacaaggttccccacatagtgcttttgagcaggacgacattgttgatgacgactcgatggtacgtgcagatgcacgtcagatcaccctacttcctgtcgggctgagtatttgagtatcactggtgaatatggattacaaatgagctgtggcggtagagagtgagttctcttgtcgatctagtggaggcacgattgctgtgagaggactaatgaggtatgaggttgccacgagctgagatgtgatgagctgagagatgagatgtgttcaaaggggtaccccctcggccctatatagacgaccagagggttatcccattacaagtcgtgatcactctctaactgaatcctccttttaacatggcacgccttccagcttatccagaattcatttgcccttcatcggagtcatgtcggagtatctagcacttctggtacgctcaacctcctcatccgaggtagagacacatgactcggtcatccggtcttcaactccccgggttgagcgctcaacctcc

SEQ ID NO: 93358 - DNA, 445 bp, Zea Mays
atctcaacaatttggagtctctcacccttacacagttgatctcaaataaatcacaagagtaaggtggagtagaaacacacacacaagagacaaactcaaagcaacatacgcacacaagttgagagaggagcacaagagaaaacacagcagaattacaactcaaacacttgctcgaatctcaaactatcaaagctctagcgtggtcatagtgtctcagtgtagtggaatgttcaaaggatgcttggtgtcctgatggcaacacctaggagcctcttatatagcccccaagggctaaaggagccgttgctccttcattaggaaggccctaattgcctttggcccgtgggcacaccggacagtccggtgcaccatcggataatgaacagtgtgtgattcccttccttgtttggcgaagccgaccgttgccatctatggtcccacggca

SEQ ID NO: 93359 - DNA, 579 bp, Zea Mays
ttcttccttttctccttgacaagtgcagtcgggcggttcactcggcgtggacgctttgggcgggcaccttcgggtttccgaatttccacctcttcatcaaatgcttgcccagttgtgatggccattggctcggtgcgggtagagtcggatgattccccagccagcaggctaagaacaacatctatctcagcgtcatcagtgcaagctggcatctcaaagtgagtctgtctttcatcctcgggaagactccgaagtggagcaatcaaagcctcaatgtcctcagaagagggtcgcactctaagacccaggctaccgtcacaagaaggagggttggacacaaacttagataatggcctaagtggtggcaggttccatgcagaataggccacacgagcaccagcatttgaaaccctgcccctcaagatcatttccagtcgactcagcagatctttagtgggaattattctgttcgtgacccaggtagaatcgttgacaccgctatacaagtaaggagggtaggccctatcctttaagggttgaatgttcttgaatacaaagtcagcaactacagcttcagca

SEQ ID NO: 93360 - DNA, 331 bp, Zea Mays
ctaatactttgctctatgcctatgacactgaatctagaactgtggatgataattaataattctgagacttttctaccggtctgtgatgattttatatttaactgttgtctatacttgcctatgatgatatgttttatactgatgatcaatcaagggagtatgacttgttgttttgttttccttgctcaatttgtgaattttgcctgtgatgaaatatatttgactgatgaccattcatgggaggttgacttactgctttgttttccatactcttggttttcttcctgtctatgttttattttgggtcaggcaaccaaacataatctatcct

SEQ ID NO: 93361 - DNA, 700 bp, Zea Mays
gcaagccttgatgatcttctcaaggaatttggggataccttagagaaagagttcggtagtacctcagggaacgctctcgtgtagttcaacctgtagtagtcttatgcttgtaatgtattggtgtaatgaataaaataacttggttgaaaacaatttgcatgtgcataatagtgactctcttccctggcagatggcttcggataaaaccacgcctaccgcctccaggattggagcagggtttcccctgagagctgaaggggaagccgttagagaggaaagtgaacccacctccccgcacctccaccactacccttagacctagcccaagttctagccaatcaaacccgactcatcaaggtcctcactcgaagtctggaaaatcaacggccaaatggtggaagaccgcaagacataatgggggatttcctaagactcaaacctcccacgttcgccggatcaagcaaccccctcgatgcagacgattggatgcgcacgatcaagagaaagctggaagccattggttgcccagaaaaccagcatgttcaactggctgcccaccaactttccgagatggccttagcctggtgggacaccttcaacgtcaccatcagagatgctacctgggcggaatttgaagcagctttccgggagcaccatgtgccccaaggactggtacagcttaaggaagactgtaacaccc

SEQ ID NO: 93362 - DNA, 461 bp, Zea Mays
ctcctactgctgccctgcgcctataatggcgcccagtcataacatcagtatttcacaaagcaggcgcccagtcataacatcagtatttcacaaagcagcttgtacagttcagttgccacagcgatgcatcttttaaattgataaacttccttgcaagttgttataactcttataaagactaagtgtcactatcaactgtcaaccacatctttagggctgtaatggaaataattactggatgtgtcaaagtttttgagtaattggctttactcagtgcttttgaagaacatgaaagcatgccatattaactaaattagttacattattagtcatggagggtaccagaaaagaaaacaaattgcaatacttgcctagtatcagatggttgctactcggcaaaggctgcttatgagggcttctttgcaggctcaactttatctggcccctacactagggtgtcg

SEQ ID NO: 93363 - DNA, 323 bp, Zea Mays
ctcaatttatagtgatcaacagcggtggtgcccaatttggggaagacacgctggcggccggagagagggggaggtcgctggcgcgagctatcgtggctttcactgaggcaatgactctggcgatagacgagctatctactgcggtctactgtgacgtggtgaaatggctgacgatgtggcatgatcaagggaaacggcgacacgatggtggtggtcgcgcagccatgtcgtcggtgcaagtgggtacgtcaaggctggttctatcctttcccccattgatcttttcacgtctatgataatatcctgcctgagctaagcacgaa

SEQ ID NO: 93364 - DNA, 524 bp, Zea Mays
gaataactctcttccgcattctgaattcattataacttgtttttatcctaaccccgggtgaagtttgtgttcaaagtttataatttataggttttgtcgattcaccccccctctaggcgactttcactcatgttgtttgtcataaagaatacgagacaaccaggcgaccccggggcccacgagcacgtgtggcttcaccccgagtagaacgcctgattttacctttgcttggtggctccttcccggggaagccactgttggctgaccccacccccggcctataaaaggaaggggttggtccttagacaaatggatgcatacacgcacagacgggccctaaacaagaagacacccagacggatcgacgaaggggaggagaacacaccgacgaggacccaaaggccgaagcctcgccaccaagcaagacttagctaggactccactctgtaacctttagctccacttccacccccgacaagagccttgggagcgtctcctctctcgctctctcgcccgcttgtaac

SEQ ID NO: 93365 - DNA, 527 bp, Zea Mays
cagtcagcctactacaccctcatagggggcacactgtacagaagaggtgagacgggagtcctcatgaagtgcattcactcggctattgggaagcaactgttagatgaaatccatgttgggcagtgcggagtacatgcagcgtccagaactctggtcgggaaggctttcagatcttgtttctattggccaacagcgaagagtgatgctgccgagttagtctagagatgtgaagcttgtcaattcttatcaaagcaacaacatttacccgcgcagcagctgtagaccattcctgtaacatggtcgtttgcatgctgggggctggacatgattggacctttcaagaaagctcagggaggctatactcacgtactggttgccattgacaaattcacaaaatggatagagtacaagctcattgcctctttgacctcagccaaggcagtggaattcatacaagacataatattcaggtttgggataccaaatagcatcattaccgacctaggatccaacttcaccagctctga

SEQ ID NO: 93366 - DNA, 504 bp, Zea Mays
ccccagtttccaatctcttcttgcagggcgacgtttgggcggtgccaaacctgacgttgcaaaaagggcttagcttgcctttcctttgcaagaaagaaaaaatgttgcccgaaaggaaaccaccacccattttctaatggtggagcgttgaattctgccgcgataaaatgttcgcgtgttgctttcgcagccttttgatttgcttgtgacaagaaaaccgcgaaatttccactcccgtagttgcgctccatcttgcttacaactgtacccaagctcgagatccaatgtctttttttttgtccccgtttcgtgcaggtggcttgcgcaaaatatgttgaagcaacggggagtatcatggaaacacgctcgacagaagttaccgcaagagcaaggacaagattcccgtcgcgggcatgactactgatgcgtactgtgtcggttttatccaaatcccatcctcagcaaagcagccgagatgcagtagtacgtgtacgtggacagacg

SEQ ID NO: 93367 - DNA, 511 bp, Zea Mays
aaataagggggatagagttccccaccgatttgatagttatgggtaaccaggatacaactatagatgtcatcctagggatgaattggctaaccaagtatcaagccagtcttagttgtgataagagaacggtgaagttagtatccctatcaggagaaaaagtgttagtagagttggtcttgtcaggaccaaggaaagggagttgtcaccaagtcaccgcttgtattgaggagattaaaccattagaggctatcactgtagtatcagatttcccagatgtgtttcccaaggagttaccaggtatgccacctgaaaggaaggttgaatttgccatagagcttattccaggcaccgcccctatttccaagagagcctatcgagtgtccggaccagagttggtggaactcaagaagcagattgatgagttgtcagagaaaggttacatcagaccgagtacctcgccttgggcagccccagtgctgtttgtggaaaagaaggatgacacaaagaggat

SEQ ID NO: 93368 - DNA, 402 bp, Zea Mays
cgccagtggtgggggtggtggtaattgagcccaggaagcttgagagtgacttgctgaagcagcagaagccatatgctattgattgcctacgtattccgtgatgtagagtagcacgaatcagtatgcatgacctgcttcggctgattctgccatgcctcggcttcagcaagttccttttgcttttggatcgtgacttggcacgtcctcgttgtatgtcccttgtcctcgccacagaaaaggcagaacaattttctgggttgattaccgtaccttcctccgccaaagcttcaccctctctgcctctcagggatggtggtctgtaagaagtctgctgcatgcccgaagactgtgagctgtgctggctgctctgagcattattggccctatcattgctgacatgtc

SEQ ID NO: 93369 - DNA, 987 bp, Zea Mays
atatcctctagtctggtagcttctgcctcagctatgttttcaaagaccagccttggtgccccaaacctgaggtcggcaggcagcactgcctccgaaccatagaccatgaagaagggagtgtttccatgcaaagctcgactaggttgagttcttaggctccaaaccacatacgacaactctctgatccactttcccacgaacttttcatttttgtcgaagactttcttcctgagtgcttccaatatcattccattagccctttccacctgatcgttggctattgggtgtgctactgacgcatatttgatctggatgcttctttgttcgcagaaatcaaagaattcagagctagtgaaattggatcccaagtcagttataatgctattcggtattccaaacctgaatattatatcttatatgaattccactgccttagctgaagtcagagaagcaatgggtttgtactctatccatttagtgaatttgtcaatggcaaccaacacgtgagtatagcctccctgagctttcttgaagggtccaatcatgtccagtccccagcacgcaaatggccatgttacgggtatggtctgcagttgctgtgctggtaaatgctgctgctttgataagaattggcaagcttcacacctctggactaactcggctgtgtcactctttgctatcgactagtagaaaccagatcggaagacctttccaaccagagtcttggatgctgtgtgtatcccgcactgtccgacgtggatctcatctagcagttgcctcccagtagccgagagaatgcacttcatgaggactcctgttgcgccccttctgtacagtacctccccaatgagggtgtagtgagctgactgccttgcgacgcgttctactgtagctttgtcatccggttcctcttcattctttatatatctgatgatgggctccctccagtcattagagtctgactctggctggctcaaaacgttacac

SEQ ID NO: 93370 - DNA, 281 bp, Zea Mays
ccatgtctggtaaccatctattaagtttggggtgaaaaccttaggttgttggacattattttgttggcttttctcctaaggatgttcaaaatacgtgttaggtgtcctattaatgccaccccctcctgctctatatctctcgggctctctggtgtccaaagaatattcggccctatgcatatgaggtggtatggtgtggttataatatgctatcagtgcggtagcatagtgctgctgtgatgggtgcgaaaactgtgcatattgcgtagcctctggttcgg

SEQ ID NO: 93371 - DNA, 836 bp, Zea Mays
ccttaaaagaaaatacctcttaccccaagaaaaatcttctctcctttcccccgatattaacagacccttcttttcctattccagatggaagactctctggtcattaggacatcctactgctcagaggtggaggggttcccatatctgctgcgaagttgtgcgctttgcatggggatctgcatgaagccagaatatgtccagaaagagtatctcgagaatggaatggagaagtgctctatggcagtctacctgggagaaagccgaaactacccgaaccatccttctttccaagtcactttcaccgaacaccgcttcccagatacttgccaaaatgttgcccggaaagccctccgacatctatgccagaactacagcagagtaatctttgaaaccccccttcgctacttcccacccagcaacaaaaatacccccgcctggaggaaaagacttcaggctctgtcagggagagaccctaccgaggatgaccccaccatcgtctacgtggctggatacctccacactctcgataaccaatatgatgaccttgcctcccactgcactcacctaaactcccgagtggaaagcctggagcaacaagtcagggaacttacaagggaaaaggcgtcccttcaagagagcctcgagatagcggaaggcgaggaaaccaacacccgtgaggcctaccgaactctgaagatggattacgacaaaaagctaaagaagctcacccccgtaagaaaaatctgcaagaagaccagaagccaaggatgccagactgagcagaaggaagaagcccctccagccctacctcctaccaggatagggaactcgtccga

SEQ ID NO: 93372 - DNA, 634 bp, Zea Mays
tatagactagataacaaaattctaatttacattggtcgatgattaccttatcatcagcatatatcctaatatcttgggaaaccgatttttaatgctgagcatctgcaatactgtccaagtgattaacttattatgcatttgctttttcagactaagcatttagtcatcgaaattctgtacattgttctttgttgcaaattctctctacaccctgtaggccagtctctgtattaagttatcacaagtttaatgtttttcttgctctttgacttattgcaactgattgctttcggaggtgtcggcattctcaactccactgtaagtctcgttttttatcttttatagtagtatttttacggacgaatcaaaccgaacatcaacctgggatgaattttgggcttgtgcctatctggtttacacattcatttgttttaggttctagccatattaagatagattcagacttcacgtgttatactgatcctgtatatatttagttcacttcatatctgcgctcatatgctctactaagtatctcagcaagttacattaggccacgcgtcttgctttagttaagttgcttcgtatgcatactcttaccactgtctgttttcatgaaaccaatataactttt

SEQ ID NO: 93373 - DNA, 302 bp, Zea Mays
tggagtgtttggtgttgaatgggcagattattattgcttagtcagtcaaacttttgtttgttttattttatttgacgatgtgacagacaatcaaactttagataagatattaatattctacagaatgaagctccacttctcaaagatatttggttctacttctttatctattatatatattattcgtccgaacttaagtccaaattgggcttcattattatgtcatgtcagattattaaattaacatcattagtttggtactttgattgaccagctaatactcgtagacattttctgagcaa

SEQ ID NO: 93374 - DNA, 494 bp, Zea Mays
cgcacggggcacctaactagtatacatctatgttgttgcatttctaggcagatggtgtggagcctcttccatgccaccggggcgtgcaacaacttttctgcctatgcgtgggcgctatacatggccaatgggttgtgccgacatggcccaagcccgttatcggtcgtgctgatttaacagataaatggtaggtcatgccgtgttcgtccgtggaccgaagtctcagacgaagcatggcccaactagttttaaacatgtcatttcgtgctatcgtgttgtatcgtgctaccgtgccgacggctagggccactcgtaacatagctcgaaaataatttattttccctattttatattgttcattttctcattttttgtaacagagctcgaaaatagctcgaaagtgggatcgagtcagtcatagttgtatatatggtgggctagatcgggacgagtgaggttaggctacaaaccgatcgtgttgggttgtgctcgac

SEQ ID NO: 93375 - DNA, 1156 bp, Zea Mays
cacacagttttcagagggaagatcatttaccccattagttttcatatacgtaaaaacttgctcaatatcatcaaactgcctgtacctgcaatatcctgcaagaattatttaattatctctcttggtttccacccctagatgacctagccacaagaatgataaatccttagagagcacacagttttcagagggaagatcatttacaccattagttttcatatccttaaaaacttgctcaatatcatcaaactgcctatacctgcaatatcttgcaagaattatttaatatgttgaaagattgggtgttacttctctttcaactatgtcttcgaagacatactttgcatttctgtacagtccctccctgaacgccacctaaaatagcattataagaataaactccaggtttaatatgcctagaaaagcactctgataaatatacatgtgcagatttcagtttcgtttctctacagctatgaaatatgaaaatttcaagagtcgaagcatctggagcaaaccctaaggcctccaatatttggaataacaaccatgcctgatcagtgccaagatttgtacacacagacacaaagattttgttgcgaagacgcaactcaggggaacatctccactctttccaacaaattcatcatatccccaatttgctttccttgttaaattcttcttctatagttgacaaggctcccttgcttaatttaagatccaaactctttagttgccgaagaataccaagagcttgcagaaaactatctttcttgattaaagatatggcaacagaataaataatacctcctttggtgcaagaaccaaatccaactttaagtatgtccacatatactcttcaaatcaattcgtccttttttgtttctgatcagaaaatgaagaagtacctgatagcatgaaactgaaggaatcaaatgctcacaccttgcataatcataaagtgcaactgaatgatttctcaaggttgtgtgcttctgtatactcctgggtaatccaactgaataattcacttgaaacagtcggagccatatgatcaaccaatgagcgcagtagcaattgaggtggtaatggactgagcatatgagcatctgcaagtatggataccatcgtctcatttgaccttggcagacagtgg

SEQ ID NO: 93376 - DNA, 941 bp, Zea Mays
gtgttctctgccttcaagcgtacatcacgatcatcccttctttccataaatgatgttttaccatggtttttgtgagcccaaacattgagagttccttagtcagtatccagtgcctcgatatgagtgtcaataattatttgctagtgaatttatggggtaggtcgtgtgatcaaaagttgaaggtaaaggaagaagagacatgaatatttatacaagttcgtgatctttatgtgagatagtacatgttggaggttcttgtgccaatttggattgtagtccgtagcgcatggataatgatgtagcctttcacaaggagcaagtatcatattttccacagagaagaaacatgctagaggtgaattggctaactcaaacttgaaatgagttgtaaacttggtaagtatacacactggtaattagatgggcgtaaatgcaatccaaagatacgtgtatgaggaagaaaaggatagggaccctaattgtcaatagatatgtaaattttcctggacggacaacgaggggtaaaagaatcaaaatatacttttactattctgtaaaggattaaccacggttaacctattgataatcaattacaactagcttcgagcaaaattttacgctattaagggtcctatggaaagagagaggtgtgacaccaaaagtagcactggacgacagggtcaggatacacaggccacgccctcgttgtcaccaagagaggctaccaagcatagttgtgtggacatgatggcacattataaagtgttcaagtagagtttgaaaattgaagctcctccttagcaatagggacagagctagccagcttagtggccaggactagtagtggcttataacacgagcaagagacaagacttgatgaacattagactaacataatcataagccttgagttaaagtgctcctagactattgcaacaata

SEQ ID NO: 93377 - DNA, 477 bp, Zea Mays
cacagatgggagtagagatgggagtagagcacgatcattgggcacatgactgatacatgagcggacgcgaacacgggaatcaacaacgcaatcatatcgagctatctagagaaacagccatatggttctgaaaccaaaactgttcgtcgcctctgttccgggcccgagaccgaaactgtggggtctctcccgtcacctcggcagcgtttctcgactgcaccgaaacaaccgtctcaacaacctcccagctcagatgggtccaaggaccgagcttgcgaaagagaagtgccaactgccagtgagtgccaagacagtggaactaaaagggcacgatccagtgcgtcatcagcattggttacatgatctttcccaaatacagcacgaaacaagaggtatatgaagcataacccgccatattttgttagtcaccatcacacaaccaatgaacacccactacacacacacacacaaaactac

SEQ ID NO: 93378 - DNA, 640 bp, Zea Mays
gcgcgagacgtcttagcctaggcactggcgtggatgcggtggggcaatgctccaggcgctgtcgaggggatgacttgccactggatggcacatagtctcgagcagtctgtagatgaaggcttggcgccgagctagacgggtagtgggaggcgaagaacattccgcgccgtataacggcggactcgggtcgtcgctgccagatccttggcgctcggccgcggcgaagtggtctggagagagaaaagagagaagggagagaaccggtgatgaagaagacgcccgacatcacttgatcatgcgttggacggtaaggattaaagggataaggatgaagaaaccgggaccgtaggatggtgattggagggggtagatttatctcgcgtacccgccgttcatcacgaatcgcacggctttgattagaagcaggaaataccccttcatcccaaccgttatccaccgtagaccggcaatctgacgactaaagcgaaatagtggggatcgtgcgctgtgagtcgtcgatctcagatccgacgatgactcgggaatcaggatttatacccatcgccggtctaatctgggcgctcggggttggatcggacggtccaaacatcactgtaccccttcggccctgcacatttcc

SEQ ID NO: 93379 - DNA, 434 bp, Zea Mays
caactcttcaaaaagcacatacttggtgtcgtggcagcacatgcctatgtgattgagttccaaaaaagaggtctaccacatgcacacttccttcttatcatgtagacaggcaataagctaactgttccagaccagtatgacgctgttatatcggcagaacttccagataagaacagattcctagaactttttgatatggtagtcaaacacatgatgcatggcccatgcggacatctcaacatgcaaaataaatgtatgaagaatggtagttgcaagtgccactatccacgactatttggtgagacaacgcttcagggcaaagactcgtaccccatttacagaagaagagatgacagacaaaaagtacgagtaagggggcatgacttggacaaccgttgggttgttccttataatcctactttattgaggatgta

SEQ ID NO: 93380 - DNA, 406 bp, Zea Mays
cattgtaaggagtatcaaacaagaagaccaaatttcagacttataggaaacatttgcaaatttctgaagggctggtctgaagcttaatctagagaaatatgtattcagaataaagaagggaaaattcctcgactgtttagtctcaatgaagggaattgaggcaaatcctcataaaatggaagacatcattcagatggaaccaccaaagtcaagaaatggagccaagcagcaggcaggcaggcttgcatctttgaaaagatttatctcaaaatccgcagagcgaagcttgccattctttgaggttttcaaatcagccaaagtatttcaatgggggctagctcaataacaagcttttcaagagcttaagcaatatttggtctagttggcaaccctctctctaccttcg

SEQ ID NO: 93381 - DNA, 960 bp, Zea Mays
acaagcagcacccccattgggatcagcaacagatggagcacccccattgggatcagcaacagatggagcacccacattgggatcagcagcagattgggtacacccattggggtcagcatccgtaaatccagtcgcaggcacttcttcagtagcaggaactaaggtaccagcgtcctaatccaaactggatactcgccggaggcgtcttcttttcttcttctgctcatcagcagaaggatcaggctgattggctcggcaagggcgcctcgggcgagtactgacaggcttctgagcatccaaagttatatcagcctctgggaggggcaccactaccaacgccccagcaggagcagcgtcggaagaatcctcagccagcaaatcaagcataacacttatctcagcatcactagggttcaagggcacctcaaaatggacctgtcgttcatcatcaggaatctccccaagcgaagcaaccaaggcactaacttcatcagcagaggtgtcgcactctaaggcccaaactgccatcagtaacaggtggattcgacacaaaaagggtgaaggctttgggaggaggcaggttccaggccgagtatgccactggagcaccaacatttgacactttgcccctaaggatcatctctagtcggctcaccaagtcggcagagggaattcttctgttggtaacctgagttgagtcggctagccctctgtacagataagctgggtatgccctgtctttcaatggctgaatattcttgaaaacaaaatcagtaaccacagcttcagcagtcagacccctctctttcagcagtccaacttcagctagcaacataccggcctcagctacctcctgatctgtgggagactcggtccagcttggggtgcgaacgtccggctgtcttcccgaccgggaggggagagaattcccataattctcaactatgaaccactccaagc

SEQ ID NO: 93382 - DNA, 437 bp, Zea Mays
aacaaatctccctgcaagttgctctgacagactgactgaataggcagcgtgatggtacagtgtccggatcagaacgccagactcagatgcctcaccaacgatgaccgtgcgcccggatttgtgcctgccgcggtgattcgtgcccagcgcagatggataacaacgaagggtaaaaatcttggcgctcggattagctcgggctcgctcaccgttgcgcccgtcgtacccacttgaaccgcagctggtcgggatcatcctcgccggcgttagccgctcaacgattgtgcgccacgtaccttggtgtcttaccgcgtcgcaatagctcgggttacacatatccggtgatcgccgatgaactcgccacggtgaaagcaaccaatctcttgcgacagtgcccttttcattctccgaccgccaccgcgccatctcaaattccc

SEQ ID NO: 93383 - DNA, 521 bp, Zea Mays
ccttttggtgccatctttcttctccacgaacaagacaggagcggcccaaggcgaagtgcttggccggatgtaacctttctctgacagttcatcaatctgctccttgagctcaaccaactctggtccagatattctgtaagctctcttaaagataggggcggttccaggaagaagctctatagcaaactcaactttctgctctagtggcatacccggtaagtcctttggaaacaaatctgggaacttggacacaaccttgatactctcaattgggtctgcttcactgctatcgacagctatctgataacaacttcctttctttggctcaggcgggactaactcggtcaccacttcctctcctagtggggacaccaacttgattgttctcttatcacaactgataactgcctgatacttatctagccaattcatccctaggatgacatctattccctgagtacccattactataaggttggcgggaaacgctatcccccttatttccacacatacattcaaac

SEQ ID NO: 93384 - DNA, 415 bp, Zea Mays
tccacatcgtctgtcataatgagcatgagcagagacgaccaggctgcaagacgcatacggacaatgcggcctcaccagggtaaaacacccgattttaccatggtatagtggctccttctcaaggaagccaccgacgggcgacgactgaccccaccatggcctataaaagcaggaggtcgatcatgaggacgggattggaactccagaaccaaggacgctcgacgaaaggcaatgacacacaagacctaaatacctcaaggccggagccaatgattagcgtaggactcgagttccgtagtcttttaggtccacccttgcataagagacttgggagctcatatttttttcttgctcgcttgtagcccctactacaagcatcgagtaacaaagatgtcggtagcacaagccactgaat

SEQ ID NO: 93385 - DNA, 417 bp, Zea Mays
attacgatgagtagagtataggaattacaatttcgtataagaagaatgagttttcctcccttcaatccaaaggtggtcaatgcatggtattgttcctctatttataggctcgagatatggcttaggcgaatttataattgtatccttaatctttatacattcaaactaatgtacatgtcagaggtaaagatgtccttcttcttctctcactctgaaggttgtttgaatcatgctttgtctgaagcttgtacacgatagtcgtacgaagaattcttcttcgaacactcgcatgtaatgtttggaacctaccttcgacattaaccctgcagcatacatacaataaaacaaaaggaatagtaatcgggtgagtgttttgagtaccttcggaagaagatccccaacagtagtcctttccgg

SEQ ID NO: 93386 - DNA, 368 bp, Zea Mays
gggccatggattactgtgcgtgtgagggataaaggaagaagattgatccaaataatattggttattgaatttgagtgagcaagagagatgagggttatctagtgaactaaaccgttgattttgagggtttgttatgtgtgggtgcaatatgtttggtgaaattaacagaggttatgtgaaagttccctttatgaggaacatagatctagatgtcggctatctggggtgaataggcgaataaaaattaacactaataacttagaactttcttactctacttaaagtttgatctcagcagaatgaagatcatgtcgattagatcgtagcggaatacaagcccttgtttcaaaagatcatgtgtttcaaaa

SEQ ID NO: 93387 - DNA, 923 bp, Zea Mays
tttggtgataataacagcaagtttgcagaattataaccacaaagcgacttgttgttgcgtgtcttgctggaagttgagactaatccttcacggttaaggacaaatatgtagtattcatgccactacattaatctaagtcaaaagctcactgcataaaacccctatctataatgtgcgtaagatttcccaaataaatcaccacaatagcatacattgcccacaactggatgattgtggttggggattttatctgtatgcttttagaatatctcggcattagggggaggaatgcccatataatgtaatgcctcaatattctattaaatgcacaaaagttaaactgcacatgtcgttcggtgtgtactcctgtgtatatggagtttgccagaaatcgttgaggagtaaccatattggtctgtatgcttctacctgatgtagatgtggatatacccgggattaatatcatatccacatttgacttattggtatttgatctattctcggggacgcctgcgaatatgatccatcggccttagtcaaagcatatgttctgattgcagattcacgtggtctgtgataactctcctccgattaattcaccctgatggtgatttgcctcatgaagaggttcatcttgatgatgaaattcctagcaatgcgcgcaatatcattgtgctgggaatacggaacaatgaatctctcgttttgggaaatgacgaagatcattattaaatgtgggagacaaatgtgtcgacatctatcttgcctctatagattgcaaagggatccaaaacaaagtcctaggcatgagtgtttgaagctctcttatcgggtcattgataaatgcaatcgaggctgaaccaagaatcgcaaaatgaaagtcgcgagcttgaagttcggacatttatgggcactattgaaat

SEQ ID NO: 93388 - DNA, 605 bp, Zea Mays
cacatagagcaagcatggggccgaggtgatttactgtgccctcggaattgcactcgtatgcttctcggatggggagctgggcggcgttccgtgcgtggtgggtggtcaacagaccggttgccggactggcgccgctgggggatggccctgtgccgctgtgccggtcgcctggggagggagatgatacgtaagccatggagtggtaaacggacggctgggattcggtcgggggtgtagttcggtgggatccgatatccaccgttggatcggtaatggatgggcaaggggtcgcggaccggtgatccatccgtgaacggtcgagattaaaacgtcgacaccgttttgggtagatcgcttccacaccgttgatcatcacgtctaggggcgagtcaaaacagtaccaccggtcttcacaaggaagaagatgcactgggatcgtagatgtgtggatggatggcccagattgaagcaacatgtacccttttgagttatttaatcacagccgtcgatctctggttgtgtggctcaggttatgtactcgagtccgatctaatctaggccaccgaatcgtgatcgtgcggatgtcgtttggccgtaccccttcg

SEQ ID NO: 93389 - DNA, 377 bp, Zea Mays
gttgttcgtggagtccttgaagatgattctagcattgttctagtcacctttagaacaaaaaagaatttacaaatagagtttttgtagtttaggtggcaaatattaatgcatctcaccattacgatcatcaaaagaccaaggtttgcaaagtttatggtcatcccaccaccatgtactaaaggaaataaggttgtggcgttttagccataaactcaatagtggagatgacgtgcagcttccgataaaggccggaatagaaggaccacttatgtgtggaaaggtatgaggctatctacggagttacctaaacgagagattaacactcgcatgggcttccttgcatagggctctgccgggggctaggaagaagcttgcac

SEQ ID NO: 93390 - DNA, 443 bp, Zea Mays
gaggtggtgggtgcgtcttggagcatgccaattaggagctcctgcccgttggagcaagtgtcattgaagcttaaaaggttagctcgcgtattgtagtcctgggggcataaagaagtgggtaatgtgaggatgcagctagggcttgtcagagaagtgttacataggatggaaatggcacaggatatcagaattttgtccagtggggaagtttggttgctaaacatgttgaagcaacgttgccttagtcttgcgtctcttgaaaggactgttgctcagttgagatcgcggatccactatctaaaggagggtgatgctaacactaagttctttcatttacaggcatgttatcgaaagaaaaagaatttcatttccaaacttgaggaagatggaagaatggctaccaatcatgaggacatgcaacaaattcttgaagagtatttttg

SEQ ID NO: 93391 - DNA, 283 bp, Zea Mays
gattttactgcaaagcatgtactggctcaagttttgtaggtttcgattcctaataatgtcagccttgctagataagatgagctttttaaatggccgactaaatgcaatgtgttgtctatttgaagtatacgcccatgctaaactgttatactggccatattgcttgtattgttctacaagtgtataaaattgaaccttacagctaacaatgtacaatatacttttgccaccgttcatctggtttgtcttgtctcatgatgatgctgtttgtaggctggctaca

SEQ ID NO: 93392 - DNA, 581 bp, Zea Mays
gtcagtgaagctctcaagactcgatgttcgaactctactcgccgtcatggattagcactggggacagcctctgcgctgaccgtccaacccgtgtcatccctgctcgatttcacgagagcaccgtaatcatggtaggtctctgatgctcctcgcgtcgtttgtgtgagctctaccgtgcagttgccgcgggatcgagctcgcgggtctgtgcttcccgtcgccgccgtcggtagcctaggttctcgggtccccgtggtcgattaagcccatgtctgagtccgacgttgttcggggttcgtgatggtgccatcgccgtcgtttgcgtcaagccaccttggccgattgggcgctagttcgccggagcaccgcgtggcggtgttgtaggcgagtctttgtaaagaaccgaagctgaggggtttatgtgcgtttatcagtgagagtggccaacagtggatagggcctttgcttgaatgttgttggcggcagggttcctgacacaaaagcgcgcacacagagcatgggctgcccgtgatgggccagcttgccttgttacgcatgctgtctgggctaatttgggggcc

SEQ ID NO: 93393 - DNA, 330 bp, Zea Mays
aaaaggcatcttcggcagatcagccgaagccagtactcctgtgtgatgatattgctaatcagaaagcctacttcggctaccagctatcttcggagcaggagtctaatcttaaaagattcctgtttcacaacaaggatgtctttgcctggtcagccagtgacctatgtggagttgatagaagcataattgagcatgctctaaatgttaacccaggcaccaggccgcataagcaaaagcttcgtaagatgtctaaggacaaggccgaaggtgcaaaggccgaagtcaagagattgcttagtgccggagtcataagagaagttacatatctag

SEQ ID NO: 93394 - DNA, 548 bp, Zea Mays
aacacatagaattatataggtttgggttgattagatgcataatatcctacgtcttgtgtgtggatggcaatgtattgtttttgagatctgtattacaaagagaatgagcgtagtgttgtctatgcctataagaggatccaatcgttttataggggtacatattctatcttatacatccaacaaaattagggtttacatagttgaactgaatgttattaatctgtgcttatccacgaaactaactctgacttatctgtgattaggtgagctttgaggcgcttatctcgtcccctacatgcgtgggaatcggctagtacaccttcacacccacacaaccgatctctacgtccgcttctggttgtgtccgactaatcagctcgtgaagcctatgcgcctgtcctattgagaccttataacaacccataaatcgaaacaggatcttggggactcgagggatatctacccccataagcccatgagctaccccacaagtatcgccaatgtccatgggttggttgggtgggggtgaggtggctcctaacctgtgc

SEQ ID NO: 93395 - DNA, 738 bp, Zea Mays
ctttccttggaaatccctaggaaagccggaacaagacaacggacagcgcaacctcctgcgtctcaggcgaagactacttcttgcaagccgaaaaccgggaatttacttgcctgaagaaccccactgcccacttcgcccacaaaggagtggccgcggattacaagaaagaaagaagcaagcattcctagaaagggaatagagctctaccaaattatctttccagcaccttcgccctcaaagaaggacggaaaggaactcaccatcacaacaactcctttctaccccgacatcctcttcatagggggagattggaatcgtctcccatctccgacgacgagccgaccgtgcatgaggaagagcctccctagcgagaagctcgacgacgaaggaacagacgccggagtattcggcggtatcacaaagttggagagtgggacccagcgcagcccgtatctcgggatgaagtttcaaaactgggtgaaacccccgacgagcggttataccgagaaaggcggaattctcgccgacgtgaccaccaacaagctcaggaacgagatcgagaacaagccgagcagggcacaaggttacgccgagagaatcccctcttttctcaaaacctgaaccctgacttcgctcgcgcaatgaacacgctgagcgaagtcggaggagtgctggcctagatagctgatggcctctcgcagactctggatgctgaaggctatcgatagctgcttactc

SEQ ID NO: 93396 - DNA, 733 bp, Zea Mays
agaaatttaacttctttttcataaaattgggatatcacactctacccccttaaaaaaattcgtcctcgaattcgaccactccaagcaaagcatccaaggtaccccatatagcaccaccattcaaaacatgggtccattattggtcttaattaacacaagaacttctacctcggactaattgtctaagtaaactacacaacctgatatctagcatgaatcaacatgcaatgaagctcaaagccagtcatagatgcaatcaaaactacgattttacaccatcgaatttggatgcaactatacatcaacatcaatgtcttcaaacaacactcttttatgaaggggtaatatgcactaagcacaacccttaccagcttcaacaattcattttaattcaatggtgaaacatccacactagatgaatgtataagaagatcaaacgcctcacctcaaagcaccacaaaacatgtggttctattgaaacaaaactcctaatctttctaaaccatgttcttgccatcatgaaaagataatcatgtaatctcacattctttgcaccccacaaaagggagaaagtctacagaactaatggagcaataaagccgacaagaagccaataacattctgcgcggcatggttcatcgaagaaatgccaaaactccacaaagagcactgacaacacaacaacaacacaatacttgcttaatcaatgtcattatacttcatccaaagctca

SEQ ID NO: 93397 - DNA, 391 bp, Zea Mays
gtgagaggctcatgtgtgagggaccgcgtggtgatcaagaaagagaaagaatttggcaccgatggacataatggaacggtgaagaacaagttaagttgagattgatgaaccaagaaggccatgtgatgacatggagtggatcatatcattaaaggggtatcaaggaaagtattgatttgtgctattaatcaagtggcttgatgaagggtgacgggggaacttaatgctataaacaatgatcaaaggtagcatggttggctacattatggatgaccattattcatcatttgttgaacgaccccccatgttgtgtgcaatagtcaaagcaccatcatttgaagatatggaattgaatgagcagaacaaaggcatatgtgggggatagatatcg

SEQ ID NO: 93398 - DNA, 991 bp, Zea Mays
aaaattttgtggcaaggtcattatccgagcactagacgtcgtgccaaaaggaggtgatttttcaatcatggatgacacaggtggtgatagcatgacagaggtggagcaaggacagcaaggaggcccagtgggcacccgggaggtcactagtgaggcttgctagatagacacagtagtggacccaaacacccaaagaggagcaagacaaagtgtggaggcggtggatcagcttaaggtcaagacagttgttgaacctttcaagatctcggacgccaaggccaccagagttttttctctcgagcatcgtgtcccaagggacaaggcatcgagacccacgaacaatatccttgcccgaccaaaggaagccatggcgacgttggtccagttttttgacaacccctttctgaagctggacgacacaatgtagtttaagtggatgtcatggacggatttgatgaagaccaagcacccatcgggttcaagagagacgcctgccaacccgcgaggtatatgtcagttttggatatggcgggggagaaaaggtgtaggcggagcttggtaggagagagggggaggccaagataggtctaggggaagccttccatatggccatcaatagaggaggagatttgttgtgtgtggtttgtgttcatatgcatggggatggctacacttttactgaagtagatttttaggcttgtcatggagctaaaatggttgagtgttggttttaggtgtgaggcatcctcggggtggcctttgaggaggatcagggtgtcgttggcataatgtaggaccgtgcagggttcgcggggggagaccgggtgcctgatgtgggggtcacgattaatgatcacctgcaacatgacggtgataaggatgaagaggtaggggacatagggttcccttggcgtagcccatgtttataggtgaaccaagggacaagggacccattcaccaggatatcagtttttgaggaggctagaaattt

SEQ ID NO: 93399 - DNA, 520 bp, Zea Mays
ataagttgatgacatcatcatgcgagctggaatatatccggtgcgtatgccaaacttggtccatgtgggcttaagcagagctttcggatgcagtagcaggagggctggaattataccaaggtcgattttgcaagtaactagttcttttgatgctaccaaaggtgcaaagcagcctcactcgctggacagtttcaagtgcaagttaagtatacatcgtctcgtgtcatatatataggaactgtcgtcctaatccttagggtaccctgtcatcagtgctgaaacattcatgtccaccagctgaactagtttttgcatgcgcccctggccctctcatacctttcttgtactgacattagcttgaaagaaacgatcactgttcgatcagcagtttgcgaggcatggatggcgagggagagaggcgcatggtggatagcgagggagagatacacatggatccggcgttgtacatggcggcgacgcaggggaaagtgtcgatcctgaagcaactggcggatccgga

SEQ ID NO: 93400 - DNA, 565 bp, Zea Mays
ctggaagacgttgatgtactcgaagaagagcgattgaatacggtgattcaatcagcgcgatatcagcaaactctgaggcgctatcatgataaggccatacgacgtcgatccttcgcagtgggagatctcgtcctccaccgaattctaacgggggagggacggcataaattgtcacctctatgggaaggaccattcatagtagcagaagtcactcggccgggatcatatcgtctcactcagatggacaacacggaaattgggaactcatggaacatagaacacctcaggaagttttacccctagctacatcccagaagctctcggaacgacgatgtattctgtaaatcgagaaaaatatcatcaataaaaaggtttcaaaggcactcagattgttcattgtcaattggcacgcttacttaactcggggtgaccactatgccctaccaatggagcaatcggcttaagtcagcaatgacttaagacggtgcgacatgctcacacttacttaactcggggtgaccactatgccctactaacggagcaatcgacttaagtcggcaatgac

SEQ ID NO: 93401 - DNA, 344 bp, Zea Mays
aaaacataaattgaaggcccgattttgctcttctaaaactgaaatagtgaattaattttttatttaattattttgcagatgatgttgccagtttttaccgcatgttgcagtgagcttatcctcaaatgagacgtaggcttcgagggtgtgcaagagatagatgtgtgcccagagttccaaaatctcacgggtgacatcatctcctgtgcggcgcgcgttcacgagcagcttcaatgaatggagaaggatctttcggttgtaatcgaagcagacacaaaacattgtaaatatggcaaataggatgcatatcccaacccataggtcgtatcatgttttgttcccta

SEQ ID NO: 93402 - DNA, 867 bp, Zea Mays
cgctgatactgtgtcacagtttttttcttcttcttcccaaagatcacaggttccttggatgagatggagtgggagcgagcctgcatatgtggtatggagtgcagtatggatcggaggtaagacaagcactgaagaaatagagcattgcattgcatacattccagctaccgctgaagaaagaatggaaaagagaggcgagccataaactgggtcctctcatcagaccgtcggaaaaaaaaaacactggctggagatattagaaattcaggtagatgtgcctcactgtatgagcaagcatccgtctttctcagacagccccaaccaccctactgtccgtgcacaatcaaggagctgagaggaggagctcacactttgtttacagccaacttgcattggccactgtatttctcaacgacaccgacgcacgcacgaacgagcggagcagagactaagaaaatggtgggcaacaaaacaatgcagcgtgtcctgtaggaactaggaaggaaggaaacaacgtctctctttctccatgcactgttggtacagagtaactgaactggctaccttacattattatcaggagaccttgcagttgcaggcaggcagttggccttctgaattgctaatggtagcacatccgatcatcaggagacctgcaaattaattattaaaaggaaatcgcatactatttcgtgtggattatttgattggtctgttgttttctagacacacaatgcgcgcgcggaaatgcgcccggtgcatcttggcatcttctctgtcccgtcctctccgggcctacccgcccacctcttgtccttgcctttaaaaacgcctcgctccctgcccctggatgccattgccacctcg

SEQ ID NO: 93403 - DNA, 345 bp, Zea Mays
gatctggaggcaggaaagcaagaactagggcacagaaagcagaggcggctgaaagcgcagtatatgcgggatattctagagtcagataccgtttccaaaagcgcccagttagcacccggcagttacttctaaaacaccggcgtgccacgtcgtcacccggcagctacttctaaaaccccggtgtgccacatcgtcactcgactattatcctcaaagtggccgacgcggcccgttctaactcggttgttatttctaaaaacgccgacgttatcaccagtcgctcgacatttatctctaaagcgtcgacgatgtcttcagtcgctcgacggctatttctaaaacgcc

SEQ ID NO: 93404 - DNA, 289 bp, Zea Mays
gttttcttgaatgcatctaatcaacgtattcctgcatttaagggctactgtgttgctatgaatgtgtgccctcgtaagtttggcattgacatggctgtgagatggaattctacataccttatgcttaagcattagttccttacaagaaacctttggtgtcttcatggacactaactatcctagaaaaccaggtgagcctaatctgttgaccaattcacattggtatgtagcgaaaaagttgcttgagtttcttgaactgttttatgatgctactgttactctttctggt

SEQ ID NO: 93405 - DNA, 302 bp, Zea Mays
tcgaaatgcaggccaatagaacaggtaagcgaaagcctaccagagaaaatataactgccaatacccgaagcggtgtctcttggtgatcttggatacattattcaccatgcttcgagaaaacaattgacgaaagaacaaattgctgaagtgcaatactatgcgaaagacttgaagtacccttggggctctctggtttacagaggcaatgacgaaggtgattacctatattacctgccaggcaacaaggaaattgatgtttgccaggagctgatggatacgatgagctacccgaagctagaact

SEQ ID NO: 93406 - DNA, 354 bp, Zea Mays
gtggcatgcattaaaccccttaaaggaaatgtcaaggacttgaggattgccaagaggagggaacaaaagaagaaaatcaatacctcttccaaaagcctcaatcatgcctccatacaaggtaacatccaaggtaataatcaagtcacacttcatactaagagaagtaagaagtgtagtgaatgctttgaaaagggacactcgattaggtcatgtccctatattaaaaatgacttgattagtaacaaggatgataaactttgttttaaatgctcaaggaagggacacttaattaagacttgtccatatttgaaacaaaaaggcatagtgctagaaaagaaaatattgactaaccat

SEQ ID NO: 93407 - DNA, 304 bp, Zea Mays
catcagaccattgcactcaaacaaaaatccaactcaaacatagcaaccaacaccatcacatggttgttattattataaagataacttaaaatgagtattcaacgtctgacgcgagagctaacttattacaacataaacttaaaatttctagagcagcctggtgacggatccgggctccccatagcgaagcctcttgcggggaggagacaacgccatggcggggacctgggcttcaggcggatcccgtccttgaagttgggcttccagggctgcaatcctggcgttggcatcctccagctccaag

SEQ ID NO: 93408 - DNA, 458 bp, Zea Mays
ggctgtttcaatgtatataggctggtgcgttaaaaccttaatcttcttaccctttggcacagctgagttggctgaagtagcaactttccttttctttccttgttttcacaagggatagctataatccgggtagacaaaaccaataacatcgaaaactctgtttagccttttcttgccttgctctccgaaggctagggtcatggcatcatcttcggtccttgtataggcaccaagcaactcgtcactggtcgcttcaatacaatttagccactcatcgtttggctcgtcaaactgctctctgtatctgaaggtatattttagatacaccaggccgccttggctggacccgacagcagcttcttcgcatctcccaatcatttacgagaggccatactctataggcaatgtgctcttagactaagactcttgtgccaataaaagtgcacacagtattaaaa

SEQ ID NO: 93409 - DNA, 669 bp, Zea Mays
ccagcaacatatctgtacttgaatcctaatggaggtataagtatttatgtaactctgaccccagaatgaccctaggctccatcagaatgagcgatctaggtcgtgttgctagtggattgcaaaggggtgtctagtctagtccaatcgacaacgaagtttgctagaacttgcgacttgatgacactcctggactcaaaagacatgtagtattctgacaattccatggcccattttccaattcaggcggaggcctcaaggctgttgtatatgccagatagactctgttctgttaatacatgattagggagagcgatcagtaatgcatgattagggagagcaatgtcgaggggtactttcttggacccctcatcactttgaatggggttctagtgcttgtcaaccttggttggggctctagagtgcttttttgcatgctggcgcccagacaatgaagattttgttgccttgtgacgaagtccctctctatgttgtgggccacttcctgatctctgaagattgtgatgactccgcaaggccctagtatcttcatgcacaagtatagcccatggattgctgcttcgaaggcattaatggcccctgcctaggattgtgttgtacggatacaccatatcgatgatgtcgaaggtgatatattatgttcgcgtgttt

SEQ ID NO: 93410 - DNA, 300 bp, Zea Mays
gtgagcactagaccctgatggtcattttacttgttgatctgaagtcaactacgtacttgctccaaacgacgaatggtatgcatgagcccctgaaggacccttatggataacatagtattgtgcatatcggtctaaatcttaatgattgactgtgtatttggtaataatcatcataagtttgcagaattgtaaccacaaagcaacatgtcattgcacgtctcactagaagttgagaataatccttcatgttgaaggacaaatatgtagtattcatgccactacattaatcaaagtccaaac

SEQ ID NO: 93411 - DNA, 690 bp, Zea Mays
gacatttaacctctactgtttatcatattattatttgttttatttagatgaacacttcaataatggaatatacacatggtatttatttatttacttagaaaacataactttgaatgcacacttagaaaagataatcttcattacatatctacttaggagaagttaatacataatgtcccatgaattatttttagtttaactatatttttaaggggcgtattatttgtatagtttataaaggaaagagtaagtagtttgaaagtctctctttcattggttgctccaaccttttagttttaagttttagagataaatcttgaataccaaattcttagttatcattatgtgtttagtttagagagatatattttatagaggaatgaaattgttattggaagtcatttcccaaaatagaattttaggtgctacacgttagtagacttcaggtcatctatttgcttctggagagagaggattccaccgcgataaggaagatatttgctcaggtactagaactccatgtgcttccagttgagcaaccaccaggtccaagacactctatgaaaccaagagctagcaaacggaacacccattggtaaatgcaaggtagcgcaagacaagatacaagtacttgtaaatttgacaagaagagcagaaagcccaaagctagaaccactgaggcgctccgag

SEQ ID NO: 93412 - DNA, 808 bp, Zea Mays
aagtttttgaagatgagtacctgagatcacctaataagaacgacacaactcgattactagacctggtactatttttgtgagttcacaatttactttgatagtgaaaatattgtggcatatgaggatgaattttgtatcctcgattggtggcatgagtacaaactaacatccaattttctctataatggctaaagatattatgttagttcctgtcacaactactttggaaacttgcattactctttataataggtttcttgaggagcgacgatgaaggagatgtggatctgtattatggcttaggacttagccaacaaagagcacaacatgttgtggaggacaaagagactccttcaagaacttatgggttgaacaagattaggaacttgttgattagagtgtgttgagtctatgagtgtcacttggtgagtaatattaagggcatttttgcatcttgggctttaaaagggttggctaataaattggctaattgcaggtagagatttgggaaattatttgtccattagccatttaaccttggtaatatgtaacaatagatcataaagaggaaaatatactcttggttggtttctttcctttgtctcgtggcttattgtttgtacaaaatatttactatgtgccaagactccaaacatactcttactagttgtttgatagctaattatttacaagtatgactataaattctgacatttaagatcaaaactatggtttataataaattttgaacgttgaattttaaaataaggttcttgtcctttttaggagatatggatttttaataagg

SEQ ID NO: 93413 - DNA, 437 bp, Zea Mays
caccaggggccacgacgcaagaatccctaagacacagagcgactggcgctaggactgtgggttgaatccccagaaacggaggaactcttatacaaatgtgcacgaccgaaggggtatcggccgattacaactgttggatcaacagccgatgcaccagattagatctaagactttgcgaaccagtatccattctagaccgttggatcaactatctacgctctggattcaaagtaacccagatcttttgtcacacgcttgatttgcatcggacgacggatgaagcttaggctgaatcggtatattatttctaatcgcaatcgttgcctaggatatcaacgatctaaccgtcgtctccctgattctacgcgtagacacgacagtgccgcccatcctgcggtggcgcttccaccaccgcggcgagccttgccttatttgct

SEQ ID NO: 93414 - DNA, 1258 bp, Zea Mays
caagagttggagaactaggagtcttcggctgtcgctacggccttcggattgctcctgtattcttcaatggacaatccttaacacggtcacataagcacaacaagaggagaaccctgaccacagttcctagtccaagggcgacgatggcggatttgcttttattgctgaacaatgggaaccctctgtgggtgactgcttgctcgagccattatttgaattcaagctcctcatctgtgtgaagctgacaggtagcttaccgctgaaagaattgtttgagaggtcaatgttgaagcagttgtctagcttccccagccatggcgggatattcccatctaacttgttacatgaaatttccagcacattgaggcttcccaagctctgcagccacgggggaattacgccgatgagtagacagtttgtcaggatgagcacctgcattgtctcaccgccgcggaaattcttggtcagcaccaagcttgtcaggttgggcaggtgttgcaagacctgcaatgtctatgccaggttgtgaaactattcctggtcagcgagaggtacgacagggatctcaactccttgaagctctccggtatccccccccacgagcttgttccttgtaagattcagtgtcctcaacttggtgcacacactgatgccaggagctatagcgccactcagatagttggttccaacatcaaaagtattaagcttcggcagcaagctggagtcgatagcaatctcaccagagagcgagtagttcctcaagctgattaccctcagcagtggacaactttacagggaagcgggcaactcaccgtccagcctattggtggccaggtttacggactctagcctcctcatctctccaaagacatcagggatggagcctgtgaacttgttataggacaagtcaagttgcatgatctgagagaggttaccaaggtcactgccgaggttgccagtgaacagattttcatgtaagctcactctcctcaggttgggcaacgtgtacaggtcgtcgggatcccggtgaaatagttgtcgtcgagggagagctctgtgagcaccctgcaccgacatcagagatgcaggatgtacatcggtacatgtgtgttggttttttgtttaaccttctttataatatttgcaagttgctttaaaattgagtgctcataagatgcatcaaaatgtttcctatccaaagctcgtatactataattgtttcatgaacttaatttgttgacacatgactactataaag

SEQ ID NO: 93415 - DNA, 493 bp, Zea Mays
agcgctggggcctggacattgtcgggccgctacccacggcccaagggaacctcaagttcaccttcgtcgtcgtcgagtatttcaccaagtggatcgagacaagagcagtatccacgataacgtcgaagactgcccagaaattcttctggcaaaacattgtttgccggttcggagtcccgtccgagctcacagttgacaatggcaaacaatttgacagccaagacttcagggacttctgcttctccattggcaccaagcttgccttcgcctcagtataccacccacaatccaacggcgtcgtggagcacgccaacgacaagattttcacgacgatcaagaaaatgctcctcgacgacaagaagggtaaatgggccgacctgctacctgaagcagtctgggcactgaacaagaccgaatgtcgggcgaccggattcactcctttttgcctgctatacggatcggaggccatgaccccgcaggaaatcaaacatgg

SEQ ID NO: 93416 - DNA, 685 bp, Zea Mays
ggcggcgctcctcgacgccggcctcttcggccccgcccaaacgctggtacgtgcggcgatcctgcacccccttccatcctctctgcgtttgaatctatagggtttcggggcgagcagaagcggtttcggggttcgccgggcgcgtgtggggcaggcctaaacctcttgcctgcgacgtgtgcgagcgggtttgggttgctgcactgggtgatggccgacttttccgtcgcagactcgcagtgattactcagttttactcttctcctacacttgcaggggtgtttccttgtgtcgtcagctggtgcgggcaacgatgctggtatgtccatgaaggtggaaagcctggtaagctcaaggtttcctgagcagcagctccgcacgcggtgctaatctggtctaactttttgttatgattctgtcaactccacttcctgcctacatctgatgccacattgcggaaactaaaccggttgatttgtttcttggcagtcaatgcacagattagtttcttgatagtcaatgcacggattatcctgcacaactgcatttcccaattccagttctgttctttacagggcccattattattatttcttattggtggggagagctgatttgcttgttggactaccgtgtaggtccagcatggggatgctttgtatggagagaaagaattccgcagggc

SEQ ID NO: 93417 - DNA, 580 bp, Zea Mays
tagctcagagccatagtttctccaacattgccctcaacaacctgaacagactcaacaatccacaagtcacgtgaagcaggaatagtagacggatcagtacaccaagcagagcatcgaaagcaggacaaatcttgcagtgccaaggtctcctgatgcacctgatgaatccaagcataggggctaagaatatgttccactgtactagtttcccaggcatgaacagggatgcctccaatctccagatcaaccaagaatggcaaggtgactcccgaggcgccaagaaaccttgcccaacgcttacagataacagaaaaagaggcagttctgatgagaggccaacgactgactaggaggtctgccatggccagatcaggaagaatcagcagcagattacttgcagagatcctgcggatgaccagtgaattttcattgatattcaatcttggagccagaagcgcagcaatctccaccggaggaatcacaaggtcgctgataatggttaacaccaccgcagtcctgagctcatctttagaagctgaaagcttgttgctccaacccataatgcagggtgagatagcac

SEQ ID NO: 93418 - DNA, 360 bp, Zea Mays
tagtctgatccaatatagaggagtcctgcatttcctgccatacagagtctcgaacggtgacatcttcagactggcctggtaactattattatatgagaactcagcatagggtaaacttttatcccaacttcctccatgttgaagagctcatgctctcaacatgtcttccaatacttggttagtcctttcggtctgtctatccacaatcacccatatcaaatcatatccttccgggtacaaggcaatccagtaatgaaatccataccaatctcttcccacttccactcgggtatctttagtgggtgcaatagtccagctggcctctggtgtttagccttaactctttgacatgacatcgca

SEQ ID NO: 93419 - DNA, 315 bp, Zea Mays
tgaaggtcttgacacgtagaccgagacatattgagacgaccgatgcgccaaagcttattgaaggtgcaaaaactgccccttctgccacagaatcaggtcttatcatgccaatcgtaactcatacagatccgaccaaagagctgaaatcagagagggcattagaacagccgaaggtactgagcccagcaattacaacaaaactgtcgaagccatcaattgtttctgcagcgactccaagaaagaggagaatgactagtgtattagacgctgttttggagtctgcgaagatgtcagctctcgcttctgccgaagctt

SEQ ID NO: 93420 - DNA, 595 bp, Zea Mays
aacagagggctttaggcgactaagtgtttatgccattatgagtatctcgagacacaagaggactaagacattgaatctatcatgagcgcccaggacacaggggtccagaggacttggaccatccttgtggacaagccccagggcacgaggggcctgaacaaaattattgtagttgagggcgtcttgatgcaacgagggcccaagggcttaaaccatcatcgtgcacgggttcctataagcacgagagtgccctaaactcaggagtgctttagggaaccgagggccctagacccttggtggtgatgtcattcttttaaagtgtcttgagatcaagttacccgaagggttaaacccctaccttgatgggcccccaaaagtggtggtcctagtagctagacctcatagtagcctcctatatcgaggtcattgaacatgtattggaggtagtataaccatcctcggacactgacagaagcccttgggtctgttgctggactagttctataagcgagtccatccctctagttagacacctaatgtaatagattttgagtatgcattgtcgttaccatgcatgtcatcgttaggggcaccc

SEQ ID NO: 93421 - DNA, 379 bp, Zea Mays
cttgagttgagatacgtggaacacatcgtgtacatcagacagatgatctgtagctcaagctggtaggccacctccccaactcgcttaaggattttgaagggtccaataaagcgaggggataacttgcctttaactttgaatcttctcattccacgaattggtgacacctttagacatacgtgatcaccctcttcgaatcaccctcttcgaattccagtggtcttctccggttatcaacatagctcttttgtcatgtctatgctatcctcatgttttcccggatcatatgaactcgttcttctgcctcttgaataactttaggcccaaagaactgtttttcaccattctaatcccaatacagaggggtcctgcactttct

SEQ ID NO: 93422 - DNA, 315 bp, Zea Mays
gtcaatcgctacctccaagtttgaactctatatacatttcctccaacatttgtctctaggttcacattggttgctgaagtgcgaaaattttcgtccaagtgtgactttcggacggaaaccctggcagtcgatcaccactcgattcacactgaaccttggcaaccaggactgaaccgccctctctttccaacatggtctccagggactactgaatactgataagtatattacaattacaacatgttctctatcttacaggtgcctagaagtaaggccagatgagctagcagcaagaaagaagaaagaaggcgttcg

SEQ ID NO: 93423 - DNA, 794 bp, Zea Mays
attcaccaaaaataggttcactccacaaaaagttagctaaatggtctagatgtaggaccccatacgctcgaacccagatgcaataaattagcgaatttgagagccaaattcaccattacgatgaagctcttcaaaggtgcgccatcaactcaagttcgatggattttatgaaaattgcccaccactattacttaccccacgtttcacatcacttatttctttcacaagtctacccccaccatgatagttagtcgtgcccctccaccgaccggatgtgccctccacccatgcctttaccagtagtgccccgccttgactggtgtgcgttgcccgtgtcgattcaccatacaaccataccgtactcttgaccaatcatgcctcacccatccctatcgcccgccctaggtgatcttctctctctcccttgccccgactgaccatgccctctctccctctctcctaactgctagctctctacgcacctagacatgagtgtcacatctgccctagtcactagcaacaaccctaccttgctcatgcatcaacaacaaacttcaatcgtcggtgtcactagccacacatgcttcgtgtgtgccctagatcgagaggtagaagaatagctacccgcacaccagacatcttcttttcttagaaaaagaagaatgtattaatatttgacatgtggggcctatccttggggaaaaagaggccattccaattaaaatgtccttgtgtggatatggagttggtgcctaagacaagcgatttcgtgttggatctcatatcactattta

SEQ ID NO: 93424 - DNA, 720 bp, Zea Mays
ggtcgaatgccgaagaccgtcgatgcggtctttttcgacacgttgcatctgagtttttgtttttgcgggggcttttgttgtatattacatggctctgcctcgttaaaaacctcacccccttgaggaaaagagtgcaggccggaataacattgtttgctagattacaagggcgcatgggccctgatggttagacaaaaaaatttgcggagattgtcaatgttccaggagtgctctaaatcttcgccggaaggcgttactagcctgtacgcccttggggatgccttcgacttgacgatgaatggaccctcccatttcggctctagcttgccccgtgattctgtccgggtggtccggatgagtacaaggtctcctttgttgaactctcttgggacgaccgcgttgtcgtgctaggccttggtttgagcctgatatttgttgagggactgtagggcgaggacgcggtctccgtcgatgagatctttagacgttggttcgtcgacatcggggaccgctgatgtgcttgttcgaggcgacccatgctttatctcctgcggcgtcatggcctcggatccatataatagacgaaaaggtgtgaatcctgttgcccggcattctgtcgtgtttagggcccaaaccacttcaggtagttggtcggcccatttgcccttcttgtcgtcgagaagtcttttcttgatggcagtgaaaatcttgccgttggcg

SEQ ID NO: 93425 - DNA, 486 bp, Zea Mays
atgacgtggaaggtggaagtgtggtgaaaatgacttggtatgtagtggaggaggtggaggaagatgaggaggaggaggaggatgtgcttcctttggttcggtgcgaacagcgctccaaggctcggagtgatacttcgagtcttgctaccccagcgagaatggtggatatccaaggtttgtctatgtctgttgtcgatggtatacttgaagaggccattcctaaggagcccctgcttgagttacctaaaattaatgttatcgatgtctacatagctcgctcggatgaagcaccttctgctgtttgttggctgggctagaggtaagcctgccagtccccagggagctcctatattagtcggtcttaccgttgacccagtcctacccctagaggacatttaagcccccgagggtgtcacggttggttccccttctactacttcaatggagattcatgttgggttgccaatgcctcatattgacgatgtt

SEQ ID NO: 93426 - DNA, 651 bp, Zea Mays
gtgacctcgtaagatttgccacctctttcaatacaactattacaatggtgcttagaagcatcaaggagtatatgtctctattccgcacttttaatcatttaggtaaaaccaagagcaaacactaatgatagtggtgtaactaatctatgtattttgtaaagcacttatactaatcactgagtgattgtgatttcttaagcacttggatgtctagagctcttgtgtatgagtttaacttgatatgtttcttacccccacagacttcaaaaacggtttaggtccaatttatgccaatatgccataaggagtgaactagttattgcaactacaacaagtcgcaacacgcactgttagaccatctgatgccttacaattatgtcaccactagatgttgtcgactattgggcatgtacatatcgtttgacgcctgctatcgaactagtccaatgccacatttcctcttcggaacctctctacatgactgccatactctattgatatggtctgacaccggctaaaccatagggtttcgtgccccatttcctgtctagaacatctttgcataactgtcatactctgctaatatggttcgatgcctgctgaatagtaagtttgacacctgtgagtgtgaacactgggaccgtctggttc

SEQ ID NO: 93427 - DNA, 554 bp, Zea Mays
cattgtgcgtaaatagtgtgttagggatatttgtattacatgtacattgctacattatcggtacgggttcagaaattatgggaataccctggaaacgtggatgcggttacttgtttagtatagcatccgtgatttcctttcattcgaaaaaaatacacccagactgcagaactagttggcggtggagatggccggctctggacaatcgccggcgatggtaggagatggtggtcggattcgtccagacactgagggagtagttgatggtaacttaatggttacaccacctcctgctctactgaggcctgtaatcgacgagataagcataggggaggaaggagaacaacggattcgacctccgatgtccaatattagctccagggagatcgatacgtctcaaataccgcattcacatgtaagtccaattgttgtatttgattcttgattgattagattgttatgatcataatccatggtacaaacaacattgtcaatgaattgcagcaaaaaacattgatccgaatatagtgccaacagtagggatgactttcaag

SEQ ID NO: 93428 - DNA, 1399 bp, Zea Mays
cagagataaacatggtgagaagaggacaaagatttcgccatctagccatctcgcccaggcagccaggagatgagaggcaatcaggtcacacgacaatgaataggacggagtgacctcacatgctgctctgcaagggaatagaaagctcccttgttggaggccaacggagcgacctcattggacggagctggcagtgcgaacggaaagctccaactgtgctgcaaggaccgccagcgtattgcgagattcaatagcctagggaggaagaagcagaactataagaacacagacgcagggtagatcaacgccggagagccgtcgccgccaccgccgcctcgtgcccttcatttgtgatgcctcagctccttcgtgtggggtattttccacccctcagggaccagacgtggttcccgatctggaacgaagaggaaatatcaggatacagtccatacgggggttaactgaatgcacatttgttcgtgggctgggcttctttccagacgagggaggtccacgggctttggtccttgttcccggccgggaagtgcttaaacgaacatggcctgaggggggtgatctctcataaatatagccaaagtagcttggagtacaagtatacaatctcctaaatagggaaagctataaccttatacaaggaagactataatcagtctatactaggctatgtacgactgtactttacatatatgtctaacacatgcctgcagtcgcagcgggagggtcccgacaaaagactggatttgaactcgtcgaagagctatataggcaagcctttggtcatgatgtccgtgaactgatgagaagatgggacatgaagcacgtgcacttgtctaagagcaaccttctcacggacgaagtgaatgtcgatctcgatgtacttggtgtggcggtgatgaacggaattggctgccatgtagacaacactcacgttgtcgcagtagacgaccgtcgcagaagcaattgacacgtggagttactcaagaagatgccacaatcagcaacactcagcaacaacgtggcccacggcccgatactcagcctccgcactggaccgggagacagtagtttgtctcttggaggaccaagagatgaggttgtcgccgaggtagacgtaatagcccgaagtggagcgccgagagtcaggacacccagcccagtccgcatccgagtaaacggtgagagactgaatggggccgacacccaggtgagggccgacacccaggtgaagaccggaggaaagcgtgcccttcaagtagcgcaagatccgtttgagcaaggccagatgtggctcgcgtgggtcgtgcatgaaaaggcacacctgctgaaccgcgtatgccaaatcagggcgagtcagcgtgatgtactggagagcaccgac

SEQ ID NO: 93429 - DNA, 407 bp, Zea Mays
gctatggggcttgacagtggcaggcacaggtcttcaatgtttgcatgcacagttgcacacatagtcaatgttccataaagatgaagacatgaagtaaactctataaaatagagtcgcttaatatttttttatgctcttcctttgtctgttttagactaaattaccccattgtttgtgtgctcgttaaattcatctttgtcattctcgaattatattcaatctcattttcattcataaacatacaattttcttgtcattaaaataaaatccatataactggacaagatttctccaagacaacgagaaaatacatcacaatcgcagacatagtcaatgaaaccaaggaaagtgactgcattgatggtaatgactaaatcagagcattttttgagatattttaaagaaat

SEQ ID NO: 93430 - DNA, 507 bp, Zea Mays
ttcctgaggtgttctatattccaggagttcccaatttctgtgtcatctatctgagtgagacgatatgatcccggccgagtgacttctgctactatgaatggtccttcccataagggtgacaacttgtgccgtccctcccccgttagaattcggcggaggacgagatctcccactgcaaaggatcatcgtcgcacggccttgttgtgatagcgtctcaaagtttgctggtattgtgctgattgaattactgtgttcagtcgttcttcttcgagtacatcaatatcctccagcctagtagctttggcttctgctatgctttcaaagaccaaccttggcgccccaaatttgagatcagcgggtaatactgcttctgacccgtagaccatgaagaaaggagtgtttccatgcagagctcgactaggttgagttcttaggctccaaacgacgtagggcaattcccttatccattttcctgcgaacttttcatttttatcgaagacctttttc

SEQ ID NO: 93431 - DNA, 271 bp, Zea Mays
gaaaatccgaaagaagacaagagccaaggatgccagactgagcggaagagggaagcccctccagctctacctccctccaggatagagaacttgtccgacgtcgaggatatgtccctagctagccttgacgaccttctcaaggaatttggggacactttagaaagggagttcggaagcaccttagaaagcgctcgcgtgtagtgcaacttgtggtaactgtatgcttgtaatgaacttgtgtgatgaataaaataacttggttgaaattttt

SEQ ID NO: 93432 - DNA, 627 bp, Zea Mays
actctccctctgcagctcggtgccaggtgtagttaatgtggccggctacttacagcgggccagtcttgggtcaggcgtggaatccactcgagtggcttcctcttgatccacttgacccccctttcggttccacctcgcccaaccccggactcggtgcctcggaactaactgagggtgggtccttctagggtgaacctttccctcgcattctactgactagtgggccctagggtcttggggatcatttccttgacaatagcccccgaggggagagtgtctccccttggtggcttccatcgggtcgggcgctagttgcctcatctttaccagcctctgagtctagagggtaggtaggatttgcgagactcgtcattggccttctaggggccagtcgattgctataagtagagggtttccccgctctatccttaatcggcctcgtctaacgccttttcattccctagaaatgacatcatgtcggaaagatgccctgcccaaaccctttcggggaccacttgacttgccatggatcgtggcaagcatccctcctcggagtgtcctcaccaaggttggtctaaaaaccactcaacgcgggaagggtaggtggtttctgggagcctctcaatc

SEQ ID NO: 93433 - DNA, 751 bp, Zea Mays
gagtccgccatcacacaaagatcatataattcctctgtgggggacatgatagaggaattcagagatctcgacaaattaggacaggggtttacatcgaccgatccgttagaggagatcgacataggagatggcaaaactccaaggccgacttttgtgaacaagaccctggagaccgatcctagaaatgaaatgatcggtctattgaaataatattcggattgctttgcttggagctacactgagatggcgggattaagccgtgagatcgtagagcatcggctacccattaagtttggtttcagacctttcaagcagaaagctagaacatttcatccagaccttctcccgcgaatcaaggacgaaattcaccggctactagaagctaattttattagaccttgcagatacgcagagtgggtctccaatattgtgccagtggacaaggagtcaggtaagctcagagtatgcattgattttcgcaatttaaatagagcaactcctaaagatgaatatcccatgcccatagccgacacattgatcaataatgcatcgggaaatagaattattagcttccttgatggtaatgtcggatataatcaaattttcatggccgaaaaagatgcgtctaaaacggcctttatatgtccaggcttcattggtctatttgagtgggctgtcatgacatttggtctaaaaaatgctggtgctacttatcagagggttatgaatttgatctttcacgggctgttgg

SEQ ID NO: 93434 - DNA, 884 bp, Zea Mays
cttagctaggtagcgaacactcgatacgtagtcccttagaaccaaccactcatagagacttgggaactcttccctctctcgcacgcttgtaacccgaattatgagcatgaagcaacaaggtgcccgtagttcaagccaccgaagattggaagtacggaatataaatcttgcgcccattgagcataccatccggatctagaatgcacatatacaaatttactcgttggtgttggttcaagacaccgacaatattaaaatgaacatatggttcatatattaaatattaaaataattagaaaaatattacactttatcttaagcaaaaggctaagaatggtatgcgttgaaaaggagcccgacccttttttaatagctggttcggtcgctcgtcctccttcgactagtgaggtgatactatgtgggagcgctgcgctatgtgcggctttctgtcaaggtgggcttaggtggtttctcatgggtggtatgacccattggtaggctagaaacagaggagggaaacaaacttacgcgtttcgcacgtgacatacgacacatgaaactgatgcaataatgctttaaatgagtagagatttctatgtgatggacgtgaaagatcaacaagatttcttgtgaaatacagggaactgacatgtgaaactccatcgtcatatcttggttgccccagggagcaactcaatatcatcgtctgtgctgctccatcgtttatgagaaaatccattaataaaatagagaacatttgtgacaacgatcaagaaggattgtagttagtctttactctgtattgaactatataactgctactcataatatagagagtttgttaggtttttttccaaactatactttttcgataggaaaaaaat

SEQ ID NO: 93435 - DNA, 336 bp, Zea Mays
attagatcctgggcgtaatggctcatcgtccaatctgggccgttgatcccctgatggacggattctggtgcatatcaaatatccaccacagatcgtgggatcgatggctctgttagttgctcggtttagatctaatctgagctgtcgaatggcgatccaacggtgccaatctgctgataccccttcgttatgcgtcatttgcataagagaccctatagaattttgaaaccaacccgccgtccgaatcagtggtaagatcattacagaaaagtcctcgagtttacaaaatgaaccctgatctcttagaaaattttgtaccccatccagaatttttag

SEQ ID NO: 93436 - DNA, 408 bp, Zea Mays
ggaaggttctatccaagacatgtctgaagcatccataacccatcacagggtgaggaaaggatagcccactttcagggtctgtcaggacaacagaaggcaagctctcagcagcaaccctcacatagcacattttagtccaccttctccaagtggaaggggaggccgaagctttggtggcagattcagtgcaccccgaagaaaaccattatgtttgttttgtggcgaggacgaaggccacactacaagaacatgtcatcataccatcaacaagcagaaagagcttgctttatcagctacaaaaccttcacagtcaaaagaggtgttcagtacatcttcatattgttcaccctatatcccgcaatatgtccaaactcagtcgcaagagccaaggtcatgtctacctttggc

SEQ ID NO: 93437 - DNA, 1152 bp, Zea Mays
accgtcaagagacatggtcacctgatcaagctctgcctggccttgagtacacctctcctcagcatcagaacaccgccgagtcaaatctgaagaaaaaaaattagcaaccacttgtgatatgaacagaaagaaagattaacaggaaacactatcaaccagctcaccagcgttagcagattttagatcatatatctgcttctgaagagaaagggggttccattacgacaacgaagaaattttctcgagcacgggagcgccacatgccttcagctgagcagccaccaagtctaggacactctgcagctacagaagttagcaaagggaacacccattggtaaaaacaaggaagcgtgggatgcaggtgcctgtaagttggacagaaacaagggataccctaaagccgggagtgccgacgcgctcctagaagaaaggacaacaacagaagccgcattatgaccagggtcaggcatcggaggaactggataacggataatccaagctaagtgcaacacccattgggatctcaactccaaatgcacccattggaccttcaacacttggaacatccattgggtcttcatctccatggccattgacctctaaggtggctaggctagctggaccaatgagcatatcagaactcatcaccgcgacatcatcagtctggggcattggcaaccccacttgaacatctatcgaagcagtagatggggagccgatcgcaggaccctcgggggctggaacacccctgggggctaaagagcactagcagactggcaggcttacctctggcctgacaagtaagccaacagagggcacgtcgtccgggcactctatacggacgtcaacgactctaatttcaggcaactcaagcaaaagatcttcaggaatagagtcttccagcacactgtcatcgacagacattatcagacctcggatattgattatccccacagaagctaggcctgacttgtcaccaccagcttttcttcgccgttctcgatgaaccagggggagcgtttcttcccctttttcatcatctccctccatcatgtacctttcagtcctcacaccattgtagccctccacaacatcctctagatcagcaatcattgtactatcatcagggttcagcacgacaggggcagtcac

SEQ ID NO: 93438 - DNA, 369 bp, Zea Mays
gcccgatgaaggtgacttggaagggagggtggtttgggtaacttcggctttctcccaggtagaccgccatagagcacttctcaactccgttttctcggtattttttccagacatattccggcttcttgcggatccccatgcatagcgcgcaactccataagagatgagggaatccttcctcctctgagcagtaggatgttctattgacccaagagccttccatctggttggagaaaagaagggtctgttaatatcggggaaaggaaagatggtttttcttaggggtaagaggtgttttattgttaaggcaacttttaaggtcagggctgcgttctacggacagtcctatggctctgataccacctgaag

SEQ ID NO: 93439 - DNA, 422 bp, Zea Mays
ggtgagtatttggagctcatctcttgggacccaacctgggcagtcactgagcttgagaagaaggcgtctgtgtcgactggcgatgccattgccagttcgccaggagagctgtcgcttccgtttccaatgaaattcccaccaaatttcactacttactacagatttcgaggaaaagctcatcattatgtgaaaatgggcaataccgatcagtttcagaaggtcacctacctgtccccttatgcagaggcaaagggattgactcctggatcgccagagtttgataagagggctgttgcagtgatgcatgagatactgagcttcatgctggaaaagaggctggtgactgatcaccttacacatttccgtcgtgagtttgtaatgccacagaagcttatgaggttactattgaagcattatggcat

SEQ ID NO: 93440 - DNA, 633 bp, Zea Mays
tcacatttcatataattatgactatgtgactaatatgtgctcaccacttctgtcatttcagtgatctcgcctgcctgtgagctgtctcctgtcctgcctggattctcttcctctctcatgagatttccaggtagttatccattcttttgttatcctatcggctgctatcttctcgtgcttagtttttctcgctcacatgcagacttcaggtcaggatggtgcgcacgaagaatgtgttagcgccagggggaggagacgacgaggaccctcctcgccccttcaggcaggtcaaggggaagactatctatttggagcagcaggaaggccgcaagaagcagcttttggatagagcagcccaagcagctctagccacagcagcagtagctgagcaggcagagagaggtggtcagctgcagatatcatcagatcatattgcttaccgagtttgtcgactcgcctctcggcctcgctcctccgctccatccactcccgccactgctaccactccacctcccacttcacccgctccagtcactcctgcgccatccaccacctcagccatacctaccacctctaccactcctgcttccactgctcctcctcccgctcccctttccgctccacccattccac

SEQ ID NO: 93441 - DNA, 386 bp, Zea Mays
cggccatcagggcaacgacaacacatcaaaccttcgtaaccagcgcaacagacgcagttgtggcttggtagtcggggtacacgataagtacgcaataggcacaacaggcgcaacaagtgcaactgtgactcaatagttacgacatacatgcaatgccttcagggcccacgaaaaatgtgtgactcggcgatggcggtccgactcaacgggagcgatctgatttagcgagagcacgacatagcaatcacatgacgcagcgaagttcgaacggcacaaatactgcgtcgtgttaccaaggcgcagtcaatattcagctaatgtcataactcagccgattaccaacgcaacctaatcggcgtgtccgagtacccactatacaatttaat

SEQ ID NO: 93442 - DNA, 433 bp, Zea Mays
gatgatggatgtacaataggaacagcaatttgagaaggcggagacggttgggcctgcgacgaattcgaccaatcaagcaattcgacatcccttcgaggccaaaggataaaattcttgatagcttgtccaagtttctcgataccttcgggcccagggatgtctaacatgtcgtcctcggatccttggacaaccgacgtcacttctactttgcaataatcatctggaatatcgtttccatggaacttgcgtcctgggatcgcaaggcctgtggctactttctttgtacgtttattgttaataccatatcttataaccagtgtgcacgcctcaggccttgtgatgtcatcaactggataacggaccttatttcccgttgaagcaacagagcttgggaatgtcgtacaatcggtggaagccggcggttgagctgctg

SEQ ID NO: 93443 - DNA, 527 bp, Zea Mays
aagaaattctccggctatagtgactaattgaaggtgggactgggtgctttggcttcgtgataacatggcgcaacagacctggccatcaatttataggattgctaagtggtggctagtgaatttggattgaacgcggtggcggttagagaagaaacgagtcacgggcatggtgattcgtggccttcaccgtggcagcctccccggtgaccatcggacgtgcataacactggtgattgcgacatggtaattgctgaggtacgtggcgttcggtcgacgggcagccaactccgatgacttattcggaccggccgcaaagcagaaaggagcacgtcggctagctggattagtacccatagcccaacagcggtgacgatctttttacctcgcggcgttatccgggcttaagtgggcacgaatcacctcatcggtgcaaatctacgcgcgaggtcaccggcggcgagggggatctgcttctgttgatattttggtactgtacccttggaagctttttcagttagcctgacagc

SEQ ID NO: 93444 - DNA, 524 bp, Zea Mays
ttgagaatgaaatctttttattgatgatgtattatccaattacagaatacaatgctgccccgatagcttttgaaatcttgctaagggtaaaacttcctgagatgctctatattccatgaattccctatttccgtgccatccatttgagtacgccgatatgatcctggccgagtgatcttcgctactacaaatggcccttcgcatagtggtgacaatttgtgtcgtccttcccccgttagaattcggcgaaggaccaagtctctcactacaaaggatcgatgtcgtatagccttatcatgatagcgcctcagggtttgctggtgcctagctgactgaagtattgtattcaatcgctcctcctccaatatgtcaatatcctctagtccggtagcctctgcctcagctatgttctcgaagaccagccttggttccccaaacctgaggtcggtaggtagcactgcctctgaaccatagaccatgaagaaaggggtattttcatgcagagctcgactaggttgagttct

SEQ ID NO: 93445 - DNA, 441 bp, Zea Mays
ctcgtcctcgagatttgtaagaaagaggatataggaagagtgattttaatttagcttttagtttctaattagtataaaatcaagagtctctctttttttccattcgtgagtgattagaagagcatgggtatatatatgtatgtccactttattatgtaggatagaagatgtccttggagcatagataggtttggttaagaaagggtagggctaggaaagactctatccaagattgtgaatcctgattcctttgaagatctatcttgaatcttatccttccttgatttgatgaggtcgatcatcttcgatcttcgttcttgaagtctttatccgaattaggggcatgtagttagggtaacttgtaggtatgatagatggttaacaggttggtggcataagataagtgtattatggcaacatctaggatgggatggatggtca

SEQ ID NO: 93446 - DNA, 459 bp, Zea Mays
aatttatttgtttttaatcgtgtatccttcttcgactacttttttcagatatggcccgacggtactctgagcttgaggagaaacatcttcaacatcaagccgactcaacccgatggtactccgagcttgaggagaggtattcccaaggtcagatcgacctggctcgggtttctgcttctttggacgacgcacattctttgaattcttctcttaatgcccagcttgactctgaaaaggcggctaacgaggtaagctttcttattggatctaccgtgcttttactgcttactggatgcttgagagttgattcttgtttgtaggaggagaaacaagcacttgtagcttctcgcgataatctagataggttgtattgtgatgctagcaattccctaaccatcttggaaaggagccaccgctttaccatgacagatctggatcatcatcgtcgtgaactgcaag

SEQ ID NO: 93447 - DNA, 820 bp, Zea Mays
ctagtacatcaccagaatgaggtggagaagacccgatgtggacatccatggaggtatgagaaggggaacccgctcggacaccctcgagggctgggttgcagcttgcactacccacccgagccggatcattaccggcaacaccctcgagggctgggcaaccgctggcaccacccttaaggactgggttctctgcaacagccacccctaagactgaaggattctcagtcacctccatgggaattgaacgaccttgaccaatctcttggctctgaagaccgccttccaaggtcgacgatgcccgagacgctgcccgggatacctctaatcccacatctggaatgaccgagcagatgtccatcatatcaccatcagtttgctcggacagcagatcttcaggaacaacatcctcaagagcctgatcaaaatttgctagggataattcttgcagaccaacaagagcagacggagctagagaaggaatatcgctactcccccactgactctgcaacgccgactattcttacgaactaatgggacttcttcttcgtcctcgtcaacaatacggacaataaacggcacagggtcacacccattgggttcatctctggcagggtcacacccattgggttcagctctaatagggtcacacccattgggatcagcatcagtagggtcacacccattgggttcaacatcagcagggtcacacccattgggatcaggtccagtaaagagttccaccggtacttcttcagcagcaggagcagaagggccagcatcctggtccaaacacgacactcgtcgaagctgtctctttttc

SEQ ID NO: 93448 - DNA, 384 bp, Zea Mays
cggtcgggtgtggactcgtgcgggtcgccggtggcgagcagttttccctggcatgctaatctctggtgagctccgttctttttcttcttccactgcgaagtactcaaccgatagtttgtcacccgacagtcgtggggtatggcgcgtatggaacctaggagtcaccggtatcttagtggagaacggcggcgactgtggaggtcccaccatggagggcggacgactgcgtcaggggctctgggcgccggaggttgaagaaggtgtcgcggatctgggcgttcgactaggaggaagaagattctattgtcgtggattttagaatgaacgaccatggttgggggatagggaagaagggtccctggccggccgatccatgttggatgg

SEQ ID NO: 93449 - DNA, 295 bp, Zea Mays
taccgttttcacatgaaaattccctgttgcattgtgggtacttttgaagaagccacagacattgaagaatcctttgttcaacacagttatagagaaaaaattggtacgccatataggaaagggacatggcagaattttcaccttagtcatatcttgtatctttgatctgctcttcatatttacatttatatccatggttgaagttcattataaagtgtacgaggatgaaataatgaccactggccagtgtttgtctgaaatgaattcccaatctttctagttcactgggtggtgc

SEQ ID NO: 93450 - DNA, 511 bp, Zea Mays
cccacaagcaatttatgacctcgttttgtctcaatgcaagttttgagatagatccatgtgctaccttagttcccgctagaacttcacccgggttttgagacccaactcagaaaccatccagtggtggtttcatgatccaaaccaacaaaaccactatggagtagcatatcctctatgctcactccaataccttaatatgtttcactggcagtcctcaaccgcttgatcaccaagtcctcaagatggctccgctttacttggtcaaccgttatcttgacttggtcaacattgtgtcctcttctatatactcttgcacttgtcgatatctgtagatgtcaaacaccacaatcaatcgtttggcttcactagtcccttagtcaaagcctcaatatccgttcttcacaacccctaaccatcagcatgaactcacttgaccttcaccatgatcgtcatatatcttcaagctccacacttgcgtataacaagctaagagatatgttgtggacaccac

SEQ ID NO: 93451 - DNA, 373 bp, Zea Mays
aaggacttggcaccgatggacataaagcaacgatgaagagcaagctttgttgagattgatgaaccaagaaggccatgtgataacatggagtgtatcatatcattaaagtgttatccagccatgtgttgatttgggctattgatcaagtggcttgatgatgatgatggaggaacttcattctatgcacaaatggtaaaaggtagcatggttagctacacttatggatgaccattgttcatcatttgatgagatgtaattgaattctcaaggcaaaggtataacaataggtttttgttttactagtcaagaggtgcttagaggttgacgattgatcgggttagtaggctagatagtcgtactatcaagaggggtc

SEQ ID NO: 93452 - DNA, 311 bp, Zea Mays
aaatgatgtcagtactgaaacagtttgagataatgcattgcttgactaacaatgctccgtgggtatgtggtagcacgggatgcctgatttggttggtggaaaacaggaatgaggctgataaacttggctttgttgacctgaataattgttacgttgcgcacatataactgcattgatcatgactagcgtgccttgtgctgctctagtgcctctttgggcagcttggtcgcatacatgcttatttgctgagcaaccaccaaggtgccgtcttggtttggtcaagcatcgaaaatcacttattttggcatatg

SEQ ID NO: 93453 - DNA, 271 bp, Zea Mays
ccctatttccctttcagatagtcataccgtatcgacgatggggtcaaagataagaaggtatcgacccggttaggcgatgtgcttagggtggttggaccgatcgaaagaaatggcatggttgaaccaactaaggaaggcagggctgttgtcttggtggtgaacacctcacgtcccttcgagcttccggcttctcttcgaagcatagtagtcgtacgcccagaggtcagtaggcaaccgatttcagtgggggaaaatagggcctcttctcggt

SEQ ID NO: 93454 - DNA, 658 bp, Zea Mays
ggataatggcatcatgtgctgaaccctcctagccagaaagaacatatgtaaaccttagatcaaagtctacagcagctaagatgttctgtgttgtggtgtgtttcctaccaaggaaggcagctctctgatttctaggaactcttgctagcacatgagtggcattaatggcaccaatacagtcctacacattagggcaaacatttgttactacaaacccaacatgaaaaaggaagggatcagtagtggtctgtttggagggctgaccttgaaataagggtaccatctgtggctatctctaactttggttggtgtagcagttgaaggtggtgagatcatttcatttctcagttcaccaacaacatacaatacttccctaaagtatctgctaatggtctcaatagaccttcgaaaggtcatatgtataactctaaacctttggttatgacctaccacatgtaaaaacatggcaacctgctcctctactgagctatgaatgttatctctcaatagctgcctagtgcgaaaaagttcacaaaattgcataaaaggggctcttctcatcctgagtaagtcaacacactcaacatcagtggattcataaataaatctcaagttgttttgcctctcttggtctctttggtgcattgggccatatgtg

SEQ ID NO: 93455 - DNA, 453 bp, Zea Mays
aaaagatcacgtcgcggatgagttcgggctactatggcctcattgttcctcgaccacttgcaccggtgacgtggccttgcggtcgtcaccggagtttgcacacttcaccgcgattgtgccacgcctcaggccattaaccacgtcgccgtgatttgtgatcgttacccagtgaccgtcgtggcttcttatcccgcaattgccacgaatcactgcgtcagtaacctctcctcctctccggcgccgcgcgtctccttcaaattcactggccaccgctcaagagacctataaattgagcacgctaggagctccgtagggtaattacccatccaaagcaccaacacttgcctccaattgttcaacagagaccacgaagtgctcatctccccccaaattgggtttccgccaccgtgaaaaggtcctcaccgtggctagctcgattcaggtccaatcttg

SEQ ID NO: 93456 - DNA, 447 bp, Zea Mays
cttgtacctacacagagtggtttgattggtagacatcactaaacatggaatctgtagacagtgaaagccttagttcaatttagatctagattttggcccagacactaaatatgtcctctagttgccatggtctgctttcacaaggtttctttctgctatatcacaaaaagaagcacaccatgcacaaactgacataggcttatccgaccactgttacggtatgttaatactttgcgtactaaagtacactaaagtcgaggtactctaactgcagaggccatatactggctagcctccatcatagcaactcttgtggcagtagctgcaactcaagcagccatatctactatttactcgattggtaagcaagccttgcactgggatgtttcccatgtttcaatgttgtgcatacctcaaacaaatttctagggcgtatttacatccttg

SEQ ID NO: 93457 - DNA, 324 bp, Zea Mays
caagacttcatcagcttctcgcatctctcaaacaaggccatacaagtagaaagggctaaagaagaagaaaagggtcacctcaagagaaagttccaggtcctccgagctcagcagcaggacaggcagcagagaattcgatcctttgggtttccacccaagggaccaagcttcaacaagccagctggacccactccgtcacgtttcaatcagcagggtcaaagctcccttcaggccccctccattgcaagcaaccaacctctagccaatgcctgttggcactacggagaccccagtcactacaagaataattgtcctcagttgaag

SEQ ID NO: 93458 - DNA, 605 bp, Zea Mays
cctctgctgcttctatcgtgccctcctctgttgctatgatagagccctccgaccttgctttggtgctgccctccattactgcctcgtcaaggttatattcatctaaaatatactttattttttcaagtttctaaaattcacatgattatttactattttcatgttttgtgtagggaaaagaaaaggaagagaggaaaagaggttgcgcgtacaactgacgacaatccaacgactaatacaatgaccaaggttatgaagaaggcaaaaatcaagaaaaggctcgttgcggacttgtaactgaatgtgctcggtttagctgaatttggatgtaactgaatatgctcggtttgcttgtgctgagatttggacttgtaactgaatgtgctcggtttagctgaatttggatgtaactgaatatgctcggtttgcttgtgctgagatttggacttgtaactgaatttggatgtaactaaatatgctcggtttgcttgtgctgagacttgtagctgaatttggatgtaactgaatttggacttgtagctgaatttagctggatgtaactcaaatatctggatgcaactgaatttagctgttgccggtttgct

SEQ ID NO: 93459 - DNA, 549 bp, Zea Mays
atggtccttataattttaatcatgtcttttcttgatttcttagtgcctaataaaataaataacctttgattagctctggactagggttctctgcatttttcctatgttctttatcacttggtattctaggaaaaatatgctcatcctatggttattattttctactgcctttcttatttttctaagttttgggcagaaatagtttttaatggacattcttgggttattcttgtatattggggtgcttagtatttttaaaccgtgtgtatgttgggtatgtatctctacaatttttctttagcctagtatagaagtatttctatttttctctgcattaataagttttgggtattttcctaatttaaatcaaaactctaaaaagtattgcagtaaccatggggtttactatttttgtctgatagtttataatatgtaggtcctagcaaaattagtttgatcaaatttggttgaataaaattcaagttatgaattttccaagttctctacttatttgaaaagaataaatacaaaaggttaaaggaaaaggac

SEQ ID NO: 93460 - DNA, 792 bp, Zea Mays
gtgggatcaacagttacttgctagctcgttcagcacgatgaccctgactcctattgtcaccaactgagttgttgattctggtgcctcctaccacaccacaccagacgctggtatactttcttattcccacccacctctctcgtctcatccttcatctattattgtgggcaacaggaacattctcccagttacctttgtaggtgatctggttcttcgtgagccttaccatattcgcaatgttcttgtcgcccctatatcattcaaaatattttatatatttgtcaatttaccaccgataactcttgctctattgagtttgatccttttggcttgcttgtgaaggatctcactacctagagccttctcgcccgctatgatagctctaggcccctatacaccatgcagctgcctacatccacttctccacctactgcttctgctatatcaccgccttcatcctcgccgcaactgcacgcactgacttcttctagtacctccaacacttggcatcattgactcgatgatcctagccctgatgtgttgtccaagttgtgtagtagtctagtcatctcttgtactaggggcacctctgagaatctatgccacacctgtcagctaggtcgtcatgttcgacttcctttccctagctcatatcaggttgtgcatacttttgacctcatacactatggtttgtggacctctcctgttattagtgtttcgggttataaatattatctagtgattattgatgattcactcattatttgtgaacttttcccttgcgtttgaagt

SEQ ID NO: 93461 - DNA, 369 bp, Zea Mays
ctttcgcctggatctggtaatcctttttcttgtgaatcatgttggctttatcatccgaatctctggatcccttaatgattctgcctcgttatctggttatctgttgtaacccgttctcaagtatcggatgttgatcttgcctaaatctctcattctaatcattctcatactctttctccaaggattatgacgtcattttatcaacttatctctaatcagtgtatccatttagttcaatggatttcattgttgtccttggttctctcatgtctctaaaagctcaacaatctattttgatctcatggttggttcccctcatatctactctcgtataaatctctgacctgataatctctgtgttaatcataa

SEQ ID NO: 93462 - DNA, 344 bp, Zea Mays
ttctaggtctagtctttgcatgctgtaaagccaccttgaatgctttctgacccctgaatcattgttgttgattcttcttcggaggaggaggcaaaatcttgctcctagtaacatcggcctgaaacttggttgagccactatggtggttctaggctgtgatattctagatttcaaggtccttttacgcccatttaccatagcgtaaagatcattgttgttctcttgagtcaaaaagtcgctgacgaaatcattgaaggaagtgcacgatgaaattcccatacttttcatcatcttcaagcttaagcccctcttgaaactagcaatcttcttggccttagtgtcca

SEQ ID NO: 93463 - DNA, 1078 bp, Zea Mays
tctatttgcaaccaggatcacaaggatgtggtgtgtaggaggaatccaaatgggaaacttaaatgggagccagtgacttcttcctcttcgcagggcactatcaacatgatggcaaccactgagcaacaattttctgtaccgcagcagttttatatgccagggattcctcagtacttgcatgtgccatttttccctcagtgcttggcagcgcctactcctgcaccgaccgctccttaccaccttagtttggagctccttgtctgcctcagcctgtgactccttgtggttcttcttctgttaatttcactctgggtgtttcctcttccgcgggtgttccaggagcatatgtgctaccctctgcggatggcagagaccatggagatgtggagacatgtactgtctcagttgattcgtttgatgcacatgctctttttgactctggtgctagtttttcatttgtttcggagaattttgtgtcatgtgtcggtctttcggtgtaaaggattggtcacccaattgtggttagttctactacgggctccataagtagttgtttagtttgtccgggttacttcatcgttcttgtagatgagacctttacgactaatctcgtggtgatttcccttgagccatttgatgttattctgggtatggattcgttaacccaatatcgcgtagtcatatcctgtttctggaagatagtgtctttgcaggcgccgtcgggtagggaggtgatattttttggggagcactccgaagtacactctttccttgttataccaactacttccggatcgttggacaaggaagtcaggaattcatttttctttgatggtggagaatgaggttgccttgtgagtgccggacatccgtgtggtgtgtgattatgccgacatgttcccggcgaagctaccaggcattccactagagcgtgatgcggctttcgaaatcaagctgattccatgtatgcagcctattcataaggcctcgtatcggatggctccaaaagagcaggttgagttgaagcggcaattggatgatatgcttgctaagggtttcattaggcctagcaggtcac

SEQ ID NO: 93464 - DNA, 426 bp, Zea Mays
gaccactcatacatggacttgcacactttgcacgaagtcttcagtacgaagtcggtgctcagaaagctccctcgccttcctcccttggtctgctctctcatctttcagctcttttcttaaaaatgtaacctcagccagggcagacttcgccttaatagccacatcagtgtcctttttcttcttaagttttagctcttgctcagcctttgtcgccttagccgcatccacttcccctagcacatctgcgacgacagcgagctgacaaaaacaaaaccaccaactgtaaacagccaatcaaaaaagcaacagagtgaatagtgatattctcactgagcgtaggtgggtggtggcatttttcagcacatcctccgtaatagtggagacctctgctttcctccgtgcctggacagtggtgtgtagtctccc

SEQ ID NO: 93465 - DNA, 881 bp, Zea Mays
tacagagaaggtcggggtttaactcgcaagatatcccagacacagccaaccaccgagtggactacgggttagattctatttaactcggggtcgttttagcaaaaggtgcgcgtcgaaggggtatagggcgatcctagccgtccgattcaatactgatggatcagattagaaccccaacattataaaccagtacgtgactacggtcgtcagatctctatcctatggttcaaagctgaccacgccttcctgtctaccggatcctgatccaatgaccaagaatcaacgctatccccgatctgatctgagacgtccactacacaaacgacgaccagatctggtagctaatcacagtcgtccgcgctcatctatggtcacggcgttttcttctacctcagactcgccgagtggtgacgctgcacccgccccaggaccacggctgcacggcgaccgacccatagattgccagaaccccagaattcgaaccccatgcacgaatcgttgattacaatgtcactactcaaagtcaggaatatggcgaagcaaggggaacgtccttaccagagatcatcgcgggtaaatctctagccacggtggtgagcagtagtggtgcatcggcgaaggattccggcattcaatttgcatggttagtcctcaagaacacatcgcctgatctctggtcggctcccacggacacccagtacgatgcagcccgagcgatggcgttcatctcctcttcctcgctcacctgaccccatgcgcgtactccacaactcttggcaaagcccatcggccatgctctggacgtccattgatggcagggtcgagttatggcggcagcttcctgcctcctcattgcgtcgatggctctcggtggtggctcc

SEQ ID NO: 93466 - DNA, 386 bp, Zea Mays
gccgaattgtttaccattatcgactgtcaacttggagggaatcgacagacaatattctgctagaagaacttttggttgtcttcaacattattgttgacacagctctagctttgatccaattagtgaaatattcgactacgatgaagatgaattttaaattgccttgcactgttggtagtggtccaatgatgtcgagtccccaacgctgtagtggccaggtgtgtgtagtgagctttgcaaactgcgaagggcgctcgttcgaggtgagattttttggcatgcttcgcacgaatgggccactctgttggctagccagtagaaacctttgcgtatgaccttagctgcgagagctctaggtcctgaatgcgatccacatgttcctctat

SEQ ID NO: 93467 - DNA, 490 bp, Zea Mays
gttaccttcaggacagggagcaggtatcagcgatgctagtgtctcatctactgaggagcgccttcgctctgaacccgtcgcgtaggcttggatccaccacctcctcctactgctgcaaattgatgtaatatttggaaacagaaggtcaggatataatatttggttaaacaaattgatgttatgatattagtatcagaacattcagtattcaagaagagtttagagatgattctagatcatggcatagcacacggagaaagtggaacaaagattatatgagaactgaagcagaattttgaagagtattacatgctcagtcccccatgctcatgcctcaaccaatgctagaagtcaagctagaaaaaaagatcttttattatagcatagttccaaagaagcaatccatcatagttacacagtgatgtcatcaagccacactgctcttggcaacattatagcatgatacatcctaaatggtatagttgtggat

SEQ ID NO: 93468 - DNA, 609 bp, Zea Mays
ttgttgtgcagctgaacacggcacacattatttttcttgattcatacctgtgagcagaaacgctaatatctgttacgtgatgctgaccgttggctgaaattattttttttaggaaagacgagagcgaatggtgggaagccaacggaagtgttgctgatttgtggcggcggcggcggcggcggctaaagagccagcgcgcaggggctggcttggagtagtttaacgagacggtcgttcgtggctaatcagtcaggacttcgtcattcattgctaatactttgctaacgttcaggtttccactaccgattattcgaactttgatctggtcacctcctgttttctctggtgaggtcttctagaatggcacggtcggactagaccaaagaacacggtgcgtaccagtaccaggcctgtctctctgcaatgcgagtgctgtcgtttgtcacatgatagcggtgtcgtgaattgtcatcgattaaagagatgctactagtattttgtgagagtgagacgctgacgagtgtgttacgtccgtggtctgatctcttttgtccttgaaccgaccgagtagatactcctattttggtggtagggatatgtatatatgta

SEQ ID NO: 93469 - DNA, 725 bp, Zea Mays
gccaacatttcagagaggccttgcctgcctcattcggagtccttgggtaattctttgtctgggtgcactgctgttgcccctgccctcggttttgctgctgaaacccaaccgcatgaaacagcaagctttgaagccagaaaacaagagttcttcaatggaatctctaagcattcttctgggattcttcttgttccgcgagctgaactgcatgttgatcctccaccttccccacatactactcccatgccaagaagaagtcgccgtgttgcgggagttggagtggaatttaatattcatgacctgggaggaagaactaccaggaaagtcatgagatccttgcatattatttccgagaatgagggaattagtcaggaagccttggatgaatatactcagcttttcaagtgccccctgacccgtagtgaggtggaggctcttgctgccctgtttgggtggagagcccctgagttggttccccttcagtaagggtgttgttttctggttggtgctgtaaactgtgtgtttcttaatggatccatccaaaattcttatttggaatgtgcgaggtctcaattctcgtgctcgccaagattcagttagagaattagctctgtccgttaaggctgagttagtatgtttgcaggaaactaagatgcaatttattgctagaagcaccttaatttctgttttgggtgctgaattttctgaatatgtcttcttgcctt

SEQ ID NO: 93470 - DNA, 346 bp, Zea Mays
gataaatcccaaatttttccaagacttctgcaatcattccatgcagaggaaatctcaaccctgctttgaagaagctcttaaaaactacaacttcatcatttttcggcttcgggatactctcttccccgccaaagtgaaccaaccccttatcggcttccttgaagtagcctagcttcgtcatcatagtcatatcagcttcagacacagttgatttcccaaaatccagatggctgggcttcgatggcataataatgtcataatcaatctctccttcattagcatcaccctctttgatatctgcctgctcggtttcagcagcgggtgattcttcgtcagcagcgccttc

SEQ ID NO: 93471 - DNA, 979 bp, Zea Mays
atctggtgccataccaactatgggcacgattactttgcttttcttgggccaaacacatctattggtcacatgtgtctccttatggcatatatcacaccacaaggcttttgaaaatttcctagcatgatgcccttcctccccacacctttggcagaagaaacagcgcccaaaatccaaatcacccgatcccggagcagcagtgtgagcagggttacctgaggtgttgccttcacctgaggacgatccttggttttcacctttgatctccatttttccttgagggggcctcaagcaccaactcaagttgtgatttcgcccccaagctagggagggttggcacatctcattggagctctagtggtctcatttcgggtttcttcccttctgctccattgcacggggaggattgcgtctcgcgtcgttaatgcccaccatgggtcagatctcgttcgcaggacgagggtgtaatgggatatcacgccacccgccgcagaagctttgtttctcactggtgggaaggttccataggcgggataggaaggcagtgaggtggggggagggggagagcgagaaccatctaggttagcggagaaccctatgtctccctggagagattccacctgagggatgagggaagtatctagagggggcgagacctcgggttggaccgtcttcatctcaacacggctcgaaatcggctccactccggatgtccaactacgccatttgtaggggccagaatggttggcccatccttgtttccactctgcaccacaactgggccaaaaaaccgagacgaggaggagacaaagccgacaacagacctgagatcgggatttgcttcccgccttccttgtttcagaattttggtgttcagcaacgggagagaggagagggaggccgggacgatgagaccgaacatggacgcgaggaggacgacgccataagcttcagtgttacatgctatggcgacatcata

SEQ ID NO: 93472 - DNA, 272 bp, Zea Mays
gtaaagtgtgtctagatagagcgacgtgtacaagcagcgggtggatagcagttcgggtgtctggaatggcgtgttggttcagccgaaatcactccagtggagtcaccgctaagaaatgaaggaacaaggaagggtgttacggaatttggtgaaagatgtccagatgggtgttagcgtcgttctggacgccaatcactaacaaggtgtaccgacaactgtgctctctacggtggcgcggacagtccatggcctagggtcggacggtccgcgac

SEQ ID NO: 93473 - DNA, 585 bp, Zea Mays
ttgggaaaaagtggaaaactgtctaagggcttcacaaccactcctcattgctctaaggattgctgatggagatgagacaccagcagccctagaaatcatggcagcaatggatgttgcaaaagccactataaaggagtcattgaaagataagccaagattacaagcagatgtactatcatgctttgaaaaaagatgggaaatcgaatggagcaaaaactgtatggagcagccctatacttgaatccgagcaagttctttgctttaagggataaagataggagacaagctgttaaacttagatccatgttcaatgatgtgatgtggaagatgatcaatgatgatgatgagcaaacaaaaattagcaagcaagcggatgactatgagaggtctgaaggtgagtgcttctcaaagcaaggagcaataagagatagagaaagaaaaaatcctagtaagtttttttttgtatttcagtcacactatatttagttatttggtgtttgctaatgaactaacaaagctgcctttttagtcctttggtggggagcttatggtggcctagcatatgaactacaatgcttagcaaag

SEQ ID NO: 93474 - DNA, 465 bp, Zea Mays
cttgatgcttctcgacccgaatgattaaactagaacccattagatcaccgggaacactttgaattgtccccggattgcgcggtcaccgtaagcagagaggttgggagctcgaaccgtgcaattgatcgaggggaaacgattgttagttgttaaattaggtatcaaccaagttagagcaccggccattgcttgtcttggccagtacaggctcgccggagcttggtctgccgccgttctgcatcatggacctgacgttgtaaaggaatagaaatgtgaggggtcccggtgcaattgtcagtgactcaggaaatagtgcttcaaactcttttcaagttgtttataacgccaggggcctttgcgcaaagttatcagtgcgggcgcgtgcgcggggtcatttttcctatcgtgggccatcttgggctgaattcagcccagtattgttgatccttttcctttttctttttc

SEQ ID NO: 93475 - DNA, 359 bp, Zea Mays
atccctacatttacgaacctcgttgggactccctaaatcaatgttggttctaaatccatcacgaaaaccatatttcggccaccgttttgtgttgtcccactgtcccattgactacaaacctatctccagtgtcatgtgttgtcttcatgtcgtcgtcgcgatcttctggtcttccatcgacaacttcgacctaacaagacattatggaagattgttgtgctagctcaattaaaaatagaagatagatcgcgaaaaccatatttcggccaccgttttgtgtcgtcccaccgtcccattgaccacaaatctatctctagtgtcatgtgttgtcttcatgccgtcgccgcgaccttctggtc

SEQ ID NO: 93476 - DNA, 522 bp, Zea Mays
gcccgaatccccacccattgatcttcagcattagcgtagcgaagtagcaaaaatggcagaagttcgaaactgaatgaactcggtaccggccccagaaacgaaccggcaaatcccattacctcggtcacggtgagaaccagatcaacgcagcagagctgtggaggaagtggattcctcgcgcctcctcgctccctatctcccgcgcgggcgcaaaaccaaaacgcattggtgtggggacctgagagagttgggggcgagtgggtgggtgagcttgctgacctactctactctactctactcccttggcggctgtccggctgaatgactgaagtagggaagctagtggtctgtggcctgaagtctggagagtgctctgaaatctcaaatccgcgtctttcgatccgagtacaaaatagcataagctcgagggactggagttcaagatttgccggaagtatcgagtttaggtgctttggaacagcactttagcgcatctcgagctcaaggtgtctcctctagttg

SEQ ID NO: 93477 - DNA, 658 bp, Zea Mays
gcacacgcactgacgcacactggtgttccggatactttggatggtggggttcagctactacagagatgacgaagggcggcgaccactgctttttatttgcagggttggttcctgtgtgctggatggagggagcagagaccaaactaactaacctgcctttgccgtaaaagcctccaataattgagggggggcatccaatccaatccaatccaacccctcttttcattcttttggccagccaaagcccatgacgagaggagcccctgccccaccacacacacacgctatgtacgatggctgatgagccgatcgccgtcactgtcgccacactcacctgtttattaacctctgctactgagtaatggctgtccttgtcgtcctgtcctgtcctgccaatcaagctaagggtagagatgcatacttggccggatagcgccaccgccggtcgtcgtcggccggtggtgcgtacctggccgagctaggccagtcatggtgcggctagctaccttaccggcctatcgcgagtagatcggcatgcacacgagaccttatcctgcgtactatcatgtacatgttgctggtcaacctgccacgcaccacgtcgtccctgcaccagctacagctccccagttcccatgccgctgcgctgcctttcccg

SEQ ID NO: 93478 - DNA, 388 bp, Zea Mays
caataagtttggaaggaaaaagagacaactacaaagggaggacactcacatgaaagagaaggacatcaagaacaacaacacctacttggacagtaagatcttcaaaacaatcaatggtgtggttgtaagcattctaaatcttttccattgtgagaataccaggcttaagttgtttattgcaaattttataagccttgatcaagatgtataatgcttctccatatttgtcttcaaaagtgggtgcatctatccaactcattcaaattcttgatgcatatctttagggggagtctatttctatatcttgattatgttgagactatcgctttatcttagtaatctcatatagtctcttgtatgagaataagtttctcatgaagtatgctac

SEQ ID NO: 93479 - DNA, 412 bp, Zea Mays
atcttcgggagagggtcgcactcttagacccagaccactatcaccagcaggaggattagacacgaaattgaaaaaggacttaggagctggcagattccaagcagagtaggcaacaggagcaccaacatttgatactttgcctctcaagatcatgtctagacggctcaccaaatccttagcaggaattctcctattagtaacccgagtggagtcggtaacaccactgtacaagtaagccaggtatgctctgtccttcagggactcgatgttcttaaaaacaaaatcagcaaccacagctttggcggtcagacctctttccttcagcagacaaacttcagcaagcagaaccttagcctctgttacttccagggcagtaggagactcaatccaacttggagtgcgcacatctggc

SEQ ID NO: 93480 - DNA, 381 bp, Zea Mays
gtgcatgcaaatgttttgtgcggggagtctttttctttcaaaggtcctcaaaacttgtgcggggagtcttctttcaaaggtcctcaaaacactaacctgacagttatcttctagcatgtttaaagcgttacaggtagaacaccgaaggtccgactcggccggagcggccatgagcgcaagtacaaaggcaccaactttggattaacaaggtgtgtgcgtagccgatgaagcaagacaaatcaagacaaaacaacgggacaaaaagacaacgctacccttagtttgttcactagctcaaatgtataagtttaagggcatacttgtaatttttccaaagctatacctcacgactataaatagagtaacattgccatgcattaa

SEQ ID NO: 93481 - DNA, 628 bp, Zea Mays
tgctattagtgcggacgcgtcctgttccaacagattggagctgaatatattgatctaggcaaagcaccgctaataatagtgatcttatcttatggtacaagtatatgtactcttgagagttttgatctatatatacatgtatagccgtattcctggttatggatgcttcacatcgactagttaaggtctagctccaggcgactgatgtggggaggagaggaagttttacttgtcgtcgtctagagagtgataaggtgtgtgtgaaggtgtagggaagggatgttggttttgagaagaagggatgggcaacactgaagttttggagaagacttgaacagctgtgagttcatgacctcaagaagaaaattattatttttacacttttgcttgacagcactaaaattacaaagcagaagaaaaatacactaggatcatcatatcctttttctttattttctaatatacatttttggtgcttaccacgcttaaatgttccggtggcatgttaggaggccgtggtaagtttgagtttagtgttattaggcgtgttttctctgtcttcctaacaacatgcactctgatcgggagcgcagctgtatccttaggggtcaagggcgctatattaatt

SEQ ID NO: 93482 - DNA, 424 bp, Zea Mays
gaaatgtggagttccatcttgttgggaaatcaagcttcaaaaatggcttgttggtcaacttctcttcctctacaatttccttaaatttcactattctcgaaccaccatttctaatatatctaacagcagctctaacacgcttcacagagaggtcgacttcttttaggccatcatgcacaatgagattaacaatgtgtgctgcacacctcatatgcaagtacttgccattagctatattatttccgctcaaatgcctcctcaaataaccaataccagtgtcattggcacttgcattgtcgactgttacagtcattactctctctattccccattcagccatgcatctcatcacattttttccaatgtcatcacctttgtgccccttcaccatgaaaaagccaataactttcttatgaaatctcca

SEQ ID NO: 93483 - DNA, 635 bp, Zea Mays
gtgattgggcctttccctaagttgggtgtgcttaatgaactgttgggcttcaggcaatcctaatttgttgggcctcgaccaatcccactcgggctggatgtatcatccggtatcagagctagggcccattttaagaaggtgggaatgatgaggacattctccactatttatcattggcaaagacgcaattgcccgattggcccaattgtagtcggacgacgaccatgtgggcctcggaattatcccacctctcttaacttggaggaggaagccaccttaaaagggagagccacatttcccatcagactagtcttttcgggcgattgggcctttctgagttgggtgtgcttaataaattgttgcgcttcgggcaaccctaatttgttagccctcggccaacccaacctaggctaagtgtaccatctagtattagagcttgggctcattttaagaaggtgggaatgatgaggacatcctccactattactcgttggcaaagaacgcaattgcctaattggcccaattgtagtcggacgacaactgtgtgagcctaagaattattccacatcgcttaacttgggaggaggaagccaccttaagagggagatccacccttccccatcggactagtcttt

SEQ ID NO: 93484 - DNA, 341 bp, Zea Mays
ctggagaaagacagttctttgggctcgaaattattcaagaggcagaagaacaagtttgcataatccaggagaacttgagggtagcacaaactcgacagaagagctatgctgataatcgaagaagaccactggaattcgaagagggtgatcacgtatacctcaaggtgtcaccaattcgtggaatgagaagattcaaagttaagggcaagttatcccctcgcttttttggacccttcagaatatttaggctagttggggagatggcctaccagctcgagctacctgatcatttatctgatgcgcatgatgtataccacgtgtctcaactcaagaagtgtctc

SEQ ID NO: 93485 - DNA, 422 bp, Zea Mays
ctgaggaacaattttgtctacatccccctcgtcgagttccttcgcaagaggtgatatgaaagtttcaacgatttttgtggaggtcggtgtcatattttcctgcaccatggggtatagaatgatcgaactatctttctgttgcattggtgttgaatttagcgttggtgacttatgacgcgttacacggcttaagatcggctcatcacccaacttgatgtcacgtcgatgccaaaggaccaactcgttcattgccttctgcaaagttatgatcccctcaactggaaagtctatctcccaatcttcacaaccactatctgtgatctctagaacttggaccacagcatagtgtggcgggacaggattatccttgtagttaacaagtcctggttttaccaaaccagtagcagcttgttttgtttttg

SEQ ID NO: 93486 - DNA, 419 bp, Zea Mays
tatacctagggtggtagtgaagtcaggctagcggtgctatggtggttcggtgcaatggcgaggtgacacagtgtaggcagacctggaacagctaggaagatctccgcaaaaaagaacacaagtcgatcaacaaaaatcggcagcccctcccccacacggggaggattccaaaacctacaaataaaagtaacggcgtgatggctgacatgcacacatgtacatcaaatgacaagatgttcgtcaatcacatatatattattaatcaatgcagaagaatatatccaaccacatcaactacttgaatcaattgaactaccaagtaaaataaaaaacttttcatttgagcacgtatagataggccaaattcttattccacaaatgtaacctaatctgtactaatatcatatgaggattatgag

SEQ ID NO: 93487 - DNA, 391 bp, Zea Mays
ctaagccaaaaccgtgccaaaagaaccttaacaacaactagccctactccgttgtattcatctagcagagatgatgggccgtgaaacagtatgaacctaagctgccccaagtgtgatcggacgtgaaagctcacactctacccaccaagcccagtccgtgcagagcccacacttggctgggcccctgaaccttatcccattccttcgttaaacccaacgtccacttccaccagatgaccagactaccaccactcgctttcgtctcttccccctcttcccccaccttaccaaggcaccaacctcgctggcatgctcgccgtctctccctctccccctcctcgccttcctctcctcaccttaacccacctctgcgctttccctctcctcccac

SEQ ID NO: 93488 - DNA, 463 bp, Zea Mays
tatggtgttccatcttgtatgttcggtatacgagtccctgtagcttgcttggtgccagtgctatggtaccttggcgggtcccgcaaagtaggcttatggtaaggttcaaggtcgtgtccggtacaacttcatcttccgacataccccttacatcactatcaagcacacgtaggtatacgcccagtatggggtactgtcttgtcctttctagtgtatgggtcactgtaaagactctggtgctgaggtctctagaccggagttgaccagaccggcgagtcaatgagggtatatccgtcggtgcacacgagagtgttccatcgtgtctgtctgatgtcctttggtactatatgtatggcctggtcatggtttggtgacgttgtgtcttatcgcgaccgtcgtggaccgatagcgttagctcgagttccttccttgcggatccgctcggcggagacttggttgttca

SEQ ID NO: 93489 - DNA, 301 bp, Zea Mays
agagaggccacgacttttcgatgcagtttgccgggaccccaggaggaagacgaacatttccctagaagtggaccccgatgacaatgggagtggttcacacgggttgctgatccccccaggataatttcgccccaacctttggtgactgggccgctggaattgcttgggctaggatcgcctctattattggcccttcctgtctccgctctccccccggctggatctgtccttgggccgcctgagacggtctgctcgtctgaagcttgaacgataatttgaacttatgttccttgtttttttc

SEQ ID NO: 93490 - DNA, 766 bp, Zea Mays
cacggtagccgccgagagaaagagaggagagagaacaaacgcctcggcgctcccatcgcgtggaggaccttcggaccgtgagcgccagtcccgtcttcaccccctccgcgtcggtatgttccatgccccttctctgtagcgtgataggaagcgcgagacgtcttagcctaggcactggcgtggatgcggtggggcaatgctccaggcgctgtcgaggggatggcttgccactggatggcacgtagtctcgagcagtctgtagatgaaggcttggtgccgagctagacggggagtgggaggcgaagaacgttccgcgccgtataacggggactcgaatggtggactcgggtcgtcgctgccagatccttggcgctcggccgtggtgagttgactggagaaagaaaagagagaagggagagaaccggtgaggtagaagacgccaggcatcacttgatcatgcgttggacgatgtggattaaaggatagggatgaagaaaccaggaccgtaggatggtgagtggagggggtagattaaatctcgcgtaccccttcgtaatatggaatccgggcggttagattgtgatcgtgtggcctagatctgggcaggttttcataaagcgcggatctaatcttgaccatagatcttggagcggacagccaggatggatccataccccttcggctagcgcaattcgcaaaagagtccctctgtttatctaaaaacaacccgccgtcctcattaacagtagactgagtattggaatta

SEQ ID NO: 93491 - DNA, 448 bp, Zea Mays
tgcgagctgctggtgggtactggacggcgcaacaaggcactggtcgacgcaacaagtgacgcccagactggagttcctctccttccaagccaggattgtggtcgcgcaacaaggcactggtcggcgctactaatctggtatgggaatttccctcacgccctgcattcttctgaaagtctgttattagtcccagaacacaccacatgaatacacaattttctgtccattttcttagtcactctcgaggattcttaaattactgctatagaaggtatgtgtttaacagatatgaagtgttgttctgaaagagcatggaacaacaaagaaaaagaaaaataaaaaaagaaagcacaaagtctgaacttatgaacttctgaacttctgaaacctacatattattctaaaatttctattaagtctgcagtcacttttgaaagcacaaaaaaag

SEQ ID NO: 93492 - DNA, 573 bp, Zea Mays
ctagggccttttttaaattgacaagtttatcatgttcatcaaagagtagatcctcttgcttctccaagagttcattcttctcattgatggatttaattaattcactgatttttatcaattttaactctaccaaggcttttagaaatcatacttatatcttcctcatcatcactataaagtgaccagtcttaccacatccgaagcatgcacgcttcccttttgacttgttgtcattgttctttcgacccttcaacacttgcttggggtctccttctcgtttgttgccttgaaagcaatgagttgtggttcattggaggatatgttcccttgcaccaagccttcaatgcacttggactccttcaccattatctcatggctaagaaactttccaaacacttcctcgagagtcattttcttgtacctaggattctcacgaaccaaagatacacaagtagcattgcgagaagtaaaagatcttaacataatttttaccacttcattatccaaccatttcttgcttccaaggtcacatacttgattcaccaggtgtttaagacgattgtacatttcttg

SEQ ID NO: 93493 - DNA, 536 bp, Zea Mays
ctcgctttgcagacttcttcgctatcctgtacttctctatgttgtctgcacacttgtcatgatgtaagcgtttgtagcaatctttcttctccttgatagccttttggacatcttcgttccaccaccaagtgtctttaacttcccttctgtttccttgactcaacccaaactcttctgaagctatctttcggatgcatgtcgccatcttcctccacatgatatttgtgtctccctcttctgcccaagggccctcctcgataactctctccttgaaagtttgggccacatcccctttaagcttccaccactttgttctagtgaccttgttatgcttaatccgttgtaaacgaatcttaaaacggaagtcagctacgacaagcttatgtttagaaaaaaaaaacataaaacaacaaaaaagacactatcgtgatacagttcccatgtaatatgttgaaatatggttatctagcattgtagtcttatgttgtttgtcacgggcaaggttggttcccaagcaaacacagcctcacctcgct

SEQ ID NO: 93494 - DNA, 340 bp, Zea Mays
cgatctcaacgacgacgacatcgatgaacccgtcaccaccgtccctaaggatcgtcgtctccctgccgccacccctacgatgaacggcctcaacgaccacctccttcgcttcacctgcagactccagcgccccgcccaaaaccctaaccctagccccaatccgccaccgtctccgcccccaggtactgtacgaccttctcttcttgcttcattgtttttcctcgcccttcaatctacttaatggttctaatttcttccttcgcaaaagccaccgccgaataacaagtcaagaaggtcaagctagatggtgtctccgtggctagatggcatctccccctcc

SEQ ID NO: 93495 - DNA, 482 bp, Zea Mays
tgacattatagtgattgaaatggataaggactacgtgaatccaaaaaaggcacgacaaaggacaggtattagcaatgagcatcattataggatagattgttttttttgctgttctagatctgctacaaaaggagttgaatgatagattcaatgatgtcaactcagagttacttttatgcatgtctgccttgaacccagagaatatgttccatcattttaacactgaaaagttaatcaatttagctaagtgctatcctgctgattttagttacaaggatatggaaactcttgagcgtgagcttggactatatattgacaatgtactgcatgatacagaattctcaaacttgcaaagtattggtgatttggctaaattgatggtgacttcaaaaaagaatttttcatatccattagtgcatcgtctcattaagctagcgctaacactccctgttgctacggcaactgtagagagatgcttttca

SEQ ID NO: 93496 - DNA, 885 bp, Zea Mays
aggcggttgtttaacataaacttcttcttctataaacccattcagaaaggcactcttcacgtccatttgataaagcttataaccacgtgaagcagcaaatgcaagcaaaatacgaatggcttctaagcgagcaacaggagcaaaagtttcaccataatcaataccctctttttgagaaaaaccctgagcaaccagcctagctttattcctaacaacatgaccatcttccccttgtttgttcttaaaaacccatttagtcccaattggtttacaagaaggtggaggatcaaccaaaacccaaacctgattccgttcaaaattttctaactcctcatgcatggcattgacccagttagaatcagataaagcatgtccaacatctcggggttcaaaagaggcaacaaaagcagtatgcgcgaagacacagtaatttttatttttcatacctctgttccttgttgtgcgctcatccaaattacctattatgttcttgggaggatgacgatcctgaatgtgtcgtggtgctgtacgttctgaaatcgcctccccctcaactacagccggtacatgatcaacagtcggtgaagctgcgggctctgttgtggatgtacgtgtcggcgatggtccatcttccaaagaagtggagggctcctgctcagtctgcgcgtctggctcctcctgcgctacaggctgagtatcatcatcgtcgtcatcacatccgtattcctctttctcttcctcaaaaatattctgcccaatctcatcatcacctgcacactcaaaaactgaagagaaacaaggcattgtctcatcgaaggtgacctcacatgtctcctcgatgcggttagtagcaagattaagtacacggtacgctcgcccttgcaa

SEQ ID NO: 93497 - DNA, 577 bp, Zea Mays
cgagaggtcatgagggaaaagaaactgatattatgccccaatggtgattccagccaggggttgaggggtaggggcaaatgacctgtgcgactataccgataactactccatccgttctaatttatgctataaccaaagcaaaagtagatccaatctactaggcaaatcacctagatgcaaaccatcatgataaaaatatgtgcatgaacgactttggtttcattgaagggaaatgggtacaatcaagataacatgcgagtagaagatcatggatcattaccagtagatgtgcagcacagcgaaaaaaacgtgacgatgcagtggaagtcgtcgtacgtcctcacttaccaccaacacgttaatctatgctcctatttgttgctgatcaacaccgcagtagcgtctccatggtaaccacacttgcgcaataaaacactacaacatcaatgtgctagcaccacgcacgcaacggaggaaagacagcggcttgggtgttctcaaccttagggagagaggtgcaggcggcggctaggatgcctcttgattctatcacgctagcctcttcatgtatataaac

SEQ ID NO: 93498 - DNA, 293 bp, Zea Mays
aatgatgttcgatggaaaactgaaaatagagctttttcctctataacctttttccaccatggactattaccaaaatcctaccagcaccaaaactccctagtaaactacaaggaatagtcggaacaaaagaatatcgtgataaacaactattagtaggttatggcgctgttctcaaaaaagattaagaacgtacctaaaagaagttttaggaaaactgagtcctaatgcatagaaacgtgtaccaataaatgattatattgttccacattggaatttgctagcacacaacatgc

SEQ ID NO: 93499 - DNA, 385 bp, Zea Mays
attgcttggaccggagggtatgtgcggtggctgcatccgcggatgcggtgattcagtcggtggcagttgaaagaggctacggtccgtcggtccctctagtgctcgggggaaggccaccataacctggcatgtcatacggaaatccaggaggagttgtggcggtagaggttcattgtgcgttcttcaccgcggcgacatgggaaaagatggacatcatatactcagtgaagcccccaagttggcgttgtacttcagcgagaatcgtggcgattgactccaacgacggtgcttgggcagcacatgccacattgtcgtcttcgttgaaccctggcatgtccgataccagattgttaaggcttcgttttctcctgaaattatatgaatg

SEQ ID NO: 93500 - DNA, 538 bp, Zea Mays
ctctcggccctgcttaggacgaaatcggccttaggccttctccatgtctttccaccacttggcggcttcatctcttggtttggtctatcacataacgcttccagatctactcttgcctttacgttatcctttgacttattaggaatgtccataattgttgcccacagtgcctcggcaacattcttttcagtgtgcatcacgtcaatgttgtgtggaaggagcaggtcgtcataataggggagacgagtcaagccagacttatgtgtccacatatgctgctcaccatatcccacaaaaccaccttctgtattggccacgagcccatctatctgttgacgaattttggcgctagtcatcgttgcaggtgggcggtctgtcactacgacacctttcataaagttcttgatgtctaggcggaatggatggccaggaggaagaaattgtcgatgtttatcgaaggacgaatatttgccacccttttcaaccaaatgaacctgagagcttccttgcaaactgggcatgggaacttaccgtgaac

SEQ ID NO: 93501 - DNA, 406 bp, Zea Mays
ccacaagttcacagaattggctcgctatgcgcctgacgatgtcagcacagaagccaagaagatggcccgtttcttgaaagggctaagaccagaactcaacactatcctcgccagctaagattttctcagcttctcgcacctctcaaacaaggccatacaagtggaaagggctagagaagaagaaaagggtcacctcaagagaaagtttcaagtcctccgagctcagcagcaggacacgcaccagagagttcgaccttttgggtttcctcccaaaggaccaagcttcaacaaactagcagggtctgctccatcatgtttcagtcaatagggtcaaagttccctccaggccccctccgttgcaagcaaccaacctccagccaatgcctgttggcactgtggagacccc

SEQ ID NO: 93502 - DNA, 356 bp, Zea Mays
ggcgggcaccttcaggcttccaaatctccaccactttgccaagctcttgtctagccgtgatagccatcagttcagcatgggtcgagtcagacgattccccagccagcatactaagcacaacatctatctctacatcgtctgtgctagctggcatctcaaaatgagtttgcttctcatcactgggaagattccgaagaggggcaatcagagcctcaatgtcctcgggagatggtcgcactctaagacccaggctaccatcactagcaggagggttggacacaaattcagaaaacgacctatgaggtggcagattccaggcagaataggcaacaggagcaccaacatttgacactctg

SEQ ID NO: 93503 - DNA, 516 bp, Zea Mays
gttagctcattttagaatgattgttgaaatgcttcgttcatgtgatgaacatgtatagttattttgaatcgagtcgatgtggtgtgatgatgatattcgtgattaaactgggagtcatgtgtttgagtagtaaagcttagttttaagttgcaagcgatgcgggaaatgttttagtaaagatattgtgaaatgtgaatgagttattctatgtatgctgcatgtggtgtagtggtggtatgaaaataggttagcatgcaatcggctagttggcgactttgattggaattgtttagttaatttggattgtaaggtgaagtcatggaatgacttcgtagccatcacaccatcggttaaataactatagttaagtgttaaaacagctagagtagcaagtggatggtaattgtaaaggctaggtggaaatgaagtgaaatattgtcgtagttagggctgcacgcactgttttcgccgtgctctctgtttaatgaactaaatcatgttttctgtagaaaagcc

SEQ ID NO: 93504 - DNA, 395 bp, Zea Mays
gttggacttggggtagacgcttcgggttggtgacatcgccggggagccatggcgcagctcctagccgcaccgccatgaccatgtgttatggggtggggaaaacaggatgatgatcgttggccatgggattataaacgggcgactatgattagattgtgtcttccttgaatctagaccgcaagatcgtaatggacggacgatatttgatctcacttgtaccctttcggtcgtataatctcatgccttgatttatgatcgggcggccaccagcgcaaaccggttcaattgtgctcggatctaatcctagccctcggggcgcgatccaacggctgagattgaagcataccccttcgccgtgacttttagctaaagagcccctacccttttcacaaatc

SEQ ID NO: 93505 - DNA, 479 bp, Zea Mays
aagacttgtgactggcgtggaggtcatggtttgcgggcggaggtagttcgttgcgagagccaatcagagtaaacacgagaagcgagaggctggctggggcgtgtcgtgcggagggtgcaggaggcgacacgggtgttggcgagcgtgtgcgggcctagggagagtggagtcatggtctgcttgtgtacgataggggagagttggtgtgcgttttggtgtgagtgaagaacagatactacaactgtacttgtaagtgagaggcaataaaaaaatctattgcactgctcgagagacttgctgccagctacacactactggggctgggttgtttctgcacttaaactcaactgccgcttctacgtgtatgtcgttgttgctaatggttgtcgtgctgtcgagctaccaagtgtaccaaactgaagctagttgtgttgggcttgggcctccgatgaatggccaatagaggccgcgacgggccg

SEQ ID NO: 93506 - DNA, 305 bp, Zea Mays
cgcacgttgtgtggagccacaattgcgcctgttgcgtttgttacagaggcttattgtgttgttgtagcactgatgaccgcacacgcgttggcgccagatacgctggagcttgtactcatgcgaaatgtggtggattattcgagcccctgatgtcacatcatagcgcaaccttcgtaaacaattttgttttcgctctatattttgttttgattgtgttgtgtggcatcatatatttatatatttcgccaagtggccataacaactatatcaagttgtatagtgcttgaaaatctgggaaattaaat

SEQ ID NO: 93507 - DNA, 337 bp, Zea Mays
tggcgtccacctctggtgattccacgaccaaatcaacatacaccatgacgccaaagaaagcagcggcaactggctccatccttgcatcgatcgatcccaatcaagggaacgaagctctcatcagagaagcaaggaaacagaagaaggccatcagctcacccccctgagaagaacttaatgaggagtcagcaaccttaaactcatccaccaacaagttgagaagcgcaaggagaaaatgcttcgtctttcagagctccaaagcaagattaacgaagcaactgaagagatgcgcaatatcgaagcacacgaaaacttgaacaacttcagggatcaagat

SEQ ID NO: 93508 - DNA, 329 bp, Zea Mays
ccagtgggcagccatgcttgtcgatctgcttcaattcaccaccgcctcccggaagcaacaaacaagcaaacggccatcccatgtgacgaagaataaactttagatgaaaactaccgtctcaaacaaataaacacgatatctatccaatccaatccaatccagctcctttccctttcatctccttctccttcatcaggaggggacggaagctgccaagggccgcgtggtgggctcttagtaggccgccgaacgccacagggctgcttcagcagcacggccttgtcgtgcttccagtcgaccggacaaacaaacgtgtttcattcgtgtcg

SEQ ID NO: 93509 - DNA, 496 bp, Zea Mays
gagtgctaagtcccgatcagcaagctgatcccgcaggtgacggatgtctcttcttagttcatttattctatctccgtccgcaacccatgcattggtcctgtgttgcaattccgcttgaagtcgacttactcgggcttcaagatctcctattgggtcattgctcccgctgctactgttcccatgtcgaggggccagttgatgccgaggcaccccgattggtccagttgacttgcgtgccgtttgccttgtacgcggcggcatctttctaagggggaaaactttattagtataattcttagcatgatgcatgtgtaattacagaatcaaccttagttgattcaaccttctatacactgcactcttcctatctggtctttaagatagactcttcagaatacttaggtaagaagagaaaagagtttttaggtaagactttttagaaaatccttttgaagatgcctcataatatctgcaaagaagggctacgctccgatac

SEQ ID NO: 93510 - DNA, 347 bp, Zea Mays
cgctttggaagcttcggcaatttttcttaaaggagtaggactcaaggtttttgttgtttctaacacaacatctagcacatttcccatccttctcctcttaggagttgctgcagaacccttttgtgccttcgacactgttacctctgatgaagggctcaaaatctctggcatttttgttatttcttcaatttttgacccttcagccttatccttatcagccttcgtctcaactagctcaactgaaggtaacttcggcattatagctggctcttcagtcctctacgcaggaggaacaatttcttttgttttgacagccgaagaggccccttcgccaaattcaggtatca

SEQ ID NO: 93511 - DNA, 1878 bp, Zea Mays
ctggtgccggtcctgctgctgtgcccggagaacctggaactttcttttgagatgccctttttcttcctcctttgccctttcaacttgcatggccttgttggaaaggtgagagaaattgaggaagtcttggctagccaggattgtcttgagttctggcctgagtcccttcaggaaacgggccatcttcttgccctcggtactgacatcatctggcgcgtagcgggctaactctgtgaacttgtgcacatattcgctgacagatcttccgtcttgagtcaattctcggaactcgtcctccttaagctgtactagtccttggggcacatggtgctcccggaaagctgcttcaaattccgcccaggtagcatctctaatggtgacgttgaaggtgtcccacccaggctaaggccatcccagaaagttggtgggcagccagttgaacacgctgattttctgggcaaccaatggcttccagtttccttttgatcgtgcgcatccaatcgtctgcatcgagggggttgcttgatccggcgaacgtgggaggtttgagtctcaggaaatcccccattctgtcttgtggtcttccaccattcgaccgttgattttctagatttcgagtgaggacctcgatgagtcgggtttgattggctagaacttgggctaggtctaagggtagtggtggaggtgcggggaggtgggtttcactttcctctctaacagcttccccttcagctatcaggggaaaccctgctccaatcccggaggcggtaggcgtggttttatccgaagccatctgccagggaagagagttactattatgcacatgcaaattgttttcagccaagttatttcattcattacaccatcacattacaagcataagactactacaggtggaactacacgagagcgttccccgaggtactaacgaactccttctctaaggtgtccccaaatgccttgagaagatcatcaaggcttgctagggatatatcctcatcgtcggaccaatcatctattctggggggaggtagggctagaggggccttcttcttctctgtttggcatccttggtcggtggtcttcttctggattttctttttgggggcgagcttctttagcttcttgtcatagtccatcttcaaggttcgataggcctcacgggtgttggcttcctcgccttctgctatgtcgagactctcctggagggatgccttctcttgcttaagctctttgacttgctgctctaggctttccacttgggagtttaggtgggtgcagtgggaggagagctcatcgtagtggttgtcgagggtgtggaggtattcggccatgtagacgatagtggggtcatcttctgtgggatctcctcctgacagagcctggagtcttttcatccaggtgggggtgtttttgttgctgggtgggaaatatcggaggggggtctcagagatctctcggctatagttttggcacagttgtttaagggctttttgagcaacgccctggcaagtgtctgggaagcggtgcccgatgaaggtaatttggaagggagggtggtttgggtagttccggctttctcccaagtagaccgccatagagcacttttctattccattttcacagtactccttcgagacatattcgggcttcttgcggatccccatgcgtagtgcgcaactccgaagaaggtgaggaaagccttcctcctctgagcaataggatgtcctaatcaccaaggggttttccatctggtagacgaaaagaaaggtctattaatatcggggaaaaggggaaagagtgtttcttggggggtaagaggtgttttcttgttaaggcaacttttaaggtcagggctgtggtctacggccagtccta

SEQ ID NO: 93512 - DNA, 1390 bp, Zea Mays
gcctcttgagcgtcgacgtggtttactcgtgccctgccatgatactggctcttgctctgctggctgttggaggagggtgccttggaggcggttgttggggcattcttggggccattcaccgagttggagtaagtaggcatggatgccttcaactggggggcaattattcttgtagtgactggggtccccgtagtgccaacaggcattagctggaggttgcttgcttacaacggagggggcctaaaaggagctttgactcagctaactaaaacgtgacggagtgggtccagctggcttgttgaagcttggtcccttaggtggaaacccaaaggatcaaattctctggtgcctgtcctgctgctgagctcggaggacttggaatttcctcttgaggtgacccttttcttcttcccttgccctttccacttgtatggccttgtttgagaggtgcgagaagccgaggaaatcttggctggcaaggatagtcttgagttctggtcttagccccttcaagaaacgggccatcttcttggcttctgtgctgacatcgtcaggtgcataacgagccaattatgtgaatttatgtacatactcactgacagatcttcctccttgagttaattcctgaaattcatcttccttcagctgaatgatcccttggggcacatgatgttctcagaaagcggcttcaaattctgcctaggtagcatctctgacgacaatgctaaaggtatcccaccaggatagggccatcctagaaagttgatgagcagccagatgaacacgctggttctcagggcatctgatggcttctagcttcctttttattgtgcgcagccagtcatcagcgtcgagcggattgctggatccagcgaatgtgggaggcttgagccttagaaaatctctcatcatgtcctaaggccttccaccattcgggcgctggttctcaaggcttctggtgaggacctcaatgagtcgggtttggttggccagaacttgggctaagtctaatggtagctctggaggtgcggggaggtgggtctcactcccttctcttccttcagctcctagggggaccttgctccaatcccggaggcggtaggcgtggttttatccgaagccatctacaagggggagagaattactactatgcacatgccaaaaaaatttcaaacacgttattttattcatcacacaagttcattacaagcatacagttaccacaaatcacactacacatgagtgctttctaaggtacttccgaactccctttctaaggtgtccccaaattccctgagaaggtcgtcaaggctagctagggacatatcttcaacgtctggcaagttttctatcctggagggaggcagtgttggtggggcttccttttttc

SEQ ID NO: 93513 - DNA, 536 bp, Zea Mays
gagtactccagatgaagctagaagagtttatccggttgaggcaaggaggagaaacggtgatgcagtatctcaacaaattcaaccacctctcttagtatgccattgaccaggtggatactgacttgaagaaaaagaattgttttatgagggggctcaatgacaggcttcagcggaaaatggcaacatgcttggacctcacctacagtaaggctatcagtacagcactggaagtggaagccaaaaatgcgggacatggaaaatcaaagggatttggaggtgaaaggtcaaatcaaggacctgagaagagaaccaggttggtgattcgaccttttaataaaaatcgttcttcgcctcacccaccttcatatccattcaagcaacccgtctttatttgtctcactactgcccctgctcctaccaattagccgagtgcccctggtactcatttccctgcccttcctagttcctccagtggttgcttgaactgtgggaagtctagacatttcatcaaggactgcccatatctgaagcaaaat

SEQ ID NO: 93514 - DNA, 422 bp, Zea Mays
cacctctgtagatattatagtctatgccattgggtaccacatacttgctaactagtgtggcaatctatacttgataatacttcatggaatactaacatgttcatgagtggcctcatggtcgatgcacgtaccaaatagtgttctctagtaccttattgcctaagtcattgtgacagtgcatctatcaggctataacgtcgtgcatcatatatttaatatgtctgatttgaggcttattcaaaataacaatgttatggccatgtcaagattaggctttaacgtggtatctctgttttagggaccataaggcccttggtgggactagccacatccttctgtcctacgtacaattttgtacttagtcatagcaagagtcccttgtttttatggaaggccttaggctctgtaggcttcgagggtcg

SEQ ID NO: 93515 - DNA, 528 bp, Zea Mays
ttgtgcccttaaacatggtggtagatgggattagagcttaccatatgcagagttctcttacaataattgctaccaggctagtttgaagatgtcaccgtttgaggctctatatggcagaaaatgcaggactccactatattgggatcaaactggtgaacgacagctctttgggcctgaaattatacaagaggcagaagaacaagtgcgaatgataagggagaatttgagaactgcgcagtcaaggcagaaaagctatgcggatacccggagaagactgctaaagtttaaggagggtgatcacgtgtatctgaaggtgtcaccaatccggggtatgaggagatttaaagttaaagggaagttgtcccctcactttattggacctttcttgatcttaaagcgagtgggagaagttgcatatcaactagaactacccgatcatcttgcggatgtacatgatgtcttccttgtgtcacaactgaagaagtgcctcagggtacctgaagagcagctatcgatggaggaccttag

SEQ ID NO: 93516 - DNA, 503 bp, Zea Mays
ccccttcttcatctgtcctgaggtctgggagttgttccttgcgagctttttatgcaatcttgccttttcgatgtccaaacgctgagctttgcgtatgagatcttctagcatcggtttaacttctatgcgtccattgtcccttaaacaagcattcagctgagctgattctctcttccagtcttctaaaaatttggttgctttcaccccgaaaggtttccggctgagggcgtctgctactacattggcctttccgggggtggtagtggatcttaatgtcataatccttaatcaattccagccatcttcactggcggagattgagatctggttgggtgaaatgtactttaggctcttgtgatctgggaaaacatgacatttgtttccaatcaggtaatgtctccatatctttagggcatgcactatggctgctaattccaagtcatgtgttggataattctgctcatgaggcttgagtaggcgtgatgcataggcaatgactttct

SEQ ID NO: 93517 - DNA, 676 bp, Zea Mays
aattagaacaattaggggataacatatcttaaacatttcagctatagccatgattcagatgccaggaataccatgctatttgaaagcaattagaagctcttccaaggcataagaaattgacaacatcataactaaagcgaacaagaagatggtgataactatcacagttgacacctgaaagcttgagaggtgtaaattataatcgttcaggctaagaggaaagacaataagacagtgacagttgtcacagttgaaaaactaagaaatgttcaggctagcaagaaaactccaagctgtttattcatacatagacaccaattttattgtttctacttattagtgcacttctcttttttttaagaagaagaaaacaaatgagttcccatgaaattgtgacttagagatgaccggaaacaattactagagactagcacaaagtacgcatggagtaaaaaattctcggctctgcaaactttacacttggctggggctctatgagatggtgcacagctgcttggacccagagtgtagccagttatcacttattagtgcatatcgccaggagctcacatgttgagcaatcatttgccagagccgagcttcttttttttttgcagtgcagacagaatgcaggtagtcataaatcttctacttgccacatttgcttcttgcaaac

SEQ ID NO: 93518 - DNA, 374 bp, Zea Mays
ctggatattattggcgatttattctagatttttctaggattgctaaaccaatgactgagctcttcaagaagggagtcaaatttgaatggagtcagaaatgcgaagatgcctttcataccttaaggcagcacctgacaacggcacccatgctaacacaacccgacaacaccaagtcgttcgatgtatattgcgatgcttctagaataggacttggatgtgttctgatgcaagataaccgagtcatcgcatatgcgtcaagagcactcagggctcatgagcagaattaccccactcatgacttggaactaggagcggtagttcacgctctaaagatctagaggcactacttgatgggatcctgatgtaacttctac

SEQ ID NO: 93519 - DNA, 377 bp, Zea Mays
gctggagatgcagcggctaggttattttgggaacggtgtcgggcgggccccaggggcagaagaggtccccgaaccggagggggaactgatagtttttgaagtttttttcgttgctggtcttcgcccctcgacgcatcggtttgtagtggaggttttgcggaagttcgaggtacaagtccatcagttgacaccgaatgcagtggtggcgcttgcgaagaacgtctaggatgtctcctcatacggcgggcagccgtctgtggaagtcttcgctaagaattattgtctgcactggcagaagagaaaaataggtgataagatagcccaatttggatcgtgcaccttcacgccaaggactgggaagacctcggctgaagttg

SEQ ID NO: 93520 - DNA, 508 bp, Zea Mays
gtcctccgccgaattctaacgggggaggggcggcacaaattgtcacctctatgggaaggaccattcatagtagctgaagtcacttggcctggatcatatcgtctcacacagatggatggcacagaagttgggaactcatggaacatagaacatctcaggaagttttacccctagctataccccaaaagctgtcgggatgacaatgtattctgaaaactgggaaatatatcatcaataaaaagactttaagagcactcaagttgttcactatcaacctacattcttacttaactcggggtgaccactataccctgctaacggagcaatcggcttaagtcggcgatgacttaagacggtgcgacatgctcacgcttacttaactcggggtgaccactataccctgctaacggacaatcggcttaattcggcgatgacttaagacgatgcgacatgctcacgcttacttaacccggggtgaccactataccctgctaacggagcaatcggc

SEQ ID NO: 93521 - DNA, 636 bp, Zea Mays
gtgaaatggtctagtaagaatctctggtcttactgcagaggtcaggtcaaatctagctgtgatatgtgatttgcataatttggaccaagagcagttattcgagtgaaaaaaaaacaaaatcagcttggagtggaaatgtatcccaatgcactggtctatgccataaatgctaataagtttgttgatttggtaaatgcatatggtgtggttgagtggttctgtgacaatgtacagtgtttacttttaatttccctcaggcgtcatttctatgctttagtttatggatttgatggttatattgctttgatatttgtctgctttaatttccctggttagtcaagattcattgatgatccacctatgttaatgctgatgtgcaggaagtatgcttatttttttacatcttttttttctctgttgctcatattgctgcactttgctgctgaatctatccctcttcccatgttttattagtgacgtttacttgactgtgatttgtgaagcttgatttaatcacacaagatgctttcagagtcttatttcatgcagttgtttcccaatttgtcaggttcacctgtagttaattttgtaaattattgttatatctgtagctgccccaatggaagttgagctgcc

SEQ ID NO: 93522 - DNA, 593 bp, Zea Mays
acagcaaggataactccgagcatgccagggagtgcatgggtgtgtaggcgtggctcaaccctgaagacccacgcagattctcagagcacagcaaggcaagggtgaaattatcttcggaaaggggggggggggggggggggtagagataagatggcactgtagtagatatttccaactggtgatatttcagtgatgatcacagtttttaacatccctgccctcttctcatctttatcttctctctattccaaagtaagacacgacaagggaggaaaagatcagggatagatatttctgcacttttgaatctacaactcttgattgatcctccctacttcagtcagtcttttctccttattttgattaagaacaagtcagtcaccattaatagaacttgttcactaatctagggtctgcaaagttcctatcggtttcttggacccaaacctcatagattacaagttatggtatccaaaaaccagctgcaatacacgggtaccatttccactccctggaccctaatcttcagtctttagctgatccctcccttttcgacagagacaatttgggcgcccttatcttctaaattggta

SEQ ID NO: 93523 - DNA, 631 bp, Zea Mays
tgatcaatggcatattgggagaaatgattaaatttgttgagatactacatcacagaatctcccacctccttcagacgtatgaattcttccagcttcatctgtagcactccttctggaacataacgctctctaaatgccaatttgaactcttcccatgtgacttgatgtcccgcatgccagatggcagaaaagtttgtccaccaggtgttggcagggcctcgcaattgttgggcggcaaataggtgcttttgtgtctcggtgcatcggattagcccaaacttttgttccatcacccgcacccatacatcagcttctatgggctcctatgccttgacaaagagcggtggatgggttttggagaactccagatagttggtgtctcgtggtccttgaggttgacctcttccttcgtgttgttgaaatcgatttcctgccatttcacgctgaaagcacgtgttttcggcggtagcattgaccaaggcagcgatagcctcggtcagggtaggaggtacaagtggcagattgggagtgtcttctccaccgtgggatgtacccgccccatcatgagcacgagtccgggatggcatctgaggcaaagaaacatttggaaatataacatgccaaacataca

SEQ ID NO: 93524 - DNA, 470 bp, Zea Mays
cgaccaaagtgatgaggagagggatgaggaattcatagttgcactagttgctttggatatatggaggagctcgtcaagtggggtttcaagaagacccatggtggaaacaggtatccaatgtgttgagcgttcattggagagtagtgatgattgttatgacatgtttcgcatgtgtcaaactgtgtttcgtcgtctccatgatgcattggttcataattatggtctggtagcaagtcgcggagttagtacgaaggaggcgctagcaattttcttgtgggcttgtgggggccccaatcatttagacagatacggaacaagtttgggcattcattggaaacaatcagccggaaatttagtgaagtcgttcacacaatatataggatgtctaatgacgttattaagtctagggaccaccatttcactgacattcatcctagactgcgagaggctagattttggtcacatttcaa

SEQ ID NO: 93525 - DNA, 660 bp, Zea Mays
cttttgtggccatatggtagtttacaatgaggtttgtgttggctatatttgttttgattgcatgagaagttttgttccatccatccttatttattatttttttgtgtaggataccagaaatgcacttgggagtttttttatggtaaagacgaggtgatgcatacgataaggtcgaagagactcatgggactgaatatgtggtgtggatctcagctcgttgattcctacattaaatatcgtagataggagatgcataggtatgtggattcacaagattgtgattgcccgaggcatgttgagctgagaatattgaaggcggcacacaagaagagagcacatgagacaaggaaatggagatggctagaatgcagaaacagatgttgggaaatcttgttggtcaactgagtgcaagtgagtgagaaaaacacacgttgttttcgcttgcacattgtatttgctaacttatttgtctcaatatatttgcagagattggatgcaccgggaactatatcgtagacgaggctcgtgcaagatacgttgagcaaaaaatggtgaagtggagctgatggaggaggatgacaacacatcaaggttgagtgagctcatcgcgctagctgagataggattacgtgcgcaagaggaagaggatgagtctatgtc

SEQ ID NO: 93526 - DNA, 320 bp, Zea Mays
aatagttaacaggccagtctaaagatgtcaccatttgaagctttatatggcaggaagtgcaggactcctctatattgggatcagactagaggaagacaattctttgggcctcaacttattcaagaggcagaaaagcaagtccgtataatccgggagaagttgagggtagctcagaccaggctaaagagctacactgataatagaagaagaccactggagtttgaggaaggtgatcatgtgtacctcaagatgtcaccacttcgtggaatgaggagatttaaagtaaagggcaaattgccccctcgctttattggaccatt

SEQ ID NO: 93527 - DNA, 397 bp, Zea Mays
acaaaagcaccgagtaagctcagacattgacagcacagtgcagtagagctaaataacttacttcgcactcatactcgaatatgatcctagagaaatcggtgggaataacgagaaggcgaccatcatgtgcaaatgctgcgaggagcttgccattgggtgaaactgccatcttctgcacgggtccaatctccagctcttccccaagcacttgtacgccatcctcgtcaaccgcaatgacccggtcgccaacagcaagcagcacttctgggctccctgacatgacaaactgtgcctccaccacggccatacacagaacatgttcctcatcaccgatgcctgggtcggcgaggtgacgggggtgaggatcgtcgacctcgatgtcagtggccaccacgac

SEQ ID NO: 93528 - DNA, 715 bp, Zea Mays
atgcacgaatatctggtcccaaacatagaaaattatagttaatttaggaatcacaaagcatactgataaagagttggactgtcatactaagctcccacagcaggtgaacataaaaaacttaaaccgagatatctctgtatttccatcatcactgtaaactttggctgacaatagagaaaataccaatatactttctaactgcagcaccctctgtacagcttacaacattggcagcatcgtaaagcatcacaaatttaaagaaagataatcactgaaaggttgcaactgtgtcccacaccatagaaaagataaaaatctgccctatgcaccatatcatatatgttcttcggtgatgatctgacatgggtcagttctattcgatgcttgacactgagaccatggtttgcttgcatccatggacatcttttgttccgcttgtcgatgttttatgattgagaccactacacttcactgcaaccatggagagtaacacacccctagtgttttgaaatagaagcattatcaactaacattacgtcactccaatttgtaatgcatcgaatatattctctgataattcttgtgcatcaatccaactccttccagtatcctttcttgcacgctgggtgtcgaatacagtgcgattccagtatttctcatcccacatgtcaactgaagcatgaatgcttgataatataatgtatgcagaataatc

SEQ ID NO: 93529 - DNA, 487 bp, Zea Mays
gcgatctagatgaatctactacttgcaacataaaaaggggaacaatgctagctgaattaattgaatcaacttctctaataatatgggatgaagctttcatgacacacagatgtgcatttgaagctttagatcgctctctccgagatttgctctacttaaatgcatctgcttctaccaatgctccttttggaggtaaagtaattgtcttaggaggtgatccaagacaaatattgactgttatagaaggcggagatcatgcacaaattgttaatgctgcaataacaaactcaccactttggtcatcaattattgttcttcacctcacagaaaatatgaggctagcttcagcagaattaacaaatgaggaaagaactcatattgctgaattcagcaaatggatactagacattggtgatggcaacataccagctacagtgaaaccaggggaatctgaacctacttggataaaaataccatcagaattctt

SEQ ID NO: 93530 - DNA, 470 bp, Zea Mays
attggatcttcagtgccatggccactgacctctaaggtgcctaggctggctggaccaatgagcatataagaactcgtcaccgcgacatcatcagcctggggcattggtgaccccacatgaacatccatcgaagcagtagagggggagccgaccgaaggaccctcaggagctagagcaccccgagggttgaagagacctagcagactggcaggcttacctctggctcggccagtaaggcagcatagggcacatcgtctgggcactctacacggacgtcaacaactctgatttcaggcaactcaagcaaaagatcttcaataatagcgtcttccagcacactgtcaatgtcagacattgtcaggcctcagatatccattatccccgcagaagctaggcctgacttgtcgccaccagctttacttcaccattctcgacggacgaaggggagcatttattccccttcctcatca

SEQ ID NO: 93531 - DNA, 744 bp, Zea Mays
tcaattttataaatgtcttatcaattgtatatagactatggaagttgagcaagttgttgctggtagtacctcaaggactgccatgcgctggacccctgtgatgtgagcctttatcccgaggaagtttgcggacttggttgggcaaggagtaaaaacggataaaagggttcaaagaggtccatgtcaactttgttgccaaagcactgactgaattcagtggccaagaagtcacaggcacccaggtctacaatcatttgaggatgtggcataaaaatggatcaaggtttgtaggctcaaggacctaaacggtgctcattgtgatgagaattcattcacaatcatccttgatgatgagcacctgttgggccatacaaaagacaacccaaaggatgctgaattcctcaatgtgccaattgaaaactatgtgcaaatgcaaaattatatttggaactgggcaggctactggcaggtatgccatgacctcaaatgagccccttggcaccatctcggacatcacttaaggtgctggtgcatctaaagaaccatgtcttgttggtactactgcttctggttctgctggtgccagcccttctcatagtggctatggtgctgctagttcttctggatcctctggaaagaaaaggagacttaatgataaagagctggggattatgacaagacttactggagctgtgaacaaattggctgaagctgtccaagcacctattgtggtccagaccaccg

SEQ ID NO: 93532 - DNA, 625 bp, Zea Mays
tcaaactctttggaagaaataagctgtacaaatacagtgaccatatatagggattaaacggaaagcaaacgaaaaatttggagagcggagatccagctgactcgttgcccacacacacacatgctgttggactcttccatgcgttgcacgatacgtctattaacagcagacatttttctgacagcaagaagggctcccctgtacgggaggatctgcgatggagacggcgagaaaataccaggccatgaacataatataatcagtgtgtaaacggatggtggtggtggtgggctacttaccaccgggacctccaggcgtaattgctgataagccaagatgaaccgttaacatgaccaatatcagaagaagcagcagccgagtcgtcaagaaaccacaaccgtttctttgcatgttttgtttcctggttggcagttggcaccgagggatgacgatgctacgcctaaaatcacaaagcttccggagcctattaatagccgttgcctgcaggctgcagctgaacccttgtgtgtcaagtgagtcgggggttgttgaaacgtaaccttgttcaacggtcttcatgatgatttcacacaagaccatcttggtccattttgtagggattgat

SEQ ID NO: 93533 - DNA, 359 bp, Zea Mays
actatcaaggttttgtcagagttttcggatgtgttcccgaaagaattaccaggtatgccacctgagcggaaagttgagtttgccatagagcttcttcctggcaccgcccccatttctaaaagagcctacagagtatctggacccgagttggttgaactcaagaagcaaatagatgagctatcagagaaagtttacatcagaccaagcacctcaccttgggccacccctatcttattcgtgaagaaagatggcaccaggaggatgtgcatcgattatcgagatttgaatgagatcagaatcaagaacaagtaccccttgcccagaatagaagatctattcgaccagctgagaggagccag

SEQ ID NO: 93534 - DNA, 277 bp, Zea Mays
cgtcatgcaacgtctgttccggcttactgttttgttgtactgcatacatgtatgctcgttttaggattttttctggattaaatgtaggtgttaagcaatatagtcatttcgaaattttaattagccatccagctacctacttctgtcaaaaatgttgcgctggtgtttcttccttgggggtgggggatggcaatggtactatcaacaagttatctatgcattaggaggtaattactatttagtgttgttgtctgctgataactaagttatgtgcaag

SEQ ID NO: 93535 - DNA, 422 bp, Zea Mays
tgtcgaagtacattgtagtagtgattgtgttaagttaaatggtaatatctcgaatgcacgctacaatatggttgtatgcgagacgggattatgcacatgatgagtctagtaaaaatccatcggtgtcggcatgatttctgttgtatggcggatcgatgtcttgcttggtcaagtattgcattccattcccattggataaataaataccttgttgattgattagaggtcttatatgagcgtgatcgtagcccaaaaattattggaggcgagtagcgttcataagtcagtctttgttaaaattgaagaacaatccgataagatatgcacataagtgttttaggtccttcagtagcaaatgtaagtcttatggagttttacgccatatgtaaatgcctctatgttagaccccaacaatgtgctat

SEQ ID NO: 93536 - DNA, 530 bp, Zea Mays
attgcctcgaagctcatcaaaaattgtctcgtggtagactagacataataagttggaagaatgtatttgtagcctagagatcattgtgctagccgtaagtttgttgatagcagtgaggttggatcaatagaaatgaatgatcattgggagcttctttgtggcgaagctttcattgcagaacttgggtcatcgacatgtatatcatcttggataatattgtggatttcttcctttaagcgccatagagtggctttggcctccttgatttttttgctttagtaaattttatcttgctcttgtttggcaatttttgagttctttctccttagcttgtagttggtcgtgcaattttttgaacatttgttcttcaaatttgttttggtttagctctatttggatgaagccttggttttcattagtgtgggtaagtcattttcacttgtagtaggtgtcattttcttcgtgggtctagctattgtggtctagatattgcgctcgtagtcgtgagtgttagcgagtacacataaaca

SEQ ID NO: 93537 - DNA, 461 bp, Zea Mays
cgagcctgctcggacgccataagagcctgctgttgtgtaagagtctgaaggatagcagccagagcagggtcaaccgtaggaggagtagcgggaatagcactggaactccgagcttcatgatcatgtgagcagggaggcggaggcggaatcccaaagtcatcatcatcagggactgttgcgccctgagtctcaaactgatggtaagcgctatcctctgcctgagtgtcaatcactggatcaggtgctggcactggatcctcagggattggacgataagagccaaagaggaggggagaggcctcaagggtgccctggaactgtcgtggccagatcagctgtgcgaagatgtggcagagattgtgagcatatggcagctggcgccaggcacgaagtccatccaacacagtgtcctctatctcacaaatgaggaagtcaacaacatcaaactctgaatgagagat

SEQ ID NO: 93538 - DNA, 507 bp, Zea Mays
gtcctcctgacgttgtccatagggtcgtgtgctatcgtaccaatagtatggcattccatcttgttcgtttggtatgcgagtctatgtagcatgtttggtgtcgttgttgcggtacctggtgggtcccgcaaagtgggtttatagtaaggttcaaggtcgtgtctggtatagcttcatcttctgccataccccttgcatcactatcaagcacatgtaggcatacgctcggtatggggtattgtcttgtccttttcggtgtatggggcactgtagatacttcgatgctgagccctccacgactggagttgaccggccccgcgagtcagtgagggcatattcgtgggtgcacacaagggtgtttcatcgtgtctatttgactccttttggcattgtaggtacgacctgttcgtggttggtgacattgtgtcttgtcagggccatcaggggtcgacaacgttggcctaggttccttccttgcggatccgctcggtggggatttgatcgttc

SEQ ID NO: 93539 - DNA, 504 bp, Zea Mays
gctacttgtactagcacaagatgaacttgtgcagattcagcatacatatgtttcagctaaaacatgaattatcaatccttaaggtagtctgccaactaatgagtaatctgttgttcctccttttctgaattttacaccaaaatcaagtgtcccagctatgtatcttctgatcctcttaatgttacaccaaaatcaagtgtgcagagtcagcatacatatgtttcagcagttacaagcttaaccctctgctccattggggtgtctgttggattgcacctgcccatattgcactgctctacaatcttggctgcataagacctctggcaaatagtgatttcatttgtcccttgccttacctccatacccaagtagtaactgagcagccctagatcactcatactaaaagtcttcttcatctgttgcttgagatctgcaatgtcacttgcagagggcccacaaatgataaggtcatccacatatactcctataatcagcatggacttc

SEQ ID NO: 93540 - DNA, 537 bp, Zea Mays
ataccttgatattccgcttaaggacaacattaaagggtggcgccttgagtggtttattgtggaaaaccacggcaagtccctcccccctcggtcggggagacagccagatgtgcgcactccaagttggattgagtctcctactgccttggaagtaatagaagctagggttctgcttgctgaaatctatctgctgaaggagagaggtctgaccgccgaggctgtggtcgctgactttgtttttaagaatatccagcccttgaaggatagagcatacccaacttacttgtacagtggtgttaccaactcgactcgggttactaataggagaattcctgctgaggatttggtgagccggctagacatgatcttgagaggcaaagtatcaaatgttggtgctccttttgcctattctgcttggaatctgccacctcctatgtcatttttcagtttcgtgtccaatcctcccgctggtgatagtggtctgggtcttagagtgcgaccctctcttgaagatattgaagtgttggttgcttctct

SEQ ID NO: 93541 - DNA, 445 bp, Zea Mays
cactactccgcaccgacattgtgattgcccactccacctttgttgtggccctcacgacttctaaggtggctatctccgttgtccgagagtgcgaacgcgtcattgccctcatctaggagggcgaacgcaccgctgccgataccctcaccaagaagcttgacgaggctgagcgccatctgcttggctctccctgccttgaccctcttccggaatcccagtggtcgaccccctccattggtgtatgatgtcgtcgtcattgccaacctccacgcccaaacgagaagtgtctagaacatccgctctttgttccccgttatcctcgatttagtttcctccacctacgcttgccaacgcgacctcgtcctcctcaccctacagtactacaccctggacaaccatgtcttcattgacacggtgtccctcactatcccctcttggaggtgga

SEQ ID NO: 93542 - DNA, 495 bp, Zea Mays
aattagaaaccatttaaatattcaatatttattacttatttactatcatgttttcgaaaaccgggggcgataggatttgtgttcggtgggggtgctaccgtggacttactccaaatggtgaatcactgggactcaaacgtggggttgagatagagggtttatactagttcaggcttgtgcctagtccagtgtagtgctgatctattattgcttaggagtgtgttacaactggtgcaggggttggaagaaggtgggggtcctgcccttttatatctcaacggtaggaccttatagaggagatcttttttcttagagagagagaaagattggctcccctgggttgtcgtggtgggtcctccatagggtcgtgtgtagccgtattcccgatatggtgttgttcattactctgactcttgtagtgagtccatcgctgatgtctttatagtggtgttcggtaggtcctacggatcagtctcacgttgcggtcgtacgtgg

SEQ ID NO: 93543 - DNA, 964 bp, Zea Mays
accagcaaacgagctcgaaatattctgatttttttatcactgatccaaaatcacaattgatggaagcacacaaaatttcacttgaaacagagttgtattgtggcctagagaaaatcacaaaggatctctaaaattcttgaaaacacttaaacaattttttttaattatcttcccgattttttttgaattttttgaccgaaccaaacatgccatagacgagtttgggtcaccccagaatggagtcaggaatctgctgtaaaaatttgagctcaaacggagcaccgagcgaaaagttatgcctgttttatggaaggtacctcaagttatggttttccagggcacaaattggtaggaaccgtagcggcggctatagagcacaggggcacaaacctccctagtataagcaataggtaagcgcgagatgatgaaacaaggaggggctgcaatgcaatgcggcttgcaacctaatataaggctagtgtggcgagagttcacacaaggcggctagcgagggcaaatcgagtaatgtggtgtctcgacttgtaatctgggtaaggtggatgggatagcggcgggaacaaataacagcgatggagcggttgaactacgattatgacacgacctaaaccagcaacaagactcgacacggacacaaactcaacgaagtaatctgaaacgaaattgcaaggctaaacatggtttctaggacagcggaatattttttttgtatggcaattatctggagttataggatggaaaaaactaaactaaactagggtaagcctgacggtaatacctgagtctttgaataccacttgataggaacggaggtgcccgatcttccgtcaggtgaagataactatcgatttggtggagatgtcacacagacgatccggcttccaatcaacacgactagaaccccgcaatcgcagcaccacttctcctctggttatcaaccgtgcac

SEQ ID NO: 93544 - DNA, 749 bp, Zea Mays
caaaaaagtcccgtgtcgacgtattggaggcgtgcccattaatattgtcttggtcaaacaatgaaaggtttttgtcgttatatgacgacaatggtgaagctcaaatgttttgacctttttttttgtagggtgcattttcacccctctctatgaattaatttgcccatgctatcagatattgtagcatctcctaagttcagcagcattctagtcccaaacatctctgtgtcatttgaccttccttcagcagctttggagtctgctactctgctatccatccgccccctccctctaagcaagcggtttccttaccttttcctacatttgtcttatcacccgttccaatcttattccttgtacaatgatcgccatcttatcaactttatcgccaaccctgtcaccatcgtcacatcttgcttgctagctgagtcatcctgaaaacaaagaacatctcgcaattttcagatactccataagatcggcgaggagcaaatatttttttttcttagaatccaaaacttattagctactgattgttaggaggaggacattggggccttcctgttgtgcttgtgctacaagaacctcgtggttggccccgaactgtcgtactctcggttgcattagcgtttcaagaacagaaatccaaacataccgaaatactgcagcaaaataatccatatagcctcatagcgatttcttcttattaagccgctgcggcttcgaggccaatcaatatatccacgtcg

SEQ ID NO: 93545 - DNA, 386 bp, Zea Mays
agcctgcagagccggcccagcacgggcccaactatgttgcattgcttttgtctgaatgactgaatgtacgtttcttttaccagctaggttttttttaacgccagaagtccgtatgcggtcggaaatagccagtaggacggaaatagcctcttcggggatttgttctttgcggggccccgaagctacgtacaagtacaagctccgttccgtcgtaagcggggaagaataattgctccgcttttcgccgccacctgttggtccgtccgctagacttgcagactggaactggactggaggtgcatataaacatctgattctgaagaagcgtatttggacggccatgctgcatctgctagtctgctccctcgttgtttgtaatagtctgg

SEQ ID NO: 93546 - DNA, 660 bp, Zea Mays
gtatgagttcatcgtcgtactattccatatttaaataggacaatatgtgagcaatgagtaggttaggggaaagtagcctggcattactagagaaggatgaacatgcgacactggttgcatcattttttgggccgttttattcggtcatgttgctttcacaggcgcgcagggtttctttgttggccgatcatgtagaacggccttcttgttagcatatttggagagcaattgatcaaaagtggggctatctttgactagtcgaccatgtgctttgcccttgtgtaccctttttgctttgtgtggacaccgacgcctctggccattgtcgaactgttcagctgagtcattcggactgtctgcttgagcaccgaatcgtgtgtgcgcgggtgtcgaactgttcgcgatgcatgcgacagggagcttttatcggctgctcgatcgcacttgaccccggcgccttcggtcttgttagtcttcttgtccggagccttccgagcaatcactcctagcgatatatttgacgtgcgaggctaaccaataacgatgttttttactttgcctttaccggccacttccggatgaaccatgacttttttgtttgctagttctattacattaacaataaatggttgtgcgtccacttgcatctcctgaaaaatc

SEQ ID NO: 93547 - DNA, 816 bp, Zea Mays
accagggtgcttaaacaagggagagagagagatgaactaacctggaaagggctggccgcggtgatgggtggtttacggtggcggagaacagatttgggggcaacgcgaaattcaggcgagctggtgggcaatcggatgtgggacggggtgctaaagcttcacaatttcctggcgcaactagccctgccctcaatttataggctccgagagcggtggctctcaatttgaccgcgcagtgctggcggccggaggtgaagaagaacctgggtgcggtgaattcgtggcaaatggcgtggcgagctccccgtcgacgatgggatggcttagaggagtcacgacggtacggtgtaaagatagagccacgcggcggacgccggtaatggctcaacggcggtgaaatccttatccgaaggatcggtgagcaagggggaatggattacggcgggccgaggtggcatccagcccaccggcggcaaagatttttaccgagcggagcttatccgatggccacgacgcacgaatcacggcgagcggtaatcgacggcggcggtcaccggcgatgggcaagggggggtgaacctgtgatcttcttcagtactgtaccatggcgatcccattcagacagtctgtcagccgaacttggagcattattatctcttaatttctaatgttaacacatgtcgagctctgcagcaaaaatgtagagcaatataccaactacaattcgactataggacttgaacatatttgagcactggattatgctcaaaatctagcttgaagtcgaggtcagctcactgctagtctgaaaattca

SEQ ID NO: 93548 - DNA, 483 bp, Zea Mays
cttatttcctgttgacgcgacagaccttgggacggttgtacaatcggtggaagccgacggttgagctgctggaattatttgcatatgtggagtggtcatctgttgaacagacatcgcacttgcgaactgctgcatcgattctggtggaggatttgatagcatttgagacatcaagtctttgaactctttctttgcctcctgcttaaaataatccgacaactcttctttgtattgatcacatttcttgtacaaacgtttccattgtggtccgaatccttccttccatccttccttagacgagattcctcgtacacggcctggatgctcagggttaccgagaccagccgttaggatgtctctctctctttgtggcttaaatgatccttggctctgcttagctgccattgcatatatgtttttcgcaacttcttcgacatttggatcatcaaaagatacaccagccttagtttccctgggttttct

SEQ ID NO: 93549 - DNA, 374 bp, Zea Mays
acattgccaaccagcaccccgctggtgaggcccctcgccgtcaagattatcccccctagggccgcgacaatggcacacatggtcggggttgaggacgggcacaacagccacgcagattttactgcctgtttcacgacgaagactgcgcgcacccgacgagggactgcctagaaacgaaggccaccagggataggatgtcctgagcacaacccgccgacaacccaagagttgtcgcccatacatatcaacaccacctcccacaaccatacaaccacggccccgctcagcatccacctaaccacgcatatcaacacaaccaggaggtacaaatcgtaccacctccgctccagcctccgcacccgcatcagccaaac

SEQ ID NO: 93550 - DNA, 613 bp, Zea Mays
ggccgtaggaatatgcagtgcaagagcagctactcaaacaagatccctcacatgattccgcgcttgtagcgttctgcagacccatgccattactgggcagcctactaaatggcatgggatagaacttatctgtcatgcttgtcgcgttgcaatccaatggagtgtctctgatgcacccgccagccctgtcctccatttcccagtcctcaggcgaccttacagagaatcccttcatgcaggagcacaacggacctgcgttgttagagcagatcccgtaggctccacagacagcatagacatcacatttgcttcttggagagtagctgaacgtgatccagtcgtttctgtcccagtcccatacgcgcaccttccattggccagagacatctagcacgacctgaaacgctgtgctctcgttcaccaaggtgtaggagaagtagaactctgggccactggtaacgaacatatacttgcagtaacgaggacccgacatctccggtattgcgtcgaagtatctgccgttccactcaccggaggaccagtactccgtagatctccatgagagcctcatgctctcatcaagggcgccaggacctaggcccatggaataaac

SEQ ID NO: 93551 - DNA, 400 bp, Zea Mays
ttctccatcgtcctccacgagatcctcctcggccaccatttcctctagggttaggacaattgtaactcgggtgtcccctttccccataattatagcattctctatcctcaattgcaacgtatgccggcttcacatgattaccactactcatcactcgaagtctgctctcttcatctatcatggcagacacagcctcaccaatggtaggaagactctcctggtgacaaaaggccgctctcctgctctcaaattcagaatccagaatctttagaaagtgggtcactctcctatcctctacccacttatgaaccatctgtgcatcctgtgggcaaaccatttggagaggagcataatgatccagctctccccataaatgctggagctcactagcatattgttc

SEQ ID NO: 93552 - DNA, 422 bp, Zea Mays
ttctgaaagatttcagattccaggtttgatgcctccacagctattcaaagtttagagtaagcgaatgcatcctcggctatctctcaaaccaaacaaaggataggatcaatccatccttagttatctctccaaccaaacgaaggatagaaccaatccattcccacttatccctcaaaccaaacaaaaaacaagggtcatcccatcccaccaaccaaaacctgggaccatcctatcccgtcctcatctgtcccgcaaccaaacacatccttaggctataactagtatagcaaatccaaggagaggacataaggctacaacatatataaggccttctgctcaacctactctgaatagatttatacttcatcataaccaaacaaaccgaggaaagcgaccagaggaaggcttaaatgacagccaat

SEQ ID NO: 93553 - DNA, 1062 bp, Zea Mays
gatggggagagaagggtgaggggcattggtgaggttataggtgcgtttaaggctgtagatggagtaatgctgggcgagcggtgggggtggtgatgacgggacgtgcattagagagggttgcagagcattggatagggttgtatgcggtgcgataatttatatctggcaaaaatctccattgtggcaatcaatttttgagccacacacactggtgtgacgagagtgcggcatcaacattcaacgtcgaagcgacatcgaggatagattttccactcgtgcgttggaacagggcgcattctgggagttccttcaaccttcgggcaacagccatggtgtcttccaaatgagggtgaggggtgaggcccgatcttcaaagacgcgggggaccaatgatgaccaaattgtttgcgacgttctagttaacaacccttagtctaaacacaaacttagcgatgcaagacacactaagacaatccgagggcatggacaacaggaaattcaacatgtcacatacaaacttgggagagtagtgaggggagaggtgagctagtgagaaccagacggatgatgtcagcctagcgacaatagagtgtgggtgaacgacatattggaaactttcaaaaaaactacgttgcatcaaggtaccgggcgtttcaaacctaaggttcaagagggcgaccgacgttggactaagtggagacataggcccccactcaatttccttggtttagtagactttttaccttatttattgtagttacaaaggcttattcgttagtaatcctttgtttagacccccactcaatatttgggctgccctagtaaggatcgaaggaagggtggagaagatagtaaggatagaaggaagggtggagaagatgctaccggaccttcattgacgcgttggggaagctcagaattcacccgacgctttctctttagtttggaggtgaccctagtatgctcgatgaggtcagagttgttcgctggaggcaagcacacacccttcgaaccaagggggagctgacttgagagggttagagttggagcacgaccgagggc

SEQ ID NO: 93554 - DNA, 691 bp, Zea Mays
cggtggagaagggagtgagacccacctccccgcacctccagagctgccattagacctagcccaagttctggccaaccaaacccgactcattgaggtcctcactagaagcctcgagaaccagcatccaaatggaggaaggcctcagaacagaatgggagagttcctaaggctcaagcctcccacattcgccggatccagcaacccgctcgatgctgatgactggctgcgcatagtaaagaggaagttagaggccatcggatgccctgaaaaccaacgtgttcatctagctgctcatcaactctccgggatggtcctatccttgtgggatactttcagcgacgccgtcagagatgctacctgggcagaatttgaagccgctttccgagagcatcatgtgcccctagggatcgtctagctcaaagaagaagaatttcgggagttaactcaaggagggagatctgtcagtgaatacgttcacaaattcatggaactggctcgctatgcgcctgatgatgtcagcatggaagccaagaagatggcccgtttcttgaaggggctgagaccagaactcaagaccatcctcgccagccaagattttctcagtttctcgcacctctcaaacaaggccatccaggtggaaagagctcgagaagaagaaaagggtcacctcaagaggaagtttcaagttctc

SEQ ID NO: 93555 - DNA, 456 bp, Zea Mays
ggaaccaccttgccaaaggagactttttctgaataaatccaactttctaataaccgatttaggagccggataaatcgataacatgtacagaggtacattagaaagagaactgttcaaaagggtcaatctacctcccagactcaagaacctccctttccaaccagccagccttttgtccattttttccaacataggacaccaaagagatttactaatcttcttattgtcaattggcacaccaaggtatttcattggaaggctaccaacaggacaagtgaaaatgtcagcatataaatcagtgaattctttagcatcacctaaacaaaaaatttcacttttgtgaaaattaatttttagcccagacatatgttcaaagagacaaagaatgaatttaagatttctcgctccttctaaacaatcttgaatcatgaaaatagtatcatcagcatattgtaa

SEQ ID NO: 93556 - DNA, 361 bp, Zea Mays
gaaacattgataagctttttgtgagctaacatacttagattttaacaattttaattaagctttttatttagtgcacacttcttcaaaaaagttaacgacatgtgcaagttcttgtgtggaggggttattgttttcatcatcactaccaccatcgcacacactagaggatggatcattagtgttacccatgccctaaggcatttgtgagatgagtgtgatgaagaactatgacaaccatggctcttcggtggggcttcatcttcacttaatgaatcatcccatgtcttgatggatgtccgcgcttggcctttgttcctcttttattggtgtggtcttgtttggcaattatccctagagtgat

SEQ ID NO: 93557 - DNA, 577 bp, Zea Mays
ctgatttattcaaagaccgaggcagagcttgagcggcatctccgtcttgttttgggtgctcttaggaagaatcagttttatcaaattgaagaagtgtgccttttggctgtccgaaatggctttcctgggtcatgtgattaatcagcagggcattgcggttgatcccaagaatgtcgcggctgtggtggagcggaagagaccttctagtgcctctgaaatccgtagtttcttggggcttgccggatattatcgacgctttgtaccaaatttttccaacattgctaagcctttgactagactcttggagaaggttgttcttttcgtctggtccaacgattgcgaggtcagttatcagacattgaagaacaagttggtgaacgctcctatcctagcttttcctgagagtggtaagtgtttcacagtttatatggatgcttctcgaattggtcttggatgtgtgttgatgcaggaaggcagagtgattgcttatggctcaaggcagttgaggaagcatgaggggaattatccaactcatgatctcgaattggccgcggtggtctttgctctaaaatcatgg

SEQ ID NO: 93558 - DNA, 421 bp, Zea Mays
ttagtgagaaagcatgccatgaggaacttacaacaatttaaagcatgtagattgctatggtatagaaatgatgaatatgcaatctaccatatgagaggaatttcttcaaagaatggtgacataatttaaaaacattttaagtgctttctttttttctaagtgactacacaagacacataagaaatgataatttatgatacttagaagcataattgttaccatcctttgactttcctccatgttgtaggtcttgacttttcggcataggattaattctttatttcctacaacattaatatcttcccgagatgatatgagtttagatataataatttgaaataaccttgggtcaatcttggatatgtagatcattgtagattgatagcttgagttaataggaattgactctcttaagcacccc

SEQ ID NO: 93559 - DNA, 349 bp, Zea Mays
gaaaaggctttatgtttagaagaagttataggtatctcatttggttattttatttgtccttcgaaagattgtttctaagttatcattgtattgcttacaactaccctcttgcctctacctaagccgtacatacctaagaatgatccagagcttaaagatgccctggccatgcttgaggttgtacacaagataattgacaatactatggatgaagctttaaatgatgtagctgaaaaaattatgagagaagagtgatgagagtttgtgtattgagatttaagaacgtgtctgagttgtaaagctttatgtaaaaatacacatgctttgtattttcattttctttgtaaag

SEQ ID NO: 93560 - DNA, 502 bp, Zea Mays
ttgagtccctagattattaatgtagttaagagacaatatatatagaaaatcgtgaagtatttatatggaaacaaacatgtcgtaagagtatggtacaggaacatgcgtttgcatacacggtggcaaagctttatacggtgccaattggtgcggcatcaaaacgcagaaacgatggatggaaaccgagaggacgaaaggaacgggcatacagctgcttcttatcgttgtaataaattcgatccggccggtatggtcttgaacttgaacgtatcggtgggactgctggggagcgtatctatctacatatccaaccatatgggcatcgacaacgacgcacacgtatatataggctagcagtactaggtcaggactaaactggggaccatgtgtatgtttatgtatagtatataccaacgccaatgcatacatgtcacttgaggacgccacacacaccacaaaaggaccatattcacggcactgacggacctaccgctggagagag

SEQ ID NO: 93561 - DNA, 542 bp, Zea Mays
gtttggggtagttcaccttgtttaccttgactaacacttgttgattttctggttactatatgccaagtgttgttttagtggttaacttttcttttgaactgcttaaaactaaataaaaaatgcttatacttctcaaaccttgtgcatatgattagttttcgtgtttgctagaacatgtatttattgttgcacacatagtacaaaccacttcatagcatttttacactctgactggtgtacttctgaagctcctgtattttctccattttctactctcttttgcatttctgcattttctcacaggggtccttttgtcgaggggaagtttctattttcaccttgtctatgcttgatgagtccatttattaacaaggggagagttttagggatgcattgggagaaattttgcgttgacagagattttgagaaactctgagctttcctggttcccaagggagaaatttggaaggcaaagaaatttgagccctttgaagcttttgctagttgtgttgagtcatttgcctctttctagatgagctagc

SEQ ID NO: 93562 - DNA, 840 bp, Zea Mays
gcccattgacacctctgcttcgtcatctgtatcctgttggtggtgtcatcaaccttatgctaggtggttccatgttctcgcccttcctccttagaggattcctccccttcaagggcgtaggatgacagtttttgtggtgcttggatgtgttgttcgtgttgtgctcgtcatcaattataagggggtggttgttctttggcaagcttcaattggcgtgctctctcactcttagtccccactcagttgggcggtccttcatcccttcaagggtccctccccttgttgtgcgcaatggagggagacaattgtgcggctttgctacgacgggtggtgtggtgtacattggtttgcgttagcggacaagtgtgttgtttgatggtcatgttctcaagaattcagttgttgttctgcttgtgtcaagtccaggtgtgtgtgcctcctctgtatctcaatgtcgtggtcgtggtcgtgttgtcttttgtcggttggtgtatattgtgttcatgttcactctataatcttatgagcctattgggctatccattaatgaaaatggaacaggtttaggtggggatcccccggcgaactttcaaaaaatatacataaattttagaattaatcaggattccactctaatgaagacgaaacctttaagatatattttcccattcaacaagtaatagaggcgtcattcttaaaaggaccacctccattattaaaggtttaacgaagacagttcacctaggacaaccgtcacctttagactgtgtccaacagttcacccatatggcacccaaaacactattttgtattgtagactgcattgtccgtagagtggag

SEQ ID NO: 93563 - DNA, 290 bp, Zea Mays
actcgacttagggtgaccactataccctactaacggagcaatcgccttaagtcggcaatgacataagacgctgcaacatgctcacgcttactcgacttagtgtaacatgctcgtgtttactcatcttagggcgatctctatgccttactagctgatcaattagcataaattagaaaaagattccaaaaccagcacactgcacttacttctacaatcattcatgataaccgttgaattctaacaacaaaaacaaaacgttatagttttcagcgccaagagcacattctaat

SEQ ID NO: 93564 - DNA, 1088 bp, Zea Mays
attaccttctcaaatagttggttagcaatctttgtcctcaaagcatctgccctctcctgcacaggagaacaggacgacacatgatggaaggatgggacgacgttgcgataaaccttgtcaagtgttttcagcctatggtatatataatacacgaatgcaaagaattaagtgtcaataaagcctagaaagaatgacatacaatacattttctgtaccatattgctatgttcatgtatcatagttactaatgttcagagattgtgattccataatgatgtttggttttagaatacaccagcaaactatttatcttcgtgatttttctcctgaatagaattggtaggtgagcaagaattggaagaaaaataacattgagcatacaataattttatttttctgagccttgagagaaagagtgtgtgccataatattgagagaataattaccttctcaaatagttggttagcaatctttgtcctcaaagcatctgccctctcctgcacaggagaacaggacgacacatgatggaaggatgggacgacgttgcgataaaccttgtcaagtgttttcagcctatggtatatataatacacgaatgcaattgtaaataatgagaatatatggcaccaagggggcttgcgtcctccttatctagagtcgttgctaggtccaatcctccctgaccaatggaatgcaggggacacaagttttccattgattttagtcttgcaacttacatacataccacaatagttagcaaatgaagtaaaaaacaattgtatcaacatgaaataaaattgtaatggagctacatacctacatatcgttggagaggacgacctgtaccatcgctggcaagccatcgagctgcacaagaaggcaaggagaaaatcatatccgaaccggtccagatcgagtaccaccccaccacccaaaccttaaccaagaaggcagatcagatcgaagccaggaagagccaggcaacaatttttagataatggtctcacaaaatcactggctaaacagagcataggtatgatcagggcctaataaaaacattgtagctttagtgctctacatgaaaaaac

SEQ ID NO: 93565 - DNA, 510 bp, Zea Mays
gatggatcataagtacgcccgtaccgcggtggacagccccatggagtcgtccaagtcctcggacgatgccatgggggaccctggagcggtcgaccaatcatactcggaggaaacatccttcgagtactccgagccaccaaagtcctccaagggtggaatcggaggacacttgcgtttgccgtcagcactgcgaggccatctcttgccccacttgcctctgcctgtggttgtgcagaaagtggagaagtgaggaagaagaagagagcaagtgatcaagggcgagtgaagaaaacagccaaggcaagtgggctatttaaaggggtcgaggggtgaccatccacttcctaccccgctcaccgaatagtcgcaagaattcaataagcacttcaagccagctaaaaatgagtcaggcaactgacgctgtttcgcgtaacacagcaccggttggactcaagtcaactgcttaggcaaatgattacacccatccgtcacatcaaattactacttcat

SEQ ID NO: 93566 - DNA, 619 bp, Zea Mays
aagcatgagaaacagtctgggttatttcttgcctgactagattactagccgagggggtgtcacccggctgttgtttgcatctggagatgggtctatctttcctcttcagggagattccggtatggagcaatgaaggcctcaatatcttctgaagaaggtcgcactctatggctaggactgctatcttgaacaggtggattggatatgaactctgaaaagggcctctgcgggggaagattctagcagaatatgaaagtggagcactgacattcaaaaccttgcctctcagcatcgaatcaacccgactcaacatgtcctcctcagatattcgcttattggtaattcaagtggggtcatcaacaccggtgtacaagcagggtagactctatccttcaaaggctgaatattcttgaaaacaaagtcgacaacaacaacttcagcagtcaagcctctatccttcaatacacatatctctgcaagcaacatcctggactcagcaagctctgaatctgtggggatctctatccagctaggcgttggaacgtcgggctatctccctgatcgagtaggaagagacttgttatgattttccatagtaaaccactcgaagtgccatccc

SEQ ID NO: 93567 - DNA, 389 bp, Zea Mays
tgaatcggagggccagtgatgtatctcgcgtacataaaattcgaagcgcaggattaaggtccaacagccacaatagcttatcgattcgacttaagtgagatctaatctggaccatggcctttaaatctaacgactcggatcgctgcataccccttcggccacgcgcaaaatttcataacagaccttaggattttataaaaccaactcgtcgtccttggccgtggagaattcttacacctaggtccctagaatttgcagaaaacacccctggaagtaattgtagggataaaattaatatcaaatgactcataaaagttgttttgtcaatttatgcattttaactccaatttggtccattcaaattgtgttagcctcatatacatatttac

SEQ ID NO: 93568 - DNA, 379 bp, Zea Mays
caaaaaccctaaatagacccctggaaaaccctggaatgaaaccctagggggttatctgtaaaagtgtgcacattttggacctaagtgcaaaaaccatgaaattaggataccttaactcatatgattcacatgtaggtggatttgcaaagtaaaccttgagatttggacttatttgcaaaaagccccacttaaactctattgagttaagtctgaatttcattggtatagggtcaactttgaagccctatatcttccaaattatgaaggtttttccctaggtcaacacatcaagtttgtagagctataaaaggaggacaactttgctatagggattatgccttggtgccatgaaatgttttgagataattaggctcaaagt

SEQ ID NO: 93569 - DNA, 414 bp, Zea Mays
cgctggcacaactggagcctgaagcggaggaggtggagcagactgaactgggggaactgagacaccagaatgctgtagcataagagccatgaatgccctgctctcagcccgatcctggagtagctgctgctgaagcgcatcctgcctgtctgcatgttctgaaacttcgagagcatcctctcggataccgggcctgctcggctgccaggtgagcctgctgctgagtgatagactggagaatcgaagcaagagcagggtccatagcccgaggggcagcaggggcagcactagaactcctagcctcatgatcatgtgagcgtggaggcataggaggcggaggaggaaccccaaaatcatcatcatcatcatcaactgatgtagcctgagtgtcgaactgatcaagagctgcatcct

SEQ ID NO: 93570 - DNA, 458 bp, Zea Mays
gcggagagctaacagaaaccgagttctcgtggccttattggagcttaatatggagggagccagagcgagcacatctagcttcactactgcacggacaccacatatgtccaagggcacagagaaacagtaaacggtgaccaatagtgttcggactggaggcaagcagacaggcaaacatcatagtcaacagataggcttcacctcttcaatccaatccttggcagtgaaactatcccaagttatcccaccctcatcctgccagcacaaactcttatccctaacttacccagaagcaactggaacacatagtggatggagatctttctcaaactctgaatctgctgaaactggattcacttggttcacctgcaccccttctgttcacccccagttttctcacaaattctaatggcaccaggttgctacagcaatccaaggtcgaaatcacacagaacaaa

SEQ ID NO: 93571 - DNA, 416 bp, Zea Mays
ctatcatatacatgattatgcattgcttaatttatgtatttgttgagtggttggacaattaatagcggggcgaactacctgacaattatccggtacctacccgagtagtatctgttatttgtttcttacccgcccagattattacccggtcccattctgtatccgtcccaaatcttaactacccgtatccagtcccgtatccgagagaaatacattagggtaggatacgtgatgaccctgtatccgtttgtatctgtcccgttttcatcctacacgtaagaaactctgcgtggttcaaatccgttccctagactcccagaagaatgcctccccctcgattctggccatgggtataagtacaaagcccgctctcgttctataaatccacatagggagagagtcgaactgccataggc

SEQ ID NO: 93572 - DNA, 370 bp, Zea Mays
ggattatacagctccggtggtggtgaaaggtcagctgcaataaagaaaatgttggttaatttcgaagctaaaagtgatcaacgaagctaaacctcaataaaagtacctataatcctagcgtgttcagcagcttcttcagctcgtttagcctcttctcgaccattgtgagattctttctcattctttctaattgcttcgtcagccatctcatgaccgcccttcatccaaacatcagagtaaaacctcccgtccagcaaagaggcttcggccgaagggtccttggtgtcatctgctgagaagatggatttctggctgggctgcgcccttaacatgttcacaaccagctttgtctaaaattgttgcgacccct

SEQ ID NO: 93573 - DNA, 787 bp, Zea Mays
aggacattgaggccttgattgctccactttggagtcttcccgaggctgagaggaaaactcattttgagatgctatctagcaccgatgatgctaagatggacgccatgcttagtctgctggccgaggaatcgtctgaatctacccggaccgagccgatggccatcacgactggacaagagtttgtcgaagatgtggagatccggaaacctgaaggtgctcgcccaaagcattcatgctgagtgaaccgcctgactgtgcctgtcgaggagaagaagaaaacgaggtgacttcgattactgttgttcctggatcaggatgctggtccttctgtgccgatccctgatggagtcatggcggacaccattcccgaggttaatgtcagaggttgtgatgatgcgcgggccgctggtggcattttgacgaggatgaagaggaagaagaagagattccgctgatctgtaagaacagccatcactacagaggcagcgacgggggcagcgatattccctcccaagctctgtcggcactcgtcagccttcagaggctttcgatatcagactttgatcaggcactagaagaggtcattcctaaagacatattatcggagcctcctgaagctgacattgcaaccatctgtttagaggtcctagatggtggattttcgctgtttgattctgccgggcaagaggtaacccgggtggtgtcccgcgcatcgtcgaccttggagggcagtcttccatgcaaagacactgatctgagtcatccaactcccatggaggtggctaag

SEQ ID NO: 93574 - DNA, 532 bp, Zea Mays
gtggattacaagggcgcataggccttgaggttttaacaaaaaatttgcgtagattgtcgatgtttcaggagtgctctaagtcttcgccggtgggcgttgatagcctgtacgcgctgggggatgccttcaacttgacgatgaatggaccctcccattcggctccagcttaccctgtgactctgtctgggtggtccggacgagtatgaggtctcgtgtgttgaactctcttgggacgaccgcgttgtcgtgccaggccttggtttgagcttggtatttgttgagggcctgcagggcgaagacgcagtctccatcgatgaggtctttagatgttggttcgtcgacgttggggattgctgatgtgtttgttcgggcgacccatgctttatttcctgcggcgtcatggcctccgatccatgtaacagacgaaaaggtgtgaatccggttgcccggcattcggtcgtgtttagggcctagactactttaggtagttggtcggcccatttgcccttcttatcgtcgagaagtcttttct

SEQ ID NO: 93575 - DNA, 1405 bp, Zea Mays
tggagccttcagtaagggaaagattgctggttacaaactgttggaggtcattcaccagaaaccctccatagtcaatgatcataaggatggaaaatggttggcagaggtccatggaaacatagaattcaaggaagttactttcagttatccatcaagccttgatgttataatctttcgggagttctctcttttcttccctgctggtaaaacaattgcagttgttggagggagtgggtctggaaagagcactgttgtggctttgataaaaaggttctatgatcctaatgaaggtaacaaaacacatcttcttagagaccgttgatttgcttccttcaaatttattgctccttttaaatcattggctaactttgtttgcattgcaggccaggttttgctagacaatgttgacataaagacactccagctgaggtggtttagagaacagattggtttggtaaaccaagaacctgctctttttgcaacaacaatcctcgagaatatactgtatggaaagccagatgcaactattgcagaagttgaggctgcagcgactgcatccagatccaatgcacatagtttcatatctcttcttccgaatggttacaacacaatggtatgtctatattttttcgacatacatctaagtctggtctaataaattaaatactaatttcttcattttttccatccgcaggcaggtgagagaggcatccagctctctggtggtcagaaacaacgtatagcaatagctcgtgctatgctgaaaaccccaaagatcctgctcctggatgaggctaccagtgcattagattcagactcggaaagcattgtgcaagaagctttagaccgtttgatggttgggaggatgactgtaattgttgcccaccgtctgtcgacgataagaaacgtgaacatgatcgctgtgatccaacaaggccaagttgttgagactaggaaaataaaatgtttgcatgtcatatttacttgatatgagacaatggatatgaacgggggttgtggcgataataacttgagtttgaattacatcacatgatgatgccttgtatggctttttagcttgcagttcacattgcatacttcattcatgttcataacaattactttatagtacgacctatggatctttaaatgtgagcttcacatttgtcaatgtcagatgtattcaaggtgatcttccagttttttgcactccagtcacactctacatggatttaattttgacttcatttagacagcactaaactttcaaaagtaggaataaataaaagaagaaacattcacgagggtgggggacatggtgtcagcacatgctgtgtttgataggatgccgatgagggatgccatctcttggaatctcatgatctcagggtatgcagtaagtggc

SEQ ID NO: 93576 - DNA, 635 bp, Zea Mays
attttgaagtttaaatttgaacctgaatcaaatttgaatttgaaatttgcaaaacaactagaaataataagaaaatgaaataaacaaaagggagagaagactgtctaggccggattcctattcttatggtccaagacctatctaccctcatgccagcccagcaccaacccacgcagcacctcatccggtcactgacaatcagtcctagccactagaccctttccgttcacgcacacgcgggctccacgctgacgggtgggccttactgctcgggtccgtcgtcgacctcgcgttatggggcgtagctgtgcaacagaagaatcgaccgtatatctcgcgggaccgtttctggctccagctgggactccgagcgccaccagaatatataacccaaaatcatctactctttctcccagaacttttcaatcgctcaccccgtcaccatccttcctttgatctagcgttgatttttttttgctccactttccttgggcgtctactgccttgtctggtgtagaaaaaaacaatagattttgttctgttgttctgctacgggttttgtcccctcctctctcactcagcgagctgtgttgttcacttgggattccacagcttggtttcggatgcttgattag

SEQ ID NO: 93577 - DNA, 307 bp, Zea Mays
gaggtaggaacggtccatggtgccaaagccttattgatggttcaatcgtcctaccctctcgatgtcctaggcgtcggctagcgtccttcctttttttctgccgtccaacctagtgcgtcatagccgggggtggtgctggcctgctgattgatacacgaaaggggaaacgggtccttcaggaatgcttttgtcgaggccggtgccaccctcacacgttcttcgtcgtacaatctccttctggtcagcgttgattgggacgcataccctgatcggcgcagacgccgattgcaaggaatttgcccgtccc

SEQ ID NO: 93578 - DNA, 446 bp, Zea Mays
cgtgccactgccacccagccccagatcagcaggggcccgcaaccagccagctgcgctgttacttgacggcagcacactccatgtctgtgtcttttatctatctctaatgatttaatctaatcaggccccctatctgctgtgccgactgccaagcttatcctgctcctgctccctctccgcctccggcctccaacttgtcagcgagttatattctaccaagtggtggaggagtgcccgcagaagcaacgacgacgcacacggctggcttgagcaagccagccaagcaacaatggcggacggaggaccgagggaggacgaagcggagagggtgctgcaggtggtggcagacgcgatgattctatatatctggagacgaatggatcgaggaatggggagtgggctcagctcgagcggccacgatttatgtttaatggaggcaaatcagg

SEQ ID NO: 93579 - DNA, 311 bp, Zea Mays
caccgcgaccaattcaaggtcatgagttgggtaattcccgtcatgcttcctcaactgccttgagccataagcaatcactctgccatcctgcatcaacacacaaccaagaccaatacgcgaagcatccgtataaactgtgaaacgcttaccgctcttaggcaaagctaggataggggcatccaccaacttgctctttaatgtctgataactgacctcacaatcactagaccagatgaagagaacacccttctccaagagtctagtcaagggcttagcaatgctggaaaaatttggtacgaaacaccgataat

SEQ ID NO: 93580 - DNA, 518 bp, Zea Mays
gcctaatccactacaaaaccctgctcgctcgttaccaaaatgttaataggggcgaaagaagatgagggaaaaggatctcatcaaaccgcttgaaacatctttggacaaaggaaggggcgaatcctcatccatgaaggatcttgacgataatgtcgtgatgactgtgactcgagtttcgatctcgaacagcgagagcaacttggcggaatgacaatcagggtcatgaacgctggagtacttttacattggcctctgatgggccatcaagggctgaacccgacagtgcatgaaattgtgcaccagccgagcgccagtgagtccctgttgcttcaaccgtagcaaccgccttaaaaagatgctccaccttgctcttgaatcgtgcctccacgccatagtgcacttctccatcgacaccagctcccctccggtgaaaggcggcgcactgctggccacattcctggtgtagaaccacttacgttcataccgcacggaggaggagagcaggatcttgaagtacg

SEQ ID NO: 93581 - DNA, 620 bp, Zea Mays
tgtcgatggcgaccaataggtgcgtgaagcactcgtgcgccttttgtagaggaccgacgaggtctaatccccatacaacaaagggccaagtgatcgaaattgtttgcaaggcctgagttggcatgtgcgtttgcttcgtgtagaattggcatcctctgcaggactgcacaatcttggtggcgtcggcaaccgtagttggccaatagaaaccctgtctgaaggcgtttccaacgagggttttctccaggcaactttggttttatatttttcaggctataaagatgccagagctggtacccaacattgctaaaacttccttccctaagtggaggaaggtggtcaagttagtaccaaaagaaaggaggcaagggctcaattctcttatcattttaacagcctgggagatatggaagcacagtaattcttgtgactgagaattcagagccgaacactcttactttgatcacaaggattgttgaggaatgttggctttggaggtgagctggagcctccaaactgcaagacttcctggtctgggcacgagctaggaatgtgtagcctatccctctgtggtttttgtattctagtggtttaggtgtcaccgttgttaaaaaactctg

SEQ ID NO: 93582 - DNA, 461 bp, Zea Mays
ggagtacaactctttgttgaacagctttagggtttggacttcggtgaccaaaggggctggcgagcaacataacaatagatcagtagacacgatgagcagtgaaactctccgcctgaagcatctttctgcaaattggcgagacaccgaaatgttaatctgctctactttaggccctttcgtttttattaacgcacatggcaaaagaccacaagttaaaactggatgctagctgtttttcacccccaagatgaacaaagacatgatgcaggtaaactagctaaaagttgcagttatatcaggtcctgtttagcgatctatatatgttcttgcaaaagtttccgggtttaagggatcaactggctctgaaagataaaaaagttcatgtgactgaaatagcaaaagctgagagaaccaattaaggcatgatgctgtttcaaaatgctggtcatactatagatccg

SEQ ID NO: 93583 - DNA, 645 bp, Zea Mays
cagaaacatgtccttcagtggtctgaccggtgacatatcatctgctttcgcaaatctcaaggctgtccaatccttgtacgtacgtgtggggtcggagttcttcatctgccagcagctaaattttattgcaacctcctagtcatgcatatatatagtgcatgatctcaagtagctataagacatgtcctttgatttgcagggatttgtcacacaacaacctgacgggctcaatccctagctccctgtcacaactgccgtcactgacaactctgtaaagtctgctgattaactcggcaaattattctgcatcttgcgatttcatgaaccaatatgcatgcatcagcatcacacgtcggctcacatcaatgcatgttacaccttccagagatttgacggggaatcagctcagcggaccaataccctctagtcttctcaaaagaatccaagacggctccttaaacctaatgtccgttatctttatcctctataattttgttcttcattctagcagacatatatgcatgatatgatatgataccgcctttaatttccagcctgacgacgacagtatcgatctgtctctcatctctgtacgtgtagctatgccgataatccagacctttgcaccaacgccggggattcatg

SEQ ID NO: 93584 - DNA, 498 bp, Zea Mays
ctgccaaaatacaacctgttattagcatgattcattcgcttttgtgctccccatgcagttagcttcgatctggcataaatacaaaagatgggataataattttgtaggatacaaataggcatgataactgccaaacggtgtgcaaaaataactcaatagcacatgtgaacattgattatcactaatttcaacagttcatacaccaactaacctatctagacagaacatgaacagagcgtgttacataattttgtgtctgagttcagtacgactacaagaacatgaggcattgttcacgttgagtgtaacaaataaaacttaaatgaacatatgtagaaatgatgaatccagcgaatgaatctagctcgcatctcaccttccaatccacggaaatcagtagaagcatcgaacgtgggagagcacaaaagcgaatgaataaagaacgtaaatgtttagggaaaacacaaaagcgaatgaatcaataatgtgggagagcac

SEQ ID NO: 93585 - DNA, 473 bp, Zea Mays
atggataaggctatccgggctggccggattttgatgaagaggcctggcgttgtggtgcctgatgacattgtagttgatgtactcgttgcatcgggtactttgagtaatccttctgcttctggtgaccctgtggacaaggttcctcgcgaggatgctcatgcacagtaactagagagtgagagtgtacattgatttgttcaaacagataataacttttcattgagatggtatttttcgcggttttttgaactcttgtcgaatgttgagttactctcctttgttgagtgtgggtagggcatagtatgcgccctgggctttttgctgcttaattgatcgtgtcgcaccgacttaaggcatttccgaattaagtcgattgctgcgttggtggggcatagtagtcaccctaagttatgtatgtgtgagcatgtcgcgctgacttaagtcgtttccgacttagaccgattgctacatta

SEQ ID NO: 93586 - DNA, 288 bp, Zea Mays
cacttgcccatgttctttagctctgttgatcaatatcgcaagcatgtctgctgcgattttgaatagtaaaggagacaacaggtcaccttgtcttaatcccttctttgtttgcaagaactttcccacgtcatcattcacattcaccgcaacactgcctcacataatgaaagatttaacccaagatatccacttgggcgaagcagctaatactagttgtgacctatgagctaactaactattagcagctaatgtatccaatcaggcccttatcaataaaaagaagacgaa

SEQ ID NO: 93587 - DNA, 537 bp, Zea Mays
ggagaaagcagggtgcgaacatattaaaactttggcccaagccgaagttgctttcttcattgatgatacgaaggatccctcggccgaggcaagcttaataggcggaaattttttcatgggcatttgggagaatggcggtcgagggatggctcacgaaataataaagaaaagtaaaatagatattcacgacactagagaagcaacaaaaacagctgaaaaggctgcggagcttgagagacgaataggtattacttaatgatttttaactttgttgtttacttttgcgacttcgaaataatttacattttctactgcagctgaactatctcctcccctagagcccttcgagccaatgaccgaagcagaggcaaaagaatcatcagaaattattagcatggccgaaactattatagacgaagtcgttacccgactgctggccgaagctgcagataaagttttgaaagaagaagaatagctattgtaaaaacgttgctagattattagtgtaacatttgctgaactatgcttgtaatattt

SEQ ID NO: 93588 - DNA, 365 bp, Zea Mays
gccgaactagcaactactacaggatttggggaaaatgatggggaagaattctataggaagaagatagttgttcacttcattttgttcataatccggcaacggatataggaatcatatatatgtgtattgctattggatccccatttacatggcccactgtagcccaacaactctcgcatttggttttctcgcgcgctctggtcaaacttgtttcgcgtcttccttctatgacccttcgcctatcatgtgcatgtcgttgttctcttccaatggcagcgccttgctaacattcccccgaccatgagggcaatcttgtccccaagttgtcgctttaggaaacctagcgtgcaaaacatcaacatcct

SEQ ID NO: 93589 - DNA, 459 bp, Zea Mays
cactgtagatctggttgtggccctgtggctagaggagaacagaggttggtagaggaatgatagagaggtggacaaagatgaggacatggagactaatatgtagcctcgtgaattagattgcataaattttttgggttcaggtctggtgctagatgtcaaaacgcgaaggcttctcacctccgtgaaaccctctcacgcgatgaaacgagggcaagttttaataacagacatactttgcaaaggccaattgtcaacataaagagcaaaggcttaaagggggtcaccttgcctgaatgccattcaagagcattcaaaaggttccaatgataattaggcttacctagttgatccattttttctaaaaaccctttatgtttgagggcttgtaagatcactagatgttcaatcatatcaaaaaccttttcgaatgttattttgagaatagttattccttttttt

SEQ ID NO: 93590 - DNA, 432 bp, Zea Mays
attttcttgactttccaaactgcagttatacgtggtgaaagagcaagaatacactttgataatcttgtcaagagatggagggcagctgttctaatacagaagtacactaggcgtcgacttgcagctaacatgtttaatgatcaactgaatcatatcattcttcttcagtctggtaattaatatgataaaaatgggcatattaacattaccctagagtactggatctatctaatcatgtgttgtcatatgttgctgcagtgatgcgtgggtgcctgactagaaggaaatacaagtgcctgcagaatgaaaaggagtcaaaggccagtcacaacatagttccaggggaaacaaggaagaataatgctgagtcaagaataagccatgtgagttttatatcaaaagatatctacagttttatctgttctaatcttc

SEQ ID NO: 93591 - DNA, 495 bp, Zea Mays
ctcgcggagttgttcgagttgtgtgtcctgactccccacgggggtccggtccacatcccgctcccttgggccttcgacgcacagagttggtgttggggtgttgttgttgctgggcatgtcgagttgattctatccttcgtgctcgtgctcgacatggaagcattcccgagttgggtcgtaaccctcgtcgtcagagccatagtcgtcagagccgtcggagaggtagtagtcgcatgcgaatagaaagtgccgcgtggagtcagcgttgcggagcccggaaaagtctagaccgaagtccatgctatcttcttcctcggagttcatatgctccgaggttggagatgtcgcgagcagatccagcgttgaccgtaggtgatgccctggaagatcggtgtatgcctccatatcgatacttaccgaaggagggtagcctgggggatcaaagctcatcctgaaggggatagggtgaaacaccgttcctacctctcagaccac

SEQ ID NO: 93592 - DNA, 494 bp, Zea Mays
cctccaccgattgccgagacctgcgcgcgggcgcctagtccccagaccgtaaatagccgagcctgctgtcagctgcgcggtccacctcctctttgagccgccgcaacggatgtcgtgaacctcgccgatagctccgtgtggggggaaatcgttagcgaaccggtcctgcgaattttccccacgtctctgcgctataaagccaacgccccgctgacccggcaccctcaaccaaccctagtcgcccgagtacttcacgccgcgcgcgccattggcagaggaggagaaagaagggtgccgccagggaagatttctgtgtaaactcaaattgggggggggggggggggcgtagttggtcttggagcttctggagatcaccacgtgcctgcttgtggcctcggcgggtggagattgtattggctgggccgtgaattgctcgccagtcttccgtcgtcgccgccgtaccacggaccaccgcgaccgggagcaactacgtc

SEQ ID NO: 93593 - DNA, 407 bp, Zea Mays
atcgattggaattttttttgacggatcgagttaagttggtaggtttggttgtcccgtacttaggtctactacagacggagacgaaacgtactcgaatgagcgaaagtgaatgaaagctatagtcatgggcatcatctcaaatacaagattccgttggtcattagtattattttctcttttgtaacaacatttttctgtactagtcctgtatggaccggtttgtgtgtcatcaagctcgcagcataggtaaacacattagcctactatatgtcttgcacgtaaatgtattcgttaccatggatacaatactttatttggctaaagttactaggtcagctacatgaacaagcagttaaaaaaactgacgatagaaaagttgataagcttgtcataagtttggaacggtt

SEQ ID NO: 93594 - DNA, 280 bp, Zea Mays
gataatgtgtgtggcgtcagtggctctagcaaggaacatggttctccaggcatgtatgcttggctcttgatcgttggtgaggatcatcaagcttggctcaatgttctttgggctatagtcattcaccaaagcggtattgaacaaatgcttgcacttgtgcgcttgagcgaactactagtcgtagttgaagcataggcaacccaacattgttacaccatctcctctgttgtgaggtgtttgaagctacggtgcggtgatgtggttggggtttctatagtca

SEQ ID NO: 93595 - DNA, 590 bp, Zea Mays
cattatggtttcctctacctgccgatggatttcaggaagaaggccaatgagggctacactttggtcaacatgacctcgctggaggcagcttgccggctatggggggctcatgggggttcaccacatgcacgggtgagctttcaagggcagcgcaagacctgcaaggcccactacgttggccacctactaggctccatggcatttgaggttgccgtcgtcggcccccagccaagctccaccctcgaccctcatggagatagcacaggccattgtccaaccgaggagtctaacattcgacatcgcccggacagttagatcggtctcataccttgtactcataacgtagcatgagaatgaattcttcttttgtaataggatagcatttatctatggtccaacccggtgaggtccaccctcataaacccggtctctggtgtccaccgcacagacctcatgtatccagttataaaggaagaatttgctcttagttcaatcctcatgtgtcgattccttttcatgatttaatttacacatgtcgtttcctctacctcccacgtgggttctaacttctgttgttaccatgaaatctg

SEQ ID NO: 93596 - DNA, 785 bp, Zea Mays
aaagagcaagggctcttctgcaaaacggctcggccgaaggggcacggtttactatcagccgtccgatcacacttgggtggaccagatttaaatcgatccgcatccggtatgcaccgaagaccatcagatctcgatcctacgacgcacagggatggacccgaactgttattgcctattcccgcattgtcacgatccaacggtcgcgatgccatttagccgaacaagtacgcccagctcgatccgagccgttagcggctggatcaacgacagtcgaaacgtcttcctcccacggccgagggggagcggtagcgcgcgtacgggagcggtggcaccatgccaggatccccccacatagcgcacccccgattgttaactggcccaaaacaaagaggaggagcgggtgaactcggtagtaatttacctaccggtgctaagggcaggagaggtgtcgccccacagcaaagggcggatccacggcaaaactggtgcgacggcgagaaattgctagagcatcggtcgtccaattgccaaattagtggtaggggcagcatctttgtatctccatgattcttcagagacaccgccgaggacccattgatgcccaccagcaagaacgatgatggcgacacaagctcatctctcactcccaatcgcgaggtcatctctcactcccaatcgcaacaacccagagatccccatgtgcttcgtgattctgacgtcgggttccgcgcgtgtggttgagccatggagctcgaaaatcccgggacgccgagcgggttgttgag

SEQ ID NO: 93597 - DNA, 343 bp, Zea Mays
gatatctcagcagtattgcacggtggaaaatccatctacgagtagacagaagtggaaatcaggatccatttgttcagctgtggaaaatccatctaccaatagcatctttgaaatgaggccagaaacgatcttctctagcttttggatgctcgccgctgaaagtaggatcccttggtttgatacaatctctcgccaatttttcccaaacatgacaatacatctctgaacttcatgtgaactgtccataaagaccttacaaaccaattttcagcttgggagaacgacagagtgcctccaacacgagcagctgttgccaccgcatatgcattacctcgccattttc

SEQ ID NO: 93598 - DNA, 583 bp, Zea Mays
cgtgaatttaccttacgtgctgtatatttgtggtcaattcatgatttgcctgcatatggtatttggtctggctggtgtgtccacggtcgactgtgttgtcccatatgcatgggggacacaagcatatcgattggagcatggtaaaaaggtctcattctttgattgtcatcgacggtttcttccatccaaccacccgtttcgaaatgatacgaagtcatttagaagaggcataaaagttaaagatggtccaccaaaacgtttaatgggtgaatatatcctgatacaacatcgtgcccttcaaagggctacagaaggtcatgagtttgaagggtatggtcaagatcacaactggactcatatttcttttctctgggaacttccatactgtctaaagccggaagagcgaaaaaaagtatttcaatggttgaaaatgttgaagttttcagaccgctatgcagctaacataaaacgtactgttaacctcgacactaataaattaaatggtttgaaggctcacgattaccatattttgatggaaagacttatgccggtaatgttccgtggctatttgaagcctcctctg

SEQ ID NO: 93599 - DNA, 428 bp, Zea Mays
gttgtgaaggtgcctgaaaaatttgggttcaattggagcatttttggctggtttgggcattttaccgaacacgtggtgggcgtgatattagggtttcggagaaatggccatatgaggagtgaaaaccctcccgaaggagccaagaacctgcagggatacacactagggacaattgaacacattccaccaactggattggcaagatttgacaagaaattgagagatggacaatggggggtgaattgagtgccacactgcctttcaaaaccgagagcaggggtgatagagggaaggagaggggaaaggactgctcaccggagttgaaaggatcacggagagcaccaggtcgccggagagacgccggtgatcggagaacgccggtgggagagagggagtcgccgggaacagagagcagcgggtgctggctg

SEQ ID NO: 93600 - DNA, 459 bp, Zea Mays
tgtagaggcaagaaaattcagattttctcttctctcttttctatacaaatatacacagataaatacaatttcagcaactaggattttaaagatgcattgggtgtgagatggcctccggcggcggtgattcttggggttcggagtccatgattattgggcggcggtggtcgttcccgagggaggcattgggtgtgtatggtgagaaggcgtcgcgggatggaaacaaaatgatagcgatttgtatatatcatcaactcaaggtgatttcactatttgctacatttttcatatatgtcttgtcagactatcatgtgaagacggttccatatttataagtgtctagtatactcactaacatctatgacggttcttatagtctagacgactcttagtattcttatttgagatggtttcatacatagaagtgtctcaaatgctcattgccatctaagacagttg

SEQ ID NO: 93601 - DNA, 834 bp, Zea Mays
ggaaaagataaaaactagcttcaccaacgttggcgcatattcaagtgaagacaacttcgtacggggcgatcccgaggggccaattgagtggatcagcagcgaggccaaagcctttgaggagattttaaatgaccgtggggatgtctgtgccttcttaggtgcgaggggaattgcggctattttggagaagtcaggttgcgatcatgtgaaagctttggcccaagccgaagctactttatctattgatgatacgaaggacccctcggccgaagcaagcttagttggtggaaaattctttactgacgtatcagaaaatggcggccgagggatggctcacgaaataataaagaagagcgaaaaagatactcacgatgctacggaagcgacgaaggcagctaaaaagctgcagaactcaaaaggcggataagtattgcttaatagcttttaacttttttattttttatttttgtgacttcgaacttatttacgttttctaccacagccgaactatctcctcccccagagtccttcgagtcattgattgagctagaggcaaaggaatcagcagaaattattaacatggccgaaagcattttggacgaagtcgttactcaactgctgaccgaagctgtagacaaagttttgaaggaagaataatagatattgtaaaaatattgctagaatattaatgtaacatttgatggactatgcttgtaatatttggtgctcatgagtttttaatgtaatgtataaatggcttttgtaattcatttctttgcgatgcatgaaacttttattgtacataccgtttttgagccttcggcgaaaaaacac

SEQ ID NO: 93602 - DNA, 406 bp, Zea Mays
tggaaacacatctgggaactcggacacaaccctgatactctccatcgggtctgcttcactgctatcgacagctatccgataacaacttcctttctttggctcaggcgggactaactcggtcaccacttcctctcctagtggggacaccaacttgatggtccttttaacacaactaataactgcctgatacttatctagccaattcatccctaggatgacatctattccctgagtacccattactatgaggttagcgggaaacgctatcccccttatttccacacatacattcaaacaaatgttgtcggctcgaattctaccaccggctgagtcaatttgaatgggggttgacatggtagtaattggaagattatgtgcttttacccatgatgcagtaatgaaagaa

SEQ ID NO: 93603 - DNA, 1121 bp, Zea Mays
caactggtcttcaacagattgaggcgataccggtggaagctcaatccggagaagtgcatctttggagtactggcagggaaattactcggattcattgtcagccaccgaggaattgaggctatcatgagaatggaggtgccacgatcacagaaaaaggtgcagagtcttaccggatgcatggcagccctgagcagatttatatcgaggctaggcgagagaggcataccattctacaaattactcaagaaggtggacaaattccagtggaccacagaggcacaagaggctctagaggcactgaagaagttcctaactacgccaccattgctcaagccaccacggcgagtcaaccggaagaagatctgttgctatatatatcctgcacgactcacgtggtaagcaccacgttagtagtcgagcgggtggaagaaggacacacatacccggtgcagcatccagtctacttcatcagtgaagttctcgggccctcaaaaataaagtatccccaagtccagaaactgttgtacgcggtgcttctaatcgctcgcaagctctgtcactactttgatgaccacaaagtcatagtagttaccgggtttccaattggggatatccttcacaacaaagaagccatcggaagaatagccaagtgggcctgcgagctgggagctcatgacatagagtttcggcctcgcacagcagtaaagactcaaacgctagtggacttcgtatcagagtggactgagcaacaagttcctgacaacccggaggctactgaagtatggcgaatgtatttcgatggctcgctaaagctgcagggggcaggcgcagggatcctcttcattgcccctggaggtgaacaactcaagtatgtgtttcagctattattcccagcatcaaataatgcagcagaatacgaggcgctgatccaggggttgaacatcaccatatcactaggcgttaagaggttgatggtatacagagattcactagtggttataatccagataaacaaggactgggattgctcgactgattctatgggcaagtactatacaaccgtccaaaaattagaagacaaatttgaagggttcgaattccatcacatggaaagagaccgc

SEQ ID NO: 93604 - DNA, 1053 bp, Zea Mays
aggcaaagaacaacaaaggcgacgtggaacaccgtcggccgccgttgctagcaaatctgcttcatcaagtggctctagagtattggcaccctctcctcctctacttcaatgccattttcattaggaggagcagaactgcctccttctactccccttctattgaggtctgttcctacagaacccaaagaaaattctaggatgcttatcttagtgtcatccacgcctaatgatatgatgtctccaaacattacaggtgctcaaggaggtcctaagcttcctgcacaagaggctgatcttccacctccaattatattacaatcctgcctaagggaagtgttcgaaggagagtggaagaatttgagaaatcagtagaggctaagatcaaacagcctccatccatgtatacatctatagcgacgccgctataagtgtgggttgttcaagaacccaagagttatgcttatcccaccattttttataaagctccacaggtattaccttatgattctatcattaggttacctacatttaacagtcatgctaacaaggcactaagtactattagagccgatccaaggttggctcatttgttagaaaaatctaggattaaacttcaacgcaatttcaggcttccatcaccgcctgctatttgtgaagaatggtgggatgatgcagaaagattaatcagaaaaaggaacaaaaaggggagaaacataactcaatcaaagtatggcctaggttatagtcatgatgactcaagtgaaaatgaagatgatgaagtcgatgacccacgacgagtggcatgtcatatgacctttgagggtgcttcctcttatgagagtaagataaggcttataaaacgccatactgtcctgatcaatccacacaatagcaaatgcttgtcaaggaatgggaaatgagcagtatgtcttatcacgagttgaagaagttctcactataggagagcagggagaaatcgtcgatgctgcccctgcccctcaacaattagaagatggtgttcaactcactattgatgaattagttgagatcaac

SEQ ID NO: 93605 - DNA, 709 bp, Zea Mays
ctccgtaggagtttcgaaagggaataaatactttggtcatcctcgtcgcctaggaagtctagaagcataggaatatttatgtgtttgatggagttcggtctaaacaagaagcagtcctagactcgatggctgaggagggtcacctgtggtgtttggctggagcttctaagctacaaagtttctactcgggagtgcttgggccacatagatagtccatgttgggtcatggttttgtttttgtaaactagtcattcagtgtgtgttgtctggttgagaggattcttttccctcttgttgaattgttattttcttcctaaatgaaatgacacgtggctctcttgcatcattcgaaagctctcttgcatcattcgaaaaagagcaaaatctgaaaaatgtcaggcaacaccaatgctttagacttttgcctttgctctcacaacacaaaaatcacttacctcattcccttttaccatcttctctacttggagagttgttaccattgtcacttcattcaatgtaagattatcaccctccaactaaaccttgtgaccttgatccacaaatgttagcaccttattcacctagtcacactccatagggttgtgatccctcaactagtcatagcccaagattgcatcataaacacccaagtccaacactcccatacatgtgataaaaatatgaccagcaaccctccactccacagctg

SEQ ID NO: 93606 - DNA, 527 bp, Zea Mays
attctatcacccgttggggttttaatcttaggcttaggttggagggtatctgtcggtgtttgtgacccgactgcacactatggggttacccacatgatgcttttaggtaggatggcatcgttgattgcgactcgatggtatgagcagaggcacgttggtattgctcgtagatttatacatgttcgtgctgctttgaattgcgtaacaccctacttcctattgaggctatgtattgatttctggagtatggggattacaaatgagctttgtgatggctcaactactgtgggtgaggatggggtgagatgatgtgagatgagatgattttgtagggtttccccctcagccttatatacacgagcagagttatccctttacaagttgtgatcactatccgcttcacttatctccctctttgttgcagcttgcagtcctatatatccggagtcttaatcacattctcgcccgagatatcgctgaatgtgtagctccttgatgcttgcaactgcaccacccgagatattagt

SEQ ID NO: 93607 - DNA, 608 bp, Zea Mays
aggtcatccattctccgatagatctacgctcagccaatctgcttcattcgagcttcaaggtccaaggtacgcttcgtcgcatctccaaggtctacacctcggattgatccgagttcctttaaaatcgtaccttggattaccattagggtttagatgtactttacttctttctgcgctacgatttatgtgttcatcgcctactttaactagttagggttgtggttaaggccgacatccgattcgcctattgtttatgtacaccaaccaagtttcatattgtggtacacatagatctcaacctatcctcaatcacgtattggtaactgatccgtggtaatgaagtaaaaaatttatactacgctacataggaaacaatattgagactacagtgtcatttgcatattcgtcgtcctcgtttatttaagattgtgtacccaccaatttgtccattgtcaattgatttaagattcctgtggattctatgttgtttgctcaatgttgctgggacagaattgcatgttaatgttgatattcgaagaactctgtagcattaccgttgaaaaaccccaacagaacaccttgttccttccatatcgattactttcaat

SEQ ID NO: 93608 - DNA, 569 bp, Zea Mays
tgtaccgcgctctccctgtctcgaaatcggatcgcctctcccgtcccgtactcccatacatagattttttttctcccgaatgccaatgatccagcacgcgcgactgggaccacctcggctgtgcctgtgcgttgacaccaattttctcatgaccagatcagcactgtagtttttcctctttgttattgtgttaccagccaggcgtcagtatctgatcacccacataagcagtctcagggtcgcaagcctggaacacgtgagcgtcgtgccaatatcctcacaggaccggagtgggtgtagttgtgtgcgtggtccgtggtgttcctgtccctgtctgatggaccaactacgtctggtggagggtttctttatgtatcgctaactctgaactgggaaggcatgaaacaaacagaggaaatatctattccggccagttcctatctctctctctgtcgtcctcctcctccaaccttttccccatttccttctgttagtatagatcggagctgttaacaaattggtatcagattcctccgttcctcggtcgtcgcgtccatggcgtctcctgt

SEQ ID NO: 93609 - DNA, 489 bp, Zea Mays
accaaaccaccttgactagacctggcagcagtctcctttggcatatcccagtcattcacaagtggccacactctgtaggctttgtgctcctgaaccaggtctcttgtgcaagtgaaggcacaaacattgttgaaagccttctggcatgcttcggtatcattcccaagcgcagtagctggccttctgaggccgaagcgagaccagatagggcgttggataatctcctttatgtcctccatttcaatcagattattcttaacataaaaaccattcctccatccaggtctcgggccacctttttcgaaattttggaactgggtaacttacatcagaacgaggaacgaagccataacaaccgaaattgttgtgatattgctccttgccagtggccttcgtctcgtacagtagctcatgcatgttacagaagcactttgcgcttggttctagcccttggctcctcacctcccaaataagaacccccatcctgat

SEQ ID NO: 93610 - DNA, 310 bp, Zea Mays
tagccatgcaaggacttatcccaaaccttaggtgttgtcaagatcagtccagtgatctaccagactttccacgagtgcaataattgagagtggcactctcgattgggagagatgtgttcatcgaatatttctggattgtctgatgctctcatggacgtggagaaatggggcataaagagttagtgtttactatgttctgctcaaggggcgtccatgcaaatgggtaggtgttccatcgaatggttcatgggaacaatgatagaacctatgttattcaaaagtgtttgatgttcttaggtggtgtggttag

SEQ ID NO: 93611 - DNA, 1053 bp, Zea Mays
tgcgagcgcattagtgtgatctacccttcgagccccccgagtaattcatgaggattgcttgggtgtttacttagttcttggcgaagccatgggcctcccttttgccaacctcttttgaccttcttgtcgtgttagatacgctttccttttgtgtcgtggttctcgatccttacatgagcggatgtaatctctagtggcagacccatatggagctacctaagaggcgctgcctgctagagcgtggcttgaatgcacgcaagcgcatcagcatgatgtagcccctgagcccccaagtaatctatgtggattgctagcttggggtgttttttcctagctaagatcaggatttgccttttgtcctttcctgacatggccatctaacttggtcatttgcgcttgtcagttcttcgttgtgcacacgtctcctctcaggagggttttcgggcccctctgaagagagggtcgccttcccctacctagtcgatgcaagggaaggggtcgttgagctacggacgggttgtccaagtgagatccgaccgctccttcacagggcttggtcttggcgagcggttccactaagggactcgacccactgggggcatctcatttagtccttccttattctatcacgtattgtccctttggtcagtctggccgatcgggggggcatggccaccctgtcaaccagttgccatagaagaatgtgaggtacgaccttggaagtgggaccgagcaaatgacctatgggccagtcatctggcttgcgactcgttgggagcttgtccggtcgacccctcgctctgtgtggggaggtagagtgaatttcggttttacttggtgtgaggcagttgaagcgacacggtagaaatggaccgtcatggcttcgtctagcatgggcggctcgatgggacacgaaacaacctgctctccttatcgtgtgcggttggcgtgatggtgtggttaaccgcactgaccactgctaacacctccgctcatgtatttcccgatgcatcttccgaagcgacataagccctccaaaacgtacttgtgtat

SEQ ID NO: 93612 - DNA, 447 bp, Zea Mays
attatatcttgtatgaattctactgccttggctgaggttaaagaggcaatgggcttatactctatccattttgtgaacttgtcaatggcaaccaacacgtgagtatagccttcctgagctttcttgaaaggtccgatcatatccagcccccagcatgcaaatggccatgttacaggaatagtctgcagctgctgtgcaggtaaatgttgttgctttgataagaattggcaagcttcacatctctgaactaacttggcagtgtcactcttcgctgttggtcaatagaaactagatctgaaagccttcccgaccagagttctagatgctgcatgtgctccgcactgtctggcgtgtatttcatcaaatagttgtttcccaatagccgagttaatgcatttcatgaggactcccgtcgcacctcttctgtacagtgtgcccctatgaggg

SEQ ID NO: 93613 - DNA, 617 bp, Zea Mays
cgggggtcggaacaagaaaagattgaacagggtatttgatgctattggcttcgtataccctgattatcgctacccgctgcgagggcaagggaaaaagagaaagattgccgcttcggtcattacagctgagccgaagggcaagaagatgaaggttctgactcaccggccgcgttatattgaaccggtcgtgatacctgaatttggcaaagggacctcttcagctgtcgaagcaaaagaaactgttctgattgtgcagagcactgaagagccgactgtagtgccgaaggtgcctacagttgggccagccgaagctaaagatgataaggccaaagagccacaggtggaaagagtgatagaaatgccagaaatcctgagcctaccgcagtggtagatttgccgaagatgcatagagctcctgttgcaactcccaagaggaggaggatggccaacgtgctggatgctatgatggagactacaaaggccttgagccctgctcctacgaagaaaattgctgaagctgccaaagcgcaagccaaagccaaaactaggcaagcagaagccgaagctacaaaaactcaggctgaagccgaaggtgggccttcagcgcccgtcgcgac

SEQ ID NO: 93614 - DNA, 462 bp, Zea Mays
agcagactcgctacagggacccatatggtgggtgaataggacggaatgccataccagcagtacgacagcacacgaccctacggacgacgtcgagaggaccacaccacccagaggcagcaagccaagctcccttctagtagaatacgagttcctactataaagtcctccccagatttataaaagggcaggtgcaaccttccttctacacacaagcacacaagctgtaacccaatataatgtgattccatgatcagcactacactggactagggccctagcctgaaccagtatgaacccatgtctcagatttctcatcgagtcctaacgactcaccattcaaagcaagtccacgctagcacccctgccaaaccaaatctcattgtcccctagttttccaaaaccatgacagttggcgcgccaggtagggggacattagtgtgccaagtgacactttctgctctg

SEQ ID NO: 93615 - DNA, 720 bp, Zea Mays
caacattggacttcagatcctattcacatattgaggggaaggctcctacacccatggctcaaagattacaattcatatttcatatcttgtgtaagctctaattgggttgtcatcaatcactaaaaaggggagattgtaagtccaatcaagccctaatgagggttttggtgttgatggccaccgaattagagaactaataagatttattgagatgacaagtagggaatcaaaaagaaaggatgttatacatgttgaaggaacccctaatcaccaatggagactttgtcgactaatgatttaaaattcttttatgttttgtgtcaggtacctaagaacggggtacctagggtaaggcacataacctcttttattgggacgaccaagtccccgccgaccaagtccgtgagatggcatagacgatcaagaccccatcgagcaagtccgtgaggcggggcgaactatcgggctcccaccgagtggacccacgaaggagccctagcccgatgttgccgacccacgttagctacgacgagacgcactgtccttaggccacacccgggtaaacatgcggcacaccgaaggcgcgtcgagtggtcgccatcagagcacgaacctcacgccatcgcgcatgaactcagtcacgtcaccactgtgttgtggggccagtcaagcccggtcgttggatgacctcagtaccaaaatcccagcagtgacccgaat

SEQ ID NO: 93616 - DNA, 415 bp, Zea Mays
gcctgaacctctatagatcatgtgtcattatgcttgagcaactatgacctagtaggtatattgcacaacatcgagactggctccctgttcccctagttattccattcaggcaccttgggtaccctagtgttgttatcatgacaaaagatcttgttaaaaataagacatgatatttaatccctcttatgaaagaacgtaatattgtaggatgcaaatgggtttataaaactaaactgaagcaatatggcaatctggatccatattaagctaaaatagtggcaataggttttaaacaaagatatgacattggttatgatgacacattcagtttgattgttcaaatggtgactattcatattgttctctgtagaggttggagcttgtgtcaactttatatatagaatgcatttttttc

SEQ ID NO: 93617 - DNA, 655 bp, Zea Mays
gtcggactccaaggctaagctgaggcatgccgcatatctgtacttgatgcctgtgggtgatgtgataattaccgcgacgcttgcccctagggatgaaaacggacggaaacagacggaaaaacttctctcccgtttccgtatccgcattttatcatcgaaaacgggatcgggtccggaatagtcgggaacggaaacgggagcggcataaatagaattgcgaaaatgaacggaaacagaaatactaacggaaacacataatttaatacaaatagaaatgttattgatgtttgactagtgattgattcacagaacaataacataaaacaaatagatatagagaggcaacattctattgttgtttggttgctaaatgtgtacatttagctacatccgatgttgtttaagactttagatcacttgttatttgaaaagagtcggtggttataatggccaattgtgctataatttgtcacctaaatacacgaggatttagtttatatactaatgcatattaggctcgtcccatatttgttaaatacggaataaatacaggttcaattcggaaaaaagggatcccgtaaaacggacggaataagccctctcccgtttccgtcccgttttcatattttttcgtaaatacggaaacgatcggatc

SEQ ID NO: 93618 - DNA, 637 bp, Zea Mays
aaattatctaactcctcctcctcttctaaaactttctgctctttatcaactaatgattccctaagcttctgggcaaaactgcatttattctatcattttctaaagccttaaggtgacgaaaacttactgatgctactatcattgttgcccaactttattccaatcgacttaaaagaagaagcaataacattattctgcaaaggaagaaatgaatgagttatgtgatttttaccttgtcctgtcgccatatctaggtttcgtcccgctttgagacgttctgcccggcccagggatccctctctcgttgatgccgcgcgacatttactccgacacagaaactcctggctatcatcagttttcggaattggagccatcatttcaacctcattatgtatctgaacttcttcagcaatataggattcacaccccaacctacttatgatccatgctattttcctcaaccataatatgctcctgctcaactcaaacatcttctgtagcagaaaatagtacctgtttgactcccttggaagaagaaattccttgctgctcagttccccccttcttttctcctctattttgtttagcatcatacattgacttctcctctgcagtagcgccattattggcctcccca

SEQ ID NO: 93619 - DNA, 363 bp, Zea Mays
ttgagggtagctcacaccaggcaaaagagctacgcagataatagaaggagaccactggaatttgaggaaggagatcatgtgtacctcaagatgtcaccacttcgtggaatgaggagatttaaagtcaagggtaaattgttccctcgctatattggaccattctgagtttttaggcaagttggagagatggcctatcaactcgagctacctgataatctatctgatgtgcataatgtatttcatgtgtctcaacttaagaagtgtctctgtgtccctgaggaacagttaccaatggaagagctcagtgttcagggtgatttgacttacacggagtatcctatcaagattcttgacactttgact

SEQ ID NO: 93620 - DNA, 711 bp, Zea Mays
atgcttatgaactgaacgaagcctggtatggggcgcatcaaaggacactcaaggacgggaaacatggacaatcgtgtcaccccatccacgtcctttcaaactctaaggcatgcgcaagcccccgagcaacatctatgtcgctcaggaatccccaagtactcgaagtactcgggggaaaaggtcggcctctatccaatttaggggcgtaactcgagccttaagaggagcaatttgcaccggaggtaggcactaataacgccaacacccaacactcctttctcttagaggataagcacacctgctagatgattgcggattcgaaccctctcgtcgggcgtgatgtcatgactccaactgatgggggccttgaggggaatgcctagattgaagcaagggagtcatggccccgataaggtctcctgacccgcaacctataaataaaaccattattgatactagcccttgtggggcaaggaaagtggaaccgagatgtactcacatgatctcacattgcggagatagatactcgcgcacccgattggccacgcctctgtcatttttcgctcctccctctttcgcagcaactcgacgcagaaaaactatcaccataggtcaaaattggactcgacgccaagatacccctcacataggatgataaaggcaacaatatgttgaatcccattttgattcaggtagtgaaattgaacctgc

SEQ ID NO: 93621 - DNA, 508 bp, Zea Mays
agattatgcttcaaggcagttgtaccggcatgaggaacattatccaactcacgacctggagttagctgttgtggttcatgccctaaaaatatggcgtcattatctactaggaaatatctgtcacatttatacagatcataaaagtttgaagtacatctttacccagtcagagcttaatatgagacataggggatggcttgagctggtcaaggattatgaattagagattcactatcatccaggtaaagctaatgtagtggtagatgcgttaagtcgtaaggctttctattattgtcttaccatgaagacttctgacattacgttatgccaagaaatggaaaagctaaacctaggaatgattcagcatggaacttcaaatcacttgaagcttgagtcagtcatcctgcaaagaataattgacgcacaaagaaatgatgagggaatgaaacacattcatgagaaaatagaggccggtaaagccaactgcttcagaagagatgatcaaggt

SEQ ID NO: 93622 - DNA, 381 bp, Zea Mays
ggaaaacaagaagaaccagtcggagtgaacctctaggagttctaggacttcaacgagtttgaagagtaggctagtgagcccccagtcatatgaatgcgtcgatggctttttccaagctccgagaaaactaagtcgtagtaggcttcaatgccacatttgcacaatactagcgggctacaatatgttccttatattttgtgttttggttgggcactaccaataagacttaggtccacagagcactcactaaaattgcactgataatatccatgctacaaatgataatagattattgattatgggcaaacataagcaagattgagcaaaggtgcacttgtttattcttgtttccacacttagaacctatttgggagagcttag

SEQ ID NO: 93623 - DNA, 315 bp, Zea Mays
gtcaagtcagaaggaactctgaagcgacatacaatgttcttccagaagaacttatgtgtgcactgtctttgacgttattgttgacacaatcttggcttcgttccacttcgtgaagtattcaactgcaacaaaagtaaattttaagttgccctgcgctgttggcagtggtagtggctaggtgtgtgcgatgagctttgtgaactgcgaaggggcacccgtgcgaggtgagaatttttggcatgcttcgcacgagcgggccagtttgttggatgcgcacacaatggttggccagtagaaaccttggcacatgacctt

SEQ ID NO: 93624 - DNA, 426 bp, Zea Mays
attgcaagcgataagccaagttgcccacccgggccaagatagtgaacggtccaatgtatctcgggctaagctttccgaagacaccaaaccgaacaactcctttagtaggtgataccctgagaaggacttggtcacccactgcaaattccaagtctcgcctcctcacatcagcataactcttctaacggctctgagcggccaaaatattctgacgaattttccgaaccttctcagatgtctgctgaacccaatcaggaccaaccagagatctctctcccatagtctcccagcacagaggggaggtacaccacctgccatataaggcctcaaatggtgccatcttgatgctagcctggtagctgttgttataagcgaactcggccaacgcgagatgatcctcccagctacccttccaagatagaacac

SEQ ID NO: 93625 - DNA, 590 bp, Zea Mays
ggaatgaccatagtgctataagggcatctttctgctctgagttcgccgtgttgttgtttgcgtggggacgtattcctgggttgtttggtccccccattccttccatatgtgaagcaatcccctgatctccctatttgtcacagcggatctgtctgggggcgccccatctttttttctactcctccccgcgcattctgtctgccacaaaaggggatggtgaaccgtaccatgcttccctcaatggtcgagttcatggcgctcggtgagctccaaatgggtgatcttgaatgaggccctagtgccttttgcaaactccaggcgtgggtccattgggggttgtcctcatactcctaggtctcaactcatatagttgacaaccccactcatccgggtccaacggcttgatgcctctctttgcgataaataatgattcatacatttcttgagactcgaacacaatctagacgtgcccttggcgctcgtgtgctgggtcctagccgctaggtgcccaccacctgaccacccctcgctctgtggtttcaggagcgactatgaacccttcgcgagctgaccttcgaactccgaatttg

SEQ ID NO: 93626 - DNA, 465 bp, Zea Mays
cacgatagatacaacatgttgagctaaagaaataagatccatatattgctgctactgcattgcttactgtagagaacataatacatacactggtgataaaaatgatcagtacctgccaccagtcacggatttcaattacgtctccttccttcacgccctccggcaggactagtttccttttctccccagcctcccatctcaacacattcttcttgtcatccaccacatagtacttgtactcagaggtaaagccggcaacaacagacacgctcccacaccagattagctcactgtcctgatggactggactgagagatactccttgcttgacattccacgacccgagtgctggttccgacccggcaatcagcaagctctggccccattgcgtgtaatacggtagtttgaacagcaaggtcactgaattcaggtgtttctttcccgaggtcgccatgtccttcaaat

SEQ ID NO: 93627 - DNA, 475 bp, Zea Mays
gtagtaacttgatgtgaccgcggggtgtaatcataccgcccgagtagttgaccttggtccaaatggagtcgtgttacgtgaagcggcgtctgttgcttgactcattttcaggcggctttgattctcccccatttcggtctctagaaatacctttatcattgtcggccagggatggctgggggacaacaccagcttgttggcggtgcaagtctggagcttcaccagggaggaaaacagagtaccttgacattcctctcaaggacagcatcaatggttggcgccttgagtggttcattgtggagaaccactgcaagtccctcccctcttggtcagggaggcagccagatgttcgcacaccgagctggatagaatctccgaccctttcgaagataacagaagctaaagtgctgcttgtcgagatctgcttgctgaaggatagaggtctgactgctgaagctatagttgctgacttcgt

SEQ ID NO: 93628 - DNA, 554 bp, Zea Mays
caggtagtaacatccctgtcccctcctctctcaaccaaggacagccatcacaggaggtgtataaccatacaaattttaaagggagaacagtccagagcagtatggtaggtggtgttataccaaaactctgctaaagccaaccactgcctccatttgtgaggatgatgatggactgcacacctaagatattgttccaaacaccgattcgccctctcattatgcccatctgtttgaggatgatatgcagtagaaaatagcaacttcactcccataagctgaaacaaatgtgtccagaaagaacttgtaaacactttatctctgtctgacacaatagttttaggagccccatgaagcttaaccacagtgtctagaaacacctgagctaccccttgagcagtgtatggatgtttgagggaaataaaatgaacatatttggagaatctgtccaccactaccaaaatagtgtcaaaaccttcagacttaggcagcccctccacaaaatccatagaaacgtcctcccaagcacctgtagggataggcagaggctataacag

SEQ ID NO: 93629 - DNA, 749 bp, Zea Mays
cggaaggcccagtgcaactgtgtaactatggactccaagatcgccactctgtgtgaagaattatgcaagctgaacgtggaagttgtttcctcagggactttgaattatatctcagtggagcccaccttgcatgagcagataatcatggcccagattggtgacaaaggtgttcaagtcatcaaagaaatgctcgaacagaaggtggataagtacaaatgcttccgtcaggacagcaagggaattctatggtttggagaccgattggttgttcctaagaatcccgagctcagaaagaaaatattggatgaagctcacctttccaaattctccatgcaccccagcagtaacaagatgtatcatgatctcagatccttgtactggtggaccaggatgaagagggaaatttctaagtttatatctgaatgcgacacttgccaaagggtcaaggccagtcatttgaaggtagcgggtaccttacagccccttcccataccatcttggaaatgggagggtctcagcattgattttattgtgggtttacccaacacatcccgacaccacgattctatttgggtcatcgtggacaggctgactaagacaactcattttttgctagtacataccacccacagggcagaaaagtatgcagaaatctatattgaccagatagtgtgtctgcacggaataccaaaagactatcgtatcagacagaggagcaccgttcgtagcacgtttctgggagcagctgc

SEQ ID NO: 93630 - DNA, 678 bp, Zea Mays
atcgcgctgctcctcgccaacggcgtgaatgcagacaaattacataattcaatgactgcactttggcccttggcagactggagaccaaacaatttgaccgtagaaccgttgtaaggaatcatcaaccacttgtctgcccaattcaccatcataggactgaatttttcaagccaatccatgcccacaattaagtcatatttctgcagtggtaagacccgcagactagaagtgaagtcacaccctgatagcgaccaaactgcattggtgagttcgtgagtacactgcagttgagccacatttgctacttgcaccgtcaagggtcgttgcagaggagtaaggccatggacatgagctgccacttgagcacttaaaaaggagtgggaactccctgaatccattaagactaatagctccataccctgaatttgaccgatgaactgaactgtttttgggggtagcgactagcgacaccctccactgctgcctgggataaacagattgcattcagttattcagaaaagctctcttcgagacccgcccgccgcaccaccgaggcgccgacagcctcttcgagacccgcccgccgcaccaccgaggcgccgagcccctgcgccgcttgctgtgcgacgcgcacgccgccgagctgtcgcgctcgagagcggcttctactcgccgccc

SEQ ID NO: 93631 - DNA, 650 bp, Zea Mays
gtggaatgaaggaaccgggcaagaaatatacatcttgctgcgtaatatcaatttataacatgaagtagaaagaaaacgataaatctatatacatagaataactagcggatcttgccaacaacaacgcttagtataaaatctaccaaagtaaggcgatgcatcgcatggcagtgatgcgatataatagagaccacatcagtgcaacatgacgcttaccttggaatatcttaagaaagggatggtgatgcgcagaagggatgagggacatgcatgcactacttgggaaaatatgttttcctcattattgttgatgagaaatgtacattttatactccatagactctaaacaatagacactctaactaactctatctgattggtataattatacactattcggccaattgaatgggtgaccatgccaccctaaaatgatcgacttctagaaatttcgttgcacccattagacaatctttctattgcaccaatctggttaggatttggcgacaacagatacccctagttctggtaatatatacttatatcgaaactaaatcatagcgatacaaagcatcttcaactaggaatatcacatcagcggtcaaaatgcaattaccatgacgtctgactctatagcatgatatctttcc

SEQ ID NO: 93632 - DNA, 527 bp, Zea Mays
tttgaagaggataatgccgatgccgatgatcggtcatattgaggtactgagaaattctaattatatcaatgacatttctatcgtgaggcttggtgaagaggaaattacacctattccttagaaggatgaagtagtggtagtggagtgcttaaaaaatttgatatctaccttcaccaactgaccccaatgcatttgtggggctagggatcttcatctaggctgtgagaagtcaaggcgtagagccaaacactgatttcttttgccaaatttatgagctacattaccatacaaaagcaactagtaaggaatagttgcataataactttagttgtcacaatttttagtataaaaaagacactcgatatccggccctagtaccgaagcaagtggccaagtgcatgacaaaataatggttttatgtaaagaatgatttaaagaatagggaagatataagggatattattcagaggcctattaaaccccatttcagcataagaggctagcttgtattatgaatgacgaagctc

SEQ ID NO: 93633 - DNA, 513 bp, Zea Mays
ggaaggcagggtgattgcttatggctctaggtagttgaagaaacatgagaggaattatcctacccatgacctcgagttggccgctgttgtgtttgccctgaaatcgtggaggcattatctttatggtgagtcttgtgacatttacaccgatcataagaatctcaagtgcattttcactcagaaagagctgaattcaaggcagcgttggtggcttgagttgataaagaattatgatctatcaattcaatatcacccaggaaaagcaaatgtggtggctgatgcacttagtagggctggtatcccaaaagtgaccatgcctttgattgcagatctggaccatatgggagttgctttgtgctatgttggcaccgctagagaggagactcagatgctcattcaatcctcccttctggatagagtgtgtgtggcatagtagcaggatcatttgttgtaggaggctcgaaagagggtcgggatggtaaacctcgagagttcaccattgatgagaatgat

SEQ ID NO: 93634 - DNA, 687 bp, Zea Mays
aataattcgatctgccaccatacctattctgtttgtgagtactttagtgataattttaaaactcacatttagcaaacagataggtctatattcctggattttcaaagcaatctctttcttaggaattaacgtaataaccccaaagtttagtctatacaccggcaaagaattattatggaagtcctcaaatagagccattaaatcacttttaataacttcccagagaacttgaaagaattctactgggaaaccatctagtcccggagctttattatgctccatttggaaaaccgccttccagacttcctccatagaaaatggcgaagttaaaatttcattctcctcatttgaaacttgagtgatatcattagtaaccgattcctccaattcaatagaagtaaattccggtttaccaaataaacctttgtaatagctagtaatgtgtcttttgagctcctcctcatctactatacttgtacaggaatcatcttctagactgtatatcttctgtttccgatgtttgccattcgccactaactagaagtatttcatattatcatcaccttcaagcatgtgcttaacctttgctctttggaataaatgaatttcctcctctcttagaatgccagccagtcgttcatgaatataagctttcaaagctagttcattaggcgacaggcgaataac

SEQ ID NO: 93635 - DNA, 1200 bp, Zea Mays
agaaccttcacttttttgcccttcggcatagctgtggtggtcgaagcggcagtctttctcttctttccttgctttcatagcgggtagtgataatcagggtatacgaagccaatcgcatcaaataccttgttcaatcttttcttgccacgacccccgaaggctacggacaaggcatcatcttcggccttggaatatgtcccaagcagctcatcactggtagcttcaatacatttcaactagtcatcatttggctcatcaaacttctctctaaatctgaaggtatacttcaatcgaaccaggccaccttaactggattcggcagcagtctccttcggcatatcccagctctccacaagtggccacaccctgaaggttatgtgctcttgaattatatcccttgtgtcaatgaaggcacaaacattgctaaaggccttctggcacgcttcgacgtcactttcaatagtgaccttcggccttcgaaggccgaagtgagaccagatggggcgctggataatttccttaatgtctccccttttaattaaatcatttttaacgtaaaaccactcttccatccaggccccgagccatcttttccagaatgttgacaccaggtagcttgcattagagcgggcaatgaacctgtaacaaccaaagttgttgtggtattgttctttgccggtagtgttcgtctcgtataatagctcatgcatgttgcagaagcacttcgcgctcggctccagcccctagctccttacagcctagacaaatattcccattgattatagcttcaggggtaatctggtgaagaaagatttggaatatctttaatacctcagccacaaatttactcagtgggaaccgaaggcctgccttcaagaagcttcggtaaataacaacttcgttttcctcaggagcaggggcagtgctgtctctcccaactctgacaatagacatgtcgcgaaaatatctccctctcatggcgccaatatgactttgtttgatagtcgattttccgaagatagtatggcttggtcgctagggccgatcctcagaatcttcatccccactttccacgttataactatcattgtcatcagaatcttcggacaaaccctccatgatctccttagtaattttctctgtatttgtttttgccatagactcataaaacccagcaatgaaaggatccgcaactttctt

SEQ ID NO: 93636 - DNA, 384 bp, Zea Mays
ggcacgtggcgttcggtcggcgggcggccaacaccgctgaattatttgaaccgattgcaaagcagaaagggggtgcggcggccagccggaacagtgcccatactcaacagcggtgaagatctttctaccctggggtgttatccgggcctaagcgagcacgaatcacctcgccaacgtgaatccacacgcgggggtcgccggcggacaggggatctgaatctgctgatattttcgttactgtaccattgcaaactccttcagtcagtctgacagagcgaatggcagagaggtttgctccaaattttatgtaatgactgaatcaactctatgtatcaaagttatagcctaataaaccagctacaattttgctacattgtgcatccc

SEQ ID NO: 93637 - DNA, 339 bp, Zea Mays
cgggggagcaagcaagggctgaggaattccttgccagagttcctcctctgtcgtcgggctgccatttgtcgtcgatagagtgtcgcgctacacaatccgaggtatgtggcctctgttgtgttcgtagaattctctggatcacgtagcgcctaactgctcggaggacgatgtaccgaagcgccagggcgccgcacgctggcgagtctccgccgcctcgagtcgtcatgctgggagaggaaggtgtccctcaaggcttgttcggggattggtgtaacggaacatgtccttgaggggattgatccttggccgatgacctcgcatcaggcggaccagttaaga

SEQ ID NO: 93638 - DNA, 281 bp, Zea Mays
gttttactcctctaggttgcaatagtttagacgaaatctgaaggtgattttgtttctgtagtatgtgtttgtgaactccataaagttggccgtaaccacccgcgggccagcgttgattgaatcatcctcagtttgtatgtgttgtagttttttattcgtttttgtctccgcttcttcccctcttcctgtttcttaatttatgaagaaccttcaagttcttgagttgggatttggtttgggaactattgtggaatgagatagactctttggatcactacaag

SEQ ID NO: 93639 - DNA, 374 bp, Zea Mays
aacgacttagtggcgagggaggatgttaaggaggttattatgcgccccatttggtcccgcttcggccttcgaaggccgaaggttgaaatcgatgaagccaccgaagcttgccagaaggcctttggtactatcttttttccattggtacaagagatttgatccaagagcatatagctttcagagtgtggccgcttttagagaactgggaaatgccaaaagagactgttaccaagtctggcgaaggtgagctggttcgattgaaatacaccttcaaatacggagataaatttgatgaaccgaatgatgactggctgaaatgtattgaagctacaagtgatgaactgcttggaccgtattccaaagcggaagataat

SEQ ID NO: 93640 - DNA, 755 bp, Zea Mays
ctggctcccatctgagctttccattgggattcctcctacacaccacatccttgtggtcttggctgcagatagagcacctgccactccactaacactcagcacagcgatgcgcatcaccacaacggaaacacaccagccctagcccgggcttaggaacaacccgatacctctgagtacttcctcctgaagtacccaattcagaggatttgccacggtaggggtggtggcgctggtgttgtgacttgcccctcttgtgggctggacccctagtgttgcccctccttgcgtcctagccacgaggctgatccacacccgaagatttctgcgactccatggtgtactggtgttgcatctccacacccaaagcctactccactgtagtacgaaaatccaccaacggaaaggctcccagagcatgcctgatagaaggtttcaagccctgacggaactggctcgccttctccaactcattgtaagcaaaatgaggaacaaagcggaccatcttgttaaagcccacttcatactctgtgacggacttcttctcttgcttgtaggactgcaaatcaatcttcattttctccaggaaggtgaccgggtagaacctcctctcaaactgcctgatgaaaacatcccaggacaggactcctggcgaagaggagtgagctacctgcacgcctctccaccaaatttgagcctctcccttcagcagctgtgtgccaaagcgaacacgatcaccatacataatctcaaagacg

SEQ ID NO: 93641 - DNA, 388 bp, Zea Mays
gcgtctccctcaaattcactggccaccgctcaagcctgctataaattgcgcacacccacggctccgttaagtagtcaagcccctcatccagcaacacgtgcctcgaatcatccactagagctccccaatttgggatttccccaaaatcaaccaagaacaccgagcggtgtgacctcgccgtggccaacgagtttcaggtccgttcatgtccactgtcctcttgtttcagcacccttacttgctcctgatactcgctgacccatctgattaagctaggaggccctagatcaccaggaacgtgttcactcatccgattgttcacgctgtctccgtgaaccagttgatgtagagcctcattggtgaaattgagtgaggggaaatgattaag

SEQ ID NO: 93642 - DNA, 307 bp, Zea Mays
atttgccttttgctttcatctttcttgatgatcatctttcttgatcgtgcaaggtcttggttcttcatgtgagggcatgaatcaatttcatgacccttctcctgcatccatagcacattctatcgcttctctttgatctttctttgttgaaggacataggtacattgttagagcaaatagtatgagcattagttttctgaccgtgaattttgctcatgcccttcttggaaagcttggtattcttttgaaggggttttgtgcatgctacgattgtccccttctcaagctttttcaccatattatcact

SEQ ID NO: 93643 - DNA, 3004 bp, Zea Mays
cgagctactatttattctactgttcttctcctcaattcacccaggctgggccatacactttcgcattacgctttctcacccttttggcatacgggggcccaacaggcactgtggttggtccggcccgttgatcatctccttcctgctgactgtcgttgtccttctcttcagttatgctaacattcccccctactaagcatgctggatgtccccagacagctgcattaggaaattattgttgcaaatcttggacattctcccaagttgccagctcctcaggcatagcagaccattgcaccagcacttggggacaggaattgagcccgcgaacagaagaacgatgctgcaaaatcttaactggaacactgaaacggtactgatcagatggtaatgcaggtgaggccaccaaacctttccccagcgctcgcttcaattgtgagacatgaaaaaccggatggatacgcgacgatgaaggaaggtgcagtttataggcgacagaccccacacattggatcacctgaaatggcccgaaaaacttaaaggcaagtttctggttagcccgatgagcaactgaagactggacgtatggctgtaatttgagaaacacccaatcaccaactgtaaattctctctcagaacgctatttgtctgcttgacgtttcatcctcattttagccctctccaaatgttgtttgaccaaatcagaaataagctggcggtcctgcaactaggcagacaactcagtagaagagataacagcgttatcagagatgccaaactatctaggacgacaaccatacaatacttcaaatggggcgcgacctttatctgaatgcggcgaagaattgtaccaaaattgtgcaacagacagccaatgactccattgactaggacaggcatggacaaagcaacgaaggaatgtttcgaggcactgattgacacgctctgtctgcccatcagattgcggatgatatgcggaactcatctgtaactgctcatcagccaagcgaaacagttccttccacaaattactgaggaacaccttgtcgcgatccgatacaatggaatggggcaacccatgatgcttgtacacttgatcgtgaaaaagacgtgccacggacaaagctgtatacggatgcttgagcggcaagaagttggcatatttggtgaaggtgtccacaataaccaggatgcaagtgtaagattgagaacgaggtaaggcttcgatgaaatccatagaaataatttgccaaagcgaagatggaacgggcaatggttgaaggagaccgggtaaacgagtgcgatctgctttggcttgttgacaaattatgcaatgagcaacaaatgtatacactaaacttttcatccccttccaagcaaaaatttgtttcatccttgcatatgtgaccggaaatccggaatgaccacccacagcagaagcatggaatgcagagatcaatttgtgttgtagaatatcagactgaccgatccaaattctgttcttataacgtaacaaaccatctttccaagaaaaatgaggtacaaccgaggtatctacgcctagctttgcgatgatagccaaagtctgtgaatcctggttatatgagtcagccacttccgtaatccatttaggagtacatgatgaaattgctaaacatgatgaagacagacttgggtgacgagacaaggcgtctgcagcgccattgtccactccttttttatatatgatgcagtactgcaaacccaacagacgtgtgaacatcttcttttgccaaggagtgtgcaaacgttgctcatccaattgtgccaaactacggtgtccgtatgtatgtgaaattctttgagttgcaactagtggcgccaatgatctactgcaatcaaaagagccaagaactccttttcataggtagaaagtctctgcgatctgggtcccaatgccttgctaagatatgcaataggatgtccagcttgcatcaaaactgcccccacacccaactgactggcatcagtttccaacgagaaaggcaatgaaaaattcggaagtgccaacacaggcgctgaaatcaaagcctccttgagagccacaaatgatgcttcatgagatggtgtccagataaacaaatttcctttcttaagtaaggtcgtcaaaggcttggctaacagtccaaaatgccgaacgaatcgtctgtaataaccagccaggcctaaaaaacttcgcagttccttcacattcttaggagtaacccactgagccacaacttcaattttcgcaggatctatagccacaccagccgcaaaaataacatgacccagatatgtcaactgtgattgagcaaacgaacacttcgaccacttaacttgccatttgtcccgaaccaatagctccaagacttggcgcacatgctgcaaatgctcctcaaagctggcactgtaaatcaagatgtcgtcgaagaaaaccagcacacaacgacgaagcaacggtgacaaagtagtattcattgcccgttgaaaggtagccggagcaccagtcaacccgaaagccatcacacgaaattcataatgacccgaatgagtttggaatgctgttttgtgagcatccgcaggaaggagacgtatctgatggtatcctgctgtcaaatccaaactggtgaaccacgatgcctgtcccaattcatccaaaagctcttcaataactggtactggaaaaatggacttcacagttagagcattcaagtgacggaaatccacacaaaacctccatgagttgtctttcttcttcaccatcaacacaggagaagagaactggctagaactgtggtgcactatactagcctgaagcatctctgatatttgatgttcaatttcatctttaatggccggtgggtaccgatatggacaaattttgacaggagttgccccatgcactaaaggaatggtgtggtcacattctcgagaaggtggcatcccaactggaggggcaaaaacagaagcaaattcagataat

SEQ ID NO: 93644 - DNA, 415 bp, Zea Mays
ctcttgtgcacgtcagccttcctagcccaacaatgtcaacataacaggaacattccgccacgggctcaagccgacaaatgggatggagaacatgtctgtccaaaagatacgtgtggcgaacgatgggaaagagatcttagtcatcgctgcacttatagctccatgttatatatgtttaagactagaacactaggcccacttgtcgaggtccagctctcttgtaacgtgcttcccttgtactataaaaggggtggcacatgcgaagcaaggggacattcactaaaagactccctgagacgtaagctatctcaagctatcagtagtacaactcacaatggagtagggtattacacttcggtggtccaaaccactctaaattcgtgtgtgttcttgtgttcattcttctctacaggat

SEQ ID NO: 93645 - DNA, 426 bp, Zea Mays
ctggaggcaaacctggtaaatcttcagggaacacatctggaaattccctgacaacaggtatatccttgacctctttaactgtagcagacacactctttccactgctctcttaagtgttggtaatcggatcagcaacttattattaccgttaggtgagtccaactgtatcgtcctttatagagcgtcgatcaccgccccatgctgacgaagccaattcatacccagaatcacatctatgtcctgacctggaagaactagcatataggtaggaaacatgtgaccaactagctttatgggtatctgatataccatctccttagtatgtaaacgccctccagaagattgtatgctatatccattttctaccacctccaaagacaactggtgttttaacacaaatgtccgatttataaaagtatgggaagc

SEQ ID NO: 93646 - DNA, 391 bp, Zea Mays
gaggaacaccagaagaggaaagaccaacacaggcaacacacactcgacgagaccagaagacccaaaaaccggagctaaggcttagtttaggactccagtcccgttgtctttaggtccacccccacataagagacttgggagctcttctttccccttttctccgcttgtaacccctactacgagcattgagcaacaaaggtgccagtaccgcgagccgtcgaagaccggatgtagggacgttcagcccaaaccaatataaaccttgtgcctaccgagcaccccatccagaatccagaacacccacatgcaaatttacttgtcagagtggaggttcgaaacatcgacaatttgtaaatgtgagatatgaacaaaaaacagaagttttttttgc

SEQ ID NO: 93647 - DNA, 749 bp, Zea Mays
cgctgtatggcttggtgtacaagtaatgtgtacaaagatatgcacgcctatacatatctctaatacccgctcgcatcgtgataggaggattgcggatgtaaaaaactagacctaagctcagcgaacaattgtgtagacaagccttgttcatgatgtccgcgtactggtgcgaaaacgggttacgaagcacctagacctgtcccaaagtcaccttctcgcggacggagtgaatctcgatgtgcttggtgcgccaataatgatccggattggttgtctgtagacaatactgactttgttataataggcaatggtcacactaacaagaggggcgtgaaactcctggagaagctgtcggagccaacaacactcgaccacaacatgggcgacaacatagtatcctacctcggtgctagagcgggagacaatggtttgtcgcttggatgactaggagaccaacgaggtagacatagtatttggagctaggccgcctggagtttgggcatcctgcctaataagcatccgagtatgatgtcaactagttgatggagccgatgccggagactaaaggagatagtgctcttcatgtagtaaagaatctgtttgattagcgctaggtgacgtcatgaggatcatgcatggaaagatagacctattgaaccacgtacgccaagtcatggtggatcagtgttaggtactgaagggtactaacaagactcttgtagttgtcggaggcatcaacgacggagcac

SEQ ID NO: 93648 - DNA, 580 bp, Zea Mays
tccgagatcatgaaatgaccacctttcttagcggacggataccagatcatttggtgacgtcatctagacattgatcctccatgcaccgttggaggtaaatccggtggcacacctgtcgagtactcgggaactgggtacccaaaataggcccatggcctcttcaaaaatggcccatctgccgaccaagtctctatgaagcaactctgcgaggcagatcgactgaccaactatccgatgaccaactccaatgaccaaatctaatgacctactctccgctaataagctctgaccgaccaactaaccatcgagcaacccgacgaggcagagatctaagtccagtggtactaatccacgtcagctacgacatgacgcgtcatcatcaacacatgtccggacaagctcacaccaaataggatgggcatcagggtctctacaatgacccgtacatcggaaggacaggacaatgcgccacatcgagcgtgcgcctacacacgctggtaggtgatgaagggcccatgacgataggagaagccacgccacgtacaaccgcactttgagactgatccatggaacccaatgc

SEQ ID NO: 93649 - DNA, 291 bp, Zea Mays
aatctgtgcacctttatttcaaaatcagcccaaggcctatctggttcagttttctggagccaaagccatctcaaatttaaagaccatcccatcacttccaaattatgaattcccaacccaccaagggagatgggtcggcagaccttagaccacccaacgacacaatgacctcctcttatatcagttctacctttccaaagaaaaccccttcgaatcttatctattgccttgatcacccatcttggacattgcaatgctatgaggtgataaatgggaatagcagtgagcaca

SEQ ID NO: 93650 - DNA, 812 bp, Zea Mays
gtctcccattcagtgactcactagagcttgggtcttgcgtgatgctcatgcagtgaaactgcatgtccacactgttgtagctgtcgacacctcggtgtccttctcgccgtgatccaattaaaccaggcagtgtctacctcgctgctccgtggacttagttcagtaaagccctacctctctccccgaatttagtagacctcgccgtgtgttactgcgttccatattccgggtgctagccaggtctgtcgcgcgctgtccttgcccttaccggtgaccacgctaccgacatcccacctccaccatggtcagcctagcacgatttatttatatgctttaagcttagtgttctagtacttgcatagggcagtgaagcttatggacatgtctgtttttttgtcccgtagcgagtcgattggaacgccgccacgacgccgttgatctttgccgtgagccactccatcatcgaccgttctgtttgcgctctccccggtcatgtttgcgtgagcaccgttggtggggtgacttgctagtccttcccgtgccctccccttgaactctactgtgccggcctcacctggatacctctcaacggacccaatttttactggaaccgtggtcagggcatggtgatcttgttatcgcttgttccttgggtccaaatgggccgccgtcgtggataacatgttcttagcgtagactcgactagcgtcccagtcgtattccaccgtgtcccaagtctcaggctcgtcggaggggacggtgggattcgaggatgtgggtttgtgaattgaacagaagacatggggagtttt

SEQ ID NO: 93651 - DNA, 350 bp, Zea Mays
gaccacatactattccatcaactggcatcaatgcatgcatcaacatccgcctatattaaacaagcaaactaaaaagaagcctttaagggactaatagtatctagtactacagaagataggtaggttgttctcagccacttctaaacaaatctgccatcagcatcctcaccggcatcacacacgcctacggcaaacacacatcgcaatcacaatcagctagataccacgacatcggcatcctcaccggcatcacacacgcctacggcatgccattccagcctcacaagtcacagctgcatcatccacctactacaaaactagacttctttgacaccttcattcaaggagca

SEQ ID NO: 93652 - DNA, 1113 bp, Zea Mays
ctcatcgtcgactcaggaaaaccaaacagctctctgagctgaacaacatgcaaagtgacatctctctctcaaagcaaaacctcatccactggtgatcgaggtcaatccagactgtagcatagaatactttgacccactcctcaacatagcgaccaccaaaatcgaagagcgtggatagaccaggtaggtaagtgatgtgactctcaacctctgcaccgactgccacatgaagtgttgccctatccaaatgccggtgagctctcaaggcaatctaagcagatagctaagctcgatagaatgactcttgagtccatgtactgaacagaggacgagctgctaggtcacactgcgctgggaaccacgcatcgactggcacgtgtctgaatcgatgaactatagcgacagtggctctatgaagaccaaacagtcgtggatcctctatcaaaggatgaacatcggtctcgtcacgctcccggaagcggggtggaggaactggtggagtagcggagggagcaagattggtggaggctatgggtgtagtgagggtagtggtagctggagtggtagaggctagagtaggagtggtggctggagcagagggttgtgccgaggagacaagtctagcaggagtggagcgcaaccgagacgattatcgtctgacatggtaggcgatcttatctgacccaatccgcatctgtcctccctgctctgctctctcagctgctcctgttgctgctcctgctactcgattagctctatcaagcctgcacttcttcttgccaccctgctgctctaggtagactacttttcccttatcctgtctaatagggcatggagggtcctgatgatcacctccccctcctagagtgacattctttgtcctaaccatactaactgttgggccctgctctagaactgaccacaaaccctgactactggaactacccactaacaactgatatgctgcacaagaataagaggagataagtaagagcagcaaagcagtagataagtgtggagataagaaaggtttgctacctggggcacgtctctcaagaaaaaacatacaggggaagactaacgcgagcaggcacaccgtcacactgaaataac

SEQ ID NO: 93653 - DNA, 414 bp, Zea Mays
atcactgtttttacttgccttcaccgaggatttggaaaggtactaagtatgatctggaggtcacccacctgtttttgacacaccacttagtgcacatatttacataacaatcgctaataaacaatgccgcacctacacacaattctaacccgtcgcgagcaacaactctccccatcacccaccaaactgcagcggcgctgcttgataatttcataactttaaaattataacagcagtgatatcaaacaaaaactccagaaacatctacataaaattccctacaagtttttattcaaaagataattaaattccaacatctcgatggccccaaatagccgacaaagtacaccctgtgttcagtttttggacagcaacctagctgagttcaaaatgcgatatctcctataatattcc

SEQ ID NO: 93654 - DNA, 742 bp, Zea Mays
ggacaaatgcctattcttttcaaccaaggacttacttatgaaagcaataggttggcccttttgcaacaacactgctccaaccccacatcactagcatcagtctccatagtaaatggctgagaaaaaacctggaagagctagaacaggagtattgatcatatccttctttgattgttgaaaagcagtggttgccccttcatgccactaaaattgtttcttcctcaacaaaagagttaatggtttggcaataactccataatctttcatagacttcctataatatccagtcaaacccaaaaaagtagacaaagcatttattcagttgaaccaaagacaaagcagtaactacagaagcaccagcatccaaaactccttgcaacttaattgttctttgcttataccagaattatagagttttgtactcctaattacaagtcataggactatggcccttcaaccaatcgaagcccaatatggcatcataagaacctagatctaatattctcatatcagtttggaaagtgaaaccatcacaccaccattccacatcagagaccatcaaattactcaccaattcaacaccattagctaccttcgccttggtaggagcacactgaatatatggcaaacccacttgttgcacaaatgaagagttggtaaaggtagctaaactaccagaatcaaccaacaacaaaaacacctgatccttcaccatggctcttagcctgatactctccatccc

SEQ ID NO: 93655 - DNA, 305 bp, Zea Mays
ggagatactgtcatgagtatctcaacaaattcaattatttgtcccagtatgcaattgatcaggtaaatactaacctgaaaaagaagaattgcttcatgagaggcctcaacgaccggcttcaaagaaaaatggccacctgcctagatctctcctacaggagggctgtcagcacagcggtggcagttgaagctaagaacacaggccctgggaagtcgaagggattcggtggtgacaggtccagtcaggggccttaaaagcaaccaaggttggtaatccgacctttcaatcaaaatcgttcttcatct

SEQ ID NO: 93656 - DNA, 386 bp, Zea Mays
cttgctaaggttttggaagctggctgctgctaaactactttcttcgagcagtgattcgcccagtgaccttgttcccaataatgaaaacttccacggccttctccttgctttggcgctacctgattgttctggttggttgctgaggcaggaaggcgaggtgcctggttgctctagcgctgatactaaattcctccttgctggttgttctaacggtactattgttgctgccgctgagggaactacctctgatactgctgcttgtgctaacgctgatgctgatgctgatgtccttgagggtgaccttgcttgaactgctgaggtgggttgcctgagtaacggggacggctactacccccgacctgagatccaccaatcttgtgtttcac

SEQ ID NO: 93657 - DNA, 1300 bp, Zea Mays
acaaaagaaataaaaatagattgtggacataccttaaacacactttgatagagcttcttaagttgatctaccttgcttctcgcttgcacttgcggattgtacctattatcatattcaggattacaaaaacaaaactatcaaaaaaatgttgtaaaacagtttatatgatcataatgcaagaacatttgcattccatacacattcgcttcttttgttgccccttgcctgcacacgtcttgtcacagcattccttagagtgtaagagctaatatagtttgctggcatattgtctttcttattgtttgtgtctggtgtacgaacgttgtttgcactacttggtgcaggtgcaggaggatcagctgggatgagttcaggaggtttagtagggacaacggaagaaggatcgattggagtggtgctttcacggttgctctgcattaaacaattgatcaaacaatttatgttgcaaaagtttctaatagcaatgatggtaaaaatacaaatatcaaattttatacctgttgtgctacagcagcaagggcaacaaccatttcttgcctcatttcttctctaagcacctgtctttttctttcttcttcttcttgcagtgcttgcattttttcttgtagtattctttctcgttctgcaacctcacacgcaagtttttcatttaacaactggacgtgactttcaagttcaatgttcttttggttggttgcaaccgtggcacgagcttgttcgaggaactttgattccatcacttgacttcttgttggatatcttgataggtacccatgaccatgaagtctgtttgccttacatcctgttgtttccttgaatgttgtttggaaaatagcattttcctcttctcttgttagatgatatctttctatttgatatattttctcaacaattttctcagctgccttctcctgaaaagaacaatatagttcaagttagctcaattcaaataagaattcatgcccagtattttaaagtatgttttagtagtaagctttgtgatttactcacataaatgccacgtgaagcctctttcgaccattcatcatttttacaatgagtaatcatccaaagggatagatcggttggttctataccagtttctggatctctctgtaatgtgaagaatgtatcatacaagtttgtcattaatcatggaaaataaagtagtggtcatatcattacctgttgaaagcttatttgggaaaaagttctagaacccattatatgcttcgttctttgcttctgacggttttctgagttccgggtgcttattttc

SEQ ID NO: 93658 - DNA, 464 bp, Zea Mays
gtccaatgcttgtttagaatggttgctgtctcactgtctgactgtttacttttattctatctataatttatttttcttttgtcgataaggaggctgtgggctgcggttgtgtttgttccattttcactttgttttcaatgactacaggttgcaactttttaagtgatggaatcagccgtggaaggaaaggggaggaatgcaagtgatggaactgattcagaaagtaattcgtttgacaagagggatgatatgtctgaagatgaactggtagtgcttggtggaaaaattgatgattcagcggacaatgtcaatattgatgaatctgaggacaatggaagtaaaaaaggagtcaagagaaggcgcaagagggtgcagatgaaggctacagctgaaaggagatctgaattctaatactctttgttagaatataggggaaacatgaattatttagtgctatttgtaaa

SEQ ID NO: 93659 - DNA, 445 bp, Zea Mays
cggaagatatgatttttctaaccttctacaattattgttatactataaatcagtttctacaatttctttataaacccaggggttgtcttacaagtttcagggacctagatgtaagaatctccaatggctgaggatggcgggcgtgtttaacgaaaagtggagggctcttttgaaatgttacgaggccgaaagggtatgggtggatctcgaccgttggatcaaactcctactcgccagattagaacatacttcgatcgaaccggtacgtgtgcgatccgggatcggtgctgaggatttagttacccgatgatctgcccgtagccctcggattttagttctacgacagtgattggttggatcgaaccgactgttcagattgactggtgatcgttagatcacgaaccgacggttccccgaccctcttcaaccccaagtagttggacac

SEQ ID NO: 93660 - DNA, 467 bp, Zea Mays
gcaatttctctcttcattctggtccaccagtacaaggatctgagatcatgatacatcttgttactgccggggtgcatggagaattttgagaggtgagcctcatccaatatcttctttctgaggtcagggttcttgggaacaaccagtcgatctccaaaccatagaattcctttgctatcctgacggaagcatttgtatttttctgctttctgcttgatcatttccttgataacctgaacacccttgtcttcaatttgtgccctcactatttgctcttgtaatgtgggctccaccgagatataacttaaggcacctgaagaaacaacttctaggttcagcttgcacaactcatcacacagggtggtaactcttgcatccttgctcatacaattgcactgggccttcctgctcaaggcatctgccacaacattggctttgctaggatggtaatgctcctctaaatcata

SEQ ID NO: 93661 - DNA, 306 bp, Zea Mays
cgctccttagaccccccattgaaagaacccgaggacctcaccagagtacttcatcaccggatcgtcgtgcgttgtggacaggaacccttagagcctaatatctggtaaggccatgccccgtggactcaccccaaaccccactatgtgtagctcctgtcgaatcgaagtgccggtagcatgggcgtgtgactgggtgttcggacacggcgccgccgtgtcggagtcctatgcagctccgctcgttgtcgtcgagtattgggtaggcggcgttctgaccgttagatcatcgctggtcagatgggatta

SEQ ID NO: 93662 - DNA, 941 bp, Zea Mays
tacttaaattccaattctgaaaatggaaaacaacaaaatagtgtaaactgtgcgacccagccgaattcagcccaacaagccacgtgtgcccgctctccccttctccctctcactaagagtcggtccccgcctatcggcactgacccctcacgcgtcgtgccttagtcactgatgcctaggtcccagttgtcatcaccgaccttccgctccccctctctgttcaccagcagacacaccactgccaatcttgcccttgcgagaccagaccaccactccctcacctgtcatttggtgacggagatctcgcgcattcacctcggtcgttacttcccacgtttcctccccagatgcccgctccacaattcctccccagatgcttgctccataactccgagtggcttcaccgacattcaaatggtgacccttggtcacgctacccttgtcgttgttccctccccttaatcagtggcacgtggctataaaatccgacaccatgcatgccccgctcacctacatttgagctcctaacgacccgagccccctgcatgtgtcattattgtcgttgtcgctgcccctagaagctcctcgaagatgttatgctatgatcgggacaatcacaacacgtctcagggtaaactctatgtactcccacacctcataccacaatgctcttgaccctccatgtccccaccaccattgacccatgtctagccatgcgtcgacgctctacctagcactaggaggtgtgcaattaggtaccggaactaaaccgccctttccctcatcctaatgcgcactaaactgactctgattgctcaccatagttaaccagggccacctcaagcacctatatcatcaaccatgcccttcccattggtccccttgccctaattcaagctcagatggttcgccatggccaacgaaagcttggtggcaaccca

SEQ ID NO: 93663 - DNA, 440 bp, Zea Mays
caaccaagccatcaaatcctagggaaaagccgagcggtggcgagctacaagctgacacaacaatttggcatccaaaataagagtgctacccctgacaagttgtcggtaggcaacgataggtaactcgccccaatgcaaaatggacagtgccaaaaaattacaatacaacaagaacaacacactgacattgttagaccagctaagccaagaatgtgcccactccaaacagaatctgagggttaaggttagcttgccctaggatagatcaatgggactatgtcgccaaatcaaatcccaagcaagttggatcagatatctttatgcacggagagtaggtggatctcgcatccatgagccatatgtcccaaagttcactaggatggccagtttccaaggccaaatcattcatgctcataccttttctcccttagaacgtccca

SEQ ID NO: 93664 - DNA, 467 bp, Zea Mays
caggagttaaggccttcgtggtctctataacagcgtctagcacgctggccatcctcctcttgggagttgcagcaggagctttttgcatcttcggcaaatctgcctctgctggtgggctcaggatttctggcacttttatcactttttccacctgtggctcttcggccttatcatctttagcttcggctggcccgactgtaggcaccttcggcactacagtcagctcttcagcgctctacacaatcagagcagtttgtcttgcttcggcagccgaagagatcccttcgccaaattcaggtactacgatcggttcaatataacgtggccggtgggtcagaaccttcacctttttgctcttcggcttagctgggtggccgaattgacagtctttctctttttcccttgccctcgtagcgggtattggtaatcagggtatacaaagccaatcgcatcaaatacactgttta

SEQ ID NO: 93665 - DNA, 684 bp, Zea Mays
cacaattgcacagttgcagcttcacttactttacccttcttagtggcgaagctattgtgaatcacagaagggtgcaaatgctttggagatacaaagtaatgatttataggtggtgcatgtattatgaaaatccagtctaaatcgctgattttgcaaattttcgtgagtgcatatgtacaaagtaatgatttatgagcagatcacattggctgtaaaagcgggcatgtgtctttacatatagcatgtggattattagaggaaaccaaaccacatcatatccatacagtggcagaggatgagaggacacagtatggccaagtatggcagctatcatacctaaacttttgatagtcttatatgttagagtattcgttagtgttttgattgtctcctgtgtatttaccctcttgcccttaatgtaatgtgtctaaaccaactaccgagtctagctattaatacaatacccaaccccactcgagtgttagagtattagggttttctacaatatatcttctactgttagaataaaattatatctattgtagtggttgtggtgtttcaattagcacgtcttgggttcgatgcgtcatttccccttttttctacctgctactacaatgttcgattcttgcatcatttgctcaattttgtttcctttttctagtagctactagttataatacc

SEQ ID NO: 93666 - DNA, 627 bp, Zea Mays
tcgtcatcgaggtcatggtcaaggggctcaggccaagaccagctgctcagtatttttcaaggaagcctcctcactcccttgaaaaattgctgcaaaaatggatgagtacataagggatggcaatgattttcgccaaagaagggaggaattccataggtacaacgaatttgtcaggggcttcggaggaaggcttcatccaaggcatgtacgaaatatccataacatggtgtagagtcaggagaagatggcccaatctcagggtcagtcggaccaacaacaggcaaactcttagcagcaacattcgcacaacacgtttcgtccacctgctccgagaggaggaaggggaggtcgatgcaccccaaggaaaccattctaattgttttgtggtgaggacaaagaccacaccacaagaagatgtcatcataccatcaacaagcagaaagagcttgcttcgtcagccacgcagcctacacagtcaaaagaagtgttcagtacatcctcatgttgttcaccttacatcccacagtatgtccagccttagttgcaagagccaaggcaaagtttgcctttggcctcaaatatctcaagaaacccaggatgagtgtatggtcactgtctgcttccttc

SEQ ID NO: 93667 - DNA, 479 bp, Zea Mays
attgtgattattgtcttgtagagttctcatatttcacttttattattgcccctaagtttgatacacatctcaaaggagcaatcaagtgaagagttctcctctcttccatatctactcacaccaacttggttttagctttcactaacattcattataaagcaagtttgtgttgtttagagttgatttttgcaggatcacctattcaccccttccaagtgctctcatcggcccaattctgaatgcaaccaggcctcaagttttctaaccatgctcgtgtcgagtctaccaagtacaagtggagattgcggattataaagtcgttgtgatccactcctctcgcatggcacgccaatccataatttcccaaccaaaggttgcggttcaacactcccgaatatttcacgatattggtgggcggcctgtaccggtgtgacactctcgaggccccggtggtggcaggcttaggctttgattcccat

SEQ ID NO: 93668 - DNA, 344 bp, Zea Mays
ctgtcttccaaaaacaggatataactgcgcgatactgagataaccaatccatagccaagataacatcgaaagcccccaaggaaatcacaacaaaattggccgaaaagacctcatcagcaaggatgatggaacacccctgacaaactgagcagctactaatggagccattagcagaactaaccaaaattgggtgacccaacctctgcaccgaaagaccagcccgcgacacaaaattctccaaaacaaacgaatagctagcgccagagtcaaaaagagcatgggccagaaacgaatcaactgaaatcgtacctgtcaccacgtctcctcgctctctaccatccgca

SEQ ID NO: 93669 - DNA, 555 bp, Zea Mays
tttctctccaaatatactcctcttgttctctacagcaatagctttatcaagtagcctttggaaagatgggaatgtgtgcgataccagttgatattgcagaggtccaatcaaaccatctagaaagagctcctgcttttgctcatcatcctcaacatctctgggagcataacgagataactgaatgaatttgtccctatattcactcacggacatacttccttgcttgagggatagaaactccttcctcttaatcttcatgagtccagcaggaatatggtaattcctgaattgtgcggagaattcttcccaggtaattgtatcggcagcagcatgagctgcacagtacgcatcccaccaatctgcagcgggaccagcaagacgacccgaagcatagagtactttctcccggtccgagcactgggctatgttgagcatcttctctatggactttaaccagtcatctgcttgcagtggatctgcggagttggagaaggttggtggtttgtggctcatgaattcccggtgcttgtcccggggtggcactggtggtggagg

SEQ ID NO: 93670 - DNA, 458 bp, Zea Mays
ctgcggtcaagcaagtatgtggcagctgcgagggcctcaacccaatacttgggtggcatggacgcatgaaggagcagggtacacacagagttgttgagggtacagagaacacgttcagccttgccattctgtggtgaagtgtggggacaagaaagattaaaaatgatgttgtgggcagcaaggagatcatccatggcattgttaacaaattatgtcccattattagcttggaagcacttaatagtgtagctaaactgtgtgcgaacgtaaggaataaaatcagcaatgtgctgacggaccttagacttgtgcttaaggggaaatgtccagcaaaaatgagtgaaatcatctagtagaaccaagtaatatgagcagccagagatactagtaacaggggatgtctagacatcacaatgaactatctcaaaaggggaaatagtgtgggaagtagatgtact

SEQ ID NO: 93671 - DNA, 563 bp, Zea Mays
ctcaggacctgttggctaaattgtcgctggacggtgcatcagtcccacatttttccttacaagatggcatcctccggtacaagaacagagtttgggtaggttctgatgttcctctccaccacaagctggtagcagcatttcatcaaagcccagttggtggccattcgggtgtgcccgttacttacaggaaaatcaaacaagttttcgcatggaagggaatgaagacctttgtgcaaaactgggtagcttcctgccttacatgccaacaagcaaagccagaccgatccaagtaccctggtcttcttcaacctctgcccataccaaagacagcttggcataccatttcaatggacttcattgagggattaccacgttctcagcgctatgattgcattttggtggtggtggatttgtttaccaaatatgcacattttgttaccttatcccaccccttctcagccctcacagttgctcagtccttcttcaaacacatatacaaattacatggtctgccatctgcgattgtgtcagatcgtgataaaatcttcacaagccatttttgg

SEQ ID NO: 93672 - DNA, 282 bp, Zea Mays
ctttctccttcaacaaaccaacttcggcaagcagaaccctggcctcggctatctccaagtctgtgggggattcagtccaacttggagcacgaacattcggttgtctccctgaccgaggggggagagacttgtcgtgattctctacaataaaccattccaggtgccatcctttgatgttgtccttgagtgggatatcgaggtactctgtcttcctcccacggcgcatctccaaactcgcaccacccacaagctggtgctgccatccagccattccaggccgac

SEQ ID NO: 93673 - DNA, 541 bp, Zea Mays
aaatgtgttccggataaccgaaaacatagctgactaaattgaagcttgggtaagcttcaccggttcaccagagtttacgtacacgctagaatttgggctgggcaagagtggaaaagcgggtcgacagagagggcgtcgtggcggtattctatggagcagaggggtgttccagtgatgagactctggtaaactccaattggccggctccgagagcaacagggggctaaaaacaagcaagaacttgaatcaattgggtatgcactaactcgaggagtgctggccacggaagagttcttcacggcggcggaagaaactagtttagggggattccgttgatcacaaaggatggggggacagaacgtgatggctagtggctggttggattcgcaactgaggaatgaagagttgggcttggttgatttgagacaaacgaagtgagagcagggtggatttataggctccgtgagcatcgcgacagtcacggtgataaccatcaccggaccctgctggcgatcaacaacaacaccgagcgcgatgcttc

SEQ ID NO: 93674 - DNA, 596 bp, Zea Mays
gacttaagtcgattgctccgttagcagggcatagtggtcaccctgaattaagtaagcgcgagcatgttgcaccgcattaagtcattgccgacttaagtcgattgctccgttagcagggcatagtggtcaccctgaattaagtaagcgcgagcatgttgcaccgcattaagtcattgccgacttaagtcgattgctccgttagcagggcatagtggtcaccctgaattaagtaagcgcgagcatgttgcaccgccttaagtcattgccgacttaagtcgattgctccgttagcagggcatagtggtcaccctgagttaagtgagaatgcaagtcaatcgtaaataaatcgagtatccttgagacctcttctttattgatgacatatttccactttacagagtacatcatcatcatcccagcagttttgaggtacagctagggataaaactttctgaggtgttctatgttccaggagttcccaacttctgtgccatccatctgagtgaggcgatatgatccgggccgagtgacttctactaccacgaagggtccttcccataagggtaataacttgtgtcgtccttctcccgttagaa

SEQ ID NO: 93675 - DNA, 1780 bp, Zea Mays
ggctgaggcagagtgatgagaaaatggtgctgtatgtactagaacctcctgagccttgcttgcatctgagtcccgcacattagtacatatatctccaggagtatttgcattagtgccaactggatgatcattaggcaataaggaagtagctgtaaattgatgtcccctattttcaaagttagataaaggtagcaaggtggaagggagaagattaatctcagcctgtaggcgcgcaccagcattagcatgcaatttggtgaaagagaggactgcttcatcgaaaaccacttgagatgcaaggatttagcaggggtatcaataacagcattaccaatattgctaatgttcatacctgcccgctgactgtgaggatctgatctggtcccttgtatgcgttttggcctgtcaacttttccagttctgaggtgatgttttctgttgcagcagtatcagtgtaccagtttgtatcaacgccataaccacagcggcagcaccatggctgtgggtagcagctgcagcagtcttgttgttggaggagttctcatcaaatctccaccagcaatcaagagcagtattccagtcttctcacaaacctgacatatgatgtcagactttctagcatctgatggcaccattctttgggcactatgaccaggacctcctttgccacggccaggaccattacgaccacgaccacgaggtccatatctaccacgaccatgacgagcagtattgaccgaagcttgtattcctctgtgaagcagttccaccctgttctcaaagctgagaagctgagaatggacatccccgaccgagacaggttccacacgagaaacaatggctgagacaagtggattaaattcttcatctgatctcgttagtatatacgagactagttcttcatcatcgatagcctgcttggtagatccatctcatctgcaagagatttcatcttggtgatatactcagaaacaaccatgttacctttccgagtagtagctagagcaattcgcgtgttgacagttcgtgtgcgagactgtgacacgtaggtttgctctaggagagaccacacatctttgggtgtggtacaacacatgacttctagagtcatggtcgtcatgaggaagcctaggacctgctgctcaagcgcggtccaccggataaattccggattgatatcttccgtggtcttgccatcagacttgttgggaatcttctcctcaggcgcggcaagggaaccatcaaggtatcctcgcagttgagcgtctctgatgatgggcagaacctgcgctctccatagcacatggttcgtcttgttgagttttacggcaacaatttgccctagaaggggtgttcgcatagcggtttgggagctggacgccattgctcgaattggtgataaatggcggctagggttagggtagaggagaggctctgattaccatgtgagaatagcaaccaggattggttaagcgtttctacctgcagagtaggccgcatagacctgcagagtaggtttcaccatcaatttctctaaactgtaaatgaaatccctgctacgaatgttgatcattgagcacgacaattaatgagcaagctgcattagctcttgtagtgtctaagcttttggcaccagttacaggagccctcagaacaagagaatgaagttgtgcttgatgattcaccattggagcaaccctagaaccctcgaaatgatgagaatgatgtgcctttaaggcctcagagagtcagaagatctgtgatctctgataattatgaa

SEQ ID NO: 93676 - DNA, 368 bp, Zea Mays
cgcacaggtgctagccaagcgtccagaagacctgcatgaaccgaatataaaaccatgcacacccaaaagttaatggggccaacaccagagcccagaccacccgccgtccacctattgcttgtcttgcttatcttcatcagttgagtcatcagtcctttcattatccaaatccttcctaccaaccctctgctgaccaacagatcccacagccgatttcttcttctttaaacgatgcttagaaaggtcgtcctcagacaggttacagaacctagagcccagattccacagcaccttggaggatagcaggggggccatcgaagttatgttggcacatgaggcagttcctttttgggcaggccccatgtctg

SEQ ID NO: 93677 - DNA, 499 bp, Zea Mays
cccaaattcacggtcaccgccgaagagccctataaattgaagcccccgctagctccgcaaggtcatcctccacccagccaccgctaatcgctagcagtccttcgccagagctcgcgaattttgaattcgccccaaatccctctccaccaccgagaaccacaccctaccatggccagccttccctaggtctgctcattaccttcttgttcctgttctagcatccttacgtgatggtgatgctcctcgatccctttaattgagccggaccgccagggattgccgggaacacgtaccatttcttcatcgttcgcggttcacgtggatagagcaggatagtttaccaaatgagaaattaacttaggggaatcattcggggagagttcaattgagtgttagccgctcgggagcgccggtcatagccccatttggccagtacaggagctcgccggagcctctccacgctcgacgccgtcgaggacttccctctacgaagaaaaag

SEQ ID NO: 93678 - DNA, 323 bp, Zea Mays
cctttgccttccaaatcttcatccacttgtgcttgtttatggtaccgaagaattggacttgatacgccgaactagccgtgtcgcaattggtgttcccaaaattccatgtgacagtgtcctgttggtcagttaactgaacagaccttacaacaagccaaaggtgaaggaactgacgagcctggtcattagtagtaagacggtgaagacccaccatccacatgttccttggaagagcattttttactgagtgattcttcctccttgcaagcctgaagcagctaggggctatgtccataggtgttgtaccattaatccacctatcc

SEQ ID NO: 93679 - DNA, 565 bp, Zea Mays
tacgatttcagttgattcgtttgcagcccatgctctttttgactctggcgctagctattcgtttgtttcggaggattttgtgtcgcgggctggtctttcggtgcagaggctgggtcacccaattttggttagatctgctaatggctctattagtagctgctcagcttgtcaagggtgttctgtcattcttgctgatgaggtcttttcgaccaatctggtggtgatttccttgggggcattcgatgttatcttgggtatggactggttatcccagtatcgcgcggttaaatcctgcttctggaagacagtgttattgcaggtgccgtcgggtaaggaggtggtattcttgggaagttccccaaagttctcgctatccttgttggcgcaattgcttcctgatcgccgatcaaggaagtcggggatctttttctccatggtggtggagggtgaggctgcctcgcgggtgcaggacatccgagtggtgtgtgactttgctgacgtgtttctggtagagcttccaggcattcctccggagcgcgatgcagcttttgagattaagatgatc

SEQ ID NO: 93680 - DNA, 300 bp, Zea Mays
gcctactcagctctagaagaagtagtaaatgggagacgagtatgtcggcctagctgacaagcatgacagaggccctcaaaatgtcccctactacatgaaatatctaaactattggtgagcttggtcatgacgttgggtcctagatggccgagacgacgatgccaagtggtggaggaggtggtggagattaggacgggaggggaggatgcgccggtggagaaaggtcagagtgtgtagaggaaccccgagctatcacactgggcgagggggtcctggtggtcagatccttcatagagaaac

SEQ ID NO: 93681 - DNA, 576 bp, Zea Mays
gtctcgccattcgatggcatacccgagacacacttgatccagcctaatcaagttcttgtaatgagaccgagtaacaaccatggcatggttaatcacgagctgaaatgtgtctatctctagttcgcgtacgtggccgacgataagcgccattcgggtggtcaaagtggatgattcctccgaccacgaaatcatgagttgatcgcacacaatgtcaatgcaactcacaaactggcatgctcagcgtcaagagccaatagacagtcttccacccacaaaagtttgtcctaaactcctgcatgtataagaagaaacatcgtaagggccaacataatcaggaaagccagcaaacaaggagtaaagcaacgagccctatcctctgttgaaagaccttgatgaagcgtccttagcgctttttcctagcgatggagtcttggtggaacccaaatggtcctttgtgtgccctcgcttcactggcaacatcgttgtcaaagcgatcgcctcacattcggtttcacgtttctccttggcccgtgcctcgatggccacccaacaaaccagggcggcggtacccgttcc

SEQ ID NO: 93682 - DNA, 415 bp, Zea Mays
ttcgggattgacccaaggttcagcagtgattcccgccataccctccattgttcacggtcgcaggggctcgagaactccatctatttctagacccgttggacgagttaggggaacaagactccgcctttatgcaccaggccatgaagccaacaaagcgggatgtggttgagattgcacgagctacgtgcgttctgttaccgggcgtgcaggaacaacgaaggggataagcctgacaaggttggcccacaccacagtggaacgagggcacacaagagactatgacaacccgggtcccaccatgacagcgacagaaagggctggcgcgagagttgggctggcgtggaagggattttgggccgaacgaatggtggcccaagcgtgcaggtaacctttttctttttcttttctaattctt

SEQ ID NO: 93683 - DNA, 321 bp, Zea Mays
aattttgagtattacaaatcctacccccccttaaaaataatctcgtcctcgagatttaggaagatctagggaaaaggtggggaaaatctatacgaagttcttcttctctttcccaagttgcttcatcttcaccgtggtggctccattgaactttgcacatctttataaccttatttctcgttactcgagtcaaagtatccaaaatcttgatggggtactcagcataagtcaaatcttcttgaacactaaggtcctccattggtaattgttcttcaggcaccctgagacatttcttcagctgagatacatgaaagacatcgt

SEQ ID NO: 93684 - DNA, 842 bp, Zea Mays
ctgaccttgaggagaagtattctcaaagtcaagccgacttgggccaacggtgctctgaccttgaggagaagtattctcaaagtcaagccgacttggcccaaacctctgcttctttggaaggagcatgttctttgaattcctccctcaatgcccagcttgaatatgaaaggatagcgcatgaggtaaactccctcggttgtcttttccatgccattattgattgggtactgaatgttgcttcttgttcgtaggaggagaaacgagcactcacggcctctcgtgacaatctggacaggttataccatgacgctagtaactccttgtctatatttgagaggagccaccgcttcactatatcggacctgaatcatcatcgtcatgagctgcaagtatcccaagacgaggttctatgacttggatagctgttatcgaccaaggattccaccatcagggatctgcgtacttccaagaagcttatcgcgcaggagctagaagccgctcgactagctgtcaaagtttcggaggacaattgcgccgtcttgaaagctcatcgcgacaaggctatggacaaatacattcacgttgaatggatcttgatgaggaggcccggcgtcgtggtgcctgatgatattgtcgccgatgtcaaggatgcgcctgatgcttcgagtcgtccttcttattccgttgctcctgcaaaagacattgctggcaaagacgtttcgatgtagtgatgttctgcaaaacacttgatgtaatgtgaattctgtgtgcgtgttatggttgtgttagaactcaaatattttgtggatagggcaccagaacatgcccctactgccaacaag

SEQ ID NO: 93685 - DNA, 883 bp, Zea Mays
ggctaacccatttatccccggccttctccagcggctacaaaaggatatatcgggatatatctgcagctaaatgttttagcggttttcactagacagtacacagtagacacttagacagatcctcccatgatcccaattcccagacctcacactagccactgattgcaacaagcaaagcagccccaaaatacatttatctcacaactagccgctgattccacaaaaatccaagtcattgatctcacaactcacattctcacctacaatttaaaatgcacctcgaacaaaaacagctagccgctgattgcaacaaacaaagcagcccaaaatacatttaccattcacaaatgtaaacaactagcaaaacattcaccagaaaataatatgcacattcagtcagtcattcagcagaatgtaactgaagcagagttcacctatgtagtatgtacaaaaaaaaagaattacaaagtatagtaactgaagcagagtttacaatttacacttgaagcggagattataatcagctagcagatattgacaaatgaaaagtagcttcatcacaaatgtaaactagcttagttcaaaaatgaataatggcttcaaattcagatgtagtgacggaatctgaataaacatatgcagtgacagaattttcacaggctgttgtacatagtaatcaggctgttctcgttaagagtttcattgtgttatttgcaataataatcagatcaacactgcagattgaagcttaaaattcagatgtagtgacggaatctgaataaacatatgcagtgacagaattttcacaggctgttgtacatagtaatcaggctgttctcgttaagagtttcattgtgttatttgcaataataatcagattctg

SEQ ID NO: 93686 - DNA, 369 bp, Zea Mays
tgcgactgcacgtcgcgcgcggcgcagcgcagcgcaggcacagagccactgaaccagtagccgtactctacagaagcaaggacatagagaattgacaagaaaaatcacgcaagggaggagagagagaaggggggagcatagcataggcatagcaagagcaaagctgaaaaagaggagcaccactcgtggggggttaaaaccccgagaacaaacttgggagtagcagcggccagccggaagcgagcggagaccgaggggagagggggtgaagaagcaacgagacgcagcgagcaagcgaaagcataccagagcaccaagcatagggacgcgcgcgcttctccagttctccctccctgccctgcaaggcgg

SEQ ID NO: 93687 - DNA, 914 bp, Zea Mays
gaagttcttcctggcccgagtgctgggcgtaggcggcgaagggcggtggcgaagcggagagttagtgaggtgtcgcggagtgatgggcgtcattgtggtgaggtggagggtggtcgtcttcgtgtggacggggctggcaaacgggaattgttgtcctcgccggctggggcgagtgtaggagagggggagctgtggaatctttttgtgggtgaggagctgaggataatgctgtttaactacagggagatgggtatcatcccgaaggttgaaccaatgtaaggtgtgatgccctcgctgcatgtatgtaactataatttgtatgatgaggttgtgtgccttcgctgatccggctgtgcccgtaggggacttgtacacttgatctagcgcgtttattgtgttggtccggcttcacccgtagtcggtttttgcacggagggtccggctgcacccttaggtgacttttgcacggatagtcttttgaggaagactttgattttgcacacttgtgctagtccggctgcacccttaggcgacttttgcgcggagtgtcgcacgcgagggtagccagcgctgcccctcgcggtgacttcgttgtggtcgaatgccgaagaccgtcgatgcggtctttttcgacgttgttttaattttttgcgggggattttttgcgtgtatattacatggctccgcctcattaaaaacctcaccccccgggaggaaaagagtgcaggccggaataaaactgtttggggaattacaagggcgagttggccctgaggagtcaaacaaaaaatttgcgaagattgtctatgttccaggtcttcgccagattgtgttgttaatctgtacgcgctgggagacgacttcatcttgacgataaatggtccttcccacttcagttccagcttaccccgtga

SEQ ID NO: 93688 - DNA, 298 bp, Zea Mays
attgtcaagacgaaggcttcccccagcgcttacaggctcgcaacgccaaacggcgaagacctggagcactcctggaacatcgacaatcttcgcaaatttttttgtttgactcatcagggccgattcgcccttgtaattcgcaaaaacaattttattccggcccgcactcttttcctcccggggggtgaggtttttaacgaggcggagtcatgtaatatacaagtgaaaaatcccccgcaaaaacctgcgtcgaaaaaagaccgcgctgacggtcttcgacattcgaccaatacaaagt

SEQ ID NO: 93689 - DNA, 289 bp, Zea Mays
ggagtcgacattaaggccctttttctatacaatgcagcttataattatataagtctggctccagcaagattagctaaagcagtttattcgctacatataatggatgctggcttccggtacgtcttcagcaagggctgctataggctcctgtaaatttagtacacgctgccagagacgccaaatataaagtttgtcggccgtccgctatgcactgttgcttacgtacggtcaccctctgtaatactcaaaattgaataagaggattatatagtaaattccttattttgtg

SEQ ID NO: 93690 - DNA, 418 bp, Zea Mays
ggagaatgtgctcacatttgtggacaagggagtgactgttcagctaagaggagatgcgggtcagcagaaggaggttccacaaatttccagtctacaagtgaataaatggttgaaaggcaatgaggtttgggctttggttatgctggagcaagtggtggataagaaagaagcagtagtccctgagcagttacaaaggttgctggtggagtttgaggatatttttgttgtccctactggtttgcctccttccagagattatgatcatcatatttctttggtaccaggacatatacctgtgaactcaaggtcctacaggtactcaccattgcacaaaacagagatagagaagcaggtctctgaactattaacttctggtctaattgtgcctagcatgagtccctttgcatctccagtcttg

SEQ ID NO: 93691 - DNA, 394 bp, Zea Mays
cattcaacgaagtcctgactggcaggggagatttttgtgcatgcgtaggggctcgagggctgtatcactacttgaaaacgctggctgtgaacatgctaaggctgtaattcagccaaacttcacagtttcagcgactgacatcaaggagtcgtcaaccgaagctatcacccttagtgggaaattttgttccgatgtgtggatgaatggcggtcgagagatggctggcgaagccattaggtgaaatgaagaagaggcttatcttgcctcagaagaagcaaggaaagctaaaaaggccgctgagcatgaaagacgtataggtacgtttgtcatattttagcttcataggtatgttaacttcatgcctgacaaaagcttatattttggtgtatctgaa

SEQ ID NO: 93692 - DNA, 633 bp, Zea Mays
cccagtttataaaacaggagtatattaactatgacaaagaagggtaatatgaacaataaaaaatacttcaaaagccactactgcaataagagtggggcgacattggacctcttaccctttatattgttcttttctctataatttatcttcatactcgataggattttccccccactgttttcgctaaaagaaacatgagtgggtttcaacctacccgaggagcaggtaaaattcttgcctagattgaagccaaacactcactgatattaatgccaaactctttagaatatggatcttcatggtaagagttatgattcaccatttgtgggcacaaaaaaggttgtcatttgcataagcataatgaagtcacaaaggaaaggagaacccaaatagaactaaaacatatcacctgaataatgtcacactatcaatcatgtgggcgctagcatgtctcctctaaaagagctcttatctgactctggtttaatctctttacctatgtcccttcactattttgcaggcctaagcaaactcagatttttaagcgcgcattagaaacataggttctgctatcaaaggttagacatggataagtcatagtgtggagctttgctagaaaagagcaagggtaac

SEQ ID NO: 93693 - DNA, 651 bp, Zea Mays
aatcttgagattaacatgggggcatgagtgtgtggccttcatgttacctcctggtgaactaatatgtaacatcttcttaagggggtacttaggtatgttgtgttttttcacaaatgactcggttataaaggaatgcgatgctccagagtcaaataaaactgatgcaggtatggagttaacaaggaacataccatacactatgtcggcatcctcaggtactgattctgcggtgacgtgattgacccttcctctactctgcggagtcttgttctgagcagatccatgagcggggggtgttctggtcattcctctgagtattgctcctctggggtgtctgctggttgcgccttgggcagttgttggcatagtggccaagctcaccgcacttgaaacagccattgggttggactggtgcgttgcttctggcctgcgcgttactggcgccaccttgacgattctgggaacttccaccagacctctggttggtctgagagttactcctttgttggttctgactctgattatttctctggctttgctatccagagcgttgcacttgataattgtttccgccttgatttccagagtggaactgcgaaccttgagcattgttcgggcgggtgttcctgcttgactgaccttggaacttcc

SEQ ID NO: 93694 - DNA, 858 bp, Zea Mays
atcctggtaggaggtagggctggaggggcttcttccttctactcagtctgacatccttggcttttggtcttcttgcggatttttcttgtgggggcgagcttcttcagcttcttgtcgtaatccatcttcagagtgcggtaggcatcatgggtgttggtttcctcgccttctgctatctcgaggctctcttgaagggatgtattttcccttgtaagttccctgacttgttgctccatgctttccacccgggagtttaggtgagtacagtgggaggcaaggtcatcatattggttatcgagagtgtggaggtatccagccatgtagacgatggtggggtcatcctcggtagggtctctccctgacagggcctgaagtcttttcctctaggcgcgggtatttttgttgctgggtggaaagtagcgaagggggtttcaaagattactctactgtagttctggcatagttggcggagggcttttcgggcaacattttggcaagtatctggaaagcggtatctggtgaaagtgacttggaaagaaggatagttcggatagttccggctttctcccaggtagactgccatagagcacttctccattccattctcgagatactccttccagatatattctagcttcttgcggatccccatgcaaagcgcacaacttcgcaatagatgtgggaacccctcaacctctgagcagtaggatgtcctaatgaccagagagtcttccatctggaataggaaaagaagggtctattaatatcgagggaaaggagagaagatttttcttggggtaagaggtattttcttttaaggcaagttttaaggtcagggctgcgacctacggccagtcc

SEQ ID NO: 93695 - DNA, 670 bp, Zea Mays
tttgaaggagcggggctcaagacctttgtagtctctagcacaacatctagcacgctggccattctcctcctcttaggagttgcggcagaagctttttgtgccttcaacagttttgcctctattgaagggctcagaatttctggcattttcattgtttcttccgcctgtggctcttcggccttatcatctttagatatggttggcctgactgtaggcaccttcggcactacagttggctcttcagtgctctgcacaatcggagcagtttgttttgcttcgacagctgaagaggaccctacgccaaattcaggtactacggtcggttcaatataacgcgaccggtgggtcagaaccttcacctttttgctctttggctcagctggggtgaccgaagcgtcaaatttcctctttttctcttgccctcacagcaggtaacggtaatcagggtatacgaagccaatagcatcaaataccctgtttaatcttttcttgccccgacctccaaaggttgcggacagagcattatcttcggccttggagtatgctccaagtagctcatcgctggtagcttcaatacacttcagccagtcgtcgtttggctcatcaaacttctccctaaatctgaaggtatacttcagtcggaccagaccaccatcactagaatcggtgg

SEQ ID NO: 93696 - DNA, 457 bp, Zea Mays
gtagaacagtacctggccgtgtatgtttagtcagaggagcagcatttgaatacagtacatctgtgcacagccgagcagcaaaaaataataataaaccaaagcactacacattgacagagatcagtgccaagtacacattaccagatatcgatgagagctggggaggatttagattggggaggcagactcgcttgacagctttaaggagcgccatcctctctgtccatggtaggttggcgtggacgtaggaaggtgattgaattttggcgtcgacgtaggaagcaaatccttggcatgggggcaatgatcgcgcggagggcatgattagccttccatctatgtgccccgattttcttgggattagcggatgtgcgggcggattgtgaggattgtggtggggtcttgcccccaatctctcggcggatgcgtgcggttggtcctctggccgtcgatttgc

SEQ ID NO: 93697 - DNA, 500 bp, Zea Mays
gtgaaaagtggtatcctcagcctgagtatcaatcactggagcaggtgtcggcacaggatcctcaggagctggacagtaggacccaaagaggaggcgagaggcctcaagagtaccctggaactgtggtggctgaatcagttgagcaaagatgtgacagagatagtgagcatacggcagctgtcgacgagcacgtagaccatccagtacggtgtcctcgatctcacaaatgaggaaatccacaacatcaaactcggagtgaaagaccagggcaccaagtagccagagctggatatgagtagcagcctccctgtaacccatctgtggcagaagcgtccgtctcatgagctgatatagaaacttggccgctgtggtgaagtctgccggagaacgtcgcgacccatttgagaagggcggtcggaacagagccgcgacgtgagctgtaccaggagcaactccgtcgtgagggcgaggaggaggatcagaggtgccatagcacaagc

SEQ ID NO: 93698 - DNA, 439 bp, Zea Mays
gcactggcaagaagtgagctgccttggtcaatctgtccacaatgacccaaatggaatcatggtgccgggaggtattgggcaattccacgataaaatccatacaaatgtcctcccatttccacgatggtatgggaaggggttgcaaagggcctgctaccttcaaatgactggccttgattctctggcaggtgtcacattcggatatgtacctggcaatttccctcttcattctggtccaccagtataaggacctgagatcatgatacatcttgttactgttggggtgcatggagaattttgaaaggtgagcttcatctaatatcttctttttgggctcagggtccttgggaacaaccaatcggtctccaaaccataggattcctttgctgtcctaacggaagcatttgtatttttctgctttctgcttgattatttcctt

SEQ ID NO: 93699 - DNA, 368 bp, Zea Mays
aacgcatgaagcatcaagctgacaaaggtcgcagtgagcgggaatttgcagttggggactcagtgtatgtaaagcttcaaccctatgttcaaacatcggttgctacccgtgccaatcacaagctcagtttcaagtacttcgggccttttgagatcacccagcgcattggtacagttgcatacaagctcaatcttccagaatcatcatctatccatcccgtgttccatgtttcgcaactgaaacaatcggtgaagtccactctgccggtgagcgccacacttccttctactactttgcaacttcagtttcctgaacaggtgttagaccgccgcacggtgtcgcgtggaggttcatccatcgaccaaatt

SEQ ID NO: 93700 - DNA, 278 bp, Zea Mays
caaggccactcccccataagttgcctcgtgagatggtcgaagactaattgcaggcatgtgtggaagaagacatgaggatgcaatacgcactaagaaaacccatgataaaggaaaaggtagacccaaatatcactgagcactttgtcgacatggttaggcaagaaaaattgtatagctaagaggccacatactatgaatgtattatttggaaatcatttgagacaaaagggaagaaatgtaaagttgttctacaacacaaaaaataagaaaaacaatca

SEQ ID NO: 93701 - DNA, 512 bp, Zea Mays
aaactaccttaggcgacgctggccacggaagagctctcctcggcggcgagttttgctgatttggggcaaaaccaaaattcgcggtctatagtggctaatcggaggcgagagttggtgttcgggtttcgtaataagctaacggagctggctgtgcacttaatttatagcatccgcattcggtggctccaaatttggaaaagggaagctgacggccggagaggggggtgagtcactgacgcgaaactactgtggcgttcaccggggcaatgtctcaggcgatagacgagctatctacggcggtctattgtgatgtggtaacgctcccaaatacgtggtgtccaggcggcaagcggcaaactccggtgatggtcatctcgacttgtcgtagggtaagtggttacaacggccagctcacgacctcatccgcggtcaagatctttcacccgccacagttatccacttcacaccgacacgaatcacggcgaaagctcaccggcggcgacagattctct

SEQ ID NO: 93702 - DNA, 417 bp, Zea Mays
gacggcgttcgtagggtcatgcacgaccgtactcctggtatgacgtactgccccatccgtccggtatacgggtccctatagcaagttagatgttgacgttgcggcgcctggcgagtcccgtagagtagacttacggtggggttcaagatcgtggttggtgcggcttcgtcttccgtcatgtccttacatgactcttcaacatgcgtaggcacacacatgatatggtgtattgtcccgtcccttccgatatgtgggtcactgtagagactcaggtgctgaggtccctgcgaccgagattgattggccccacaagtcagcgaggatatacctaaggatgtgtgcgggagcgtatcatcgtgttcgacaaagagctttcggcaccatacccatggttcagtcgtggtttggtgatgatgc

SEQ ID NO: 93703 - DNA, 1221 bp, Zea Mays
atttttagacttctcctaaactctagctcgtccccggagagttgcctggattcctgtgctttctcaaggagggtaaggacagtctgaatgattgctagttgcactttaaaattgcctactgtctttcgtctctagatcaatagagctttagtcgtgcgggtcatcttcacatgtagccgaagaatggcatcggaagaacgaacactaaatgtccacgcttgctgaaccacctcattgaacccatcaatttttgtccaaagagcttcaaatctaaaccccttatagaaactaaaggcatacataccttgcgtaactaaggggcaatgatccgaggtcatggacccaatggcctgcagatcagcctgggggaagaaatcatgtcattccgtagtcgctaagaacctatcaatcctagacatcgtagggtcgtcctgttcatttgaccatgtgtataatttaccattgaggtcaagctctaaaagctaaaggtaatcaattgtgtggttgaactgcctcatcagccttctataaattaatcctttgtttttctcccttgctatccttatcatgttaaaatcacctaaaatcagtcattccgacttcatcagattacgaatatggcacaactctaccagaaaattcattttttcattttcaggttgaggaccataaccccctgtgaggtcccacaccacatcgctcggacgggagctgattctgacggataacgggtatactgatggatagggaatagcaattatgtcaaaaagatccgcatcacatgcaattagaatcccacctgacgctccaagagatggtaaatgaaccatctgagcagctaacttgtatcccagtgtttcctttagtaagttattattccaactcattatctttgtctcttgaagacagacaatagttgccccagaagagagaatcgtatgtttcacacttgcccttttagctgggtcatttagccccctcacattccatgatagaatacaacagttggcattcattaatcaaaagtagttcccctacttaaccaggtagagccacacaagaggaacacagatgaagaaacaggactcgaccagtcaaccagcgtcaacagcatgcttccagctggggacaacatgcaactcacaactaaaattatgatagaccgaaacatagacagagcaagccaaatgaagaaacaccgctgccaagcccacaacctgc

SEQ ID NO: 93704 - DNA, 394 bp, Zea Mays
ccgatagcttttgaaatctagctaggggtaaaacttcctgagatgctctatattccatgaattccctattttcgtgccatccatttgagtaagtcgatatgatcctggccgagtgacttctgctaccatgattggaccttcccatagtggcgacaatttgtgtcgtccttcccccgttagaattcggcgaaggaccaagtctcccactgcgaaggatcgatgtcgtatggccttatcatgatagcgccttagggtttgctggtacctagcttactgaattactgtattcaatcgttcttcttccaatatatcaatatcctccagtctagtagcttctgcctcagctatgttttcgaagaccagccttggtgccccaaacctgagatcggcaggt

SEQ ID NO: 93705 - DNA, 464 bp, Zea Mays
aaagaagggaggaagtctacaggttttctgagatgatcaggggcttcagagggagacttcatcccaggcatgtccggtcaattcataactccaatgtcagtgatgaaagggccagcaatgttcagcatagccatcatagttcttagtcttcaagcatgcaacagacttctttcagaccactggctctgaggggcagaggaggaagaagtttcagtggaggaaggtttggcaatcaacccagaaagttgtactgtcttttggtggcgaggacaagggccacacaacaagaacatgccaggtcacaatccagaagcaaaaggaaattgccgaagctgaggcgcggcagagtcagctaaagcaagtcctccacactgcttcgtgttattccccatacatcccagaatacgtaggcaatcaacaacctacgactctgttgctttggcaagccattccccagcttcctg

SEQ ID NO: 93706 - DNA, 775 bp, Zea Mays
gttatttgatgatgtccaagctgctcataaattttacaaagactatgcacataatgccggtttttcagttcgtaccagacaacatagatgtgatgacaatggagtagttagatggaagcggttcctatgtgcaagggcaagttacaaaacaaatgattcttccaagaagatgcacagaactagagagacaagatgtggttgtggagcttatatttatattaagcgcaacaatgaggggaagtatgaaattgcagcactaaatgagggacacaaccatgcatttgtgacacctagcaaacaccatttgcttcgatccaaccgttatgttagtgagaaggcgaagacaactcttttcaactgtcataaagcaagcattggaacatcacaagcatacaggctccttcaggtgggtgcgggagggtttgagtatgttggttgcacaaaaaaagacttgcaaaactactattgtgatttcagacacaaaataaaagatgcagatgcccagatgtttattgataatttctatgcactaaaggaattggaccccaattttttctttgattatgaagtgattgatggtcgattgtttcgagtgttttgggctgatacaactagcataaagaactacatgcatttcggtgatatattgtcttttgatactacttacaacacaaatcagtatgatatgaaatttgcacctttcactggggtcaaccatcatatgcgttcaattttctttggtgcttctttcttagctgatgagaagattgaaagt

SEQ ID NO: 93707 - DNA, 720 bp, Zea Mays
ccctgtcggagggctaaggattcttagcatttttacttcaactttcggctctttagccttttcaaccttatctttgattgtttcaattgtatgcgtcttcagcattacagtcggttctatagtgctctgaacaatcgaaacagtctgtgttgcttcgactactgaagaggaccctgcaccaaaatcagggaccacgaccggttcaatgtaacgtggccggtgggttagaaccttcatcttttttctcttcggcgcaagatcaatttggatgtccgaaacaacaaccttcctctttttctcctgtccctgcggtgggtagcggtagtcggggtacataaagccaatagcatcaaagactctgttcagtcttttcttcccccgacctccgaaggctgcggacagagcattatcttcggctttgctatatattccaagtagctcgttgctgataacctcgatactttttagccaatcatcatttggctcatcaaaccggtctctgaacctgaaagtatattttaatcgaactaacccacctttagttgtttcagcagtagtttccttcggcatatcccagttttccacaagcggccataccctgaaggctatatgtttttgcattaaatcccttgtcccaatgaaagagcaaacagtgataaaggccctttgacatgcttcggcggcatcatcaatttcgaccttcggcctccgaaggccgaa

SEQ ID NO: 93708 - DNA, 369 bp, Zea Mays
caaagatctgagatcatggtacatcttgttgctaccagggtgcatggagaacttggaaaggtgagcttcatccagtatcttctttcttagctcagggtccttgggaacaaccaatcgatctccaaaccataaaattcctttactgtcctgacggaagcacttgtatttttctgccttctgcttgagcacgtctttgataacctgaacacctttatccccaatctgtgtctggactatttgctcttgcaatgtgggctccaccgagatataatttaattcaccggaagtaacaacttccaggttcagcttgcacaattcatcacacagggtggtaaaccttgcatccatgctcatacaattgcactgggc

SEQ ID NO: 93709 - DNA, 686 bp, Zea Mays
agagttgaggacattctgcaagcacaaaagttagcaagggaacctgttcgtcaacataagtaacgcaaggtaaaaatcagctcacctgaaggatagaaaggaataaggaaaatcccataggtggaggcaccggtacactatctgatgatggagtatcagtggaagcaatattgagagcatcactcaaggagacctcagtttcgacagcaagcagcggattcccagtatccgggtcgctgacttctaaagtgaccggaccgacaagaggaggggaagaattgtcaccatgggttcctcatattgaaccggtggtgatccggcatgaacgtccatagaagcacccgaggaggaaccaagctcagcacccttgggctagtttatccttggcggcaccttcggaagctgaagcaccctcgatcatgcacacaagagctgaataaccctgtcctgcaacgtcaagagctagtgtgttcccgcgagctaggccaccctccaaggtcgaagaagcgtgagaaactgcccgggttattccttgcctgactggattactagctaaggggatgtcatccagaacctctgtacagacgacaacactttcagtttcaggtggctccaataaaaggtcttcagggataatctcctctagtgcatggtcgatggcagacatcgtcaacccctagagacta

SEQ ID NO: 93710 - DNA, 389 bp, Zea Mays
ctttgctatgctgaggtgaatctctatgagctggtggaactattagcttctgaaataatcgtatatatagcaacacaattagggtaggggagtatatatagtggaccaacataaataacattacaaaaatgaattcgcaaataattaacacaagatcaggttttcaaaattgataagttaaaacaacatagctttgaagtgattacaaccataagttgaaatgcattgctagctcgaatgacatcctacaagtaaagcacaggtgagatagatggaataggagtgcagcacaccgtcactttgtgacggaaccgtccaatctataagagtccaagcacgaaaacatcagtctcgatagttgataatgtacttgaccccatatagacccg

SEQ ID NO: 93711 - DNA, 725 bp, Zea Mays
cacccctacaacacaatctggtaacactgctaatttgactggtaatttgactttatttcaaagttcgtggtgaaaattttatgtgtagcctattcaccccctctaggctacttccaccctgaccgaggcatgtgacagccaaaggaaggtacagtgcaaaggactccaaagtctatccttcctcactacctcgccctctgaaatacgaacaagatcctacaatccatggtgggtcacttcggataaagggaagtcaatagggacgtacgagatgaagacaaaagaggactctgaggcaaacttcttgtatgacccctaaaacgtaactcacggttaggtttcaggtacctgcagggcccaattaccccatgctccggtcaactcgagaatgatagggaaacaatgctcgccatgacgaacctttggggagcaccaaaagaaccttgcgtccaaggaaggcaatgtcatatctcttcaaaatcttcatgtaactatggccacaaattcccttggttatataaagagacggggggctcactacaatggcagacaaattcagtttgtatactttgacgtaagcatgatagaccatgctttgctctgtaacatagaaaagttagtaatgaagactccaaccctatactggacataggagttctctctgaaccagttttaaaactatctttaggctcgctttgagcaaggccatcaggacaacaacatat

SEQ ID NO: 93712 - DNA, 312 bp, Zea Mays
gagaagaagatgagctgaccggagtacggctggccgcggtgaggttgagtttcgggtggcggagaatggatttgggggaaatcttaaattcgagctctcggaggcacggttgctaacgattgctggtgactgggtgggtgatgatgttacgcagctaggggagggctcaatttataggcggcttcgtcggtggcgcacaatttggtcgagcaacgcggcggccggaggtgaagaggattactggcgcgcgtgaatcgctgtctcatgccgtggcaagctctccggcgttgattagacaacagtgggggttta

SEQ ID NO: 93713 - DNA, 325 bp, Zea Mays
caaagccatccaggggaagagtgtagcaggttgtggtaaaggtctcttcgccgacagtgaatggggtctgagaacagacgtccccactcaacaccttctcaccatttgcaaccttgacaggcagttcagctgttggagtcacatgcagtcccagtcttggcacaatagcatcgcggatgaatgtatgggtggatcccgaatccacaagagcaatgagggccacaccattgatagactttcaatttcagtgtgtcggcgatgtcaatcccagtgagagcatgaagtgatatgcccagttcctctgccagtgcattagttgtcctgg

SEQ ID NO: 93714 - DNA, 372 bp, Zea Mays
atgaaggcccccaacaacacccctagaatcaacaccaaccttgaatgccatcaattgttggttactgaaaatggtcagctctagatggcatcaatcgtcagttactggctatagtcgcattgatggccataaatcaggtgttctcttatggcaacacgactcgatcaagagcacaacaccacaacatccatcatttttttgtccatacgtctgtctatctgtctcgactcgacacgacatgacacgtcacgtcttgccatgccacatcgatgctgacaaccacgacatgctcatggcttggcctagctgcctagcctggctcggtgaggcaagcgagcttgtgtgtggcacaccagtctccttctcccaact

SEQ ID NO: 93715 - DNA, 369 bp, Zea Mays
cagaaacctaacctgggaaaacgaagccatcaggtaggtaggtgttcaggttggttagtaagcttttacatgcggcgttgaccattggagagtgaataaagtatgggtttggtggaaacgcctcatggcaggctagacacttcccatgtgtgcataacctgtttctgccgagccatagtccatagatagcaggcgacgaacaaacacaactgccatcatcacttcactgagttgtttgatggatggattggatgcacgaattcgtaagaggtgcagggtttaggggcgtatttctggcacttatggccaccgtcagctcacgcaaattattgcagtaccattcggagaaagagctccaaaattcacaag

SEQ ID NO: 93716 - DNA, 313 bp, Zea Mays
ggttccaccacgcccgaccctaggctcgatgttgtggggttcgtccgggagcgggttccaccagggtggtcgttacctatctcctccagctgaccaataggccccagttgctagatgcctttccccagtgcgcttagacctaatcatgggccacccgacccaaatcgcccgaaaaaacccggctcgacccgacctaaccaatacaatggacgggtatgggtcataatttctgactcgcaataattcacgtgctaggtatgtgccatgatttttaacacaaaaactgacccaacctaaaaataatccgactcaa

SEQ ID NO: 93717 - DNA, 311 bp, Zea Mays
tagggataattgatatatatctgatttttaaccctaactcatctgaacagggggctaataggtgggttaatttttgaaccaagcctccaactagttgttagccaaccccctcgggctaatttttagtctcagctaataactagccctagatgatccagacagaccctaattgtcgaagtttgcgctcaaggatttaaatgccacatagaagaatacacgttttgcaatgcagatcggggaattaagaattatgcattggtcattatttatcagaaactcaaataacatgcttaattaatgcattttaaacc

SEQ ID NO: 93718 - DNA, 543 bp, Zea Mays
aacacatgtcagttattcctgaagcaaattgtaattttaaggaccttcgacagaggcatttccccaacaatgtcttaaatctgggtgaaatttgtttgatggatttagtggattttatggatacgagggtaatttggttgagtgagttttgtaaagtctaaactggtggattatacagcgatatagattttttttgaaataagaggtgacacattaacctaataatatttgaaacaaaaaaatcggctatccgctaaatcccatgtcattgtgccccagcggcagtacgacacccccccacaaggctccacctcaccaatccttctagatccgacaaccactaatcaccgcatccacaaactaacggtctcgtgccttcgtctctcaccgtaaaaccctcatccttgtcttccaactctgttgtatactcgcttcatcccgttccattccccctactgtcagatccaaatcgtgagctctgtcaggaccatgatgcatactcaggtataagtgagtagtgaatcggtattatgcatggattag

SEQ ID NO: 93719 - DNA, 518 bp, Zea Mays
actctatgatcctctgatcacatcgcttaggcttcaccattaattcgatgcacatgagatactagtgataactgactacccgctccatgacatcatgcacaatcgtgataccacacgacgcacgcatcaccaagtggccagttgaattaggggctcttcaaattaatttcacaccacacaacaccattaaggctgaagttttggccgagttcatggcagggtggacaaaaattcaacaaccaatggtgatgagtaagccaatttattggacaatgtactttgacagatcattaaagtgtggaggcccagctatacgtaccagccatttcccagtcagtgaggcagtagatgtacatctatgaagcattgtccctaattgcgtcgcagaagagaacgcaaccaaacaagtgagggatcaatggcatactatagtaggcgatggtccctatagccaattgagatcattcgccttagaattatggtgctggaaccaaagtgaagtgccccctcaactggag

SEQ ID NO: 93720 - DNA, 956 bp, Zea Mays
agaactcgcacttgctaagtttggcgtacaactggcaatctcgtagcctctgaagtactttcctcaaatgttcctcatgatcttgctcattctgggaatatacaagaatgtcatcaacgaacactactacgaacttgtcgaggtagtccatgaacacgctgttcatcagatacatgaagtaagctggtgcattcgtcaatacgaatgacataaccatgaactcatatagtccatacttggtgatgaatgctgtcttcggtatatctgaaggtcggattctgagttgatggtaacgtgacctcagatctatctttgagaacacactgactcctctcaactgatcgaataggtcctcgattcgaggcagggggtacttgttcttgacattgacttcattcagagctctataatcaatacacatcctcttcgtaccatccttcttctccacaaatagcacttgggctgcccaaggtgaggtacttagtctgatgtagcctttctccaacaactcatcaatttgcttcttgagtaccaccaactctggtccggacactcgataggctctcttggaaattggggtcatgcctgggataagctctatggcaaattcaactttcctttcaggtggcatgcctggtaactcctcagggaatacatcagggaattctgacacaattctaattgcctcaattggattggactctttgtcatatactgataaatggtgacagactccttcttctagttcaggtaagtacaacatagttactacttcatttccggatggggacaccaacttaactgttctcttgtcacaactgacagtggcttgattcctttgtagccaattcatccctaggatgacatctaacccttgagttcccattactactaggctagcggggaagtctaccccccttttttcaatccttagattcggacaaatcctatcggac

SEQ ID NO: 93721 - DNA, 320 bp, Zea Mays
acctgccttctctaggatagctgcaattcctcgagcgccggagaaggcgcagatgtccccgcggtcattcagtatttcttcgaaggcttcagcttctccacttatccattcaataacaccttcggggtcgcctctgataaaattttcttcagaagagtaggcgcccactttggagaagctagtttttaaattcttcatgcaatccaaggatttttcaaaacacttttccttggattcgcgaagttcttcaacatttttctctagcttatttttccagtattcactaatctcttggttggcctgtgcaatcgtgcattttt

SEQ ID NO: 93722 - DNA, 293 bp, Zea Mays
ctggcacacatatgcgatgcatccggcttctgcccttggaaccgggtgtgacaaaaatactcacaaccctgtttcttttcgcccctcggtcgcttcatcaagtttgttgtaatctgggtattcaaagttgagagcatccatcacccgattcaacctttgtttttcacgggtgccaaaggcagttgtcatcaacttatcttctttcttcatgtagtacccgagaatttcattgcacattgtttctattagctccggccattcagtgcaagatttgttgaatcttttctggaatt

SEQ ID NO: 93723 - DNA, 511 bp, Zea Mays
ctgcagcagccacctctaaggctgaaggtccctcagtcacttccatgggagcagggcaatccaaaccagcttcctgaccctcaagaccgcgctccaaggtcgatgaggcgcgggacgctgcccgagatgaccccaacccggcgtcgagcacatcagcacaaacatccatcgctccaccatctgccggttctgacaacagatcttctggaaccatgtcttcaagagtttgatcaaagttcgccagagataattcttgcagaccaatgagggcagacaaggcaggagaaggaacaccactactttccccactagctatgtaacgccggctgttcttctgaattagagggatttcgtcctcttcttcatcatcctcatcaacaacatggacaacacacccattggggtcagcgtcagacgggtcacacccattgggatcagcttcagtaaattcaggcactggcacttcctcagcaacaggagcagaaggaccagcaccctgatccaagctaga

SEQ ID NO: 93724 - DNA, 417 bp, Zea Mays
cttgatgctaaaacaaagccagaaaaaggaaaggaacaataaggacgcgctcgggggatgactttcctaagccgagctcaacgccatctctgtcaaaaaggaaataaaccaaaattcaggattacataccttgctcacaacctgaccgtgaggcagcagttgactgtgaggctctctattgatagaatggcctcttggtttgaactgaaaatatatagccggaaacaaagccgttcaagaacagaccgaggctgctatctaaagtaaaacaaagcacatgaaatgattcactgtagtccatgaaaacatataactctggctcatgtgttattttgtagataaacacttacacttcagatatgaaaacataacagttacacttcataattgactctgctgtaacttatgacatccgac

SEQ ID NO: 93725 - DNA, 723 bp, Zea Mays
gcagcagatcagcaaccatcactctggcctgtcttcggacagctctattggcctaaacccgggtgctccagtccagaatggtcagattttggatggcctgggcttggttgggccggtagtgcctgataatgttcctgcagtcatcgctctgggtgttgtgcctccaaatgggcttcaagaggttgatggcccacttattcaggggaaccaccaagaactggaggatgtcccgctcccagatgctcaacaggaggggcaaattaaccatgtttataacaatgtggagatgaattttatgtttgctcaggattggcaaccagacccggtcttccaattgcacatggagagaaaaaggatggcgcaattttacaggctatgggcaaattactttgctcctgtgggcaaaccagagatttcagtgaagattccaaaaaagtggtcgcctttctttatgtccaatttgcttcaggaggattcatttaactggtccaagtccttcctttcctccgagataccgcctactctgctggagcctgagatggaggctctttcatttgctattcccaagagctacccgaataacaagtttatggatactgtcctctcggagggctctcaggacaagatccctgaaatggaagatgtaggctcttctccctcacgcccatctattgtggattctgacctcaggcgaagcaaaagactgagagaagctagggctgg

SEQ ID NO: 93726 - DNA, 297 bp, Zea Mays
gtttatcgtcagtcattgaggaattgaggcaaactcagaaaaaattgaagccataatgagaatggagccaccacgatcacagaagaaattacagaggctcattgggtgcatgacagcactgagtcgattcatttcaaggcttggcgaaagaggaatgccattctataaactgctcaagaaggtggataaattctagtggaccacagaagctcaagaagccctggaagcactaaaaaagtttctaactacaccaccagtactcaagctgccgcaccgagctacatccgatcagccaac

SEQ ID NO: 93727 - DNA, 303 bp, Zea Mays
gtttgcttcaccacgtagtcgacgccaccggaacacgttgaagaccgctcgtcctagaccgaggatcaaattaaacttgagattagtgtgcggggctcgccaccgatggctggaaggacaaccgcgatgacaacgaccttcacggcgtagtctatgttagcacatagatcacaaatggattggattggagaagaggagaaagaggtagacgagagagggataggttgggttgataatgagacaacagagagctcctatgtattcagttttttagtagtttgataatcccctgcataagccagc

SEQ ID NO: 93728 - DNA, 964 bp, Zea Mays
caagggccttctagactctagtgaagttcagggaaatctatagagtggttgcaccggctaccttttttttcacgaacaccataggagagctgtgtgccattttgttaaggaaaaaaggttcaaactgcatacagaaaagggagaggctaaaataagcgcctcccagacacactgatacccaggagactaaaaaagacatgtcgagctaagggacataacacgaccagtaaccagcccacctccaaccaccctcaaggctcatggagggccgaggcgccagccaaacaccacatgctgctttcattagccactatgagagtctgaatgtttggtctagcaccttcaaagacaatggccttatgtttccatcaacatgaagagcacaagaaattggccatatttactcttataatactcgaggaaattctccattgctactggaatatatgtgttcattggttgccatttctgttaaaatttgttaactttctgttaagttgggtctgttccccactttgaggcaccgtgcagtgcagcgcatgttccagccctggcagctgctgctctgcattgtctgctgatcccgccgctgcagctgagctgggcctccgcatcatgcacatcaataccaattgcaccgagaaattcactgacacggtcatgggcctcgttcaccagcagcctgtgcgagagtggtagggtgtttgacgcacacccgcacaggagggcagaggtaggtgaacacaagcgagaggtgagagaagaatacacacgggtgggcaggcctgggcaacacatgcgcatggctccctgcatcctctgcacgctttcgccaggtgccattgcgcacatcatgccactaccggttcgcctccatggacaggtctagtcatgttcaggtggcattttcccgggcgcgtgcacgtgtctcccctgcaccctccatgggcgcttgcctatgtgc

SEQ ID NO: 93729 - DNA, 506 bp, Zea Mays
tgttttagctccgatctgagtgttgcaggaagtaagatcgaattggggctactgagatggtgacaataagggggcatagatctagccaagttcctactgaagattttactacggttcctttctaattcactgtttggaaattgtgagttgaagctatcatttgattcttaggagcccatggatttgacatcaatgttaagttttcatttgtacaaaaaccataatcaatgattaatgattgcacaagcaaataaccagttggagtgctgaagtgacagatcagctgaaacgattataacacaacagaagtttggtaattatgagaagcgctaggtgctgcttcaggtaactactttctaagttaagttattttgtttaaacctcatgagacatttaaccattttcataattaaacctcacaaatgaattgtttattgaaaaatgcatgttaccatttgaatgcactagatgctagttgggtgcatgatagattcattggttctgcc

SEQ ID NO: 93730 - DNA, 2777 bp, Zea Mays
cggagtaccatttgcctgcgtaaagaataaacaagattgcaactgtgatcaagtcaactggtagaaggggggtctatcacagaagctgcttagttttagcatgatcatgttccatctttcgattctataggttcatatttgtgtgatttcggtattaagaaaataacatggatcaaaaagggcgacgtatccggtgctcaaagagttgctgtgctcacatgcacattttaaatttgggacattcatcttgcatctcacagcagcagcaattttataaagaaaccctttcacctcgctcccatggtgggaggggattttcataaaagtggtgctgctgttagattcaagatgaaagtcccaaatttaaaatgtgcacatgagcacagtacccctttgagcacaagatatgttcccatcaaaaagagataacttaattagactgcagagtaacttacttcaggatatctgagatttccctacttctgcaaacaacacaaatgttgtcatcataccatgtttcatcacattggatagcttcagtattccttgaagtgcatgcaccttgaatcccaatagaattaccatcttccaccgacttgctggcctggaggaggataaaagaaacattaactgcaagcacatggttacttatatcacactaaataaaacatgaaaaacgcatatgctgcatgaaaatcatggaagcctcatttgattattacctcttcatgatgagcagtagagcaagcgctatttggcaattctagtagaggtttctggctgcaatacagaagtgactacagaatcagctgacataccaaatccatgcttagcaacatcaaacagaatctatatagctaatggcataaataatatgcaacggatagtgaaatactttgaaccaccagtagcttgctctccagtttccaacatggggatgctttccactgccttatttagtgagcgcgtctcagtaagaatgcaacgctgtacaaaaaattgcaacatcgcttcaagtctccaatacgcattaacagataataacagaaaagaaccaagacttctataaatatatcagacataacattccgaggtgttaccctactaggatgtcataaaaagctagcggacataagaagcaactgataaacaagtgcatgacggatacttcgtccattaaggtacgtagcaccagaagcagtataacatttgcaggtttgaacaaagagcgtattccttagagatgtatgtaattctttcacgctacttaagagttaataccaataacggataaaagaaggcaacatcactactttccaaaatgcttagcgcgttgattttgtcggtagtatatacccaactgctgcttactgcactgattccatcagcagcataaatacagagctgacttgtttgaatctcagattttagaaaaggggtggcagctccaacctctaaaacaacatcagactgatgggatccaatcttcaatccatctccctccaatatcacctcaatttcatgcaagtcagaagagtgacctcccaagacctcactagcaacaacatttgaagcttcctggttgggttgttccggtgcattactttcttcatgcaccaaaacagcaccatctccttccggttgcacctcagaagctttttcctcatcctccctgagggtagcaagcactgcattacaaaatttacagatagcagtctttagtatttggatgaaaactaagcatcagcatccaggggaacagaggtggtagaaatcatcatcctgaaattgctatgccaaaatctgatcgctaagaagctataagccctcttggaatgacattatgacaatggaaggatgattaagcaagagtgatatgcatggagtactatgatatcggttgggttttagaaggctcagcgcactaaggatgcttcaagacattgcgctcaacaataaagaagactaaaagggtgcagttctttttaagtaataatattgagcattttaaagcaatctgacaagtggaatgtttgcaacagagaaagtaagtaatgagctggattagcgagacttcaaaaaaatacccatcgtgcaaaaaaaccattaattcaatgaaatggcatggcatcatgtaccagattcttctcctatattgaagagtgcaatgtagctcttcgcatgcaggagccttttctgcttcttggacggtgtagaggcagtcagagcatcatcttgggtttttcttttggtggaggcgggcgttgaggtttcattaggttcttgttttgaaggagaaggtgaaacacttgtgttcctaactctggagggcttttttgttgagtctttggggttgtttggcaagggtgtggatttgggggtagcaattgcagtggcatccttggtgggcgttttagcagatctgtgaaggggtggtgtgtcagcaagtctagatttgtgctttcctttgttttctcgagtggacctcctgaggtttggtgtgtgagcactggcagctgcggtgttcctggtctcccttccatcggcaagcttccttgtggcagttgcagaagcagcagctggaggagaagaaggggggggaggggcatctcctcctcctcctgaccgggtattagccatggatcagtagtagcagcagcagatcaacacctgggtcagttcaaccgtttgttcctccgaggtgcgaatcacgcccccgcccgcggcaccggcagcgaactcgtcccccaaaatcgccggcgagcccgaaccccaac

SEQ ID NO: 93731 - DNA, 789 bp, Zea Mays
aaaaaataaaactttctaagtccaaattcattacctagccctaaaccctaccatgttcactaatatacaataatcaaatcacttgatcccaattatgaaaatagtgcataactaagacacatcatacaaaaagatgggtatcaaataatttgaattgacaagctttgacactcagtttccactgtaatcggtagctctaacaaacccaacttaaggtaatgttatttccttaaccaaagccttaatcacctcgagtcctatagaagatagatagagtgaagatcaaggaacatatcttagacagggattttgggaagataagtatgtttggttggcctagagaatgtttgaacacctacagaaacaaatggacacgtgttcgatgccggccctgcgcccttggcatgcactggccgcgcccacactcaacctgtgccatggatctccactccccaatgcccgctcctttttaagccacgcccaagtcgccatagcttctcctcgcctcacctgcttgctcttgcacctcaccgacttttctccacaccagagagcacgccatcgtccgtcgttgccgccagagctctgctcctgtggacacatgcctccggtcgtcctttgcctgaactgaggccaccaacagcttcaccgagctccacttaagctcgtgtgccatttcctcaaagcactaccacaccagaaatgcctaacactagtcgctcgtgagcccccctgcttgctcccatggacacatgcctccaggtcacctgcacccaaactgagtgtgcc

SEQ ID NO: 93732 - DNA, 873 bp, Zea Mays
gtttttcttttctacactgtcgaatactggaatgtaataagtttggtgcaaagtatggttaaaatggactgcagttaattcaccattttggctcctaggatagaaagtattagaacatttttccgtagtatttctttacaaatgctacaaagcattttgacatagaattatgaaaataatatttggttaagctcattcatttggaatataattcagagtgaaaagaatatagtcctgtttgtttccattagttctgagttctgactatgccaaaacaggagaggtttgtggcactagaatttgctttggcaatgatgattcacatgtttattatagcattctggtcccgtatcttggttgtggcaaattgtgctaatgtgcacagaagtaaatatgcggattagaagtagaggtaaattatctgcgtttgaacgaccttttgttcgagaaaaaaaggtaaattatctgctgtgtttcaaagcagaatcaatatggtacagttttacctttattattgtttacctgaactaagttacttattattccctcggtctgaaaaaagaatgcaattctaggtttggaacaagtcgaactttcatttaagtttgactaagtttatagaaaataacattaacgtttatgtctttaaaataggtttactatgaaaacatattccaagatcattatgatatgtattcggtatcgcaaatattagtacttattgtatagattttcgtcaaaattgaattatttgactgcccacgaagctagaattgcattcttttagggacggagggagtgactgttttcagttcatgctatcatattgagtctaagtgttctattagagctattagttattgacaatttgat

SEQ ID NO: 93733 - DNA, 545 bp, Zea Mays
attcgttggtttggtattggactgaatgttaagattggttttctatattttcgtatttgttttgttgtccttcgtatcgatatctaccatccgcagatgctactcctagcattcaacctcctacaaccaacgcttctccttctaccactaaacctcctaccattgatactcctccacaaaagttcatttatccatacccttctccatactcatatggtgtttgttcctccttatggatcgaggtaattctcctccgttccctccctcatatggtgctcaccctccttttcatccttccacgggcacaatagtgcccctaagtagccgcaataatgcatcgtcgaactaatctccatgcttccatgccacacaattctaacaatgaagggactggttaagacggggacaaaagattgataaatatacatattttgtatgaattcaacaaatttttaggtcatcaatagttcttcgagtttataaattcaactgagaaaatgattatagacttgtggtaggggttgagccgttctacgaacgatgag

SEQ ID NO: 93734 - DNA, 618 bp, Zea Mays
cttgggagttgcagcagaacttttttgtgctttcggcgctgttacttctgatgaagggcttaaaatttctaacacttttgcttctccaatatttgactcttcagccttatccttatcagtcttcgactcagctagctcagctgagggtagcttcggcattgtagttggctcttcagtccttcgcgtaggaggagcagtttcttttgattcagcagctgaagaggcctcccctcccaactcaggcaccacggccggttcaatataacgtggccggtgggtaagtaccttcatctttttgctcgcagccttcggcacaggttcagccgaggcggccacagcagtagctttccacttcttcccttgcccccgcagcgggtagcggtagtcggggtagacgaagccaatagcgtcaaaaactctgttcaatctcttctttccttgacttccgaaggctgtggataatgcattatcttctgccttggaatatgatccaagcagttcatcacttgtaatttcgatgcattttagccagtcattgtttggttcatcgaatttatccccatatctaaatgtatacttcagccggaccagttcaccttcgctagaattggtgatagt

SEQ ID NO: 93735 - DNA, 528 bp, Zea Mays
tctgacgtcctactcaagtgcaggttgtagaacgccaagtacctggcaagtctaccagccgcactggatgaagaacctggcaaaccaaaattcacattataataggtaactgcgatggcgcacgggatgaagtacttggcaagtctaccagccgcacgggaaaggagcacgggatgaagtacctggcaagtctaccagccgcacaggaaaggatatgcagccgcacgggatgaaccaccagcgatcggatggagcgggcaactgcgatggcgctgccgccggcgtgacagagaagatgaagacctagctgcgatggcggcgcgaaaggacgcatgcaacagtcatcgggcacaagtaacagcagagaacgtgatgtaagggtataaatgtccattataacaggtaattagtgcagtggggtattttagctaggaaaggggtttaagtggggtaattagacgagcgctacgaataccggggtattttggcgagcggcaacgaagagagacctaaaaaagcaataagccc

SEQ ID NO: 93736 - DNA, 282 bp, Zea Mays
gcagtgtctggctaaagcaagactaatgttgcattcatttgtgtattcaccgcttactgacacgtgggggaaattgagctccaagcctccaactgagatccctcaatgcaacaaacaaaagttacgggctggaacctgaaaagaagcactacaattgtgttgttgatttgttagacaaagctgttaagtttaggatcataataagtcactaaaccaatagaatttaaataaaccttccctcttctaacttaatttacggagctgaaacggttcgccatatat

SEQ ID NO: 93737 - DNA, 417 bp, Zea Mays
attaaaggggtcggggagcatcactaacatgtaagggtgctagaacaagaacgagaagggaatgagcagacctggggaaggctggccgcggtgaggtgagttcacggtggcggagagtggatttggggcgaatccaaaattcacgagttctagcgaaggactgccagcgattaacggtggttgggtggatgatgatgttatgcagctaggggagggctcaatttataggcagcttcgacggtggccgggaattttaacggcgatgtgtggcggtcggagataagtaaaaaccgtggcgcggtggttgcgtgtcccgtgtcgtggcaattgctccggtgatcaacggggagctaggagaggtcacgacgatgtggtggcgaggttgggacacgcggtggacaacagcgagggcacaac

SEQ ID NO: 93738 - DNA, 523 bp, Zea Mays
gtaacatgtatacgttccatgggtcgtctggtaggcccccgattagtcatccaacagggtgtattatcgagccgcatccaggcgaaacaaaaactaccaaagagatgacacactaagtgggaagcagtcccgaagaatatggtgcaagaatgctatctgtgcacgtttattgtagaagtatcgttgggattctgaggcgcgtcccgcacgtgacccgatagcgaactattcggcagataactcggacgaaagcaaccgaacactagaagagtaggtcgcacgcacgcagtaaaagatgatagacttagatagactcaaacaatttgtaaaagaggatatctctctagtcggctatataaggctgcaggggtacccctaccaaaaactatctcgcttatcatttgattgataggaactccatccttcacctccactaccatttgtaatatggaaactcaaagtgatccaatactcaacaccacacaggatgtagggtgttacgcgttcacacggctcaaacctg

SEQ ID NO: 93739 - DNA, 705 bp, Zea Mays
gctagatcgatggtcacggtgttgtgcgtgaaggggtacacgatgttctaatcacaaccgttcatcacaaacccatcatctcacctcttttctcctacgtccattccctaggccagtgtcgtgcgcgagaccgtggcaaacgttcactgacgcgctgcgcacctgccctcctagtgccccaaatcacgaatcgactacgagctacacaaagagacggtagaggctaacaacatgagggattccttactgatggtgatgcggcgtagatccccaccgatagtgcccgtcgacttcacgggtgtgggactacctccgacgaacattttcttctcccccgctattcctccatgcatgtaaatgaggctttggatatctggggtgtgatctatcccgacgacaatcgaaagcgggtacaagatcatcaggcgatgagcgccttgctgcgttccatgccgaaagagaagtgacaatctcttggtgggcggaagactgtgaaggaggcatgggaggcggtgaagatgatgcaaatcagtgccgatcgggtaaaggaagttaatgcccaaagacttctccaagaatttgagaacatcaagtttaaagatggagaaacagtggaagatttcgggatgcgcctaaccaatctcatcgggaatcttcgagttctcggagagcaagtagaagatgcccgagtggtgaagaaattcc

SEQ ID NO: 93740 - DNA, 616 bp, Zea Mays
tgatttccatagtcggctaatgagtctatgttaaatatattatatgtattcatcgtggtgtaggatagagtgagtcgaagatataaattatgagacatgagatttgtgtttaaagacgaggtgtgcgaataatcggttagtgttccacttgtctagtcgataaatgtggtcataaataattgtgctcgacataaatgtttggtcgttgtatcacttcctctatgtttttaagtcaagtcaaaatgcggggtactagtggtacgctaggcggtgctccaaataaattaaccagttaaggcgaaatctgtcgtgcgtgatttatggttagtgagtagttgaattacgagttatgcgagactcatgttagaaactagtatgcgacatgtaactgtgctcgtgatgtgaataacatatcagtaggtattgttggtgtcattagcaagtgtgatgattttggttgtgcgataaattttgaagggcaaagaacatgtctagtgtgtcgaccaggttaaccaataggttccgtaaatatgcttgtgatgcttttatgtgcatgataagctcgacgccttgtcgtcgtagccttaggaaattttctgaaatgcgctattgctct

SEQ ID NO: 93741 - DNA, 367 bp, Zea Mays
agaaaacacatacctttggtcggtcttgagttgggtgtcgtgcagtgagccctagttggccatggtggtcagctagttcaagatgggaactggtggaccaggaatagggtttgcttctaggtctaggagtgacactcatcttggcaaggttggcgagtggaatcaattgaaaacatcagagaaaccttcagccaatcctaagcttatcaaaatcacccagccaaagcatatcacccagagagagatgatgtgattgaggatcctatgagagcccctccttagaaacaagtgtgggttccaaaacctaaccacctcaggaacacacttgataccgttcccgacatatctagtgttcctcctccaaaag

SEQ ID NO: 93742 - DNA, 524 bp, Zea Mays
ggaagagataatttcggagccaagggatgatgaagttatcgtctttaagagcttcttcagagcagggctttggttcccgctaaatgacatgataggggaggttctaaagaactttgaaatataccttcatcagctgacccccaatgccattgttagacttagtgtgtacatatgggctctccgaagccagggaatggatgtgaatgccgaagctttctgtcgggtgcacgaacttcactaccagacgaaggctagagcagacagccttcacaggaactttggctgctgcaattttgcatatcagaaggatacgaaggccccggttattgtctatcgtaccaagtggccaactggatgaactaatgaatggttatacatgaaagcagatgagaaaaagagggagaagctaatgagcatggttatgagtccgttagagttaaacttcgacatcacttgacccttttgcaatatgcaattggggttaccctgctagctggctgaagtagaatttagagtggtggccg

SEQ ID NO: 93743 - DNA, 731 bp, Zea Mays
acctaaaattgttgggcaacttatccgaaggtcttgccttcatttgataatgcaattcgtgaatcatacagaaaccttcggcacttgtagtaacaccttagctctgtatgacccatatgtcggtgtttatgccccgactacgcactactatggagtatcccacatagtgcttttgagaaggacgatatcgttgatcgtacgtgcagaagcacgtcggaacatgggagagttatacaggttcgggccgcctgaaggtgtaatgctccacgtcctgtttggtgttgtatattgagtttgctggtgtgcacagattacggactagttatgggtggtgatggatgagatctcctatcagtctaatggtgagagagtttcataggggtatcccctcagccttatataggggacaagagggatatccctttataagtcatgaagcatatctaactctatccgagtctatctcctgacgacgtgggtgctcctgtttacctggagctggcttccttccttccgagttatcttccgagtatctagctcttcgagtacgtgcggaccatgtgtgtggagcaccagcgattcttctgcgacaagcacgtacagatagcacccttatgccgcattttcctggatcaccccctattctggtaatctcgttttgcctagatacgacccaatggtatgccctactaggcggactactggggcccattaggcagcccatggagcgc

SEQ ID NO: 93744 - DNA, 704 bp, Zea Mays
ggcggccaaaactgaaaatacataaaaggatccatccccaaataaaacctaaaatctaatgaccacagagcgaacccaaagcagcttgaggggcaagagctaaaagttgcgtaagacctttagctcccaccatctccctggcttccatttcttgtgctacttgagacaggacggcccccatgcatggcgataagtcgtcaaaaacatatctatttcgatgtttccacataatccatttgcctaaggtgatcaaagtgttacaacccccttcgtttgatctcctcaaccagctcactagtacctttccaccatacaagaaaattttggtcatccgactgaggtgacaattgctgcaaaccagctttgtttaaaattctgaaccaaaattcccttgagaaggtgcagcctagtagaatgtggtggatggtttcctgctcctggtcacaaaacaggcagcgtttgtgatgtggcaggtttctgcgaccaacacctatcagcctaccaaccataggaagaagcgacattttaacggtgcctaagacttccagattctgtcataaggttcaaactgtactgaaccaataaagaggttgtcatacgctgccttggccgaatacctgttgtgggcagaaagcctgaaagaatgcttgtcctgttgtttcatacatatctttgtttctttagtcatcattttttttcttttg

SEQ ID NO: 93745 - DNA, 943 bp, Zea Mays
ctgcctggagttaagggggtcagattagctgcgtgcagatatggcagaggtagtgcgtgtagggcagctgaagccaagcatggagtccatccaatattgtgtcctcaatctcatagatcaagaaatcaaccacgtcgaacacagagtgagataccagagcacccaggagccatagctgaatatgagtggtagcctctctgtatcccatccacggtagcaaggtgtgcctcatcaactcatataaaaactttgtcgctgaggtgaaatccgcaggagagcaccatgagctgtttgtgaaaggaggcctaaagagagtggtgacgtgagctatactaggagcaactccgccgtgagagtgacgaggatggtctgaagtgccatagaaaagaatgtgaagcctcatcgtcgactcagggaatccaaagagctctcggatctaagcagtatgcaaagtgacatcctcacgctcaaagcggaacctcatccactagtgatcagggtcaatccaaacaatagcatagaatactttaacccactcctctatctaccggccaccaaacctcaacagtgagtacaaacctggtaagtaggtgatgtggccctcaacctttgaaccagctgctgaacggaaggctatcaggtcaagtcgacgatgagccctcaaggctatctgagatgtctattaagcatggtagaaggactcctaagtacgggtactaaaaacaggagctgcggctggatctctttgagctggaagccatgactctactatgcatgtgtcggaatcggtgaaccctggcggtagtggccctctgaagatcaaacagatgaggatccttaggaagtggtcacaactttttctcgtctcgctctcggaaatggggtggaggaactggtggagtggcagagggagcaggagtgggagcggtagaagcaggtgtgg

SEQ ID NO: 93746 - DNA, 564 bp, Zea Mays
cgccacggcagatcaccgcagtgactagggatgaaaacagacagaaacggacggaaaaacccctctcccatttccgtattcgcattttatcatcggaaacgggatcgggtctggaatagttaggaacaaaaacgggagcgggataaatgaaattgcgaaaacgaacggaaatggaaatactaacggaaactcataatttaatacaaatagaaatgttattgatgtttgactagtgattgattggcagaacaataacataaaacaaatagatatagagaggcaacattctattgttgtttggttgctaaatgtgtacaaatagatatagagaggcaacattctacttccagtgactcacccccttctcgaccgccagcgcaatcccttcgaattggacaccaccgctcactgactctataaaatgagtatgtcgtgagctctttagggtaattacccatccaaagcaccagcacttgccttcaattgttcactagagcctccgaattgctcattcccccaaatcggttttttgccgccgtgaaagactctctccgtggccagtgc

SEQ ID NO: 93747 - DNA, 556 bp, Zea Mays
catgtcaggaagatccataataccaactcaagcgatgataggggaaatcactcttaaggcaatcaacacagctctcaatcatcagagacacaacaaagctccttcaggccaccagccccaagaggcagaggaggtagaagcttcggtggaagatttagctcccaactaagaaggttgttttgcctattgtgtggagaagataagaggcatacaacaaggacatgccaagtcacgatacagaagcaaaaagaaatagttgaagccgaagcacaacagaatcagccgaagtaggtcctgcatactgcttcatgctattccccatacatccccgagtatgtgggtaaccaacaacccacatcatcagttgcttcgacaagccactcagaagctgcatgggccccgttaccaccaccaccactcatggctccaacctcgtctcacaaccaagagccagaagggcaccgccaggtacaacaacaacgtgatgcacaggaagagtctaaagctcggacagtcaacaacactgtactagagtcgagacacatttactaaagca

SEQ ID NO: 93748 - DNA, 400 bp, Zea Mays
gtgctagcttggagatgcgccgcgggaggaagactgagtatcttgaaatccctctcaaagacagcatcaagggatggcgcttggagtggttcattgttgagaattatggaaactctctcccccctcggtcgggaagacagccggacgttcgcaccccgagttggaccgagtcccccactgatcaggaggtggctgaggcaggtgctttgctagctgaagttggattgctgaaggagaggggcctgactgctgaagctgtggttgctgattttgtcttcaagaatattcaaccgttgaaagacagggcatacccggcttatctgtatcgaggcctagccgactcaactcgggttaccaacagaagaatttcctccttagacttggtgaaccgacttgagat

SEQ ID NO: 93749 - DNA, 444 bp, Zea Mays
ggcttgcttgaactcagaacatcatcgtcttcttcatcatcgctaccaacttcagcaacaacattttcagcttcggtattaatactgtcctctggaaaggatccttctttctcttgaacaatcaatccaggtcacttcaaaacttctgaaattggagctgtcccagtaacctcaacttgccaaaaaggactcattgcttctgtatgtacctgttctcagaactaacaaatctagctgtccagcaatgaacccccacctccgcagtctgtcaggtaccagatctagcttccacaacggtgtcttgtgatgtggatctgctaatagctccagtcagataatggcagggggaattaatggagggaggagctgttcagatatggaagcttatggggataagccagcatctcagagtcactaacacgtttagtcacctcattcacgacg

SEQ ID NO: 93750 - DNA, 358 bp, Zea Mays
gttcttaaaaacaaaatcggcgactacagcttcagtagtcagacctttctccttcaacaaaccaacttcggcaagcagaaccctggccttggctatctccatgtttgtgggggattcagtccaacttggagcgcgaacatccggctgtctccctgaccgaggggggagagacttgccgtgattctctacaataaaccattccaggcgccatcctttgatgctgtccttgagtgggatgtcgaggtactctgtcttcctcccacagcgcatctccaaactcgcaccacccacaagctggtgctgcccccagccattccaggccaacagtgatacaagtacttccacaagccaaaatgtg

SEQ ID NO: 93751 - DNA, 738 bp, Zea Mays
ttttttttacctggttgagttgaagcggtcgaggcgattgtggcggtgcaaagaaagaggaagccatcatgataccacttggtgtgggcggctaacgggataggcgatgtcttgtttggtgtaggcatgcattgacgacttgatgggatggataacgtcccatttggtgtaggcatggcctctacgtggtgcgactcatggtgctctgcccgagccgggagccgtctgccgaacggacagtttctctgctcggggtcataggcgagcagaatttggagcggcgaatcctcccacgccgtggtcatggtgggcccattttttgagcaccactcgtcctccctatgtttgtgtatataaacagaggaaaggtcccttgggttggttacgcttaccgtctcttgtgcccttgcctccattgctccctaaagcattcttgctcttgcactctctacctgtttgagtgctccgcatgctccctcttcttcaccccgcatccatggcctccttgctggcttgcttgcttcgctgaagccgtgtcctcgtcttgtagaagaaggggttcctacctcttacgaaggttttaggatggcagctagaggataagggtgaagtgttgtggtcgcggtacgatgaggtggttgtgctcgtgtccttctctgagcacggattcagccttccgctatacccctttgtgcgggtgctgctcttctactacaagttagagatccaaaacatcca

SEQ ID NO: 93752 - DNA, 276 bp, Zea Mays
ctatagcttcatagtgtggctcatgagcttaatccctcgatagttggtacaactttgaatatctcccttgttcttgaagattggtactaatgtactcctcctccactcatcgagcatcttgtttgatcgaaaaatatggttaaacaacttggttagccaaactatagcaatgtccccaaggcgataccatccgggcacatcgctttgcccctttcatcatctttaaagtttctttgacctctgactcttggatcctgcgtacaaagcattgactct

SEQ ID NO: 93753 - DNA, 564 bp, Zea Mays
tcgccgccggtccttgtcaccccgtcgttgtgcccattggcaggcctcggcgacctccgtccaccgcacgtggtaaggccctcagtgatcatgatatgcaaggtacacatcttgctaaccccattggtcactgtcatcgaactcttttgtgtttaaatatcatcaattttgttagttaaaggtcctatttgggcacatttggagtattcagtcacattggagggattgacctgatagaaaggttttcctgctgtctttgataaaaatgaaatgttggcaagtcttttctggacaagagaagtaattagatccttacaatgtagtgtcctgaaatagccgcataattcggtgatctcttgctgtggcttggaggaaatagttttttagggtcaggtgaactcaagtgttatacaatatagtggcaagattacacaaaattagagttttagtttttgtttctcagcttcagtgatgggggagtggactacatgttccaccttttgatatcattgtagtgcttttgtcatttttggttaaacttgtaggctgaacttgcatagtgaa

SEQ ID NO: 93754 - DNA, 336 bp, Zea Mays
gtgaaatatatgtcatgatgcacaaataatcccctacttggcatgccaactgttggtgttctaaagccactagttagtaaactacgtgctttgtgcatctggtgcgaatggactgcgaggaagtcacattgattttatactagttcaggccaaaggccaaaagtaccaacttctagtcgagtgagttgcgtaaccatgcactatgtttgtaatagggatggattacatactaattgagagagggctcaatgcccaagtctctagtgaatgaaaggcagagcagggtggattgctttgtgtgttacaagtatggaaagtacttgtgctagctttttg

SEQ ID NO: 93755 - DNA, 416 bp, Zea Mays
agaatggtaagcgtttcacagtttatacggatgcttctcgaattggtcttggctgtgtgttgatgcaggaaggcagagtgatcgcttatggctcaaggcagttgaggaagcatgaggggaattacccaactcatgatcttgaattggccgcggtggtctttgctctaaaatcgtggaggcattatctttatggcgagtcttgtgacatttacaccgatcataaaagtctcaagtatattttcattcagaaggagatgaatttgaggcagcatcggtggctcaaattggttaaagattatgatttgtccattcattatcacccgaggaaggcaaatgtggtggctgatgcccttagcaggtccggggttccaaaagtggccatgcctttgatcgctgatctggaccatttggggatc

SEQ ID NO: 93756 - DNA, 351 bp, Zea Mays
gataaaaatgacaatatacacccggaccttcgacaattatccctaggagcagtaactggcagacgttatggtcggtatgatgtcgatggttttagattccgttccacaaggtttgaagatgatcatcctctagcagccacgacaaattccggagttgtaactagagctgtcaatgatgaagggaaggtgactaattattatggagtcattaatgatataatcgagtacaagttttttggagataaacaactcaaagtggtgttcttcgattgtgattggttttctccaaactcaacgcgagaaaatcaatatggcatggtggaagtcaaacacaacgatagattaaaaggc

SEQ ID NO: 93757 - DNA, 747 bp, Zea Mays
ggagaaggcgccccttcaagaaagtctcaaaatagcagaaggtgaagaggccaacactcgtgaagcctaccgaaccctgaagatggactacgataagaagttaaagaagctcgcccccactaagaagatccggaagcggaccaagagccaaggatgccagattgaacgaaaagaggaagccccaccaacattgcctccctccaggatagaaaacttgtcagacgttgaggatatgttcctagctagccttgatgaccttctcagggaatttggggacaccttagaaagggagtttggaagcaccttagaaagcgctcgcgcgtagtgtggtttgtggtaactgaatgcttgtaataaacttgtgtgatgaataaaataacgtgtttgaaaaaaattggcatgtgcatagtagtaatcctctccccctagtagatggcttcagataaaaccatgcctaccgccttagggattggagcaaggtctcctctaattgctgaaggagaaggcagtggagaagggagtgaaacccacctccccgcaccttcggagctgcccttagatttagcccaagttctggccaaccaaacccgactcattgaggtcctcacccgaagccttgagaaccaacacccgaatggtggaaggcctcaggacagaatgggagattttctaagactcaagcctcccacattcgctagatccagcaatccgcttgacgctgatgactggttacgcataataaaaagg

SEQ ID NO: 93758 - DNA, 608 bp, Zea Mays
ctgtatttgaggcctgtaggtgatgtaataattgttgcagatgcttagggatttctgaataggtcacctagacctcggtcagtggtgacccttactctgtgcacctcaaagtagtgccttagtttgcgtgaagccatgatgaccgtgttggctatcttctctagctctgtcatattgcactttgaactagtgagtacctcggagacaaaatatagtgggcattgctgggttttgtcatgtttgcacctttcttgcaccagagctgcgctgaccacgctgggtgacgctaacgcggggtctgggctagtaagtgtccctagatcagataaatactattttaaggactcaaaggatgtagcctgattggggccccaggcgaaatccttggctccacgtagcattttcaggaacggaagactccgctcggcggaccgtgaaataaatttgttcaatgctgctagtcttcctgtcaactgttggatgtctcgggtcgactgtggtggagccatgtccattatgccatgtatcttgcttgggtttgcttgtgcctctgtgtgaaacgagatagccgagtatcttgccttatcggactctggatatgcattttt

SEQ ID NO: 93759 - DNA, 323 bp, Zea Mays
agcacatccaagagccaacgggcaggttgagcgagccaaacggaatgatattggaggcactcaggaaaaaagtctttgataagaatgaaaaattcgcaggaaagtggataagggaattgccttatgttgtttggagcttaagaacccaacccagccgagccctgcatgggaacacccctttcttcatggtctatgggtcggaggcagtgctacctgctgatctcaagttcggggcgccaaggttgatcttcgacagtatagcagaagctgaagccaccagattagaggatattgatgtactcgaggaagaacggctaaatgca

SEQ ID NO: 93760 - DNA, 320 bp, Zea Mays
gatgtggtcgtgctacttttcggtggggatggaatcaatggtggctctggtgggtttgttattgccgcgatgaagtcgaaaaactgagtattgtcggccgagctgttccctgtcctcagagcaggagaagctcttaaggtttcatgattatcactatcaactggttgaaaatctggttgattatcattatcgactggttgaaaaactaggccgggcaagtcatggataattgaggcacccattaggccgacccgatcagcagcaggcatgttgtgatctatagcttgattatcattcacaagttgagagcctaaaaactc

SEQ ID NO: 93761 - DNA, 585 bp, Zea Mays
acaagacagtgaggcttacgtgggcgtgtagttatgaccatgcgaaaattgacctgtttcacctctaggtgcttacaaggctacattcctacataacttcatagaaaactagttaggtgcccgtgtgttgcaacggcacataaatattcaacaaaatgtgagcgcacaccgattacataaaaaagaacacatatattatcaatgaagttttctttagaatctagttagttgtctgtgcgttgctacagtttacatattgatggtctgatggacccattctagttgttgacaaatgtttacaatacttgatccttgaatcctaccatgtattcaaagttctacatggcccacttaacaattctctagaccatattgcaccctgatttaaccttgtcgcacattctgtcacagtaaggtctatctaattacggatgcaatgccaaatcaatatagctaagaaccattttgtggctaaatgttgcaaaacgcccataacagttttataaattggttgtaccttgcttgctggatgaatccgatgatacactttctacaagaaaaagttaattgagcacttacaaactc

SEQ ID NO: 93762 - DNA, 1024 bp, Zea Mays
cgaacgggtatcggccaaggtgggccagtggattacgcacgaacggcgcggattagactgagtcaccagcgaagtggtatgcggcacagaccgtccaatccgcgatctatggcgcagatttaattattctggagtcactctgctccacctgatccaaaatcaagcgccaggatctaatctagcgcgaagggtatgtggatcctaatctggacggttgcccaaggatctgacggtgcccacctgtcttctaccctcggccaatccgcggcggcgcgaacagtctcccccacggccgcgccattaccagagaggctccactatggctccggtgcctaaaacttcaaccgagtggatcctacacaatgcggtgatgaacacgagttcgggcaagcaactattaccgataatcgggcgcgcagtcgcactatccacgacgaggggcggctccaccgcgagtcaatggctccagtgacaaatccaggggtccctggtcgcaaatcccgcccaatgaggtcaccaacgtcttccccgcggcccggtgcaacacttaagcccacgggtttgagcttcgagccacggcgaggatgaaatccccggtggcggaaactccctacactgctccctcacgcaacagcggtggcaagggtaatggcgtttgggtatggcttgaatcaagttaccaaggacacaaaaggggagatttatatcccaagcccgcacaggcgatcccatcccaacggactccggagctgacgcgtggatcacgcaacggcatgcgagggcgacgggtttagttgcgcgaagctaggaaaggactgacaaaccgagccaccgtccagtgacccgcaacccggtgaggcgatccgcgcacgtgatatgagactgggcagcgggccccacgtgtcagtgagatggctggagcgcgggaaaggtgggttgtgtggaagagttggccaaatgggccgaaatgaaggcctgcagcccaggtgagtttttctttttcttttgtttttattttctgttt

SEQ ID NO: 93763 - DNA, 508 bp, Zea Mays
aagtttgctcagctttacatacatgatcctgatgctgagctacaaagtaggctccacgtttttgagagcgatgatgccggtgctgcttgcccagactccgctattacacagtccttgatggagatgcttgatgcgcataacgagcttgtaaaggcctttcgttgtgctcgtgaacgcatagaacaaacacacaatagcgagataacgttacgtttattgggttgcaatactagacacgatgtccaatataatttgccttcgagcggtgagatagctgccataattgttggtgattactcatctgctcagtacacgtacgatgtccttgttcatgctaagaaccatggtctcaaacgtgtttcgcatttgcatccgtgctatatggctctgcagtacccactcctttttccctatggtgaacatggattccatcttggcattaggtatgcggatgatgacgttaacaaacgaacaaaacgtagatacacaacgatgcttgagtttgtta

SEQ ID NO: 93764 - DNA, 395 bp, Zea Mays
agtcccccctccctcgcatcgacaaagttgtcgattctacaacaggctatgaggtcatgtccctgcttgattgtttctctagttaccaccaaatatatctcagcaaagaggacaaggtgaatgccagtttcatcacacccttcaacacctactgtttcatgaggatgcccgatgggcacaagaatgttaggtccacattctcctgcctcacttaatccatacttaaagactaggttggtcgaaatatattcacctacgtcgacgacatcctcgttgtgagcaaaaacaatgtagaccacctagcagatctggcggagacttttgctaacatgagagagaccagacttgggctaaatccaaactagtgtgtcttcagcatccacatgggcaaggtc

SEQ ID NO: 93765 - DNA, 596 bp, Zea Mays
catatgtatctaactcagatggtcaataccaggaggggtggtggaattgatttgcctcctaatcgacacactcggtggatatatagacaacctcggccacagccagcaaagatgaatcctcctaatcctccaccaagcggagttgacccactgattgcagctcggatgaggatgatgcagcaaatggcggacactatggtggatatgcgggctcaaatgcagcaggaacgccaggagatgtgttaggaaagagaagagatacgccaggaattgcgccaggagcgagaggagatacgtcaggagagaagggcgcaacagcagctgcagcagcaatttcaacaacaacagcaacagcagcaacagcaacaagtaccattgcctccaccaccagttccacctcgtgataagcaccgggagtttatgagtcataagccaccgaccttcgccagttcgccaaatccacttgatgcagatgattggttgaagtcaattgagaagatgctcaacatcgcacaatgctcagaccgggagaaagttctttacgcctcaggtcgtttgacaggtcctgctgctgactggtgggattcttatactgc

SEQ ID NO: 93766 - DNA, 684 bp, Zea Mays
ggcctgcagttcccttggcgagagagaatgacaaggagggttttagaggagcttagctagcgctccatgtttttttggccgtgtttggcgttgccaccttcttgtttgttctcttgtagtggtgttcttccttgccgaaagctttgttgttgttcagagaagctaaattatatgtgggtggagcaaaagccggccggccggggtgtctgttgttgccggcgtttaaaaatgagatgaaacgaaggagctactaggagagaatttgaagcaggcaagtgatgtacagtgtggtattttttgagccgccgtgtatagcagatgtttagtgtgctgcagcgagctgatatatgtggatccagctagcctgctcagcttctgtcgtatgctaaaatcctcctgtgagaaatcctgggccgaagatcagtgagtgcgcgaacactatgatgtatatacagcagatcttcatagagaacagcttccacttgcagaccagaaagttaatgacgggggacggaatcagcaacgctacacgtacgtacgtacgtgcagcaaggaattcacaaggtcaatgatgctccgtcatctggaatcgacatgcaaagttgactagctagagtcccttgtctctagcacatcaagctggtaataatactatacaagtagctagcaaccacgctgtcgccc

SEQ ID NO: 93767 - DNA, 420 bp, Zea Mays
ctcttccgggttttcgggttctccaggttcagcttctgcttccacatggttgacttgtccccgattgacggataaggcctagcttttacctccagagacctgaccttgcttcatcggagctggagtggtataagcagccctattgggacagtagttggcataatgtccattctgtccacacttaaagcacgacctgtttgtggatgcgttaggagcaacaggtcccactggggtgcttgcttggggaggagcatattgggtctgttaagtctgttgcctgggactgccacgagctggtgtgccttcgggtgtagaataaaggggacgagtactacttccagcctgtccctagttattagcctttcttttctctcctagctcaactcgcttgtgctctggagctatagccttgtccagcag

SEQ ID NO: 93768 - DNA, 422 bp, Zea Mays
gctctatttcatatttaggtattttattgtaattgatgacatatggagtacccaagcatggaagacaattaaatttgctttggttgagaatacttgcggcagtagagtaatagtgacaacaagaattggtactattgccaaatcttgttcatccccattccatcatctcgtatatgaattgaggatgctaggtgaagatgactccaaaaggctattctttagaagaatttttggctctgaggacaagtgccctcaccatttaaaagaggtttcagttgaaataattaagaagtgtggtggtttaccattggcaatcattactatggctagtttgttgactactaaatcatataccagagctgactggttgaaggtttctaattcaattggatctgggctagagaaaaattgtgatgtggagg

SEQ ID NO: 93769 - DNA, 1177 bp, Zea Mays
tgacgtgcgtggagaaggaggagactgagaaaacaacggcggatgaattttctagagaaacatacgtgcacaagataaggattagttggagatggacacgtagaggtaagaaaaattcagatttttccttctccaattataaccaatagaatacccaaataagtgaaaaaatctgtgatttgaatccaagtaagatgcaaacagacccatcaaaacaatatcaattttaatatttttggactacgctaacaatggtaggtattttcggggtcagacaaatttccatagttatagacagtagaactgattaattacgagtactcagttcgtttctagtcatctcggtctgatttaattttgcagtacttctatcgtcgagttctaataatatttacagtggtcgaggctccaaattcatgttctcttaatctataaattttaaagggaacccagacttgacatttcgcgaaataaatacgcgagatcgatacaacatcgaaatttgcgatcccttcggaagcgaagtcacgcatcgttcacgtgggcgagacgctgtgcgcagtccagacaccggttagcacctaccacgcgccacagagagacacgtgcaacgcaagcactaaagaatttcaaacgaagtttaagaaaccggattcaatttcaaggataagagtttgggcaagacatctatggcttaaccccaaacgatactggattcgatgtttcggaatattactcaagtctgaatttagaaaaaatggatttggaaaaatttagacagacacgatatcaaaatcgtgataaacgaggatgattaaaatttagtgacctttacattcacagctatcacgttttaaagtccgcactcgtggtcgagtagacgataaacacctggggtgttacacagtttgaagtcaccgagtttttaaagtttgacaatataaatgtaaaagtaccgatatattcaacataggataggtatagcttactaaagctcttgatgcgtgaatggtaggaattaaagaaaaatatatgttgtgtgacattaatgatcgaatcacatgtgggtctattttaccatctgtatcaagttacaaagataagttttacattttatatatatcatgaaactaagctggatttactatttagtacattttttcacaatacgtctttt

SEQ ID NO: 93770 - DNA, 448 bp, Zea Mays
caactatttaactttgttagtgtcgtgaaccaaacaaaatacgttttcggttacgctgaatcaaatcacagtgtcatctgattccattaatgatcccaatacacagatctcctgttagcaaagactacgccgagctccttctccagctgcgcggtctgctcctccagatcggccagttcgtcgcccccctcctgcttctgcagaagaatctgaacttttgctctgtaatctcgatcctgaagagatgtgaactacattctacgcgtccgccaggtctgccaggtaagaaatcttggttatcgatctctatctaccttctcttctacatcgtttctgtccatcctttctctctcgccactaccttctttccatcgttctgatgcgagattttgaatataaaagggaggctcaggattcgccgtctcacgatggcgaaacagtctctttc

SEQ ID NO: 93771 - DNA, 473 bp, Zea Mays
acagggcccattgaaattgttggaaaggatactgaacaaggacctttggatatcgctctgatcttagaacaagaaggcgcacccaagaaggttaaatctcctactcctgaagcgtctactgaagagctagactttatcatacgacacgcttcgggtaaacagttgtcggaagagcagattaccgaagctaaacactatgccagggaattaaagtacccaaaaggatccttggtgtataatggcactgatgaagatgactttttgtactgccttccggacaacaaagagatatctgtttgccaagagatggcaaggaacatagggtttctgaagctcgaggttggtctctccgcaatgtcaaaggacgaccttgcagacagcctcgcttataatagtctgaaggtaaagatgctttgacttacaaacagattatttttgtatcttttaccattgtgctggtccccctccccctt

SEQ ID NO: 93772 - DNA, 683 bp, Zea Mays
gagctcgatcgggaggctctctagagagctcaccatagactccggcagctcctggcccagtgagggagtgttccggtgaacaccgtatggtagagctagaattgagcgctcgggaggcatcaggaactcacggggaaacgattttgtgcgctggttcagctggagaagctcgaagataacgggtcgacgtagaaccgagatgcggcggtgatctccggtggcgcgacgacgttccaacgtaaccactgtggtagagttcaatcaacaatgtgtataagcaataggaggtgttaaggagctaagaacaatgaacaggatgtagagaaaagaatcacggtcgcctgtccacgggagacctgcccacggcggtgctctgcccgaccgtgaagacgacgacgacgtcgggagctctggtggatgaaacaagacgaggattggtttgtctgatgcgcaaagaatagacagaacgagtgcacactccaatttatagagagaaacaaggaggttggctaattttggccagaaagagagacgacgccgtcggccctagaagatccccgaagccgagcatggcatctctgttaacccaaacgtaagcactcatgtaattcgacaccttcactgcggcgtattccagtaaagcagctacgtgccaatgtagagacgcgagaagaacggcccat

SEQ ID NO: 93773 - DNA, 290 bp, Zea Mays
catgatttgaagagttcaaatggtaaaagtaaacatatgccttctgaagcagtatgttcctgtgcagagattcctggaggtcataagtccaacatcacagttgaaatttctcaaaacgttcagtctgttgacagtagtaagatgggatcaagtatcaaacatgcaaaatttgttgaagatggttcttccaccgaggacttaaatgaggcattgccatgtaactctcattcttcttcaccaaacattaatggtcatagcagttttgtaaacaaagaattctacaatcattc

SEQ ID NO: 93774 - DNA, 515 bp, Zea Mays
acatctcattcgggtagtatctgtatccgtcccaaatttaaaaatacctgtatttgtatccgaaaaagtgtcctgaattaatatccgtatccggtacccgaaccgggtacccgtcccattttcacccctactcacggatggttgtggaagcgcgggatgcgaatatttttgggaggcgccggcggggaagggacgctgtccgttggatggatatcgatggtgcggatggcgctgctagtggtggtgatccacgtcatggatgatagtggctaggtttatgagctaaagtcctagtgtcggactccaacatatatcatttaaaatcatcctctcatctgacatagttggactctcatctgacatagttggatagagctcgacgagatggatcaagctcgcagcggctcggctcgaccctcagaacaagctcgagttaagcctgtttttgtggctcgtaaaaagagcgggtcagctcagctctgctcgctgcagctcgcgagctatcttgtggctcg

SEQ ID NO: 93775 - DNA, 824 bp, Zea Mays
aaatcctcctctagaattgatgcagcagttggcgagtgtgatgtctgttcaacagatgaccactccatagctgcaaataattctagcagctcaaccgcgggcttccactgattgtataaccatcccaagctctatcgcgtcaatgggaaataaggttcattatccagttgatgacatcacaaggcctatgacgtgcacactagttataagatatggtattaacaataatcacacgaagaaagtaggaacaggcattgtgatcctaggacgcaagtttcatgatagcgacattccagatgattattgcagggtagaagtgacgacggtcgtccaagggtccgaggacgacatgctagacatccctgggcccgaaggaatcgagacacttggacaagccatcaaaaatttcatcttttggccatgaagggatgtcgaattggttgatccaccaacgtcgtcgtcgtctcatccccaaccatctccgcctcctcaaactttagtacctattgtacatccatcatcacctcctcaatcttcacatgctgctcctcatcctctttctaacccaccgtctctgccacaagcatcaacatttaggacaccaccaccatctccacagccatcaagggattcacgacaatcaaagaaatctaaattccctataccaaaattggtgtccatgttcgagaaaaagaagagtaaagctactactgctggcacagctcgatttttgaaagggattgcacgggacctcacgtcacatactgttgatttggctgagcacgaggagtctgtagaaaaaggctgaggcaatggccgcaaag

SEQ ID NO: 93776 - DNA, 784 bp, Zea Mays
atcttctacaggttagtagtatcttccagttgcttttctgactgacatgcaatggtaattgactccctctttcaccgttagggatggcgtaagtgagagccaattcaaacaagtgctggagcaagaaatccatgagatagagaaggtagaaacaatttgagacatcaagtgttgttccctcagttagtataacatttatactttcttcaggcatggacagctctttacaatgagaagccaaagatcaccttcgtagtggtgcagaagaggcaccacacaaggctcttccccagcaatagccaatacgaggacaagagtgggaatattcgagctggttagggatgcaggcgcatttgctgttttttctattgcgttttttctacaatgcttttgctgaaacgtttatggaatttgcaggcaccgtagttgataataatatctgccacccaacagaatttgatttcttcctgtgcagccatgctggggccaaggtatgtgtgtagcatgtgttacaactaattcagaatctgaagattatagctgctcgtggaattgcagggaacaagccgtcctgcgcattaccatgtgctacgagatgacaacaagttcaccgcagatgctctgcagtctctaacatataacttgtgctacatgtaagcatgctcttcccttccctgccatcttgttttttcttgctcaactcacttgtccgatgttctttttcaggtattcatgctgcactcgctctgtgtcaatcggtatgtactttccagtgcaaaactgc

SEQ ID NO: 93777 - DNA, 374 bp, Zea Mays
tgaccatttttttctcgaacaacaacggaactgtgtgtcatttcatttacaaaagaagaaacaataaaaagaagaggctaaagaacactcaacatacaccggtcgaaacagttacaagcatgcctgccactgtgaacctgtagagcgatgccatgacaaggcatgggtttgtgggctgtgggggattttccagcccaaggttttgcttggctccttgacaaggcaggcaatggcgatgcttttgcaccatgtccctaaatggaagaattatcatgcagggccccaccccctagagtttcaattggaaaactttgtgacaattttcaatatcggttggggaaaggtgggcaactcatttatactccaacagagag

SEQ ID NO: 93778 - DNA, 305 bp, Zea Mays
gaagcatcacaggttggagggaacatacaaggagcaccataaggaggagtatatagaggaggagcaccatacgagccatatggaggaagagcgtatcgatactcgtatggatatggaggaggattcaaataagtgaaaggttatggatgacaagcatcagtggaaggtgcttcttcagttctaagaggaggagagtcagtggttggaggctcagtaggaggaggggctttgatatttggttagtaaggatataaaggaggagcatacatataaggaaagagaggttgagaaattaggccattggg

SEQ ID NO: 93779 - DNA, 1592 bp, Zea Mays
aaaattgtatttatgaggttgcatgaaaataattaataagcatatcacctaactaaggtcgaggtgaagggcccaaggccaagaacaaggaactgaaattgcaatgtagtaacggtttggcttaacaggtcagcaataggtagctggatacgagttcaactcttatctgtaatgtgaattatgcaatcgacaacactatggttaaaattatgacaaattcatccaaaaatcgatgcaacttcatatgcaagtaaaggaaatggggatctttgcatattggcaatttatggtacaattacatgcctggaattaataaaaatcgtaatttgaaactcatctgaattggagtgccaaaaccaatacaaaactcacctcatgtagaggctacgacaagaaggggtgcaataatgcagttaactatttacctcttcatagcaattttcgatcataaacccatgtgctcgcagatgcttacaatttaataatttataaaccaaccagaataccagcataacgatttaaaacacttgtacgaggggaaataaacttttgcatttaccaacaagacaagctatacatcattgacaccatgaatcacttgggacagacaagaggtctcggatgtgagttccgctggtggtctcctactgtcaccattgttgcatcggagtacctcctttttagatgttaatacatgttgtctaattctctctggttcttggtatttttctaattataccccatttgaactttttggtaaacacttaataagatgcttcaatgttagtcagaatatttcagattcggggagctgggctttcactcatcttgatgttgtgccccgtcaacaagaggtaaataagttttttatttaagagcattgttctctctggaaaatatgcggtctcaaagagttggttgcatttggatctacataatgatagaacaagcacttacctgagggataaggccaggttccaatttaaaagaccacaaggcaagatgagatgacaacttcttagctattaccaataaatcccaaaatctatcaacgtcctaatttaacatctaatctcacatggaatttaattagcttgacccttatccccaatgtacacattgatcctcttttggcaagtttaataaatttaaaataaaaacgtcaagtcaacatagtcaccatactatgcattagtatattaaaaacaactattttaattctgaactgctgaacaatagcaaccagcttcacaggttctttttgaggctccagcaccagcagcaacatcaaatttgaagaataatcctagtgttcaattgcagaaaacatttacatagtaaatgttcacaaaagacaacatctccatacttatccaatgtgaacaattgtggtgggccacgacatttttcatacggcttatctccttgtgtgatcacttatgtttaagcagaagactatcatgccactcaactcctataagaaatcgtggagacatttttaaaaacaaaataaaatcacaactaaagaaattatgttatgttgttcagagccgtgtttagcacagcttttattgaagacaacttgttggtac

SEQ ID NO: 93780 - DNA, 346 bp, Zea Mays
gtacatgtttttatcagtttaataaatatttattattatgtgctatcagtttaataaatatttattatatgactgtgcccgcgggtgtacccgtgggtgccataaacccgtgggtagcgggtttgggtaacatacgctacccgtcgcgggtagcgggtgcgggtacgggtttaacattaatctcgcgggtacgggtttgtaatctctgtacccgcgggttttaaacccgttgccatccctaaccccatgttggttggtggagattttaatattttaaggaaagagacggacaaaaataagcctaggggtacaaataaatggagttctttgtttaactctatcattg

SEQ ID NO: 93781 - DNA, 998 bp, Zea Mays
ggttacaaaatccatgcctatttactcccacttccattcgggcacgggatggggttgcaataggcctacaggcttctggtgctcgactttcgttcgttggcaagtgtcacacagggccacatactgtgctatttctttcttcatccctctccaccagtatctggttttgaggtataggtacatcttggtggttcctgggtggatggagtaggctgagttgtgagcctcattgagcaggacttcttgtgcctccccttttggtacacacagacggttcttgaaccaaaggactccttgttcatctgtcctgaggttcggaagttgttctttgcgagcttttttcataagtcttgttgtctccgagtccaggcgttgagctttgcatatgaggtcttctagcactggtttgaattctaggctgccgttgtttcccaaaccagcattcagctgagctgattctttcttccaatcttctaaaaagttgtttccctttatcccgaaaggctttcggctgagggcgtctgctaccacgttggcctttccggggtgataatgaatctcaaggtcataattttgatcagttctagccatcttctttgacggagtttgagatttggctgagtgaagatatacttcagactcttgtgatcggtgaagatgtgacatttgttcccaattaggtagtgcctccatatttttagggcatgcactatagctaccaattccaaatcatgggtgggataattctgctcatgcggcttgagtaggcgcgatgcataagcaatgactttcttgttttgcatcagaacacaccctaagccttgccttgaggcatcacagaagacgacgaagtcctggtgtatatccggtagtgtcaaaatgggtgcggtcatgagcttctcctttatgatctggaaactttcttcacacttcggggtccacacaaacctattgtctttcttgaggagctcgatcataggtcttgctatgctggagaa

SEQ ID NO: 93782 - DNA, 599 bp, Zea Mays
ggacgccttcgtcttgacgatgaaaggaccctcccactttggctcgagcttgccccgtgactctgtccgagttgttcggacgagtacgaggtccccttcgtcgaattctcttgggacgactgcgtggtcgcgccaggccttcgtttgagcttggtatttgttgagagcctgcagggagaagacacggtctccatcgatgaggtctttggaggttggttcgtctacgtcggggacgactgaagcgcttgtccgtggtgacccatgtttgatttcctgtggggtcatggcctccgatccgtatagcaggtgaaagggagtgaacccagacgcccggtattcggtcgtgttcagcacccaaactgcttcaggtagtaggtcggcccatttgcccttcttgtcgtcgagaatcattttcttaatggcagtgaaaatcttgccgttggcgcgctccatgacgccgttagattgtgggtgatatactgaggcgaaggctagcttggtgccaatggagaagcaaaagtccctgaagtcctggctgtcaaactgtttgccattgtcaactatgagctcagacgggacttcgaatcgacagataatgt

SEQ ID NO: 93783 - DNA, 332 bp, Zea Mays
aaagccaaaccactaactcccttgccaaagcactcaagaatgggagttggcggtggaggatgtgtgttgattacacggggttgaacaaggcatgctcgaaggatccttttcctctcgcacgtatcgatcaggttgtagattccaccgctgggtgtgaactcctctccttcctggatgcctatttacgctaccaccagatcgctatgaaggaggccgactagcatactaccacgttcatcaccccatttggtatgatctgctatgtcttcatgtcattcggcctgaagaacgtttgggccacgtatcagcgatgcatgctccgatgcttcact

SEQ ID NO: 93784 - DNA, 277 bp, Zea Mays
gattctgggtcagattagctcaattagtgcatggactaggatcgtcttggatcaagaatcatgatccggtactcggttctgcggttgtcgccgtttgaagctagttccagcaagcggtggtcggcggacgaacgtgccgtcgatgaggacctatgtcatgaagaaacataaattgaggtgcttaagtgcaatggtcagaaagacatatgaatattgcttagggattctttaccagttatttaaaaggccaggagcctctacgcaagttcgccaacgc

SEQ ID NO: 93785 - DNA, 494 bp, Zea Mays
ccgatcatggccttcatcttcggcgacgtcattgacgccttcggctccggagccaccgacggcgtcgtacgcagggtcgtccaggtagctgtgtgccctcttgcactttgcttttggcccataagacacgcttcggcccaaagctactgccaggggtgaaacgattggtgattgctacgtcagggtgatggttctgaccaaagccccattctcgtctcaggtgatcatgaacttcgtttatcttgccgttggatcaggagtagcttcaaccctccgtaagtggatttgctcttccaacctagaggtatcatgttgatgacttttatgttccctagaggtatcatgttggacaatcgccggagaaagacaggcggcacgaatcagagccatgtatctcaaggcaattctgaggcaggacattgcgttctttgacatggaaatgagtgctgggcaggcagttgagaggatggcaggggacacattcctcatccaag

SEQ ID NO: 93786 - DNA, 524 bp, Zea Mays
ttgcttctctgacttcagccaaggcagtggagttcatacaagatataatattcaggtttgggataccgaataacatcataaccaacctgggatccaatttcactagctctgaattctttgatttctgtgaacaacgaagcatccagatcaaatatgcatcagtagcacatccaatggccaacggtcaggtagaaatggctaatggaatgatactggaagcactcagaaagaaagtcttcgacaagaatgaaaagttcgcaggaaaatggatcaaagagttgccatatgtagtttggagcttatgaactcaacctagtcgagctctacatggaaatactcctttcttcatggtctatggtttggaggcaatgctatctgccgacctcaggtttgaggcaccaaggctggtcttcgaaaatatagctgaggcagaggctaccagattagaggacattgacgtattggaggaagagcgattgaatacagtaattcagtcagctagataccagcaaaccctgaggcgc

SEQ ID NO: 93787 - DNA, 378 bp, Zea Mays
gttttcttatacactcttctccttgcattgatgcacagctctctggatattcgagaaaaaataccattacaatttctggacaatcccattatttagttaaaaatgccattacaatcatctgaatgtaatatgtggagttagaattaccgttatatgtttccctttcccatacgccaatgtctatttttttgttatgttcatgctagctattatcatctttggttattttcttttaaattattctactcaatagatggatgtaatcaacctattgctattttgactaattatatgcttgtatggtttcagtaggaagggagaagaacctcaagttcattgtgcaggtatggttcttcataatttacaccatgtctggta

SEQ ID NO: 93788 - DNA, 435 bp, Zea Mays
tcaagatgacgtatgagaagatacatgcttgctgaagggttgcatcctatttaggaaagaatatgtggaggcaaagtactgtttgaagtgtaaatcgtcttggttcatggaggtagactctgatgatggacaaaagaggcagctcgacagccccatgataatcatacgatacctttccattcataccgaggatccattgtctatacatgaccgaggaatccgcaaaacaaatgacatggcagaaaatggcaaacgatacaatcttgacaaaatggtacacacatctaatggtgaagcatgggctcactttgatgccattcaccatgagaaagctaaagatgctcgtaatgtatgtgttgcgctggccatagatgggttcaatccctatagaatgaccactgcccccatacacatgttggcccgtgttcgttatcc

SEQ ID NO: 93789 - DNA, 563 bp, Zea Mays
ctgttgcaaaactcacaatgtttctcacacaagtaattttttgagaagcaaatgttttcttgcccttgtttggtgcatagccttgaacttccttatccaaataaaatatttcactacttagacgttatcccaacttagcctcaccaatacatcacttgcctagtgtatgtgtgagcttatccacccctcgatcctcaaactccatccatccattcctccttcattgttacgggttgacagtgtcatataatgctgctgatggcatggcctcacttatgaacatcgcaaaaatacatgagggcatcactcctaatgacgatgcaaagtgtgtggcgaagaacataccgcgtgtttggttactcgtatcaggagaatcaggctccccatatgcattgatcatagctcggctcgtgttcagtgcgctgcatctcgaaaaatgagcatgtatgaactggcgtaacctagtgttatttacctgcacctgtatagaaaacctacgtatccagacgaccaagctcacaactgtgtgcgagcagggatccaatcacacggatagtcaacga

SEQ ID NO: 93790 - DNA, 678 bp, Zea Mays
gagatattttttatgtgttgaaccttatatttcaagatagaccactattggatatgctcttaagtatagaaaaataaaagttttggatggactaaaccgattccatcctgagcctacttgtcggattggccccgtcctcctaactcgtctcctcttccttgatctagttcgtgcatttgtccgttcgatcccattctttcttatgccacacgaatcggtccgccccaatgtcgctcgatcccgccccttctcgatgccctcaccctgctcgtcatcgtggcgacgccggcctgcccaacaagtccgatctcgctcgttgcaatgatgtgacccatctccaacgaccgacgagcttaaagaaccagcgaacattggctctttgtcggcgatatgacctaaccccactcccttcatggtgcccccgccattcgagaagatcgacattggacaaggtatgcatggtttcaattcggcaagaaaaaaattagcagtatgtttgcttctttagtttatatagttttttcttctttgaaattgatataaaacttgaattttatataacactagtttttcataggtttgcttgattttatcatgcggtcgttctgcgtccgtcacctaacttccatttgaaacaaatactgttactagcccatataaattctaacaaatactact

SEQ ID NO: 93791 - DNA, 521 bp, Zea Mays
ggccttcgcatcgtgtcaggctgtcagcgttccagcctgtgtttccgttgcagttatgggtcaactctgaactctgcatcggtttgtttttgctgataaaatggctggagatttcgtttcctggtccggtttctggtctcagataatcagatccaacctctcctgacgcccgtatccccttctcttttcttgcgaacgcattcccccccccccccccctggtgccattcgcaatcatctttcttaggatatgtacatgcaagtgtctaaactctaatcatgaacagaacacagccatgaattgagcacaaattgtaggtgtaacaaatggtacttgtcccatttgtttgtatggtggtgacaagtgacaagtggccaatcaaacttgttctgtttcgctgctaggcatgttatgtttttggtttgtttttattattaaaaaaactcggaatacggttgctgtttttcttgattttcacaagaaacgagacaaggcccgtcgtgataaagaatgtaaagatg

SEQ ID NO: 93792 - DNA, 535 bp, Zea Mays
tttttgtcacgaagcttttgtaggactagtattatatgatcttcatgtgtttcttcattcgaagagtataccagtatgtcgtcaatgaatacgaacacaaactgatccagatattccatgaatactttattcatcaagttcataaagtatgctggtgcattagtcagtccaaacgacatgaccaaaaactcatataatccatatctcgtagtgaaggctgtcttgggtacatcttctgcttgaatctttagctgatgatatcctgaccttagatctatcttcgagaatatcttagctcctttcatctgatggaataaatcttcaatccgaagtaaagggtatttattcttaatttttacttcgttcaaacttctataattaacacacattcttcttgaaccatctttcttgctcacaaatagaattggagctccccaaggggatgaacttgggcgaatgaacctttttctagtaattcctctatttgtttcttcagttcaactaaatctttgacatccattctataaggtctttt

SEQ ID NO: 93793 - DNA, 499 bp, Zea Mays
caaattgagtaccggagagtggctacgcagcaggtgcttatggctcttgcgagcaacatggagtgaaggagagcacgggcgcacataaataggccgagatagggagtcagggcgccggagaagggaagaggaagagttgctggaagggagagtaaattacagctaaagatttgatggtcattgaagttgagaaactgaagaatttagaacgccattaatggtcgccttaacttcaacgagaaacggctgggagataatgctgggcagcgcgggcgtgggtggaagaagaaccagcgtggggagaggaagggaggattcatggcagttgagtgccgttcactccgacggggaggcgagcagacgaagagcgctgtgcaggtagcgcgcgcacaaacaacaaagcagagaagaaatgaatcggctggaggaagctgaagggcccgacgtgtgggacccgcacgtcagcgactagagagtgggagtgggagtatgacacgct

SEQ ID NO: 93794 - DNA, 514 bp, Zea Mays
attcggcctactctattcaccctgggagtacaaagatgtaccaggatctaaaggaaaagtattggtagtacggtttgaaaagatatgttgctactcatgttgcattgtgtgacgtgtgttagtgggttaaagccgaacaccaaagaccagcaggattactacaacctctcaaggtacctgaatggaaatgggaagaaatcggaatggatttcatagttggactaccccgtactcgggatggatatgattcaatatggatcatagtagacaggttgactaaagtggcacactttatacctgtgaagacaacttactcaggagcccagttagcagaattatacatgtcgaggattgtttgtctgcatggagtaccgaagaaaatcgtatcagatcgaggaacccagttcacctcgcgcttttggaaaagactacatgagtccatggataccaagctaaactttagttcagcttatcatccacaaacggatgggcaaacggaaagaacaaaccaagt

SEQ ID NO: 93795 - DNA, 371 bp, Zea Mays
ccggtttatgggataagcatgatacgtgggtggaagctggttctgccgcctgctatttgattaatcgctctcccaattccgctattgattttaaaattccaaaagaggtatggacaggtaaatcagttgattattctaatctcagaatctttggttgccctgcttatgctcatgttaacaatgagaagctagtgcctagagctcaaaaatgcacttttattggctatggttctggtgttaaaggatatcgtttattatgtgttgattctaaaaaggtgattgtcagtcatgatgttacttttgatgaaagtacatttctttctctagaggtgtttctgatagtggtttctcatccacatctatgcctgaaa

SEQ ID NO: 93796 - DNA, 864 bp, Zea Mays
cctcaaggggacgtgtgagcatttggtttggacgacaggtccaatgactgcaacgtgatttacacttcgataatagtccctttttgcctcttgttttcaaattatgtgctagagcctccactgatcatgttgattattacgtgaatcggaggctgcgtagccatcctcattcttgcatgggggtcgtagcaattgtctttgtaggggaattgttgaggtggtgaggggagttgaggcctttcttggtgaatggggagaggttggtagttttgttcatattgttggtaggtgggttaattttctagttagaggtgtgggtaaaaaggttagaagatgtcggttattgtcttagctgcctggtcagggtgggtcctcgctagcctctttgcctccgttctctccttagcctctttggtagtatgacaatcattggttgagtgcacgacatcctcgtcgtgaaaaacacaacatgtattgtgttctcgtgtaggatcgaacccacatcctctgctcttggggcctctgtcgcctctagtttgttgttggttatgatcataggaacaagggtgttattttggctattgattaatgttgtacatttgttgcagctgattttgggtagaggttgctgacttctgggccatgatttgggatttgctacatgtgaggtatctcttgttttgttgtgccttgatcttgcgatagtgtaggtcatcgaatcttacatacttcttgaatagctgatataactcttggagcgaagacggggggggtctcgagtgcaatggctatactggtggcctgtgcgtaggccaattacaacgtaatggatggcgtctccgtactcgactaatggcagttgag

SEQ ID NO: 93797 - DNA, 460 bp, Zea Mays
attgttttccgcccttctcaacttcgaggaacgtttcattttttgtgtggtgaggttgtactttagttgtctcagttaccaatcaccattgatgttgcacttgcagcccttgatccacatccacttcgaatttattgtgtgctatggtatactaggaagtttggagacacttacctgctttgacagtgggcataaaaaatgatttcaccactggttgtaaccttcacgtttcattttttgacttttggaccagaaaaagagtgccaaaaattcacgtggcgttgctttaggttattggtggtcaaattttcatttttatatgcaaatatgccgtatgcttcacccccttaatttgttctatataagaccctaaaccaccggttagtttttgttaacaagctgtgtcaaatattcttttccaagcaaaagagtatattttgagagttcccaacgactggta

SEQ ID NO: 93798 - DNA, 332 bp, Zea Mays
gcttatcccatcgactacaaaatccagtttctgcaattcaaaagtatatatttctcagcacataatattatgcagtcccacattcagtataataccattattacctttctagcatgatcattttgttcatggtcaccactctcattcatatttgcgtgatcctgcaaattaacctgtacctgccaacacattttaagctcaatcataagccaataacacaaaccaataaatcatgtatatgtacaaccgcaaatcaatatagttgttaaagttattacctcttcaaatgaacgtatcggtataggtatttgaacattgtccacacccccttc

SEQ ID NO: 93799 - DNA, 464 bp, Zea Mays
gaaaaatatagaattggaataggatagctcggctagtgagaaatgacatacatgtgacaaaaagggagatgatatatttgccgtttattgaccaccaaagagataagttggttggatagtgatactcaggagacaaaagataaacaatatacatgagatacaacatcttctcgcatgaccaataattttctatttgctacacatttgtaaaagattcttgacaccccatgcatttcttaatatgtagagtaaaatgcaaatacagcccacccaaatatccaatatattatatttcataatcaaacaattgacatggtacttccaaatgataatattatgcaccattaacaacccaatcacattgataccctcaaaaggatggaaagaattagggatagcgaaacctagtagaactgacataacaatgttttgatttcgaagatagaaatggagaacataaaagc

SEQ ID NO: 93800 - DNA, 498 bp, Zea Mays
cacaattcccagtccacgacggtgaacggcggggagccgagctccggcgagcgcatactggtggaattactcaatgaccggtgctcttcttcggtctaaacctaattccagccttaatgagtgtttcccctcaactaatttcatcaatggggatttaacacggtctgtccacagtgacagcgggtaagacggacagtcaaccacgttcccggcgatctaatatagcttagcccaatcgagttggtcggggagtatcaggggcacacaataacgctaaaacgggagggcagagggtatgagcggacctgagacgcgctggccacagtgaggtcaaaccgagcggtgttcttgagtgatttgggggaaatgagtgattcgcggtctctggtggacaattgaagacaagcgtgggtgctatggatgggtgattacccgacggagctcgcagtgcgctcaatttataacgggcttaggcggtggccggggatttggatgaag

SEQ ID NO: 93801 - DNA, 643 bp, Zea Mays
tttagtgacctctgggctttccaggacctggtgctcagtccactctgatatgaagtcgactagtgcctgagtttttatcgccgtgcggggtcggaactctatatcatgagctccgatctcgcacacccacttggctattctcccaacagcttccttgttgtgaaggatatcgcctattggaaatccggtgactactatgactttgtggtcgtcaaagtagtgccgaagcttgcgagcggttagaagtaccgcgtataacagcttctgaacttgagggtaccttatctttgagggtccgaggactttgctgatgaagtaaactggatgctgcactgggtatgctagcccttattccgcccgctcgactactaacgtggtgcttaccacgtgagtcatgcaggagatatatagcaacaaatcttatgccggctgaccgggcgtagctcggcatggtggcttgagtactggcggagtggtcaagaatttctttagtgcctctagagcctcatgtgcttctgtggtcactaaaatttgtccaccttcttgagcaatttatagaatggcattcctttctcgcctagccttgatatgaatctgcttagcgctgccatgcatccagtgagcctttgtacctttttctatg

SEQ ID NO: 93802 - DNA, 485 bp, Zea Mays
tggctcttggctggtcttcacctcgctctgtgcttcaatgcttctgctgactagacttgcacttcagtagctatatttggaattcctttgatctctatcaatctcttacttctatctcaatacattcattgcgtatactgtatggatatgacttgttcagaaaatctattgaaaattcctggctgtcccctccaatgggtgtggccaagagatgtcttggtacatagagcgtttagcacactgtcctgggtagtaacttgatgtgaccgtggggtgtaatcatatcgcctgagcagttgaccttagtccaaatggtgtcatgctacgcgaagcggcgtctgttgctgactcatttttaggcggcttgaattgcttattgaatacttgtgactgttcggtgagcgtggtaggaaatgaacagtcgcttccggcctctataaatagcctgcttgcactgttgttctcttcacttatccttcgatcat

SEQ ID NO: 93803 - DNA, 1668 bp, Zea Mays
actccgtagtgctggttgagcgggtcctgcatgtccgcatgcaacacaaactaacgcaaactaccgcgtttctaactccacatgcgcgaggtgattgacgtgtatgtggccgcacccctgcatgatttgactaggcgagagatgctcgttggatgcccagcccagaaggctgtgagcgtcatatttttatttatatttttgttttttttattgccgtatattccttttgcatgcgttctaactgtctaccctccatacataacatgagctgttgaaaaaaaactgagatgggagtggctcgtgccagcatgattacaactaaatatttgagacaatgcatacttaaatatgaaaaattgtgttttacacatgatgtgttatgctcatgtattaattctagtattatcttcctgctctattctcggtggtaaatatatagcagaaatattagaatgcatgtgaaggcaatatcgtactgtctgtgcatacttaaatcgctctaaatatttatgatatgttgagtttttggactcacgtcgagcgattaaattgtatagtgggtattcaaacacgtcgatcagactacgttattaatcgaccgagttatggcattggctgagcactggctgcgccctggcaacacgacgcagtatttgtgccgttcgaacttggctgtgtcatgtgattgctatgtcgcgctctctattaatcggattgctcccgttgagtcagaccgtcatcgctgaatcgcgtattttttgcatgccctgtaggctctgtctgtctgccgcgagccacaattgcgcctgttgcgcacgttgcgtggatttatcgtgtatcccaattatcgagcaataattttgcctgttgcacttattacgaaggcgtgttgtgttgtcgtagccctgatggtcgcacacgcgttgacgccacatacactagagcttgtactcgcgtagattgtggtgggttattcaagcccctgaagtcacatcataacgcaaccttcgtaaacaattttatttagctctatattttatttgcttgtgttgtgtggcatcatatatttatttatattgccaagtggccataacaactatatcaagctctatagtgcttgaataatctgggaaattaaattgaaatacaacagaacatggataagttaactctctgctctctcctcatgcataaagttttacccgtagtaacccgaagatatataatgcatgaagcctttttggcatagaagatatcacaaattgggattatattagtaagcaaaaagaccttaccaaatgatttaagatcagaaatctcagtcatacattgctcaaccagatgttagcacattgctctctttatcgctggatgacatgaagcaaactatgagataaaagaacatttaaccgctagcaacacgaagttgcgagtataccgagaggttattctcaaaaaaaaatcactatgttggtgtgaaaaccatagtgtgtttccctcgaaccactttactcgttctatctaagacctatatgcttgtgtcgcatacatctctcggaattgtaaatatttatagtcactgaattgactcgggatagtcctttgacaagtttggtatacattgtaagctaaatggtaaaggtcggttctgaatgaacacatacctgg

SEQ ID NO: 93804 - DNA, 550 bp, Zea Mays
acacaagttccatggaaacgacattccagaagaatattgctgggtagaagtgacgacagtcgtccaaggatccgaggacgacatgctagacatccctgggcccgaaggtatcgagacacttggacaagctatcaagaattttatcctttggcctcgaagggatgtcgaattggttgatccaccacgacagccgtcgtcgcagacccaaccatctccgccttctcaaattgttgttcctattgtacatccatcatcacctcctcaaacttcacatgctgctcctcatcctctttctgaccctccttctcctcatcctcatggtggcccaccgtctccgccacatacatcgcccttcagggatccaccttctccacagccatcaagggatccacgaccatcaaataaatctaaagtttctataccaaaattagtgtccccgttcgagaagaaaaggaagagtaaatccactgctggcacaactcgttttttgaaagggattggacggagcctcacgtcagacactgttgatttggccgatctcgaggagtcc

SEQ ID NO: 93805 - DNA, 371 bp, Zea Mays
ggcccttcgagggcaacaggaggtaaaaaagtactttatgaaggtaggaatatttggtagcatctcctctctttttttgacaaaagggaaattcattcatttgtcatgagcacaacaaactccattctaagttttgaagccaattggatgttacaacgttgagattgtgctaaagcttgacaagaataaagacaatctcctgtaattgatgccctgccttgcctgttttgttaaactgtctgcaactttgttcatctctctttggatcttgagcacttagtagttccttcctggtgtggcatcaatcagtgccgcaagggttggtccgaggcactaatggctgggttgcggagcacgaagccggaggtagc

SEQ ID NO: 93806 - DNA, 481 bp, Zea Mays
atagaaggcctcttcacaattcttactccactcaaattttactcccttctttaacaattctgtcattggtttggcgatcctggagaaatccgcaatgaatcggcgacagtatccaaccaatcctagaaaactccggatctggcggacggtagtatgaggcttccaatccattacctcctataccttgtccagatctatgacagttccttcttgggagatggtgtgtcccaagaacttgatttccttcagccagaaatcacacttgaaaaatttagcataaagacgatggtctcgtaggcgttggagcactttgtgtagatgcttagcgtgcttggcttctcttcgagtatactaagatgtcatcattgaataccaccacgaacttgtccaattcaggcatgaatactaaattcataaagtacatgaagtaggccaaggcattggtcagcccgaacgacatcaccagatactcataaagccc

SEQ ID NO: 93807 - DNA, 332 bp, Zea Mays
atagtcccaacacttacaaatgcaggaatttctatactttgaatgtttgtacttttgtgccaaaactcaccagccgatctgtggctgtctggctgcagagctggtcagggttgttagggtctagtcctttgtggccctcctggtagacctcaatgtcactaggcttttggccactcatagcttcctgtataaacaaaaaacattcataaggaatcatactatttgctaatcgacatagctagatcaaacttaccattcttttagcttttcgtagcatgtcgtcaccgccaaacttgtggttaggattggttcctcgacattgtctgtgatgc

SEQ ID NO: 93808 - DNA, 340 bp, Zea Mays
agaggcttgaatccatcttgatcccatgctggttcatacactccatcattcctaaggacattgaaacaagaactcaaaagcataggctcattcaacatagactgattattaaacatagggttagcgttcacctgaaaatgaatttccttctgcaattgtttagctctactccttgtaattggaccaactatatcaagtggagtttcatttgaagatgagtgaatgctaggcatgtcctcattagcctccccttcttgagaaggagtcgtcctcgactcaggctcaccaacaaatggaagcaagtctttgacattgaatgttgtactcacattggaatatt

SEQ ID NO: 93809 - DNA, 439 bp, Zea Mays
gttcagcctagtgagctcacctcttccccaccttgattccctatatcaaatctgtgaattctctgtgaatcaaagtgttggatgtggttcctttgtgtcccattgaatcccctgcaggttcctagctccttcgggagggtttcacagcccaaaatggccatatctccaaaaacctaactcaccgcataccaggtgttcggtgaaatgcccaaaccagccaataatgatccaattgaacccaaatttttcaggcaccttcacaatacctcgcgtaacatgttcgccaaatttcacgccaatccgatataccaggattcaatttcacacatttccctgtttcgagcgatcgtttccgagccgagtgcccaaattccattttcttcgcctcaaatcaaaccaagcacacacttcactcatatttacctatataaacctattc

SEQ ID NO: 93810 - DNA, 384 bp, Zea Mays
tgactctacccgggttacaaacaagagaatccccactgaagatctggtgagccaactagatatgatcctgaggggcagagtgccaaatgttggtgctcctgttgcctattttgcctagaatctgccacctcataggtcattttctgaatttgtgtccaaccctcctgctagtgatggtagcctgggtcttagagtacgaccctctcctgaggatattgaggctctgattgcccctctccggagtctccagatgatgagaggcagattcattttgagatgccagctagcacagacgatgcagagatagatgatgtgcttagtatgctggctggggaatcatctgactcgacccatgccgagacgatgtctatcacggctggacaa

SEQ ID NO: 93811 - DNA, 469 bp, Zea Mays
ccatggaggtaaattctaggcagaataagattgaggagcactagcattcaaaaccttgccccttaacatcaagtcaatccggctcagcaggtccccgtcacgaatctgtctattggtaattcgggtagggtcgttgaccttggtgtacagataagctggtacactctatctttcagaggttggatgttcttgaagacaaagtcagcaacaacagctttgacagtcaggcccttgtctttcagcatgcatatttcagcaagcaacaccctggactcggctagctctgaagctgtgggggactatgtccagctaggcgtgcggacatcgggttgcctccccgatcgggggggggggagagatttgttgtggttcttcatggtaaaccactcaaggcgccaccccttaatgctatccttcagagggatatcaaggtattcgattttcctgccccgacgaagctccaagctag

SEQ ID NO: 93812 - DNA, 576 bp, Zea Mays
gtctcttgtggcagccttggaagcggaactagagatgttgcaccaccgtttggaccaacttcttgattatgtcgaggcatgtggttcctccttaatcgagggcctgtacaacggttcatgccatgtctaggacatcatcgacttcaacgttcattatggggtgcggtggcgctgctcatggcggaggtcatcactagcagctgcctttagtatctcattggtaccccttcgttcctcttggatgagggtaggaggatctactggaaggccatgacgatgtagctagtcacatcgtgcttagggtgtctgctcacgacatcgttcgtgttgcgcgctaaccacgacatgttacgcctctccactgccccctgacaataatgaaaaggacttttgctttctagttctaagcgttgtgggtccttcgagtcctttcctttcactatctaaatgggcttgtccgggtacctcccttctttaagagtgtgtgagaaagggagagaaaaatagaaaagggaaaaacactcctccccgcggatctctcgctagctcatgctttcctttgcccttggatcggag

SEQ ID NO: 93813 - DNA, 1299 bp, Zea Mays
aggggagcaattaaggcctcaatgtcctctgaggatggtcacactctatggcccgggctaccatctcgaacaggaggattggagacaaagccagagaagggactatgcggaggcaggttccatgcagagtaagataagggaggaccagcattcgaaatcctgcccctcaatatcatgtcaagtcaccctagcaagtcctcattggggatttgcatgttagtgacccgggtaggatcattgacgctagtgtacaagtaagctaggtagactctgtccattaaagtttgaatgttcttgaagacaaagtcaacaaccacgacttcggcagtcagacctctgtccttcagcgagcaaatttcggcaagcagcaccttggcttcggccacctctgaataagtgggggactccacctagctgggcgtgcgaacgtctggttgcctccctgatcgagggggagggatttgttgtgattctccatggtgaaccactcgaggcaacatcccttgatgctgtccttgagagggatatcaaggtattccactttcctccccccgcgaagctccaaactagcaccaccaacaagctgatgctgccctccagccataccgggtcaacagtggtaaaggtacctccagagtccaaagtgggggaggattccaagaaaggccttgcacaggtgtacaaaaatggcaacttgaagaatggagttaaggtttaaatgtgtaagatttaaatcgtagaagtcgaggagaccgcagaaaaagggagaaacgggaagagcaagtccgcggatgaggaacgacacataaacaacggcctcgtgggtgtcctctgtcggaacagtgagcccgcgccagatccgccaagaacacagttctttcagcggcaaaaccccagtctccacaagatgcaaaagatctgatttagaaattatggacatgtgattaccagcgaatggaagctggctgttgggaacgataggtggaatgatcggaacgagcgggctcaagaattcagaaagcggagaagcagtagaggaaaagtaagatttagggttcagaactcaagaaggcacgtcgacatgagtataagttggctccttaggtcgagcattacctctaaagtgtcagatcacaattcggaaaagtaaagaccacaatcgccattcgggcattacctctaaaatgccgtcactgtcaagcacacggacaaactttcaagcgcacgaataaaaagcaagcatcggtgattaaatggagtaacttcatccttcattcgtaataggggaagtaacacaaa

SEQ ID NO: 93814 - DNA, 607 bp, Zea Mays
tgacaacctaaagcaacgtggaggtctctgaaggcacttcaatggtctgcttggtggacatcatttggcgagaatcaacttcaaatgcccctacgaccacctcattagtggtaaggtctgtctctctatgaatctctataccatagatccttgtgggcatctcaccaaggatggagactgcggtgtttgcactagtgtcctgacacaccaaagagtcgacaaccgtgcatgcccctacgagagaagcaaggatcgacgatggtgaattgtgcttcactggagaacaggggccaaagagctcgggcaagtcggagacagaagcatgctccccatgcgtctctgcatgctccaaatggttggccacacgtgctagccacaacttgatgatagaaacctcctcctggagaggctgcaacacttcctcaaatgagctgaaacatgtgttgaaactctgctcacaacgactccaccaaaggggtgaccaaggactgaaggttcaaaggtgtctgaggcaagagaggcataataatagctacgacaaacatgatcgccgtccttaccatgcaaatcgatgggttgagaagttgacggaggattccgatgtcca

SEQ ID NO: 93815 - DNA, 414 bp, Zea Mays
gccaaattcaggcactacggtcgtttcaatatatcgtggtcggtgggtcaaaaccttcattttcttgcccttcggcatagtagtggtggccggagcggcagtttttctcttttttccttgccttcgcaatgggtagcggtaatcagggtatatgaagccaattgcgtcaaaaaccctgttcatcttttcttgccccgacccacgaaggctgaggataaagcatcatctttggctctggtatatgccccaagtaactcgttgctagtagcctcgatacttttaagacaatcgtcatttggctcgtcaaatcggtccctgaacctgaaggtatattttagtcaaactaatccaccttcggtggacccggcagcagtatccttcggcatctcccagttatctacaagtggccacacc

SEQ ID NO: 93816 - DNA, 364 bp, Zea Mays
tgagagcgctatgtgtgtcttcctgtcgtaataggcttgtgtggtctctcatgtctcatctgtggtgtaacggttcatatatagtgtgggggctcattgggagaagcaggagagagaaatagatctacatgtttctcacgtgacacacgacacacgagtgaaactagtgctttaaattcatagatagattactttacactttcatacgcttctgatccgtacaagtttccacaaaagttggtgtgattatggttgggcgggaaagttggaagaacaaatcgctagggcaacaagaagagatgacgtcaaaaacactaaagtaagagtttgattggttgctttgctatggcctatgtgaaaaaaa

SEQ ID NO: 93817 - DNA, 521 bp, Zea Mays
agtaagcatccacatatgtgcaattgaccatgcatctttatatgtatggtggttgtctcctgtccttttgttgaacatcatgcatatcattgaactctttgcttctcttgataggtttgaatatgaggtgcattgagcggctatatggtgaccatggacttgatgttattgatgttcttcgaaaaaatgttggtgtgacattaccagttattttaaccaggcttaaacaaaagcaggaggagtggtcaaggtgccagtcagattttaataaagtttgggctgaggtatattcaaaaaattatcacaagtctcttgaccatcgcagtttttatttcaaacaacaagacacaaagaatttgaacacaaaaggtatgcatatttcttcattgtgtactatcctttcttggtagctactgtcctgttgtgtttaaactcatgaaccttgcacagctctattatctcagattaaagaaatcagtgagaagaataggaagggggatgatgtgttacttgctattgct

SEQ ID NO: 93818 - DNA, 431 bp, Zea Mays
tagtaaaaagcttatctgacagaccaagttggagctctattttctccaatttttatgtggtacctaagccagctttctgcatcaaagttacacacctataatccatcttcaactttgccacaacgcttaccatcaaatagtcactgaatcacattcaaaatcgagctcaaagttcaccccatcacactgttactgaaaattcagtccaggggttgcctgacagcccgactttgagcttaattatctctggatttttcttaacaactgagctcatactcttaagcaaagttgttctccttagtttggtctacaattttgatgtggtgacctagggcaaaaaccctagaatttaaaagttgcaaggctccaaagttgagccaaaactctgaaattcagacttaacatgaaatctcaattagggtcctttttgc

SEQ ID NO: 93819 - DNA, 835 bp, Zea Mays
ctcgccgaacttcggcgagcctattccggccggatgctgccacgactggagctcccgtgcgatagagaccaaattagacccctaccgcacacttcccctcaatcaatttcatcatctggactttgaatcaaccagtccacggtgacagggcggatgatcggagggatgaacacgttccgaccaaccgatggcgtggatgaccaaattgaagcttggggaagcatcacatgtttaccagaggtgatgcacacaccagaatttggactgggcacgaacaaaaacgtgggtcgacgaagagggtgtcacggcggcgttctacagagcaggtgcgtgttccagtgaaaggcttcagccgaacttcaattggtcggtactgagagcaataggaggctacaaacgagctagaacagggagcaattgggaagttactaactcgaagagcgttgaccacgatggagttcttcacggcggagttaagaacagggagaaaggggatttgcggactgtgtgagttctccggtgaaattgaatcgagtgcttagtcgctgaggtgcgagatgtggtgaagaagcggagtctgggctcaatttataggccgtcgaccagaattggaggaggagcgcggattaccgatcgcgctggtgagctcaccgctcggcagaatccggtgatggcacggtggccgccgattaaccggggcttgccacctcagtgattctccgccacgtcgccgaggatcttttaccacggccgccgaaccatccagaccgccgtggcattcttatcgccagcgaggtcctgatccttatcctcctggtactgtaccattacaaac

SEQ ID NO: 93820 - DNA, 324 bp, Zea Mays
tttggatttagactttgtgtgaggtcatctttgatctagtgccctctctgtttgcatctagaccatctaacctccaagcctagaccgtccatgcttctagcaaggactagggatgaaaacgggacggatacagccggatacagggtcatcccgtatcctaccctaatgtatttatctcggatacgggaccggatacgggtacttcagattcgggacggatacaggacgggaccgggtaataatacgggcggataagaaacggataacagatactaatcgggtaggtaccagatagttgtcgggtagttcgtatcgatggcatta

SEQ ID NO: 93821 - DNA, 449 bp, Zea Mays
ggggtgtataggcgaccgcggggatttacattgtacacaaccctccatgtagacaacattttgcattgatatgtcgagaaataaacatagtctgcttgatagtcaaggatatacatgttgtgcccttgcagcaattttcaggttggacccgtgtcatcccaaatttggtcctataataattcgggtcataccatttacacttgaagaaaactagcactaaaggcttacttccaacaaatgtaatctcgattatatttttgatctttccgtaatagtaggctttgtgtccttccatgtcagttgccctagtaacgactccactattttgagtggcagtcataggatgactagattcaaaaatgcttgaacgaaagtggtatccattgacgtcataatgtccatagcttttggcagttactcttccaatagatagcttacgtaactcatca

SEQ ID NO: 93822 - DNA, 412 bp, Zea Mays
cttgatgtgacctccttctcgacttctgaaaagatctccctcagcctgttggcggagttcatcatgacattctttgcagccttcttctgatgcttagtgcccttcaaccaggcaatccctaacaaaaccttgatcctgcagctgtttggtctcaagggcgtgctggtcatgtggtacttcaattggatctgcaatttcagcaagcagcaactattacctgacaatttgagtaaaacatccgagtgctttcatcgagctctgctttcatgatcttacactggagtaatcttcatgctggacaccttggagggtcatcacctcctcgacaatccagtcattttggttcggtaagttatacttttgctgagtggtcgttgcttcccctccatatcttgacaagcttttgtcaaac

SEQ ID NO: 93823 - DNA, 744 bp, Zea Mays
atactgtgcgtattagataatgtaaaggattttactaaaagctaagaggtactactatttgcagggaagataagaggaaagaggtagtagcgccatgtgtagagcaaatagataagatgtgtagattcagtcataatgaagcttgcttatgattctgcaatttcataattgtggttgcactataactgttgtttttcccctgatctacgtaattgttggcttctaagtaaaggaaaaaggcattatgggactctttggtggcttgcattagcctgtatctaggcttctgcagtgtatttcgcctgtttggttgtggaaatctttatgcaggcttaaacaatgttcaaagtactagctagtacattgattaggcgatgtagatttacacaagctgatgaacaaaaaaagtggagaaattctcatctctttctaccagtattagaaacataagttctctactaaaacataaatgtggctgcatataacacaatgtaaggaaccaaacacaactgtatcagtgcacaatgattacataaatcaatttacaatatctctaacaacaacgaatgaataattaaactaaatctagcgatggttagggtttaggggttggacctttctgacttctgtgcctccttgtgttcaccatcaaggttgtttgcgatgacctaaatccagcgatggttagggtttaggggttggcgagagaaatgtggatggggcgtgttaggtggaaggggcgag

SEQ ID NO: 93824 - DNA, 1278 bp, Zea Mays
ctcggacagagtcccagggcaagctggagcccaagtgggagggccctttcatcgtcaagacgaaggcgtcccccagcgcgtacaggctcgcaacgccatccggcgaggacttggagcattcctggaacattgataacctccgcaaattttttgtttgactcctcagggccagctcgcccttgtaattcgcaaaacaattttattctggcccgcactcttttcctcccggggggtgaggtttttaacgaggcggagccatgtaatatacaagcgaaaaatcccccgcaaaaatctacgtcgaaaaaagaccgcatcgacggtcttcgacattcgaccaatacaaagtcaccgcgaggggcagcgctagctaccctcgcgtgtaacaatccgcgcaaaagtcgcctaagggtgcagccggactagcacaacaagtgcgcaaaatcgaaatcttcctcaaaagactatccgtgcaaaagccgcctaagggtgcagccagactagcacaacaagtgcgcaaaatcgaagtcttcctcaaaaagactacccgtgcaaaagccgcctaagggtgcagccggactagcacaacaagtgcgcaaaatcgaagtcttcctcaaaagactatccgtgcaaaagccgcctaagggtgcagccggactagcacaacaagtgcgcaaaatcgaagtcttcctcaaaagactatctgtgcaaaagtctacaccaaagaaactatccgcgcaaagactgactacaggcgcagccggaccgacataataaacgtgctagaccaagtacgcaacgcctctatggacatagccggatgcgcgaaggcgcacagcctcatcatacaaactatagttacatatgtacagcgagggcatcacaccttacattggttcaaccttcggaatgattcccatctccctatagttaaatagcattatcctaagctcctcaccctaaaaaagactccgcaactccacctcacctacactcgccccaaccggcgaggacaacaattcccgcttgccagccctgcccacacgaagccgaccgccatccacttcactcactctacgcttcgccaccgcccttcgccgcctacgcccggcactcggaccaggcaaaacttcagcattcgtaacatgcggagaagcctctgccgcagccacatccaaggccgcaaagtaatccaagtcctcatccgaagactcttccgtccactcaaccgaactcccagagtcaccaaaatcagaaaacttagacgtagactcatccgat

SEQ ID NO: 93825 - DNA, 646 bp, Zea Mays
caattagctatgttatgtggactgtgatgcagaatatgtaaactgtgttatggactatttgttagtattggactatttgtgatgtggacgatatggactatgtacttattgtgatgtgaactatgtggactttgtgatattctgtgtttttgtgatgtgttatgtggtgatatcttattatatgtgattattgaaattgtggttgttaataaaacaaggaaactcttgcgatttttttatgaattggaaaaacatgacaatgcaatagaaacattatgaatataaaagtactacataagacatgactagcgtaatcaatctaaaacattatctataagtaactcatcataagagtcatccgtcgagcaatactcaacgacaacgtcgttccacttccttgactgtctcgcatcaccctcttccacctttcttttatagtaagcatcttctacttcatctgcagcctaggagaatagctagtcctcgacctccgcttcatcacacttctgcttgtaataagcgacctatgcttcatcggcgatctgagacataaacttgtcctcctcctcttgcgtaggtaatcctgcctcagcgagtgcgatgagctcactcaaccttgatacgtcctcctcctcttccccatgta

SEQ ID NO: 93826 - DNA, 338 bp, Zea Mays
cgatttcaccaaacatcaggaggggtctattgtgcgttttatttcctaacaataaatcctcatcactgaatgaaatactttgagtttggggtaatttcacttccgcttgcgagacctcggctttatcttttatttctgcttgtgagacctcaactttataatcttcagggaaggaaagtgcactaataaatgcatttctcaattcagaagaaagacacaaagcatcatacacggaaagcatagctggtattttcttcaagtgcgagattacatcatacttgaccgacacattatgagtatggtcagccacatcactcggagtgacatttaggggatct

SEQ ID NO: 93827 - DNA, 420 bp, Zea Mays
aaaatgtttcatttttgggatttttttcttgttgttctggatagcgattgcgattgacatttcagctcactgtggctttgtatgaggacacctggtattttatttgctttcccagatatcggaatatattaaacatcactccatgttcagctaacacttgatggatttagtacatagatagtattggcatctatgctacccaagttttgttaaatgttggtgatgagcatgtgggttctgtcaatttaggtcttaggacttttaaccagtggaaaaccccaattttcaacacttcaatagtgatgatgtcaacttccttgggttctttttgaacattgctacaaagtatctagctttgaaccccaaagacagacttttcatttcgtaatttttttgacctttttgcctgtgcaagaaaag

SEQ ID NO: 93828 - DNA, 956 bp, Zea Mays
gatgcatttctggtctgttcgtgggcccatggctttcgcccgaaggttgttcgacgaaagtccagtcagggacgtggtctcgtggaacacactgattggtgggtacgtgaggagtggcctcccgcgggaggcgctagagttgttttggaggttggcggaagacggcaatgcagtgaggcctgacgaggtcacggtgatcggagcagtgtcgggatgtgcacagatgggggatttggagctagggaagaggctgcatgagtttgtggacaataaaggggtgaggtgcacggtgaggctgatgaacgcggtgatggatatgtatgtcaagtgtggcagtttagagttagcaaactcggtgtttgaaaggatcagtaacagaactgctgtttcttggacaaccatgatcgtggggcatgcgaggctggggatgatggaagatgcacggatgttgttcgatgagatgcctgaaagggatgtattcccatggaatgctctgatggctggttatgtacagaataagcagggcaaggaggctattgcactgtttcatgagatgcagaaatcaaaggtggatcctaatgagatcaccatggttaatctcttatctgcttgctcgcagctaggagcattagaaatggggatgtgggtccaccattacattgaccgacataaacttcatcttagtgttgcacttggtacatctctggtggacatgtatgcaaagtgtggcaacatcaagaaggcaatctgtgttttcaatgaaatcccagttcaaaatgcactcacatggacctcaatgatatgtggtcttgcaaatcatggacatgctgatgaggccatagaatacttccagagaatgatagatcttggattgcagccagatgagataacatttataggggttctgtcagcttgttgccatgccggtttggttgaagcaggtcgtcaatttttct

SEQ ID NO: 93829 - DNA, 484 bp, Zea Mays
gttggagacaagcacaaccaaagaagggtggaagtactttgaagatattaccgatcaaaaaaaggattttgtctaggtagatgaccaagatggcagtcatactgagttagcatttagcaagaaacgaattgctgataggaaatagtggcttacaaatttctaggttaactctcactttctccgtcccaaattataaggcattttgtcatttatggattcatgatgtttactatgtatctaggcataacatatatacatggcaaaatcaatgaatctaggaaaactaaaatatcttataatttagaatggagggagtacatcttttcccaatttgtcatggtttgtttatgtgggatcaacactaaatatgcaaattgatattcagcatggaacatacatggaccaacgtgagaagcaagtcaagtatagtgatcttatcaacacagagttgatgctcttctcaatggcagtccagcatcgagca

SEQ ID NO: 93830 - DNA, 291 bp, Zea Mays
ggcatttgtaagcctgtaatgtgcctgctaattcagtggtaagcatggtgggtgttggggtaacggtattgccagtctcattggaggaaaacaagtagagtaaagagcatatatgtgaaaaaagaataggcaactaggtcacaggttcgaagaagtctctctgtatttgcggggaaaggtttagtctcgttgatttgtagaaactatcttgaggtcttgcaaccatattgattattatttggcaaaagggacatgggttgtttaccaaagaaatataaattaaaggttttc

SEQ ID NO: 93831 - DNA, 574 bp, Zea Mays
aaaaaattgtgattccaactaaatgagttagtttaatttagaatcgtttcctactcaaatacttcaaatttttatcattcatgttactaagctatcatattcaacagttgttttaactaaattactactattgtcaactcgcttcaactttctcagaacttatggtcagagtcggatttttagtaatttacagttgaaccaaacagaccctaaaatatagtcgagtgatcagatagacatatttgatgtgctaggccaattaattaactttgcaatcatagcctaaacccatgatcatttgtgttgatgatcatagtagacacaaagaactctttgtttggaagaaaaactcgctagagatttttatctcaaccatgatacatcctagttttcttaatggttctttaacgatgtctagcgctcaatagcttcagaaccccaaaaaacacctgaaacccgcgaacaacggtggaaacgagaaaactcgtgtttgaagagctgaaacaagttggaaacatattctacaaagtgaggtacatctttgaagctttaacattgccttagaatgtctggc

SEQ ID NO: 93832 - DNA, 290 bp, Zea Mays
cagaacctcaacttcttcgagagagggtcgcactctaagacccaaaccactgtcaccagcaggaggattggacacaaaatcagaaaaggacttagaaggtggcagattccaagtagaatatgcaacaagagcaccaatatttgatactttgcctctaaggatcatttccagtcgactcaccaaatccacagcaggaatcctcttgttggtaatccgggttgagtcggtgacaccactatacaaataagtcgggtatgctctgtcctttagtggctgaatattcttaaaaa

SEQ ID NO: 93833 - DNA, 293 bp, Zea Mays
taattcggactatacacctgtatcagagtctgactctttcatactctttcccgagatgatcgctagtacgatcttgagagttttgcttaccgaagggtcaggcgcaactctttatccctaggtcgggtgagtcggtctctatatatagggcatcattttgtaccctgatcgtccctcggtcagttagaggtcaggcgagacagagacctaagctcgacccattatttattcctgatattgtctcttgattttttactaaccccctagagacccctcaagggactccctaatta

SEQ ID NO: 93834 - DNA, 435 bp, Zea Mays
ggagatcattggcctggccgtcagtggcagctactcgtctctcttcctcaccatcagaaaccggggactcttcgccttctcgctccgaggcgagctccaatggagcgctgggcctgcgcttgatttcttcggttaccgtcttggctgcaagagaaacgtctccggctgctatttcgattcggctcctgttgttgatcagtgcgagggggtgctctatgtaaggtccataccagttgcatacataattgttctgtccactttctgtgctagctcattgtgcaccagccatgttcttacagatatccaacactgaaggccagctctattccctgtacatcgataaccgtggggtcaggtggatccaagacttgagctcacatggcaaagtgatgacagttgcgccgggaaacagtgggtgcctatacatcgtctttc

SEQ ID NO: 93835 - DNA, 487 bp, Zea Mays
ggaagtcgagggagccgaacatggcataacttccaagagcgaaagtgttgtcgtcgatgagtgttgatgagtgggccatcggagtgatggaagtcttttggcacgctaacggtcccctacttggcgcaccaactttcgtggtttcagaaaccaggggacaatagaatttgtgttcgatggaggagctagcgtggacccactccaaatggtgaattgtggggattctaagagaatggggtgtgagacggtgaattatacttgttcaggctcgtgccctagtcccatgtagtgctaatcgtagtattgcctgaatagtgttgcagcgtgtgcgcgtgtttgagaaggaggagggtctgcccttttattgttcaagggtagatcttacaatagggacttgtttgctattcgtaagggggcactctgccaccccaggttgaggtagaattcccaatgtcgtccgtagggccgtgcgtagccgtactcccgg

SEQ ID NO: 93836 - DNA, 790 bp, Zea Mays
gggacttggaatttgcagtgggtgaccaagtcctcctcagggtatcacctactaaaggagttgttcagttcggtgtctccgggaaactcagcccgagatacattggaccgttcactatcttggcccgggtgggcaacttggcttatcgtttgcaattgccggattccatggtaggggtacacccagtttttcatgtctctatgttgaggaagttcttgcgggatccagaccatcagatcgagatggtaccaattgctgtgcagcaggatctgactctggagtgtcgtccggtgcgtatcttggaatcttcggagcgtgttttgaggaagagatcaatcaagtatgttaaggtcttgtggactaatcagtctaagcgcgaggctacttgggagcttgaggagctgatgcggcagaagtatccggaactttttgctgtgggtgagtattgttgattcattaatctttttattttgttgttccgatagaagcgtcaaaattcgaggtcgaattctttttaaggggggtagactgtgatacccagtttgcaaagaggagaagttggaggtcatttttgctttgttttcttttgttgtttctctctcgggtggtgcgtttttgggggtttggaatttttgggaagcattgaccagtaaaatagtagaatgaggtttagtctcatgcgctggggtcgggagctagcgtgtgaacgagttgggccgtggttcatgatccggcccactagtttcccctaaccctagccgccctcccctaatcccttgggattttttca

SEQ ID NO: 93837 - DNA, 322 bp, Zea Mays
atgatgctgagttaagaagaggcccaaatataccattgaatacttggaggtcttcaaatctattttttaatgaactgcttgccatatcaagcataactaaaaagtaatttacttcaaagtctttctcaccttgtagatttacctcattgctgcaatcattttcatcataatgctttttctttagagcaggacacttttcatcatatcagggtggggccctgggagatgggggcctaggtcagccgcccctcacgccctgcctcaggcatggccgtgtagctagctacagctaatatgatagttgttaatgtctagaaaaaaa

SEQ ID NO: 93838 - DNA, 717 bp, Zea Mays
gaaggttgctctgttcttaacaaaaattcaaagatcaagaaggtagaaggtggtcggttcagacaactcctgcagatcccaagcgccgaaatatctgaagaacacagggagaaagatctaccgcactgttgaattagataagctcagatgaatcagcaggagaattgatcgcggaggaagataacattagacgtggcacaatcccgcgaaccccgccgcatgagaccggagttatctcaccggcggtcgccgagattcaatgttgtctgccgcggtgtcacccatgctttgatttccctcactgtacatctcctctatgtggtagacatgcgcttgccatgctatccgcggccgctgatcattagccggctcgccgtggctataaatggcaccatgaaccaggacgaggcatgcacacctccatctagtgcgctgatcgcaatccaaaattcgcgctgtctccgccccctcctcccaaattgaatctgcacggtgaagctatagtactctatggccatgtagccccaatctccaccctcaatttcacccagggccgccgcgacaccatcttccccctttctccgtcaccggcaggcacaggtctccgcgctccgtggccagagcactcgggtaaggatctgcgcttcttgagtgttgttttagtaactctgtatgctcgtgaagctcatcgtagcagccgcttgactaattcgggtg

SEQ ID NO: 93839 - DNA, 727 bp, Zea Mays
atcttgtgcaatctccaacctatgcagcacctcacgagcaagggcaagttgggagttcacgtgtcccactctactatcgctccagctttgcaatctttttgttgtcgccttaagtttcatgtctagagcctggaaaggacactccaaggcagggactgagttccatgcatcctgaacagcctcctggaatccatctagctttggccagaaagattcaaaatggaatcttcgctttcctgacctgttatcccgaagaccaagcagtaaagggcagtggtcagacacttcagaagctgaactctgcaggaaaacattagggaacaagtcctcccaatcagtagaacacatgactctatctagcttcaccaaggtaggtatgttttgttggttggaccatgtgtatttgcgtccatgaagggggatctccttaagagataaatcatcaatggtccttctaaagcgacccatcattgcacgattaagattagaattatttttgtcttcagctttgtagatgagattgaagtcccctgcaattatccatggaccaagacaagctgctctgacatttcttagttcctgcaaaaactgaactttatcttcactactctacggtccatatacacaagttagccaccaggcttgcccctcttgtgtgcagaactggactgagatactgtgatcatcaattctgttaaggcctgtgctccccagatgatgtttccag

SEQ ID NO: 93840 - DNA, 403 bp, Zea Mays
tggtttcaaatgcatcatggcgaagtttatcaataacactttattgctgctgccaccaccatgatggtacaagctttacaaaccatgatttcttttagatccaaaacttgaaacttcaattttatcaatcaaataagcaagtgaaatttgaattccctcctccttttcgttaatgggaaattctattaaactcatcgatcttttagatctgatgttgttctataacatggctgatcactgtgcggttgcattagttttctttctcatgtcttgagatagttgtctcgtgcttcaatcatgtaattaataataatgctttcaagtgcttgatgtgaagcaactttgactcttttgcaccctaaacaatgccctggtctcagcagcgtaataaattcatagtgtc

SEQ ID NO: 93841 - DNA, 515 bp, Zea Mays
acatcgaaaacttgaagttatgaccagatcaggggttaatccctgttgtggccaaggatcagtgcttagtagcaactcttgggatccttaccctgccatattcaatccttcaaatagtagtgtttatcttagtcgatcctagtttagagcatcccttgagtttgaatgaggttcgaacctctaagttctcagcccgaggtactgggtcagatgttctagggtggtggagcatgtaggcttatggtataggaccaggctaagcggctacacggtcccggaccacccctaagaacgtggccctttccctagactaagtatctagtgattgaaatacagcagaagtttagacccccaaaaggggtagagggaaacaacatgcgtaaacaggaaaagaaactgatggatgagactgattttttcctttgcaatgggatacatgtgatacccgagacagggtttataagggtgactctcaccgagctagaccatggatggcgctgaaagttgcctatagg

SEQ ID NO: 93842 - DNA, 687 bp, Zea Mays
taacagtggatggtctttactgctatgttgttatgccttacggtctgaaaaacgccttgccaatatttgtgtgggcaatgagtaagactttcgatgacctcatcagggacaaagtggaggtgtacgtcaacgacatcgtagtcaagactaaggcaaggtcgaccctagtggaagacttaatcctagtcttcgacaagctacgggcaacccgcataaagctgaacccggacacgtgtctttggggtctccgcagggaagttgctggggttcctggtttcacaccggggcattgaagcaaacatggagaaaatcagggcgattgaggcgatgaggcctccggctcgaatcaaggatgtccagaagcttacgggtcgttagccgcccctagccgcttcatttcaaggctggttgaaagggcgctacccttcttcaagctcctgcgaaaatccgatccattctcttggaccatggaggctgagcaagcctttcaagagttgaagcagcaccttgtgtccctgccgatactggtggctcctgagccaggggagtcgttgtacctatacatcgcggcggctgcagaggcggtgagcatggtgctggtcgtcgaaaggacagcacaagaaggccaggaacctgagggcccaggaccagctataggggtctggaccatccagaagccggtctact

SEQ ID NO: 93843 - DNA, 464 bp, Zea Mays
atggagttagttgttttaggataattattgaaatgctctgttcacatgacaaatatatatgtttagaaaaacgttgtagtgtatgttgtgtctcggagtgcgataataatgggttagcagacatgttagatggttttgggttaagctcgtggtcacgatgaattggttgtggtcgtataaatgcatatggttatggtcgcagatgaaaagtattagtgctcatgtgatgtctaagtgaaatgcaaattattgggtgaaaagcgtttcgatattgattatcgtagagaatgcgttgttaattaagtatagtaattctagtgctcaaaatgacacggataaattttagtaagtctacttattagttatcacttggttattttaactctaacaattgtcaaagtgttagaataattcaagtatctagaacgcggcaattcttgaattgtataggagctgaaatttat

SEQ ID NO: 93844 - DNA, 501 bp, Zea Mays
cgtgcaacgaccgactacaggtgcagccgaaccgacataataaacgcgctaagacttagtgcacaagtcccctacggacacggccggatcagcaaaggcacacaacctcttcatacaaattatagttacatacgtacaacgagggcatcacaccttacattggttcaaccttcgggataatacccatctccctatagttaaacaacattatcctcagctcgtcaccctcaaaaagacttcgcaattccccctcacctacactcgccctagctggcgaggacaacaattcccgcttgccagtcctgtccacacaaagacgaccaccctccacctcactcactctacgcttcgccgtcgcccttcgacgcctacgcccaacacttggaccgggaacttcagcacccaccacacgcggagaagcctccgccgcagccacatccaatgccgcaaaataatccaaatcatcatccgaagactcttccgtccacaccaccgaactcc

SEQ ID NO: 93845 - DNA, 688 bp, Zea Mays
cgctctagacagtcgataccaatgtgcacaggcgtagtggcggttgatcggctaggtcgtcgatcgattggggcaggtgatatgggtaccgatcgatgtgtttggaccgcagctgttatcgaccacatttggtcgataatggcagtcgatagctgagtggttgcctctggtctgagttgtttcattagttcgaatttgaaaataatccaaaaaatcataattccatcctataaatagagaggggggcttgaattcattcacacactttcacctccgattctcaaaccctctccttcattcgcatattttcatctccgtttcgattcggttgctttaacctttgtttcatatagatctgaggtggagtcacaacaataaaacattcacatactttctcaatgagcaaactccacaacgtcctaagacccctgctagtgcggggcaagttttcttcgatggtcattctctagtccaccatcagcgtcaggaaggtacttctcgtcccgatggcataactcctcaacctctctttctttacatgtatgcccctcctccatatccatactgaccatgtgtaaaagctccctcctactattaagccaccaacgaccaatgctcctcctagcactgatgaagcctcttccaccgatgctcatcctacacaacctttcacttatttgtatcctcc

SEQ ID NO: 93846 - DNA, 707 bp, Zea Mays
gttgctatgtgtgaggggtacctgggcttcgaacccaagctcaccttgtggtggtacttattctgcattgagctgttgcggaagagggaggagcaatggataacagaagcatggcctatcggatgcgcagcatctgcctctacagcgaaaggtcacgaaagtacatcctgattcccctttccttctctaacaaggacttgtataggcgatggttctatctgtgggatgccggtcgagggccttttccggggccatagctctatggtgtcggccaaagcactccatccgaggctccatctaattggagctacaatgtcacgcctgaggagaaaatctgagtctgatgccatcttgcgggggtgttcttcctctgagagaaaggtgtcataggcacggacgtcatcagagcctatctttcgcgaggggtggctcctctaaaggctcaatctatgccccttataagatgggaaaagatttctcgcctcttctgcttgggtccttctaagtgactcggacatcgcccggtgggtgaaccaggctctggaaatttggaaggaggtgctggggacaacgagaccaccctttcctatagccctgagtgccctccgatgtgctttgaggcgagctttattgaatttgtaagtatcctttattgctcctttgggtgccttcccttatcacacggacctgatgattttatttcgttg

SEQ ID NO: 93847 - DNA, 426 bp, Zea Mays
tgtgtgttctcgtcgaaccacttactcggcctatctaggacctctatgcttgtgttgcatacatctcttagaatttaaatacttatagccgctgaattgacttgggatagtcctttgactggtatggtatatactataaaccaaatggtaaaggtcgactccgaatatacatatatctggggtttatgtagcagaactacattgtattccaccccttggcatgcttaccataatctatatctgatctaccagaagtgagaaaagtagacaaataactataaaatcccacatcaccacagagcttgaagctaaattagacattaacatgtcattggtcctcggagccagaagagtcatatgtcttgaccactagactactagtgatgataatttgtgatagaaatatgaagatcttatagagtcttg

SEQ ID NO: 93848 - DNA, 420 bp, Zea Mays
tgcttccgctgtggggaacaaagtcactaggcagatcattgcccaaagaaggcaactcagcagccgacaactttcaacactttagcaagacaaggagctccacaacaagcaccaggaggtcgtggccaggcctacaaccatggaaaggtgaaccacctggaggctgaagcaatccaggatgcacaagatgtggcagtaggtatgtttccagtcgaatcctatctagcaaaagtactatttgatactggtgccatgcattcttttgtttctacatcatgggtagaagcacataacatccctgtagaaccaatgattccacctttaagagttaattcagttgggggaaaggtttagtccgataagatgtgtctgaatctaatgactgaaataaggaggatagcctgctaacctagtactcaa

SEQ ID NO: 93849 - DNA, 817 bp, Zea Mays
tcctaccactcataatcgggttttgcaaaatgtatttaatcacatcggtttgactggcaacagtgcaatgactagacagtaaataacatctacacttggtacatgcataaaataggcataagcataacttttcaataaaagtgtaccttgttttagcatccaccagcctccgacttaggtaggtcaccacatgctcctttcccctagtcacttgcgtcagaacagccccaataaccttatcgtcagctgcaatgtacaatttgaacggtactcctgcttgtggtgcttttaatacgggagccaaagacaaatactttctgatgagatcaaatgcttcctgttgttctgccccctaagtgaattcggcgtcattcttaagccgaaggataggggtgaaggcatcaatcttcccggctaggatagaaataaacctccgcaaataatttatcttgccgagaaacttctgcacctcgaccttataggttggaggtcccacattccgaatggatttgattcggtcagggtctatctctataccatgttcatgaatgataaatcctaaaaacttaccagtcgacactccaaaagcacatttacgtgggttcattttcagaccataccgacgcattttatcaaaagctttgcgtaaatcagctatatgagagctaaactcagccaatttaactacaatatcatcaatgtagacctccacagtgtttcccaatagctcgtgaaagatcaaattcatagccctttgataagtagcaccagcattctttagaccaaatgtcataacaacccactcaaataaaccaat

SEQ ID NO: 93850 - DNA, 622 bp, Zea Mays
cttggagcatattcaaaggccgaagatgaagccatgacaaatgccttcggggctcgtggcaaaaagagattaaatagagtgttcaatgttatcgggtttgtgtacccagactactgttatccgtcgcggaaacaagggaaaatgaggaaagctgctacctcggtgacttctagtgcgtcgagataaaaaaggttaaagttttgagacgttggcccaggcgcattgaaacgaccgacgtgacgaagctaattgagggggccactcctattgcagagccaagtcgctctgtgtcagtcgaagctaggacaaaaccggctgaagagccaaaactggagaaggcgacagagcagttaaaagcattgagtccaccatgcacaatggaactgcagaagccatcaagcatccccgcaacaactccaaggaaaagaagaatggccaacatgctagatgctgttatggaatctgtgaagacatcaactcctgcttctgttgaagcgcctagcacggagggtaaagtttcatagaaatctgacgaggccgacatggtgcaaactaccgccgaagctagaccttcggaaagcacaccgatgatcctagaaaaagagagcgcttctgaaaaatg

SEQ ID NO: 93851 - DNA, 561 bp, Zea Mays
gggctccgggctcgcgtgtcttgttcatacttcactgtcgctttgacggtcgttggaccagtctactggtctctacgcacgagtacgtttgttccgtccgtcttgagaggaggagggacccacatgaacgtactcgtccttttttttttctctcttctctcctaacgtgtggaaatagccgtcctcttgagctggtggctggtgctcgccgcagtcgcagccttgcaggaatctggatcattacaagaagagatgagcagcagtgcatcacggagttcaagagcatggaattttgtctctaggtttcttgaaggagcacgggcggtccgcccgagatccctcctaggcctagcacggaaaaactcgagcgcatcttctcgggcgcggacgacacagctgttttatttcattacatattcctccatcaccatgacacgacacgttcctcgttctcgacaagaaagaaaaaaaaaaggcgtcatggttccatccacctccacgattgacagatttctctcatatattttacgacgacttgctgtgcttttcacctgtcatgat

SEQ ID NO: 93852 - DNA, 501 bp, Zea Mays
ctttgatcctttggcaggtgtcacactcgaatatgtacttggcaatttccctcttcattctggtccaccagtataaggatctgatatcatggtacatcttgttgctgccagggtgcatggagaattttgaaaggtgagcttcatccaatatcttctttctgagctcaaggtccttgggaacaaccaatcaatctccaaaccatagaattcccttgctgtcctgacggaagcacttgtatttctctgccttctgcttgatcatttccttgataacctgaacacccttgtcttcaatctgtgccctgactatctactcttgtaatgtgggctccaccgagatatagttcgaagcacctgaagaaacaacttccaggtttagcttgcacaactcatcacacagggtggtaactcttgcatccatgttcatacaattgcactgggcctttctgctcaaggcatctgccacaacattggccttgccgggatggtaatgcacctcca

SEQ ID NO: 93853 - DNA, 386 bp, Zea Mays
ttcacaaagttctgaggttgtcttctctaactggttctgattacaatacctttccatctgctattcataccaagttaagtaaaatgttcaaaatctatgagaccaaatttggtgaagtgtgcttaagtgcatgtggtgaggcttgggatgaaatatatgatgatgatgaaactttttctgcttctctgggaaggggtgtaggtccctcggtccttctcagtctgaactctcttcataccttaacagctcttttactcctacacccttgtgagcgccacgccgccacacccaccggcttcaattcgcaggccggccactccaccctgcacagcacagctcttttactcgtacagccgtactgtacatacgtacacgtactacagcac

SEQ ID NO: 93854 - DNA, 612 bp, Zea Mays
agttttgtactgacatgggtggactgtccgcgcgactacagccagatggtttgtgcaccctagcggacggtctgcgcgcctgaagaggagatttttgaattccaaatcaccctaacctttcattcattgatttgaccaaattacccaacaaaaaagactcaaatgttaacatatattcataaagaggatcttaaccaatttcactaactgatttgatgaatccatggcccaattttagatcaaagacaaaaaaaactagcattcccaaacttgtgtaaattgaagaaaattcaatgagacttgaaataccgagaagaagacatgttgtgttcccaaacttgtgcaaaacttgttcccaaacagtctgcgcaaaaatccaagtcttcgtccacgctcaattgccaaaagagaactgttggagcttttggtgtgagagagataggctatgaactaaaagtgacctctgttctgactgtggtcgactataactgtcagtcgtggacggtccgtgggggactcttgaacggtccatggcttgatatcccagacagtctacaaaactaacccaagttgtctttgtcctggtagtcgagacagtccgtggttagggac

SEQ ID NO: 93855 - DNA, 684 bp, Zea Mays
ccgaggcctccaaggctcgaagatcgaggtgacattctccaagacggtgacacaagtagtcgtgtccgccgtaaactcgtttaggtgatcccaagcagctgcctccatgccctccacatgtttgtgtcggcgctcctttagggattgctccagatctgcgtggaaggagtcgaacgtcgtgtccctcgtcttcgcatggatggcggaaatggtgttggtggtcacctttcgctcaagcatgctccagtgattgtcctacgcttcaagtcaatcacaaagttgttggagaatcttggattgagacgtgatattcttcgactaggattcgagcttcttggattgcaccgccggggttgccgcgacgctgggatccgaagcccccgtcatcttcgttgtgcaagtgaaatgcatgggcaccgccaaacccaagatcgacagtctttgataccaattgttagcaccacgaggatactgaggcaagctggattcatgcaggagagaatggggagaggagtttgtatcgccgaatacgtgctttctatccacttccttcctaaccctctctgttcttgtctcccccatatacgattacaagtccatgatttacacgacccacttgaggcctgcgtagttaggattggcctcctagaacgtcgacccatcttcggttcaggttcaattcct

SEQ ID NO: 93856 - DNA, 403 bp, Zea Mays
caagattccaatggtacgagcataccaagaccaagaaagtacaaattgccaaaaagatagtgacttatcaatagaataggaaagggtctcaaaagacagtaagatcatggacatataaactgaaattttaaatagacagtagaggtacaagggtaagtgctttagattaagggataatggtattaaaaatgcaaggatacgagcatgtcaataacaaaatggaatagagatggtcaaatagtagaaatttaataatggatgaggaaagagtctcaaaagactaaaggctatggtagggggcatctacaaagatgtcgcaagcacaagatgagatcagatctaatagattgagagaagtatagaccatactagaataaaatactttttgtcaaggggcatatag

SEQ ID NO: 93857 - DNA, 337 bp, Zea Mays
ggatgaatataagttgtttgaaggggtaggagggtggacgaggtgaagaacggttttgattgaaaggtcagattaccaacctttgttgcttttcaggtccctggttgggcctatcacctccaattccctttgattttcctgggcctgcatgcttagcttgaactgccagtgttgtgctgacagccctgctgtaggagagatcaaggcaggtggccatctttcgttgtagccggtcattgaggcctcgcatgaagcagttcttcttatttaggtcagtattgacctggtcaattgcatactgggacaaatgattgaatttgtagagatactgcataac

SEQ ID NO: 93858 - DNA, 648 bp, Zea Mays
caacgacccagatcaacccgggacgccagcgaacctgtaagcgctattatccgttggattaaaatccgatggccaagatcctataaaccctgatctaaccaacaccgcatgatctgagatctatggctcccgctgcccgatatctcgctcccaatccacatcgttgattagccgatcgatggtcactggcccatccgcaccccagaccagagacggcgactacacaaggtaccaggcagcggcgagcacgcggtggagccatcgccgaccgtttctaaccatgatttcgagcgcggtgcttcagtctgaagggcgatactcgaaccggaatcaagaattatgctagcagcggaattcttaccgaaaatcatgtgcgcagaatctccgtccacgatgctctgtgatttggcggcaatgtcgatcgtcggtgaagaattccccaccagaccacgacgttccccgccaaattgagggttgtcatgtctttctagcgcgctcgtgaagctccctaaccaactcccggtcactatgtggcgtcacaggcatcagacggcgacggcggatttccccttccttccgcccccctctgaagcaccaattctcttccctggcaatggcgctctgctagttggcggggttgtagatgtg

SEQ ID NO: 93859 - DNA, 455 bp, Zea Mays
gaaattattagggataattgtcaccgtttgtttcctgtttttgtgtttcgatggtaggcgacgacgaagaagcaaggatccctacagacttcgatgaatgtgttagccgccaagatcttgaggcaaacaacaagctcttgaaggagcaaatggaggagacggtccacaagtcagtgcatgatgctttcattgacatgaaccttagcaagacttatgagaggctggatcgacaattgtcccagatcatcgacagacttgctgtgttggagacgcaacaacaagcaccgccaccaccacctcctcgtcctcgtcttatcgatgatgcaatgtttgatgaagaaggtaattatgatgaagcggccaccagagatttgcgcctacgtcaccgtcttcatcaaaacatagaaggtatgccacaccgcaagcaaggtaataacaattgtgctcttgacgac

SEQ ID NO: 93860 - DNA, 544 bp, Zea Mays
aaatagcagaggacctacgttcaccctttggtccgcgtccgtgcgcgcgccctctctcactcctggcgcaactggccgacgaccgccgccgccgtactcctggttctctggtgcccaggtctagcaacgtcagtcccttcgccaggtcttcgttggggccttcactggcgacgagcacccaccaggtatgggcaccccctcccttccattcctgctgctcgaaaccgagcacccgaaccctaacttaatgtatttgcgtatttgtatttcggatctcatctaagcacaactttatatatgtactaacttccatttttttcttgttgctaaagttattgggtgtacatctgtatgctcatgtcctttgctgggtccgctcctgatcctaccatattgatgttttctgaggtaatatgatttgaactccgacgaatgatactgttatgtgtgaacgtgcgcatttttcaaataaaatgaatgacattgagcagcttaacagtttgttttactgtctttactgtacgtctgtaccattgcactcgca

SEQ ID NO: 93861 - DNA, 540 bp, Zea Mays
tcggttgctgggaagcaattgctagatgaaatccatgccaggaagtgcggagtgcatgcggcttcaaggactctggtcgggaaggcttttagatctagtttctattggccaagagcgaaaagcgatgctgccgagttggtccaaaagtgtgaagcttgccaattcctatcaaagcaacagcacttacccgcacagcagctgcagaccattcccgtaacatggtcattcgcatgttgggggctggacatgatcggacctttcaagaaagcttagggaggctatactcatatactagttgccattgacaaattcacaaaatggatagagtacaagccaatcgcttctttgagctcagccaaagcagtagaattcatacaatacataatattcaggtttgggataccaaatagtatcatcaccgacctgggatccaacttcaccagctcagaattcttcgatttctgcgagcagcggaacatccaaattaagtatacatcagtcgcacatccaagagccaatggccaagtagaaagagccaac

SEQ ID NO: 93862 - DNA, 818 bp, Zea Mays
ctttccttcagcctttcaccaaacaacaacaacacaaatataagaaaaatctcataatcacaattcacaaataaacattaacagctcatagcagacttaaactaattcaaatagataatagactagttcatgacacacaacacactagtagcgcagtggagcaatataaatattacaaacttagattagttcaaacttcaaataaactgataaacataacatcaggtcaactgcagtcctgcaattcaccattacttcacatggacatagtcactggtgtttgaaatctcacagttgtcctcttcataatcaatatcctcatgcacattgtcttcatcttctttttcagattcccaatcttcttcgtccacctctctagccactcttgcgctcctgcgaggttgtagctcatcctctactcccattgcatctcctaggacagaccatggtatacctgtcccttgcatttctccctcatcctcatccctgatttgaactaatgcttgttcatcccctccctcaaagaaaaatccttgagcttctgaacaatcagaactcaagagcacctcatagttcttgtttcgggaaattctctctttcttggacaacattctattgttgaattggatgaagacaagattgttgaggcgttctgttgttaatctgttctttctcttagtatgagtctgcaaatatgctcacagatcacaatccttgtcataagtgtaaacaattgatactagaaagtcattttaagagttaaggagcaatctgacctgttcaaaaacgctccaagttctttcacaaccggatgagct

SEQ ID NO: 93863 - DNA, 333 bp, Zea Mays
ctttcttataacgatctcttaggaaatgaaaatgtagtgcttagttttggaatttagtactagatttttagcaacacttatgtcacgctatcacaaagaaaaggcactcggtgaaactctaagccaaagtctcacaaggtggctatcatctaaaataaatataagcaacagctagtgatagcaacatacttagcctttttgttaatttgggctacactacactagaccggttacaagaagccaatgaagacctccaaaattgatgtctcaaaagctgacttgttattcaaatgacaacacgtaaaatccacatcagaatacccacacaatgac

SEQ ID NO: 93864 - DNA, 311 bp, Zea Mays
cgagggttggttctccaccgagcggaggctcgtcgatctgcaaatgagcctatcacagattttactgccagcggagggtccgcccttctccaggacatccgattccaaaaccctacattgcgtattcatgatgctaggatcgatggtaatcggttctggacccttcagcatgttgatttttataactctgtgattcttcccaagaagcatcagcctattctgcatcagagatacatcaactgggaaggatgtgaagctattggagattcagagatgacacaggctttgagggcctgtgagaggaagaaaat

SEQ ID NO: 93865 - DNA, 343 bp, Zea Mays
tttttaactcttttggattcatttgtcttagatgaaattcatcttgatccagtcatatttttgcattttttgctctatacaatagctttgatctctctcgggttgacctcctttgctgttcagtcatgaatccgttggttggtttctcgcagtaaaattccttgtaataatccatgtgcgctttatttgactgctgccgtgcaatttgggctccatacgtttaccatccaactgctgccgtgcagcagttatttcttgtactgtaggttttgactgttaatgtaattggacggattaagattcaggagatgtttgccctatttgtctcaccgtcgtaacagat

SEQ ID NO: 93866 - DNA, 1322 bp, Zea Mays
gaattttccataaaggatgagcaaaataagaataacacgggataatcgtctattgatgtgcctccgtagtttcattgttggcattcttctgcttccgtggctttttagtctcattatcggcattctttcacttgcgtggcttgggcagttctttagatttcttaattcttttactccttccctttgaacgaacatcggttggaggatgtatgtcaactttctccgggattttgcaaccaatgaaagtctcatattcttcttgtggggcttgcatactggtaggaacaatttgactgaaagaagcctctaggttcataacacctgatactaagaaatccatgccttcatttgaactctttgctctttgaatcaaatcttcgaccttgtttcgcaccgccacgatctttttccttttttccacctctttagcatctttgggcttctcttccaataaattgccttcctcgtcaaccataatctctctaaaatcataatgaaaaagaatgacaaagctaacatactaactgattgaaaaagttgagtaaattatagtgatgagaacatacctcttgcatcttatctcccatctcttcaaaatataggctgaaggaagttcgtatagcctctcacctctcaatgttagaataatatgttggcacggaattcccatcatctcaaatagtttgcatgaacaacttgcaaatattgttgagctgctccaatgaacaaccctatctctcattgacccatcattaattataacaacttgcacaccctcttgttgcatgattgctacaataaagcaatggtctctagcagctatcacttcttgctaaaattttttgaacacaatatgtgtgtacaatatgcttccttgcttctccagaggccatggtgtactcaatagcggtgagctatgaatactaatattatcagcttttaactcttcatgtcgttggcattccaaggctgtatcgaatcggagccaaaactcaacaaaacttaactttcagtggataaattgattgaagaatgaattagaactttcagatcttgaggtggttctaaggagtctgcaaggggtatgtccataaagaatgctggaatccatgattcacgaattgcatacttattagctaaccattcattgccctgcagaccataagcaactatgatactattgcactacatctcaaattcttctcctgtttctgaaccccaaatacacttatttaaatcctcccaaaaatgacatgccaacagtaggcttcaatccctcattgcaatcaggtacaaatgatgtaatctacaaaatcaatcgt

SEQ ID NO: 93867 - DNA, 481 bp, Zea Mays
gccggagcaagacccaagccactacgacgtccaaggcttagcttagaatctagttccatagtatttaggtccactcacgcataagagacttgggagctcttcttcccactctcgcccgcttgtaacccctaatatgagcattgagcaacaaaggtgatggtagcatgagctagcatagactgaatgtagggacgttctacccgaatcagtataaatcttgcacctacctagcacaccatccagaacccagaacgcacagatacaaatttacttgtcgaagctaggttcgaaacaccaataaaaaccatatgagcccaatcattctccattattttgactagctcaatttgtctctacaaaacacatgatagtcacaataatcttgtgttgtcatcaatcatcaaaatccaactaggaaccatgatgcttttggtatagtcaacccagaccaaccaccaaacctagccaggttgggtctcca

SEQ ID NO: 93868 - DNA, 415 bp, Zea Mays
agaggatgttactattcatgctagccagattcgccagctgtttgaatttaccgagtcgtcgactcgccttcatagcttgtgctatggcacttctgatcctcctcgacgccctcacggcggagtcgctccagctacagctcacgtcgtggccctgttccgaccgcccttcacagatgggtcgcgatgctctccagcatatttcactctagcggccaagtacctatatcagctcatgagacggacgctactgccccggatgggttatagggaggctaccactcacatccagctctggctacttggtgccctgatctcctattcagagttcgatgtggttgatttccttatatgtgagatcgaggacacggtattggatggtcttcgtgcccggcgacagctatcgtatgctcattgt

SEQ ID NO: 93869 - DNA, 963 bp, Zea Mays
aagaattcttgcaccagatccctagtaccaatgtgctccgcaataactcaaaattcgcccagtgcaacttggcatggactcctcggtttcatgtcgcaccggggcctagtctcttcgaaaattaattctaatgggctttgaaccagcttctcctttttctcatcaactttgacataaaaccattcagtcttccagccagctggccatttggtatgatagctgaatactggagacttcgcatctttgcgataagcaaaattgtagcagtcgaagttctcgtgtagcccatcttctctagcttttgtctgataatgaagctcatgtgcccggcagaagccttcggcaagcggttttgcccctggcttcggagagcctagatgtagacgctaagcctaacgatggcgttaggagttagctgatgaagataaatcccaaacttctccaaaacatctgcaatcaactcattcaaaggaaatcttaatcctgctttaaagaagcttttaaagactaccacctcatccttttctggcgtcggagtaatttcctctccgccaaagcgaatcagcttctttttggcttcactgaaatagcctaacttcatcaacttagccatatcatcttcggtaacagtggacctcccaaactccaggtggctaggtttagatggcagggcactgtaatcatcttcagattcaccttcctcagcaccaacctgctcagcttcagtggcaggtgcacattcgtcagaaacatcctccggaactactagccccgaccgtttcatcacttcggaaatcggagcggtttcagcagcttcggcttcttctccgtcacgtgtaaccctggcagtggagcgtacccttgccatttaatgatgaattcctcacaatttttgatgaagttcttgactttttaaattttcctgaagctcttcctcttgttacgaaggaaaaccaacagcgg

SEQ ID NO: 93870 - DNA, 530 bp, Zea Mays
tcctgactcatgccaatcgcttggctggtaaggcagagtggtcgccctaagatgagtaggcgtgagcatgttgcaccgtcttaagtcatcgccgactttagccgattgctctgttagtagggtatagttgtcaccctaagttgagtaagcgcgagcatgttgcaccgtcttaagtcgtcgtcgacttaagccgattgctctatcagtagggtatagtggtcaccctaagttgagtaagcacgagcatgttgcaccgtcttaagtcgttgccgacttgagctgattgctccgttagtagggtatagtggtcaccctaagttgagtaagtgcgagcatgttgcaccgtcttaagtcatcaccgacttaagccgattgctccgttagtagggtatagtggtcaccctaagttgagtaagcgtgagcatgttgcaccgtcttaagtcgttgccgacttaaggcgattgctctgttagtagggtatagtggtcaccctaagtcgagtaagcatgagcatgttgcaccgtcttaag

SEQ ID NO: 93871 - DNA, 736 bp, Zea Mays
ggaccaaccaagtactggaggatatgttaagagcttgtgctcttaaacatggtggtagttgggataagagtttaccctatgcggagttctcctacaataatagctaccaggacagtttgaagatgtctccgtttgaggctttatatggcagaaagtgcaggactgcactatattgggatcaaactggtgaaaggcagttctttggacctgagattatacaagaggcagaggaacaagtccatcaaataagggagaatttgagaactgcacagtcaaggcagaaaagctattctgatactcggagaaggctgctagagttcaaggagggtgatcatgtctatttgaaggtgtcaccactccggggtatgcggagatttaaagtaaaaggaaagttgtcccctcgcttttttggacccttcttgatcttaaagcgagtgggagaggttgcatatcaactggaattacgtgatcatcttgcggatgtgcatgatgtcttccatgtatctcagctaaagaagtgtctcagggtacctgaagagcagctaccactggaggatcttagtgttcaagatgatctgacttatgttgagtaccctatcaagattcttgatacactgactcgtgtcacgagaaataaggttataaagatgtgcaaagtgcaatggagtcaccatggagaagatgaagcaacttgggagagagaagaagagcttcgcatagattttccccatctttt

SEQ ID NO: 93872 - DNA, 389 bp, Zea Mays
atcctgtcaaggccaatgttgtggcagatgccttaagtcgaaaggcccagtgtaactgtgtgagtatggatgcaaaaatcaccaccctgtgtgatgagttgtgcaagatgaacatagaagttgtttcctccggtgctttaagttatatttcagtggagcccaccctacatgagcaaatagtcatggcacagattggtgacaagggtgttcaagtcattaaggaaatgatcaaacaaaaggtggacaaatacaaatgcttccgtcaggacagcaaaggaattctatggtttggagaccgattggttgttcccaagaaccccgagcttagaaggaaaatattggatgaagctcacctttccaaattctccatgcatcccggcagtaacaag

SEQ ID NO: 93873 - DNA, 350 bp, Zea Mays
tggagatgcgccggattggagaagatctcgaagagtactgcacatgtgtaccggtcgtgcgcatgtcccgcagaggaatcacttgagctttgaagatgtgtctcgtgctgatcgaacaccgaaggactcagaaggtaacctggagaaagcaaatgaatatcgtaggactcggtccgcaagtagcagaggaaggtagactcagatagactcaatgaacagggatatctcttcagtcgactatataaggctgaagagccctacaaaaaatggagacttcattggatcgataggcaactccatcttccaccttccacaatcacctttaatccgcaaactcagagcaatccaac

SEQ ID NO: 93874 - DNA, 730 bp, Zea Mays
ctctacctcacggaagaagagtggaatgcccgacgcaagaaggaagtcgggcaccaccctgacagcagttccggtggaggatcagggcaccgtggtggagggtatcgtggccgaggagggcgctcaccaggtgggccaccgtctagaaaggccaccagtgatgagtgtagaaggtgtggtaagatgggacactgggcgcgcgagtgtccatcaaagcacaagaaggagcaagcacatgctgtccaagaagaagaggaggctacacttcttgtcgcaagaacgttcccggtaaaatcctccttagaacttcaatcatgctgcaagatgtctggttctcatctagagatcagggagaaggtgtttctgcagcgtgaagaagaggagaaactggaggagggaacctggatcttggacactggagccacaaaccatatgtctggatccagggctgtattcactaatcttgacacaaaagtgctgggcactgtccgatttggtgacaatttggtggctcggattgagggacgaggaaccatcaagttcatgtgcaagaatggcgagacccggtcatttgttggcgcttatttcattccccgattgacaacgaacatcattagtattaggcaacttgatgaagcgaagtacaagatccatgttgatgatggggtgatgcatattcaggaacctgatggaagattactggcaagaatagtgcgggttgaaaacaggc

SEQ ID NO: 93875 - DNA, 443 bp, Zea Mays
attggaccacctcaccaatcggaaaaaatggaaggtcatactgtccaattaagacctaacatacctacatggacacctccactcccatatccacctatgcgatatccatacgcatacatacctccaccatatgccccaaatcaaatgtggggcatgccaccatacccatttgggatgccacagtaccccgcttggggggcaccccaaacatttgtatttgacaggatggcaccaccagtataagacagattgagtgctgctcaatccggtcaccagacgcaggcccaacaagattgccggactactcggcctcaaagatcgaccaatccaacagggggcatatgcctgcagcaactgaaagaacgataaaaaaggacataatcaaaataggtacaacagatgtcgtcatacagaaagaaagtgaagggccgatgatttttggt

SEQ ID NO: 93876 - DNA, 419 bp, Zea Mays
gtggtaaaaatgcgctcatttgactgtaacatcatacattgcatttaatatgatgaacagaagatttacattgtctttcccacaccatgtggccatcctaatcaaaggagcttgtggcacccaggtcataccaccctaaggccttcctaccactaggggtccaaaggaatgtctgggagggtcctttttatgggtcctatcctataaggaggcctagacataatgagctacatgcttagtccctagccttaaagactctagaggcctaggatttggcttttcgacctacagagccatagaggcctcaaggaccttgggatttggcctcctagcctagagagcctcaaaagtctagagggccacagaatatggcccatggcttggagggcctcagacatagccataatagggcatgggtc

SEQ ID NO: 93877 - DNA, 765 bp, Zea Mays
ttgctctacccctaagactcatgcatttcatacatccttgcacattcatagtatgttttgagtgcacgtgtagtttagaagagtaatgagtgcatgtgccaacaagaagagaaatattcacataaataaaaggatgtgcattcatttgagagattgcatttatacatgaggaattgtatttgagcttgttttttgccttcatctgcttttgcaagttgtgttgagcctttacctcttttatagggactagtagtgttttagaagtttctattgttgctctaatttttagctagtggtgtagagccttttctacctcttcttgaggactacctattttgcttagttgtgcgagccattgcccatgtctttagggatcaagctttgttcatttcaaatgaccatgttttagcaatccacaagcttctggtcatttgtgtgaattttgatttttttatttgctcttgtttcctctctttgtttttggtgttgataatgcactcgttaagggggagattgtgaatatgtggttgtatgtgcacgtggtgttcaagtgtgataagtgattgtcataagatgatcagctttggttgagttttgaggctaaccatggtgcgagtgtgatgttgtttaacatgtcacttggcttatggtgtgcaagtgtagagcacagaggctatggtcgatgccaaaggtgaaagtcaaatgggttcatgctgatggactagaagcgatgaaggacgtatgtcgaggtatggactcaggaac

SEQ ID NO: 93878 - DNA, 490 bp, Zea Mays
gccagatgtaacctttctttgacagctcatcaatctgcttcttatgttcaaccaactctggtcctgatactctgtaagctctcttaaagatgggggcggttccaggaagaagctctatagcaaactcaaccttccgctctggcggcatacctggtaaatcctttggaaacacgactgggaactcggacacaaccttgatactctcgattgggtctgcttcactgctatcaacagccatctgataacaacttcctttctttggctcaggcgggactaactcggtcaccacttcctctcctagtggggacaccaacttgattgtcctcttatcataactgataattgcctgatacttatctagccaattcatccctaggatgacatctattccctgagtacccattactatgaggttagcgggaaacactatcccccttatttccacacttacattcaaacaaatgctatcggctcgaattctaccaccggc

SEQ ID NO: 93879 - DNA, 533 bp, Zea Mays
cagatttgatatatggaaccaaggaatcgtatatatatcgaacaaattaaactaaagctagatcgatctcattcaggagggatgcaggacgcagctgcaactgtatgcaagcgtacgtactaagctagctagctggtatcgcatatccttgtgccacttactggcatcgtatcggtacgtacgtagttttaactgaatcaggctcctgcaaagaccatatcgtttgccaatcacttgctcttaaggtttttatcttaaggtttttatcttaagcgtacgtagttatgacaagatgatttttatcttaaggtttgatggtttgccaatcacttgctctttgttgaggcaaagccaagattgatgctgatcctctttttaatgatgatttgcaagcctactctctgttaaaaggagggaccgtacaggagctctagcacttgatgtggttcagatgaaccacttgacacttttcacatttcagttctactagagtcgctcttctcaaaagtgacctcccgtgggatgggcacaac

SEQ ID NO: 93880 - DNA, 601 bp, Zea Mays
cggacctgaggacggctggccacgtcgagatgcctcacatcggcgactttggccgatttggggggaatacaaaattcgggcgctacagttgctaatcgggggtgaggagcggtgctctgggttcgtaacaaactagcggagcacactgaacactcaatttatagagaccactcgagggtttcgtgaacttgagatgggatgaacttgcagtcggagcaaaggtgagtcaccggagcacagcaacaatgcgcccaacgaggtaaagaccctggcggtaaacgggatgtccactacgacgtcttgcaacacgataacaagcataagtacgtggcatggctacaaagggcggtgaactccggcgagaacatttcgaccgatcgcgcggcaagtgacgcggtgaacagtctggggataaggctccaactcttccccgcgttgagatcttttacctcacacatttatcacaacgccagcgtggatagcggcgtgggttcaccggtggcgagatgcactgaatctgaagatcttttcactactgtaccatcaggatcttcttcagttgttctggcaaagcattttcacaggcgtttttcttcaattt

SEQ ID NO: 93881 - DNA, 498 bp, Zea Mays
aaggatggaaggaaggattcagaccacaatgggaaggtctgtacaagaaacgtgatcgatacaaggaagaaatggcgaattattttaaggaggaggccaagaaagagttcaaaggcctgatgtctgaaatgctatcgaatcctcctctagaattgatgcagcaattggcgatggcgagtgcgatgtctgttcaacagatgaccactccacagatgcaaataattccagcagctcaaccgccggcttccaccgagggtacgaccatcctaagctctatcgtgtcaacgggaaaaaaggtctgctatccagttgatgacatcacaaggcctgtggcatgcacactagttataagatatggtattaacaatcagcgtacaaagaaagtagccataggccttgcgatcccaggacacaagttccatggaaacgacattccagaagaatattgcagggtagaagtgacgacagtcgtccaaggatccgaggacgacatgctag

SEQ ID NO: 93882 - DNA, 327 bp, Zea Mays
gaactaactcaaggtggaagatctgccagtgagtatgtgcacaaattcacagaattggctcgctatgcgcctgacgatgtcagcacagaagccaagaagatggcccgtttcttgaaagggctaagaccagaactcaagactatccttgccagccaagatttcctcagcttctcacacctctcaaacaaggccatacaagtggaaagagctagagaagaagaaaagggtcacctcaagagaaagttccaggtcctccgagcttagcagcaggacaggcaccagagaattcgaccctttgggtttccacccaagggaccaagcttcaac

SEQ ID NO: 93883 - DNA, 399 bp, Zea Mays
gtaaactctcttggttgcttctattttgcttcccttgcttcaatgcttagagtttctcttgcttgcaggaggaaaaacgagcacttgttgcttctcgtgacaatctggacaggtttatactgtgatgctagcacttccttgaccattctagagaggagtcaccattttaccatgtcagatttggaccatcatcgcgacgaactgagggcatcccaggatgaagtgtcccgacccggtgagctgttgtctaccaaagattctgtcatcaaggagctacgcgcttccaagaggcttgttactcaggagttggaggccgctcacctccatatcaaggccttggaggatgaccgcgtcgttatgaaggcgatgtgcgacaaggccatggacaaggctgttcac

SEQ ID NO: 93884 - DNA, 368 bp, Zea Mays
gcttggttaattagtatcccaaacaagtaggttgtagataaggacaaaaaaagaacctttgtgaccactactacttggttaatccttctagctaggtccaccacgaaagaagctgcaaacgcccacttttggtcattctcaatgaccctctctctcttgctattgtttatacttaatttaatgaaggagcaggtgaagctagctttcacgttttacagatccagtttgttggttcattggacgtacgatgcctgtagtgatgtagatgtagtgcaaccttttcttattggtcgggctgtgcaacttctcgctgtgtgtatttgcgtctgctgccgccaatgcctgtagtgatgtatttgtgtattctc

SEQ ID NO: 93885 - DNA, 348 bp, Zea Mays
caggtcccattctccggcttcatggtgtcatcacatgttttggtgtctgttcctccgtcatcgtgcatcatgctggggaggttctttcccaacacgatgggttcgtcgtcagagatgggtgatgactccaatatcccctgaatgaagaggatgtcggggaagaaagtagtaggtgcaacagcgtgcttcttctcgtcctcctttgagggcggaggtatcgaggtgatcgcccgctgcgcttttccatcccggttcggaatgttcatcttccttcgccgggtgatctatgtccactccttagtaggtgaggtggacaaaggagttcatcgggttggggaggtcgtggtt

SEQ ID NO: 93886 - DNA, 373 bp, Zea Mays
tgtcgcttccacgtttcggttccccatagggtagtggtgctcgtcagcacggtcgtttcacctctactactgtagaactttgggaacaatgtgacaccgctggtgaatgccatctggatcagcctcagcgttgcagtcttattcctaggtcgatcccgatcttgtttgggggtcaatttacttcgtggcgagtccctgatgctatccgtgttttttatacgagctctactgcatcgtcatgtgctgtcgttgtctcgccggaccatcgcgccatcgtggttgtggccatctatcctcggagctctgagcctctagtttgacctcacgactctatgcacaccacattgaggagcatatggatggttttcccttt

SEQ ID NO: 93887 - DNA, 374 bp, Zea Mays
gtaggggcgggtgtatggccgttggattaggattgtgtggatcagggcgcatgccagtagggtgatgtggtcttctgatctgaaccgtagatctagatccgagggccacggatggatatcggcttcattaaatccttacccttgatcttagatccagtggccgtaatcgcatacctcttcatttattggcgatctgatccggaccgtcagatctggatcgtgcggccctagatccccgatacccattcgccgtgtacatttattaaagagtccctctgttttcggaaaaccaacccgcggtcctcgggaactattctctgtgtctggagattcttaccccgagccccctgtgcttcacagaaattgaggcccag

SEQ ID NO: 93888 - DNA, 1130 bp, Zea Mays
cgagaggttcgtcgcggcaatggagcgcctgggccttcccagctttgccgcctctgaccatgacagggtacggtattctcccgtggaccaccaactacttccgttcagcagcagtttttccatatataacaggggccgaaaaatttcggttgggtttagctatgacttgagacttaaagagagagtatgatagtacagtagtaacattttggaaaatcgtctgttaattcagggtggacagggatattacacgtgattgcagcgtgttacagtttcaaatcgaagaagctcggactctgctttcgctgtaggtggttgatgcttgccattgttcagtttgacgattggcaacgttaacctcgatattttctgctttaactgctactggatgctggatgcagctgatgctaacatccaagtctcaatctcaaccagaattttttttccgccaaacatatgagatgtgactccactactcgactaacatataatacaatgcatgccattgctgtccaaatggtttgcatgcactgtacgttccaatgtttgatacattttcctttaataatttcaattgaacccaattcatggtaacaaaattaatgttaactcggtagcttgtggaaattacttcaattatgtcttttttaaatatctgaatatgagcatcagccacgttccagtgtgatgtcacattcaagtattatgatgatgttctggttattaaatttataatatctgaatatggacgtcagccatgttccactgtagtgccaaattcgagtagtatggaggtgttgatgttctgacaataattgtcacttatgcaatactaccgtggaacattcctggtgtctgcagctctttctacaatagaaaaaattatctacctgatcttatttggctggcattgatccagggcccaatgttagctgtcatagtctgtcttcttgcactgaggggtctgtttggttccaatgttggggaaggcttgcattgtagccttgaagcaaaaagtaggatgcacaacatggagtttcccataagggtgaacggctgctgtactcaaaattgtcagtctagagaaaagggtgaagggagcataccaaaggtctccagaagtccagcta

SEQ ID NO: 93889 - DNA, 755 bp, Zea Mays
ttgaacactgaggtcctccagtgatagctgctcctcaggtaccctgaggcacttctttagctgagacacatgaaatacatcatgtacatctgacagatgatcgggtaacttcagttgatatgcaacttctcccactcgctttaagatcaagaaaggtccaatgaagcgaggggacaactttcctttaactttaaatctcctcataccccggagtggtgacaccttcaaatagacatgatcaccctccctaaactccagtagtcttctcctattatcagcatagctcttttgcctggattgtgcaaccctcaaattttctcttatcattcgaacttgttcttctgcctcttgaataagctcaggcccgaagaactgtctttctccggtttgatcccaatacagtggtgtcctgcactttctgccatacagagcctcaaatggtgacatcttcaaactggcctggtagctattattataagagaactcagcatagggtaagctcttctcccaactgccaccatgcttaagagcataagctcttaacatgtcttctagcacttgattagtcctctctgtctgtccatcagtctggggatggtaggctgaactaaaattcaactttgtatctaagctctcatgcaacttcttccaaaatcgagaagtaaactgcgatcctcgatcagacacgatcttcttaggcactccatgtaggcaaactatccgagtcatatacaattctgctagcttggctcccg

SEQ ID NO: 93890 - DNA, 353 bp, Zea Mays
caaagaacaagaatgtctgcctatttaatctttgtttttctcgtttttctcgatcgtcgaaggcgacagccatcaattgatcttcgttcataatgaagttaccaagaatttcattacacattacttcaatgctttctagccaatcttcacataggcgcttggacacgagatggtttttgaaccaataatgcagtctaacaagggtccccttttcaacttcctctttagccttcggcattctccaaccagataacattgggaatacttgattagcaaggaactcttgcaccaaatcacggatgctgatatgctccaccattgtattaaaagcaacatgcactatctgcgatggc

SEQ ID NO: 93891 - DNA, 319 bp, Zea Mays
cttgggaacattggttcccaaatgttctcctccagagcacggcatctcatgattctgaccattgtccgctccttccgggcctcacatggaacaaacaggggaagaaacgctttcattttgaggcgttttggccaaaattggaaggtttccatgaggttgtccaagcagcttgggattcagtgcaaaatatcatatgtccatttcaaactctagacagaaagctaggggcgacagcaaggaaacttcaaagctggagtaataaacaggtgggccacgtaagaattcagcttgctttggcaaaagaactactgcatagact

SEQ ID NO: 93892 - DNA, 504 bp, Zea Mays
ggcattaacaacagtcagtgcggttcaaccactttggatccaagaagttacaaattcctatgtgactgatcctgctgctcaatctctccgggctcgactatgtgtccataatccagatgaacatggttattctttatctcaaggggtgatcaggaaaggaggtctgatttgggtgggtcagaattatgcccttcgcactaaattagtggcagcggttcatgacagcgcagctgggggtcattccgggatgcatgtcacttatcatcgactcaagaagttgtttgtttggaagggaatggaatatgatgtggatgattttgtgaaacaatgccaaatctgccagcaggccaaaggcgaaagagtacaccccgctggtttgctgcacccccttcccattcctcaaggtgcctggcaggatattactatggattttatcgagaagttaccaaaatctagtgggtatgatactatcctggttgtggttgatcgtttcacgaagtatgc

SEQ ID NO: 93893 - DNA, 466 bp, Zea Mays
ggttagttttgaactaatcatttatttcgaccaagtttgtgtttgaagttgtgttttacaagcatcacatattcaccccctctaggtgctctcaaatcttaatgcaatgcttacctagggttgtgcctgtggaaactcaattgttaatgaaagctgatgtaatttatggttgtgaatgaaaaacatctatctgaatttgacttgtgtctgcaaaaacatttagatactattttgtggtgtccccttttatttccccttgtcccactgggatgagattacattcatgtatgtctaatcaccttgcaggttttcatgtacctttctgataattttaccaaaggaagatcatatttggtgatatcatgagccctttcttggagatatttcacggcttctttgatgatgacgatgggaactcatctcttcgaataatatggacaggagtttcatgataaatgggcatttg

SEQ ID NO: 93894 - DNA, 430 bp, Zea Mays
gtggcactggcaccgacaccggcggcgacaacagcagcggcggcggctgcatcccatctgagagggctgctttgctgtccttcaagaagggcatcacgagcgacaacaccagtcgcctgggctcatggcacggccaagattgctgccggtggagaggtgtcacctgcagcaacctcaccggcaacgtcctcatgctccatcttgcctacccgatgaatccagatgatgacttgtactacacagatgtatgcgacgattacacaactttgtttggtgagataagtcgctctctactctttctgagacatctagagcacatggacctaagctggaactgcttgataggcccaaaggggcgtatgccttcattcctgggctccatgaagaacttgagatacctcaatctctctggagtaccattcaaaggtag

SEQ ID NO: 93895 - DNA, 596 bp, Zea Mays
gaagcatgaagaagaggaggcagctgtgcgtgagctgccgtgcgcaaggaagaggagggaccgagcgacagtgggtgcgcgattgcaagggagaagaggcagtggacggcggcgggttcgagaggggagacaattgccattatgaaacaaaagagatgcggtttcgacgaaatggaggtgttggggatgacttatatgttttggagacgcacccatcatacctactccaaaatggacaagtgataggcatttagggctgcgcaaacagaaaccagggttcctttcaccattaccgtcgccgtgctcagacgccgtctgtcgtcgtcttctccccttcgcggctaagcggattggatagttgtcgcggctgagtcttctccccttcgcttggacagttctcggtgcttggagatctcgcggcggtgagttctcgtcgcccttcttacccatccatctctctcccttctgttcttcctctgactggcactggatttgcgtttaggctttgtctgagttcggttcgatggatttagatccacccgaaatctctgcagtatgcatcactcgtatgaactcccccgatctacaccctgtgc

SEQ ID NO: 93896 - DNA, 348 bp, Zea Mays
accaaattgagcaacctgcaatgagcatatcaagttaccatccaccaaaacagaatagggtctccaaataaaatcgtagaggacaccattgatctatgaatgccttgttccacagtaaaattaagatcaagctagtgtctaaagcggttagagtaagttttcataaaaagtatgacattaactgcaatgctcaaaatcatgttatattattttaaggctcaccaaaagggcatgtgtaatacaaaactaaacagaagacaacagtaataaggatagcttaaatgtgaatgtagcattgaattgacaatggattaacaggcgacgaagacatgatactgatctcacgat

SEQ ID NO: 93897 - DNA, 431 bp, Zea Mays
tcgttttggtgctgcttataagtcttttgtgttttagatccatcgaagatggcgcttaatctcgagagctagggagatgaaatgccttttgtacatgatggaaggaaacaaattacgtacatgtatatgtggatcgaattgactgttgcattctgcctgtatttaagcaacggtttccacccaaaacgtctataatttggtccttcctagatgtgtcaaatgtgtttactgcactgcgtttgcttttgtggcagcgccctaatagttgtttataaagtctgatgttaacaaactattgtcatgctatgtaatatatagtcttaacatgttggtttgttgagtgttcgaatatcagttttatattattatgtcaggtgttattagtgttcaattttttaagttcttgttgtacatcctatcattacatgaga

SEQ ID NO: 93898 - DNA, 503 bp, Zea Mays
cgcgaggagacagttctcttcgagaaatgatccgatatacgcggcgcttcaaaggaagtctggaagtgtgcgatggacgacggtgacggttgatggatgatcgaacggctatgaagttttccgacgacgtggatggcctagccggcgccgtttcggtcctgctttcataataaggaaattactgatatgaattttattcaatagtatcttcttgatgtattaaataaccaaattattaaacctttcttgatatattatgaacctcaaataattctccatcaacttcaactttggaaagcttttttaaactggaaaaagtttaccaccccaaccatcccaggtagcccataaataagcccaacactctagctaacccattaaaattaagttaccactccccacacctctcaacaacttattcctccccttctctccatagtccctagctgctaggctccttttctcatcaccgtcaccactcagctcgcctcgtggccactctg

SEQ ID NO: 93899 - DNA, 600 bp, Zea Mays
ggaagctggtgtggtggaggtagtagacgcaacaggtgtgatggaaggctcaagagtggtaggagctggcgtagtggaaggtggagtggtaactgggcctgagggagcggatcgaatagggatggagtgagcccgagacgagaggcgacggactcagaaagcaatttggtcggaggtgatcatcagctgacctccctgctctgcctgatctgctgttgttgctgcggcaactgctgcatgggtggctctatccaaccgtctctttttcttgcccccttgctgctcaaggtaaactgtcttgcccttatactatctgaagtggcgaggagggtcctagtcatctcctccccctgacggtgtgacattctttgtccgcaccatcctgcactgactactgacacgctgcatgataatgataaaaggtaagcgagagtagtagagtagtaggtaagtaaatatttagaatggaatagctaccttggtacgtctcgagagagaagaaccagacaggacaggagtcatgcaggcgggcaaggaggcacactaaaatgacagaagatgtgagcacatattagtcacatagtcataagtatatggaat

SEQ ID NO: 93900 - DNA, 1339 bp, Zea Mays
aacagtatgggtcatgtttgcatcactgcatatggaggaaaacgcagcgtgatggtttcaggtgtatacgcttcggaatggattgagttcctgggaagattttgcacaggcggtgttgcagaaatttgggatgggagattattttcaagccatggataatctgttggagttgcgtcagaaagggacagtggatgaatacctaaaggagttcgaggtgattaggtatgcggcagctatccacaacccacagttggacgagaccatgttcgtcgcacatttcatcaagggtttgaagcaagaattacaagggcgtgtgcagtctcatgttccagctacggtggatagagcagcgtttctggcgcggattcaacaaaatgttttggaaaagcaaagacagaagtatctgaagtttggagggcagggtaaaatcaataactctgctgttcggcaagaaaataaggcagttctggcgggtcaagatctgtccaaggagaaactggtcagagagtaccgaagacagaacgggttgtgttttacttgcggggacaaattcgagccggggcatcaaaacaaatgtcctaagaaggtacaaatgcagttgaatgttctgtcaactgatgaactaaagatgactttgacagacaaagtgctggacagattggagcaggaggagctagtagcagaggagtgtttcaagttgtcgttgcatgcgatcagtggcactacggctgaagattgtatgggggtcagggcactgttgcagaaccaagtgttactgatactagtggactcaggaagtttggctagtttcattagccagactatggtggatcgagtaggattacccacacaacagtgtgcattggcgaaggttaaagtggcaaatggggagatcttgaaaagtgacagagtggtaaaatcgatggaatggtgggctaatggccacacctatagaaatgacatgagggtgctggagttaggagcttatgatgcaatattgggatatgattggttaagaagacatagtcctatgcaatgtgattgggaagggaagatcataagctttgaggataatggggaggaggttcagttgatgggaactgctggtcagcagggagaggtgttgggaatttctacggtgcaattggagaagatgataaagggtaatgatatttgggcttttgtagtattggagacagtcacagaagtggagcagttcaatgaaggagaattacagtttttactggaggaatataaagatgtgtttgatgctccaacatctttgcctccatcaagaccattcgatcatcatattcaactacttccagatgctataccg

SEQ ID NO: 93901 - DNA, 379 bp, Zea Mays
gttatcaagtcgtatgactaatcacgatttgcaggttgatcgctgccatggcaatcaactatgcactatgattagtcaggctggtcggtctcatggtcactagaatcgatttagatgatttgataacattggtttttactcacgattagctgggctgatcgctgccatggcgatgagctatgaactatgattagtcatgattaattgtgatgtcatgattagtcttggactgactgacgtcatcagtgactaggaatgattagacgattcgataacattggtttttagtatggccaaagttcattcttagtttaaccttcccctcactttatgtgaatttgacgtgcgcttttatcactgaattgagcttctgtttttt

SEQ ID NO: 93902 - DNA, 457 bp, Zea Mays
ggatctaatgcccaaataggtaaacaagacttctaatcctggccatctaccaaggatcccacggtgtggcaatcatccatcgaccgaccgccccaagcggcagcatagacgccctggcaccatggccggagcacgacctatcctcgctcccgagtccaaatcttgagcctagctggtggtatagggagagaatggtaagtctaacgatgtggtggattcctcacctcaggtccgggcgaagatgatccggtcaacgcgacacagcggctccatgatgcatggtggcccgacggcgatgcccaagcaccggtgtggaatccctgggcctagctgctcccaaggcgtcaatccagccacggtgtcgaagcccggccatgccccaatctgcggggacactacgaggatcgctacaccccactatgcttgctctctcgtggctcagctcaagtctaacgat

SEQ ID NO: 93903 - DNA, 280 bp, Zea Mays
cataatgtgttccacgtatctcaactgaagaagtgtctccgtgtttccgaggaacagttaccaatggaagagctcagtgttcaaggtgatttgacttacacggagtacccgatcaagattttggatacattgactcgagttacaagaaataaggtgataaagatgtgtaaagttcaatggagtcaccacagtgaagatgaagcaacttgggaaagagaagaagagcttcgcatagactttccccaccttttccctcgttcttcttaaatctcggggacga

SEQ ID NO: 93904 - DNA, 342 bp, Zea Mays
gaaaaagatacgacgaagtttctgcttgatactagtcagtgtcttgataagattgtaatcgatcggtgcttgatttaattgaaatttagtgcttaagttatcgtagattttagtcagtgacttgatgttatggtaattctgcttgatactagtgacgggcttgtattggttggtgcttgctgcaagatactatccataatcctatcgctccgacattgcaaattatgatttaaaccactgtcgattttcttgtttagtcgaaactgagagttgagacagatactctctcgtctccctcgtctgctcacaagcggccgagatccaactataggcggctgagat

SEQ ID NO: 93905 - DNA, 351 bp, Zea Mays
tgaaagcctgagagtattcttctaccccatgctattgtttcacattgactaacgctctcatggcatgagggtactcttccaccccaaacttctccgtcaccgcatgggtgaactgctcctagtctcccaaaccatgttttagtttatacacctgcagccacttcgacgcatttccctccatgtgcatcgaggcagtgcttgcccagatccactcgggcacctaataaactgtgaaatattccattgcagttggtttggaaacgaccacttcggtagagaactgggcctgaactcccttccttcaccccattgctccctccgttctctacctccttccctgccaaatcctca

SEQ ID NO: 93906 - DNA, 345 bp, Zea Mays
taataagcatacttatctccaccactttgcttatctcgtaatggtgtgaccgacataatctattctaaaataaaataagcagatcttctctagattaatctggtcatgcctagaccccattcaacctaaactgatccaaaaatttatttaggtcttatttagtcaaatctagttatgctaaagtaatctagtttccatctaatctgaactaacccaatgtgacccactcaaacatgttagttaatacttgtaacatggattagaccctatctatgctttaaaggcatcttctatcctacataataaagtggacatacatatatacacccatgctttcctaaccac

SEQ ID NO: 93907 - DNA, 487 bp, Zea Mays
cgcaaggtgaggtccccgaccatggacggcggagcagtggctccagcaaacctgtaccggccaggatacgcaatgactggtgctctagagcaattgacacctaattcgacccctaataactatttcccctccattaattgcgctaatccgggtcagaatctctctgtccacgatgacggcggaaaccgagaacaatttgacgtgttcttggcgatcgagggcagtctagttcaattaaacaggtctacgagtagcaggggacttaatgaaggctagaacatcaagcaaggatgcttgaactaacctgtaggcgtctggccacgacgaggtgttcacgggtgcggaaaactgatttgggggaagaaagaaattggagctctctggtggctaatcggaggcagtagcggatgctttggcttcgtgatgacttaatggagctaggggtgtgctcaatttatagtatcccagagcggtggctcccaatttg

SEQ ID NO: 93908 - DNA, 304 bp, Zea Mays
tctggactttttagaactggtggcctcatgaaagagaagatgacatgatcaaactaagactgttgatccataatagttcatttgattgttatgaatttagatgatctgtatgttcaacgttatttgtagtgtgcaaagagccaattttattcattctattgtcttttgtagtgttgtagttgtatagttggaaaaatagatgattttactaaaggataatctaggaggtggatataactttattcgatgagaatttagtcatcctttcgtagtatatttaattttgtgatagtatctaaatata

SEQ ID NO: 93909 - DNA, 317 bp, Zea Mays
tggcctttaaacatgaaagaataatgatttgaatgaccatgatgtaaactatcagtatcatattgccaaggtcgacccaataacaaagagcatgcttccataggaataacatcacaatcagcataatcagaataagaacccagcgaaaaggggacacataccgaacgtgttaccaccatcattaagccattgaatgtgatacggatatgggtgtgcgcgagtgggcaaggataatttctctaccaaagctgtacttgccaaattgttgcaactgccactatcgatgatgatgtgaatcgaccgttcgtgcacaacac

SEQ ID NO: 93910 - DNA, 456 bp, Zea Mays
tgcgaacatagaatggtaggaggcagcccgggaacttcttcgacgtcgttcatcgccacgtaaaacaaaaaatctcaccaattcccccacttgttcttcgcgcatggcacaatctcaacaacctcaccctaagtcttctcagtccttggcgtgcacatgcacgtgccaaactgcgcaatcttgccaccgatgactttctcctgccaatgaaggcagtaattcttcgcgaagacatccaccaaaggctcccccatatgtagcctccgcccacatatactttgccagcaccaccatagcatttggtttaagatggtggagctggacatcgaatcgagctagtacttcggtaacaaagtggtgcacgggcaggcgaagaccgcctgtgaaaaatgcctcaaagacgactacctcccctccggtttagggacctcttcggcccctagtgcgtgtcccacg

SEQ ID NO: 93911 - DNA, 373 bp, Zea Mays
ctttcttctatataatccactggtgttaactttgcaaaatcgacacaaccaaatgactccacaccataaccttccataaatcaaccaaacgaattgcacctacacataacacactcttaaaactaacagttcatatcgcttgataatattcccctctcttacccaaacctaatggacaaaattatttagataatccttcctcacctcttacatacatagtgacccctacccccctccctcgcgaccccgtcgccaactctctgttcctctcactcgcgctgccaccgctgactcctccccttcttatgatcgtagcgttagcacgagtgttagattagttaccggtaattatagaagatcgtgcagtaattac

SEQ ID NO: 93912 - DNA, 670 bp, Zea Mays
ccacattcagtcgttcttcttctagtatgtcgatgtcctctagcctagttgcttttgcttcaactatgctttcgaatgttaatctgggtgctccaaagatcagatctgctggtaacacttcctccgatccatacaccatgaagaatggggtgttttcgtgtaaagcctggctgggttcgcaggctccagaccacatatggtagttccctgatccattttcctgcgagcttctcgcttttgtcaaacacctttttcctgagtgcattgagtatcaccccgttggccctttccacctgcccattagctcttgggtgtgccactgatgcgtacttgatctggatgctcctttgcttgcagaagtcaaagaactctgaactggtgaaattagatcccagatctgtaatgaagctgttaggtattccaaacctgaacattatttcctgaatgaactccactgcctttgctgaggtcaaagaggcgatgggtttgtattctatccactttgtgaatttgtcaatggcaactagtatgtgtgtatatcccccttgagctttattgaagggtctaatcatgtccagcccccagcatgcaaacggccaggtcacaggaatagtctgcaactgttacgcgggtagatgttgctgctttgataggaattggcacgcctcgc

SEQ ID NO: 93913 - DNA, 649 bp, Zea Mays
cgctcttgggagatgtgaaggagatacaagaatcaagtcctatcgagctattgggtgcacctacttgattgtctaaggtcattgggacaagaacatctttaggtgggcctaatatcttgggaggttccgtgacatgaagtattctacagcgacaaagacaaacttgaggttaccctgagcggtggagagtggccctactatgtcgaggccctagcgttgtagaagccatgtgtgggagattagttttgtgagctgtgagggtgtcctgcttcaaggagcaaatttctggtaggcttcgcaggatcgcacaatgcgattctccacgcacacgatattcggccagtagaatcctttgcgcatgactttggtggcaagggccctagggccgaagtggcagccgcatgttcctctgtgcatttcgcgaaggagatatcccccttcgatggccgtgatgcacaagggttgacatattcctttcttgtagagttgcccgtctattaggtatttgagccttttagcctcggcttggtccgtaggcagtagtgtccttggaggtagagagcgatgggggccctccagtcttcggtcatgataagacttattatcatgtgcccatcgcggtcccttacgatgggggcattgattattt

SEQ ID NO: 93914 - DNA, 490 bp, Zea Mays
ctggcagtctgcctgatgctcccctccctccgctttggagtttggatacgcctggtccgtccgctcgtcgtacagtaacagtacgacgctcttttatatgttgaatgaatctgatctgaagaggcagggcgctccaccactagctggaccatggctgcatattttccgctgctgcaacaatatgacgatgcctgccgaaagtttgatgggccgggagggatgagggaagagcgtttcagagactggagctgcaacaatgatacgtcacttgtcaattcggagctgcagcctgcaggcaacacagagagtaaagacacagacagacagacagatagagatagagagggaacatggtgcctgaggccctgaaaactcactaagaaagtcgctgtgcaggttgggctagtttgcgtagtatgttctaccttggtacagaaaagctagctactagtagatgattagcagcataagcatcaactaccccaatcat

SEQ ID NO: 93915 - DNA, 854 bp, Zea Mays
gttcgattaggggaaatgggcgtcgtgatgaattccggtggaaacggacagtcatgctggggatatacggccgtaaggactactaattaaccgtgcactaccaatttggggtgaggaaggggagacaccacgaattttggcttctactgatcacacccgaagatagtgaagacttcacggtggttcatggcacaatttaaaggggtggcgacctagctagctattcgcggtcacaatgctcgacgttagtgcatggtgaccacgtaacaaaggtgcacagtgtggtagaatttaggcgcgagtgacactgtgatggaagttatgagccacggcggccgccggtgagatattcttgccccgaccccggcctaatccgcaagatggtgaatcggctcgaagttatcccgccctggccgtccctatctccagttcgcttggacacatctgaatcccacagtaccgcggaccttttctttagatatttccccgagccactgatcttccttactcaactgaaccggcttccttcaatcccctttttctcttgattcttgttaagaacaggttaatctctattaacaagaattcttcacaagacaatggtcttcaaacttactataggattcttggacctaaactgaatagattctcagatctggtactctcaaatcggccacatttcactgggaccgctattgttctgaatccggttttcagtgtcacccaaatcgcgcaactcacttctgtcagagcaacttcgtgccactgtttctttgatttttatacaacaacctgtaaggacgactgtaccaaagttactcccctacaaactagttttaactttgttactaagg

SEQ ID NO: 93916 - DNA, 331 bp, Zea Mays
gttccttcctaagtcctaatcctaactagaaggttccgttcttttttctttctcaccattgaacatacaaagttatttgatccgaaaaggaatttatagcggaggatcggagtatgtttcatgttggtgtagtgaaacgcggtctgcaacgacctcggtccccgatacagcaaacccaatgttggttggtgtagtgaaacggtctgcagcttccctgccaatatttcagttcaaatttgtaaaatttctcaaacggtgtgactgagcttctttgcagtatctctggatagccgcgcccaagcttatcggtaaaggcaaagctgctttgctt

SEQ ID NO: 93917 - DNA, 314 bp, Zea Mays
tgcaactgcaaagaagggctgttgtttggatgaaaccaacctaaacaatcaaggtacaaaaacctttgctaagtttgatggatggccctgaatccaaatgagctgtgagctgtctaacaatgaacataaccagttcaaagtgctctagctaatctgtccagcccctagcgggggctaaaggctacagtagcatctggccatagcttgacatgtataggttgccgattattctaatttgctagttcattggctacaaccacgtattaaaacctgcccttatgggcatgcttgggtctttttagtttccttctcgt

SEQ ID NO: 93918 - DNA, 424 bp, Zea Mays
ctcctctcctctgatgactccattgggttccttactgggctcattaattcaccccaacctcaaatgcaaccagatgaaatgcaggagcatatgggagcagtgctagctttgcctactgcacctctagagaacatggtggagggaaaccaagaacaagatgctgtgaatatgcagattgatgataacattcaagtgcgcctgagagacagatcgatctacacaatgtcgatccagcctatgaaggatacctggctagaaagcgtcacaacatatcggccaaagcaatgcccatgactagggccgatgtcatggtaaaagtgccacgagtgtgagccaatttctttatgggcctgctcctgaactatgactccgttgattgggccaagaagtttctatcttcaaatgcagtcatggccctcatgga

SEQ ID NO: 93919 - DNA, 470 bp, Zea Mays
ataaaaaaacaaaggatgacatatattatatgctaccataacttaggacaaactaagaaggccgtgcaaagcttgcaccgttccaaattactgcaaacagcctctcctttgccgttacatctaggagatgtttgagttaaacaaagattcagacaagtacagattgtgtagtcaaccaattttacaactagttatgcttaccatggacaatatgctccgcataaatgacaaccattttgatgttcattatgtttattatgttaaaattttcaacaggtacaaacacttcaatagaactgctagtgtgagatcacttagatgcattgatgatgtaagaacaagaatgataattcactattgctaaatctgaacaacacaaaaccactacattgaggattgtcctgccaaatcaatttaaaggttagacattaattgtcatggtttcggaaaccaggggccagtaagttttg

SEQ ID NO: 93920 - DNA, 350 bp, Zea Mays
tgactgcagggtggttggccacgagaaacatacccatcataaccggctctccctccggtgtagtggccacttgtgtataatagtttcgcccagttttcttcacattcttgcccgctgcattatttgccgtgtttcccttgccttggctagaactcctcgggttctgctgattattggagttgttccgcctcggatatgggcagtctttgatgaaatgtccagacttcccacaattgaagcagccagttgatgaactcgggagtgcggggaaacaagcaccaagggcactcggctgagttgttgaggtgggggcagtagcagggcgaatgaatacaggctgtttgaaagga

SEQ ID NO: 93921 - DNA, 586 bp, Zea Mays
ctcgcttaaataaacactatgtcggtgtttcgaacctactccgacaagtaaatttgtttgtgcacgttctggggtccggatgttgagctcagtgagcgcgatatttatactgattcgggtagaacgtccccacatccagtcttcgacggctcacactaccagcacctttgttgctcaatgctcgtaatagtggttacaagcgggcgagtgaggaaggaggctcccaagtagcagtgaaaacgggacgaaatacaggcggatactagatcatctcgtatcctaccctaatattctctcggatactgaatcgagtatggatagttaaaattcaggatgggattgggtaatgattcgggcgggtaaaaacatatatcggaaattactcgggtagataacggatttgtcggatagtttgtcccgataatattagttatcaaaccgttcgacaaaccaaaaaataagaaatatataatcatgtatatgatagctcaaatatatattattatacctacaaaattgacatcatgcagctcaaagttaccgatgacaagaacattataaaacaacacaatttcaaaaaaaaatc

SEQ ID NO: 93922 - DNA, 370 bp, Zea Mays
agtcggttctttccaatacatctaatacatttaccatccttctccttttaggagtcacgatagaacctgtttgtaccttcggtactgtcgcccttgttggagcgctcaaaatatctagcattttcattatttcttcaatttctggtttatcagccttatcaatcttcatttcaacttccttggctgtaggcatcttcggcattacagctggctcttcagtactctgtgtagctgaatcagtttcttttctttcggcagcagaagatgtccctgcgccaaaatcaggaaccacggccggttcaatgtaacgcggccggtgggtaagaaccttcaactttttgcccttcggcacaggcttatctgggctgtc

SEQ ID NO: 93923 - DNA, 690 bp, Zea Mays
gcaaagttaagagaaaaataggagccaatttgggctgtcagtcggtttgctgactgaaatatggtcactagtggtattggtcgaacttgggatcagatttgagctaaatccagaaggaattcgactaggattgctataacaaagataaagaggagctataggactacaactttgctgcagagcctcggataggttgccatggaaatttgagagaaaattgagcccaaacattgactgttaggtgcattgatggcagctcgcgatggtacagtagaccaaaggggatcagatcgccagcacggcaatctcaccgccggcgacctctctgcgcgtagattcatgctgccgccgtcctgatccgtgctcaccagtgcttggactatgcttggggtcacgaaaatattgccgtcgttgataagtgcggtcactaaacaactccgaccaccgtaccaagttgccacgaccactacggataacttcgctggtgaccgccgtcttccggccttgtgccacgtgcctgagtacctccaccgcatcgccgtgaaccccttgtgactctccgtggctcatcggagtgactgccacggtagatgccatagattcacgcgcgccagtgaactcttactcctccgactgccgcgcgtcaccgctaaaattcccggccaccgccctcctgtagtataaattgac

SEQ ID NO: 93924 - DNA, 374 bp, Zea Mays
cgagctaatggaagccccagccagttatatctacgcgcaggtaggcgtgcatccgatcgtgcacggatttggctcatgcagattttagcgtaaaacgtgaaccaaaccagcgtaaatgagtacgaattttagcgtaaatcgtagatctgtttcataacgacgaatgggcccaaacattacggcgtaaaaatcgcgcgcttccgatcgtgcgcgggttctagatcaggcgaatttttgcgtaaaacgtgaaccaaaacagcgtaaatggatatgaattttagcgtaaatcatagatatgtttcgtaatgacgaatgggacccaaaaattacagcgtaaaaatcgcgtgcgtccgatcgtgcgcgggttctggctc

SEQ ID NO: 93925 - DNA, 554 bp, Zea Mays
attcattcaagcatgcatgcattataaaacgataagtaattaagaattaagggaaatgcatcgaatcatgaccctaacaaacatggttaaaaatggatggcaagaaatgagttggaatagataaatctaagttaacccacctcttttaaaagtcgggtacacgtttctccttgccgctatcatagcacttacatctaaccctctttcacagatcacttcacccacccccgtcaatggaggagacactcgcttcagttttgactacctttcccatgagggctttccctccatcttgtgggaggtgctctgctccaccagttaccctacgcccgctctgtatacggtgcagttgtatgaggagcatcgggtgccacgttgcagggtttggcggaccctggagtctcaccctctgcagcctgaatggcgttcccttgattccgagactgtcgggttcagggcggacgacaccaccaaggccgcagtgctaaaaaccctgacaaccttctacggatatcatcccctagagatgatgatgcacccactaggactcttcc

SEQ ID NO: 93926 - DNA, 907 bp, Zea Mays
cttacatggtccaaatgttcccctatgctactttttccgcatgtcacaaaatgtgctccattccatttctttggtgaaaaccacccaaactctattgttcactcactgggaacgcttgtatgacaaatggtacccaatacctcaaaatatctgctattctgctcgcctttttcgagtggcaaagaggggtgccgcactgaattgtactttggactctaaatcaggttttagtcagttttcagctgttccaaattgtgccataaatctcattatgcagcaatgctggctgatcgtgtggaaataatgggaacggcttaagaccttaagcccttaggttgctgcccatgttcattatatattcagcacaattaatacatgtcccaatatgactttgttacttaagttgtactaggtctaaccaactatatatctaggattctatctttatatctatcataagtatctatagctctaacagatcaaactcatgtttgcaaaggatgggtcaaatgtggtcagccatcagtcattccccaacatctcatctcagggttgggtcccacgaggtcatgactcctgcaaagtacggaagagctgcacatgacagaacaggcccactaactaatcaactaaaacatgggccacctctccagggaaactacaaacgaaatatcacgcattgctagtggccctgcaaagaaaacaagtgctcgtgctgaacactggagcaccacagacagaatgccaggcatatcagtcgtaacattcagcaatgacaagcatttctcattctgatattctctccctctgtatgtggtactacggatatttgattggtagtaggtactacatcggtacagcttattgccctattggctattttatgatcaaccactagatgtttata

SEQ ID NO: 93927 - DNA, 738 bp, Zea Mays
caccggggcctagtctctccgaagattaattctaatgggctttgaaccagcttctcctttttctcatcaactttgacataaaaccattcagtcttccagccagctggccatttggtacgatagctgataactggagacttcacatctttgtgataagcaaaattgtagcagccgaagttctcgtgcagcccatcttctctagcttttgtctgataatgaagctcatgtgcccggcagaaaccttcggcaagcggttctgcccctggcttcggagagcccagatgtagatgctaagcctaacgatggtgttaggagttagctgatgaagataaatcccaaacttctccaaaacatcctcaatcatctcattcaaaggaaatcttaatcttgctttaaagaagcttttaaagactaccacctcatccttttctggcttcggagtaatttcatctccgccaaagcgaatcagcttctttttggcttcactgaaatagcctaacttcatcaacttaggcatatcatcttcggcaacagtggacctcccaaactctaggtggctgggtttagatggcagggcactgtaatcatcttcagattcaccttcctcagcatcaacctgctcagcttcagtggcaggtgcaccttcgtcaaaaacatcctccggcactaccagccccgaccgtttcatcactttggaaatcggagcggtttcagcagcttcggcttcttctccgtcac

SEQ ID NO: 93928 - DNA, 621 bp, Zea Mays
ctattacggatatgttttctgttgccagattaaacatcattggatcgttggcgggcggttgggcctgacaggaaactacttttccttggcagtcggtgagaaggacggtcttacttgcgcaacttatgatgcccttgtgcttagttagccaatccattcataggatcacatcaatcccttgggatggcaagacagttaagtctgccaggaacactaccccacttaaaagaattctgacctgggagcatttgagctgacatagaaggtctgaccccggggttcgggtgaccaaaggaatttctaggggtgtagagggaatgccatgcttttccacaaaactagtggctataaatgaatggaatgctcctgaatcaaaaagtacagtagcgggagtaaattcgacaaggaactcaccgggcactactcccggagcttgctgggcctcttgagcatcgacgtggttaactcgtgctctgccctggtactgggtcctgctctgctgactgttagagggggtgccttggaggcaggtgctgaggtaatcttggggccattcaccgagttggagtaggtaggtccggatgccttcaactgggggcagttattcttgaagtgactggg

SEQ ID NO: 93929 - DNA, 910 bp, Zea Mays
atatactagaagaagaacggttgaatacagtgattcagtcagccaggtaccaacagactctgaggcgctatcatgataaggccatacgacatcgatccttcgcagtgggagatcttgtcatccaccgaattctaacgggggagggatgacacaaattgtcgccactatgggaaggaccattcatagtagcagaagtcactcggcctggatcatatcgtcttactcaaatgaatggcacggaaatagggaactcatggaatatagagcatctcaggaagttttacccctagctagatttcaaaagctattggggcggcattgtattctgtaattgggagatacaccatcaataaaatgacttcattctcaaaggcactcgaattgtttattgtcaatctgcatgcttactcgactcagggtgaccactataccctacaaacagagcaatcagcttaagtcggcaacgacttaaggcggtgtgacatgctcacgcttacttaacctagagtgaccactatactctgcgaacggagcaatcggcttaagtcggcaatgacttaaggcggtgtgacatgctcacgcttacttaacccagggtgaccactatgccctattaacggagcaatcagcttaagtcggcaatgacttaaggcggtgtgacatgctcatgcttacttaactcagggtgaccactatgccctactaacggagcaatcgacttaagtcggcaatgacttaaggcggtgtgacatgctctcgtttacttaactcagggtgaccactagaccctaccaacgaagcagtcggtttaagttggcagtgacttaaatcagcacgacatgctcgcgactactcgattcagcataagcacgtttgcgattgctcgtcttagggcgatctccatgccccg

SEQ ID NO: 93930 - DNA, 652 bp, Zea Mays
aaaggtcatatcaccaacctggttctcttcttaggcccatgattttccctttcacctccaaaccctttgattttccatgtcctgcatttttggcttctactgccagtgccgtactgacagccctactgtaggtaaggtccaagcatgttgccattttccgctgaagcctgtcattaagtcttctcataaaacaattctttttcttcagatatgtattcacttggtcaatggcatactgggagagatgattgaacttattgagatattgcattacagtatctccccttgctttaactggatgaactcttcttgtttcatatggagcactccctctggaacataatgctcttggaatgctagcttgaattcctcccaggtgatctgatgtccagccagttgaattgctacaaaattttcccaccaagtactgacaggccctctcagctgttgtgcggcaaacaatagcttttgcgtctccgtgcaacgaatcaacccaaatttctgttccatcactcttacccactcatcggcttctagaggttcttctgctttaataaagagcgggggtcgagtctcagaaaattccaagtatgtagtttcatgcagtccttgaggaggagctctcccaccatgcggttggaactgattgccc

SEQ ID NO: 93931 - DNA, 517 bp, Zea Mays
catagttaatatatttatcccactttagaataacaaccatgatctaattaatgaaatattatcaagtctatctagtcatatccaatctaatctagattttatctaatctattatgatctaatctagggtaagttacttaatgctggtacaaaagataaggccatatccctcatgcacttaaaactaaactggtgccttaaaccaactcagccacatgcatgagatctgacccaaccaataaagtcatgaagaattgtataatcattccccacctagcgtcaaaccaacttctaacctacatcatgtagtctatctcacctatatctatcttaaccatattcccccaacttcgatgatatacactgaccccgactcaatgagacaaagaccggaaaaggacaatatcaacctcgtcaaggaaggagagaagtcaaactcaatcttcagatgcattaccactcaacacggaattctttcctaccataaacttcttacccttagctattcttgccctaac

SEQ ID NO: 93932 - DNA, 356 bp, Zea Mays
aaacgctcagcgcaccaagtcgtcccttgcccacacccattgggggggacattcaggaattttcaatagattttcccaagcagtcatatccacacagtatacgcaatgaatgtatcaagacagaaggaagatatcaacggagatcaaaggaaagccaaaaatagccgatgaggtacaagtcaaatcaacataagtattgaagcacgaagtgatatgaagactagccaaaggccatctaccgaacgtccaatctatcacagatcaaataaattttaagacctaacaagatatgggcagatcgcatgctcgatctcaaaggcaaaacaatatgctaacctctaaagcataaagttgat

SEQ ID NO: 93933 - DNA, 520 bp, Zea Mays
caggactcctctacattgggatcaaactggtgaaaggcagttatttgggcctgagattatacaagaagcagaagaacaagtccagcaaataagggaaaatttgagaactgcacagtcaaggcagaaaagctatgctgataataggagaagactactggagtttaaggagggtgattatgtgtatttgaaggtgtcaccgatccggggtatgaagagattcaaagttaaaggaaagttgtcccctcgcttcattggacctttcttgattttaaagcgagtgggagaagttgcatatcaactgaagctacccgatcacctgtcagatgtacatgatgtattccatgtgtcccagctaaagaagtgtctcagggtacctaaggagcaactaccgatggaggaccttagtgttcaagatgacctgacttatgttgagtaccccatcaagattttggatactttgactcgagtaacgaggaataaggttataaagatgtgcaaagtgcaatggagtcaccatggc

SEQ ID NO: 93934 - DNA, 614 bp, Zea Mays
gagatgaaaaggcgtataaccgcaaggcggttgcactctcctttgcggcagtttaccttcttgaccgttggttgcagcgaagctgaggggcgtactaccgcggggcggtggcatgctccttatgtgatgattcaccttcttcgcgcttcgggccagcttgtatgacatgtgaggcctgacccccgtgtcataggatggaaaccctggtgcgcatcgggggagaccttgcccgtgacgcttcagggcgcgagcggggaaatctgcattttaaaaaggggttcacccctcgagtagcagccatgtcttgcttctctcccactcgcggcgtcctttctcctccgagctccttgcgcccctttgccttcaaggactctgcttcgagttgccgtagtttgccatggccttgtgactccatctcgagcacgcccagactgagtgagtgctcgaaatggtatacgacctgctcggatggaatgcgctggtacttgccggaaggatttgtgccgacgttatccactccgatgagcttgtcgctagagagttcatgccttttgtcctccctagcgggccggtgctatcggtcttgtcttccctctaccgaaggtgcgcggcct

SEQ ID NO: 93935 - DNA, 565 bp, Zea Mays
gccgactcatgatgagtcggatgagtcgatcttaagtttgtaatgatctccccctgtgaatgaagacacggtttcctgctaatctattgttgtgtgccctgtttttgcatctgatggttcacttagcattttagaggtaatgcccgagtgatgcttgcttttctgcgattcaaacttatcccgagctatcggcctaccactttgcgcctgacttaacatgccaacccctacttctgttgatgtcctcttgagttctgaaccctagttctttcttttttttctccaccgctctctacctttctgagttcccgaatacgtttgcatcgtttgagagatcacgatggcgcccaagaagagaaaacagagtgctactattctggccatcccgccaatcgatcccaacagtcaactccccttcgctggtaaccatgtgtcttttgtttctgaacctgaccttctgcaccttgttgagattggtgttctaccaccgaaagagtcatgcttctggcggatctggcgcagagttactgtcctgatagtgtggcagaaccacccgaattattcc

SEQ ID NO: 93936 - DNA, 508 bp, Zea Mays
ggtcagacgaatgggaaaatcagctcaaaaaactcgaccaaaaggggagatccgacaaataagatccctctaggcatccaaaacacgagacaaacccctcttaaagcgcacttcatagtcgtcctcaaggagttgtgaaactgaaagcagattgaaatgcaagatcgaagccaaagcaacatccttgggcacaaagatctcgttcacccaaatggtgctatgagagacaaccttatgtcttgatttatccatgaatgtgatgtattccttaccaatcatggggtcgaggctggagaaccatatagaactttcggtcatgtggcacgaacacctagaattcatgagccacgtgttcgccaggcctccgtcctgtatcaatagaaagacatggggtgagtaaatggcacaacattggggttaggatactgagaagaaaactactgttgtggtattttcccatgaaaagtgttaggaaaaacatcaaacatccccggttccatagggggta

SEQ ID NO: 93937 - DNA, 1069 bp, Zea Mays
cttgttgtctaggtggtgcaaatatagatttggaaccaataataatgtttgaatccttcgtttgtgcataatttattttttactatttaaatgtggggagctggttgatgcacgacgcccgtgaaaacggtggaaactggatgtctcttgtacatgaatcaccaacaagctacggaatgcggacacacaacaaaattttgatcatgcaaagtcatcataaagataatgcagacaagcatcaatatttctaaaacaaatcaattttgccattagatagaaggattgagatgcaagaaccatcaaattctagagttttttgttcacttgcaaatgcaatccatggtgtctcacatatacgatgactttagaatgctcatagctaaccaggccacgtacgttgtttgtatcttccctactcgtgccacctgatgtttttgggcagccaaattagtcgtgggttgctgctattgctgaatatggctgacaacatcctgaacaatgttgattgaggtttggcaccactggatctagaagttgggccacaggcttctttgcagttcacaccatcgtcatcccaccatgaatttgttaatagttgacagatggtgttgttgtgttagaccttagtgtgccaataaaatttttaaaataaacagtagtgccagggatctaggaataccagaagagccttcttacaaatttggtaggcatgacagaacctcctcacacatcgttgatgtttgcttgcagcggcatagaagcgatcagtgttacccacagcaatctacgaccacataaacaataaggactaaataccatgaacgccttgcttgacacccccttgatggcattagaccattgctggttgttgcagtcaccaaaactgccagtagcctacattgctgaaaaacataaaatttcaatagatacaaataaatcatatcaataagtgtattagtactatggtaagaaaaaagtcaacttctcctttagtagttgtaatcaataatatacctcatgcacattcaaattttctcctcttagttaattccagcctgcaaggttggag

SEQ ID NO: 93938 - DNA, 1065 bp, Zea Mays
gtgagggcaacgaccttgccaaccgggaacgtgacgatcacgcgcatggagacaactagggcgctagctacacgcgtgggcacatcacggcgtcatatgtcgacgccttttccttagctatggccataggaggagccattggaccatgttcgcgagctgaccttttctatagtctccttctccactgccttaatataacctcactaactcccatgatctgacatacaacacagacctctgcctcccatgccctctgccccctcccgtcacagcagcctccttgtcgtcggggccctcgcgcgtataggtcgagaggctagggttccaagaaccctacgcatggcaacataggccttcaccttccatgccatctgcccccttccgtcacagtagcctccatgtcaccaagggtccttacgcatacaggtcaaggctatggttctcaaacccctgggcaagggagtggggttatctccatgtgcagggagccaccaccaccaggggagggggacaaaaccaacaacagtgggagactggaatttgcaatgttggggtaggacgtgggatagattagaaagaagtataaggacttttttttgtaaaagtgacagcggtggaaaccaagaaaattggtgctttataggagtagagatgttcataggcatgttcgtcaatgcacatgggagtgttaaacttctaaaaccaattcataattctagccacaagaaatcatagaacaaagattatagcttcatggtttggagcagccatatgtacagataccagtctgaatgttcaatggttagagttgaagaggatgcatgatgacatctaccttctccttactgtatgtgtagagattggattggatcttagtatgagtgtagagcgagggggtacagtgaacgttagtttgtatgctagtcatttgtctaattattatacgttgtatgaaagggagtcacaaccaataacttgttgcgcctctgatcagagtgtgattgtggtgttcaactcggtcccttggctaagttggatgagatcaacccaacattgtcccttttg

SEQ ID NO: 93939 - DNA, 806 bp, Zea Mays
ccttactaggatggatgccctcggtgttcgcttggttcgtcaggtggggtgctctgaagggtggcctcgccaggtttcatttactccagtttttttgaggtactacatcagttgtgtgtacaagaaaggtaggaagtatgttagtgaggccatgcttgtgaagaaaagcataaaggatgcaaaaaggtttcgagagcctagccatcttcattctctccaacttttgttgtctagcgctgaacggttgttctaggggctggaggtaggaatggctcggcgcgccgaggccgtgccgaggtttgaatcatcataagttttggctagcatcctgcctttcttgctctctaggtcaacacttcacaactagagatgaggccaaccaacttatcgacacacaggagggggaaacagatcctttgaatcatgtctgtcgaagccagcgcagatgacccacgtcttccatttctcgttctccttttggtctggcatcgagtcgatcgactaccctggtcgacatgtcctcctggtaggctcaaccgcaaggagtctaccaatctcttgctcgatggcactccattcttctttgtcgaaatgtcgtggtcgccttttgtagtctttggagttaggaccaatccatgaagattgctcgatggttttcttttggggcgctcctcacaccggagagtttccatgttgaggtgtccttatggagggagttgttgagcgcaccctcctatcctagagggggcatggaccctatgcgcgtcatccgccaattaggctgcccggggtccagcgacactccc

SEQ ID NO: 93940 - DNA, 340 bp, Zea Mays
ggagatggcataccaactcgagttacctgctactctatcagatgtgcataatgtgttccacgtgtctcaacttaagaagtgtctccgtgtccctgaggaacagttacttatgtaagagctcagtgtgcagggtgatttgacttacacggagtatcctatcaagattctcgatacattgactcgagttacaagaaataaggtcataaagatgtgcaaagtgcaatggagtcaccacggagaagatgaagcgacctgggaaagagaagaagagcttcgtatagattttcctcaccttttccctagatcttcctaaatctcgaggacgagattatttttaagg

SEQ ID NO: 93941 - DNA, 309 bp, Zea Mays
tagctcaagggggcacgtacaaggatactgagccccgacatatgggcccaggggcaaaatggaaggaagtaactactgcctataacgccagggtgatctccgagcgccataatgtccgtagtgcatatagtattgatatcccgcgctgcttcctcggtaacgcgcgagtgatgatgagcatagtgtatgccgcagcacgggtgtactgcctgccaacggaatggacaggcactccgcctgtaggatggcctggtcgccgcccgtcagcggagtggacagggctcattaaatgatgaggcgacacattgc

SEQ ID NO: 93942 - DNA, 639 bp, Zea Mays
aactaactagctatagtaacaataacaatcaagtactagtaatgatatgcacatgaatggacacatgcgctgtcaggctggatcgcatgtgccactcattatctaggaggcataggaatacaggattgacggagaaaggacaaaaacgcttggattatggaagggaagctagcaggtgtgctgtcgcggactcgtggcagatgcacctctacacgtctctgctttctctgagtttccgtgtgctatctgctgtgctgggtcatcaaactcgccaaattttatatttgatccaagttcagaacgaacgacaagcagtgcaagtcgatcgatcgatccctacatatttcacgtgaagagttccgtgatccaacaaaatgaacacctcccttcttggaaatagtacaaattaactgttgcttctcgtcacatcttccagtgaatttgtctttgtctgtgtgtgaccaaagttgatgggggacttaaaaaatagagaaactaaaaattagttcttataaatcaaacacccctttaaacttctccatcaactgacagttctcaaataaatgccgtaatatcatgaaagggaacatatctggtgtaaaccaacctcttcatgcaaccgtgcaaatctctaatctg

SEQ ID NO: 93943 - DNA, 475 bp, Zea Mays
gtctgtggtgctgatttgttcagccaccaccctgaattctactgcgggcagttggcatggtgaccctagctgcatgttgcacaggggtcgggtcattccaaagtttagagttagcgggcacataaccatcgtcatcagtttcccccttttcttctcaccagccttgatatagaaccattcaccttttcagcctgttggccacttggtgtgatagctgagaactggagccttcgtatccttgcgatacacaaaattgtagcaaccaaaattttcatgtaaaccgtctgccctggccttcgtctgatagtgcaactcatgcactcggtagaatgcttcagcatctgggtccatcccttggcttcggagggcccagatgaagatgctgagcctaatgatagcattaggggtcagctaatgaagataaatttcaaaattcttcaaaacttttcctatcatctcattcagaggaaaccat

SEQ ID NO: 93944 - DNA, 639 bp, Zea Mays
cgccgtagatactcgtcgacagtgggattcgggctccaacgaggctactcgaaggttggtctggtcgcatagaagctatgtgagggattaattggagcgaaactagctgaagccataggaattctccgtcggtcgaacaacaccaccgtagggccgcaactcgccgcattcggatgcgtaggcaataactcggttgtcttgcatcaaaacacaacctagtccagtgcccgaagcatcgcaatatacatcaaatgatttggtgttgtcaggctgtgctagcacgggtgctgtagtcatgttgcctcaatgcatgaaatgcaccttcacacttctaactccaatcaaatttcactcctttcttcaacaattcagtcattggtttagcaatcctagagaaatccggaatgaatcgccgatagtatcctgccaatcccagaaaactccaaatctgccacacggtggtaggaggcttccaatccatcacttcttgtactttttcaggatcaactgctatcccaacctgagaaatggtgtgacccaagaacttgatctcccgtagccagaaatcacatttggagagtttggcatacaagcgatgatcgcgtagccgctgaagtatagtgtgcaagtgcttgatat

SEQ ID NO: 93945 - DNA, 308 bp, Zea Mays
ttcctcgatggatctcaacccatcccgcccgcaatggttcctgcgtcaacaagcgccggtgccgaactcattgtcaacccgacctatgagacctggtatgatcaagaccagcagctactgggcggtcttctgtcctcgatgacggaagaagtacttgctgatgttcagtccgcgacaacggccaaggaggcgtgggattctctcctgcgcatttatgcctcctccacgcgggctcgcacggtgcaaatccgtgttgagttggccaacatcaagaagcgggatctcacggccgcgacgtacttcgccaa

SEQ ID NO: 93946 - DNA, 512 bp, Zea Mays
gtgggacagttaccgctttattctcaacgttacggtttgaggagcattaaaataaggaaccaaatattcttttgagacttcggcgtaactttgtagtagcctttcttgtacgatagtagaaggaccatattcttgtgctcttgacggtggttagtggcggcaggaggacatacagaggacatagatcaaccaggtacatctactgccatggacatcgtagttgtacctgatgctgtgaccggagacgcagacggtgtagctgttactccaccggcggcgttgagggcacctgaaaatattgatgacaacacaagatcgacggagatggtaggagcatatcaacgcatccccatgagacatattgggtgcatgatcaggacacaccacacattctgcaaagccatgtaagttctgataaaatcataatatcagttacgtacatacttttgtagtgttgtagcagtaccacaataaatttggggcgtcattgatttataaatgttaaatttctg

SEQ ID NO: 93947 - DNA, 396 bp, Zea Mays
atacagctgaaaaattaaaacatgaacacattagatgtctggcttacctttacgttccaggttcgaagcacgaaacccatcatttccttaatgtctggcagccaggcgaatgcatccaaatttgcctcgtctttaagtacttcattagttatagcatactgatcagaatcacctttaatatcattctgtctaagatatttcattgcactcgagtgggtcatgcgatgtgacgactcaggcgtaccaacttctgagctcctccgccgagtctggcgggtgaagggctgaatagaccctgtattgctgctgctgtgttttgtaggagacatggttctacatgccattaccgctggtgtcttgaactcatcacagaaacaaaagatttcatccaactca

SEQ ID NO: 93948 - DNA, 395 bp, Zea Mays
ggttttggggcaatggtgatgtatatggcttgatcatgagcaagtgaacctagcaattgatctagtgcatgggatataagttgataactcaactttgacctaaccattgaaagatgtgtgaagaagcttgaagaagtacccccatcgagttatatgcttatgcacattggctagttcaatccaatgagaaagaagccaatgaaaacaatctaagaagaagctcaagtcatcctcaacttgaagtgatccatcaaattggtgtcttgcaagcatacaagtggtgtttctaccctcgtctatcaagataaagccaccctttattggaaattgatgataaaggggaagaacaaggatacaaaaatagatcaaggtggagaaactaggtcacaaaaaat

SEQ ID NO: 93949 - DNA, 437 bp, Zea Mays
acttctatgttacttgtactatctctgttactactatgttaaaactgctatttttaacatggtatgttacttgtacaatctctatcttccccctaatcttgtacttgttccagctatggctgacatggtctctgaggttgctggtcagtgggctacgcctgctcttaggtggactgctataatgtctgggtttgttctccgtcattttgttgacttgataggaaatggggttaagaccgacaagggttttaaggaaatccaccttaactctgttgctaaaaatgtctctgagttctatggccaaggagtaacaggacaacaagtgtacaatcaccttcgtaagtggaggtctaggtgggtcaaggtttgcaaactgaaggacattagtggcgctctttgggatgaggataactttgtcataagcttagaagagggtc

SEQ ID NO: 93950 - DNA, 604 bp, Zea Mays
gaaacgatacgcgttcggtgcaaaaggtgcatttctcaaggttagcaaataagagcgcgacgcgcaaagcatcaaaaacagcacatagatggtcaagatgttcagataaacaagtgttgtagatcaagatatcatcaaaataaaccaccacaaattttccaataaatgggcgcaaaacctcgttcatcaaacgcataaaagtactaggggcattagttaatccaaaaggcatcactaaccactcatacaagtcgaacttggttttaaaagtagttttccattcatcgcctaatttcattctaatttggtggtacccactgcgcaaatcaatcttagaaaatgttttagaaccacttaactcatcaagcatgtcatctaatcaaggaataggatgacggtaccggatagtgatgttgttaatggctctacaatctacacacatgcgccaactgccatctttctttggaaccaaaatgataggaatagaacaaggactaaggctctcacgtacatacccacggtccaaaaggtcttggacttggcgctgaatctccttagtctcctcaggatttgctcgatatgcagcacggttgggcaagctcgc

SEQ ID NO: 93951 - DNA, 412 bp, Zea Mays
cacggtcatgcatttcttgatccaatcactggaggggcccagagatatctctctcaagaagagagggacaaattccatcttgactgaccatgcctcacagcatgcttcatgacaaacccaaaagcacatttttaactacccagttacggagtagcgtttgatattccctaagtaagtcaattcacatcttgagaacatgcgacaatatcaagtctaaggatacaatatacatgttgcaaaaagagaactatatgacaatatctcatgttgggtcggtccagcctcatgtcatacatgcgcccacattattagtttaccatctctgtcgataccctaaatcaggggtaccctctcctacagcatgaagacgtcgcacccatgcgatgtcccctagccacgcggaggacggcgc

SEQ ID NO: 93952 - DNA, 310 bp, Zea Mays
ggctttgttcccatagctctagcggatcatgacttccctctcatggagctcgctacccccctatgggaccggtgatgtttggcctccttctaacgtttttaggggcaaatgccacagtactagtgatctttatagtttactaaccccgatgatgtgccatttgtccaccctatgtccttcaattgatgcaggacgaagggctggaaaacatatggctcatggattttagttgttcccaccacatgactggaaacattatatggttatctagcctcgaccccatgatcaaaaaggagtacatcactttcgg

SEQ ID NO: 93953 - DNA, 284 bp, Zea Mays
gtaaatgggagccactaaaaatttctcaatcaagagcttgtggcttgattccctaactcaatccaaacctctagggagaccaaaacactccaaaaaagaacaactcaaccactgatcgattggcttcttctaccaagttcctaagaagaatatgagcttcaaatgacaaaagaacttgatttggaacccaaactttcagaggaaaccccaaggaagaccttctaggacgagcagtagtgtcggcgaggagcagtgccgcgcgtatgagcggtgtgccgctcaac

SEQ ID NO: 93954 - DNA, 349 bp, Zea Mays
gcgaggaggagcaacactggaggtccagcccataagaggggcaagtctcagcaccagtgccaccacccctaccgtggcaagtattctgaatcgggtacttcgggaggaagtactcagaggtatcgggctgttcctaagcccgggttggggctggtgtgttttcgttgtggtgatgcgcatcgccgtgctgagtgtcagtggagtggcagttgctctatctgcagtcaagaccacaaggatgtggtgtgtaggaggaattccaatgggaagctcagatgggagccagtgacttcctcctcttctcagggcactgtcaacatgatgtcaagcgctgagcagcaatttgcag

SEQ ID NO: 93955 - DNA, 578 bp, Zea Mays
cacgctctagctgatgcttttgtctgtcggagccgtccgattttaggtgatagcagtaggttgacgaagtgttggttgctggaggaattgttggaggatcatctaggttagtgcaacgcatcgcacgacgtgttggttagcgacccttgcacccttgaatggtaataccgggcctgtcactcttagtggcatggctgcaagattggtagagatggagcatgtcagaaaaattggattcaggcctaccactcttcctggtctgttagttgtgactgaaaaacagactgatgggtagccataagtaagaaaatgcaaacagttacctacgggaatccttcgagcattctgggaggctagttttggaccttcctttgtaggaattggagtggagtgaatggttgtcgtcctgcaagcagcaaatcaagatcaacagtcaagtgtgagcgatttttctatcacaccacaggccaaccgcatcgcctaatagagtttagtgtttcttgggataaatctttcaagaatcactatcagttcaccgtcatatatcaattgacgaatcctattgggtaactaataat

SEQ ID NO: 93956 - DNA, 455 bp, Zea Mays
attggctataaattcatcatcaccatgctcgactactgggaagaggacagaaacccctcataagcggaatttcaagcctgggaggtgtgtcaggctttcctggagcaatccctccgtgagcgcaccacctactagaagcaaagtagcaagcagaaagtcatcatggaggtggacggggacattgccttttagcacgcccatgcttgtgcgcgaaggaagcagtgctccatagctcgaattcaggttgactccgttgtttatacatgtcaggaggaaaaacaaggttatcaccgagttctatgcttcgtctatgggggttgactccgcccctcaccccgactttgattaccaatagttgtacccaccccacaccctcccaccaaccttgacacccctttcactaccaaataaacctagactccatcattgccatgccttgccatagcgctccatga

SEQ ID NO: 93957 - DNA, 383 bp, Zea Mays
cgagcctccagtacgtccatgcatgtaacaagttcatcaactcgtcgatcaagctgctcataggatgtcgctgcagagtcctggtattttttaaaagcttcagtcatcgagtgcatcatctccttcaattctagctgagagacacactcatcgtcgttaagcttaggccccttctccttgtccatttggttctttggtcctgtcattgttagcacaaaacagagacaaaaaggcaacaaacaatgtgaaccctacaactatctctcagggtggtggtggaatacaaattatgaagcgtcttaccccgctcttacaaggttcttaccagcactgtaggtggcaaacggtgaccggtgtgactgtccaacgagcgtgggtgtgat

SEQ ID NO: 93958 - DNA, 556 bp, Zea Mays
taattcagaagaggattagagggattaaatccactcctattcatttttattaggagaggatttaatctcatccaatcatcttctggattagtgtaaccgaacaagctctaactgggtatagaagtcactgcaattaatttttcttggggaagtggagtttagggcattggacccaccgatgcatgtggccggccatggccccgtagcaaagcgaatcacagccgctgctggtcttcacaaggaagaagaaacactacgatcatggatgtgtggatgagtggcctagattagagtagcaggtaccctttcgtgtcatttaatctcagtcgttgcggttagatcagatggcatttgtgtattctttcgcttggtgcgatctcgagcttggatatgagatccagtggtcctgagtgcataccatttcgattaaaggtgatctaatgtggaccctcgatcttggatcgggcggctgaggttagtgcataccccttcgcgtggcgtttttggattaagaaccctgaagatttagcaaataaacccacaatcgctccttgtg

SEQ ID NO: 93959 - DNA, 383 bp, Zea Mays
ggatccccttttaattcgggatggtcctgttttttaccgtattttgcaattcgggaagtggcccagcctagcccatcaatcaaacgcctcttggtctggcctctctggtcttggcgaacaacactacaacagcggttccctggcgggctggcagctatgaggcccatggcccatgagcttgcttttatgacaacgaagtctgacacttacgtaatgacattgacgtgtcacggctagcgatttgttttttctgaaaccatatttcttggggtcttctggctggggaaaaaagcatatgaatatatgatacaacgtgggctttagatgtgtcgatttagggcaaaaatgaaagtgaactatagtttacaataggaggtaaaaac

SEQ ID NO: 93960 - DNA, 577 bp, Zea Mays
aaaagaataaacttcaacttctctttttttagaaaattgggtatcacactctacccccctaaaaaaagaattcgacctcgacttcagttgcttctattggaacgacaaaagaaagattagcgaagacaaagaaactcacccataatgaaaagttcggggtacttctgccgcatcagctcctcaagttcccaagtagcctcgcgctcggactaattagtccacaagaccttagcatacttaattgatctccttctcatgacatgctccgaggactccaagatacacaccggacgacactctagagtcagatcctgctgcacagcaatcggttccaacttgatttgatggtccggatcccacaaaaacttcctcaacatagagacatggaataccgggtgtacccctgccatggaatccggcaattgcaagcgataagccaagatgccaacctgggctaagatagagaatagtccaatgtatctcgggctaagcttcccggagacaccgaactgaacaactcctttagtaggtgataccctgagaaggacttgatcccccactgcaaactccaagtccc

SEQ ID NO: 93961 - DNA, 726 bp, Zea Mays
ctagatttcagcaccgcttatcaccctcagacagacgggcagacagaaagagttaacaaagtcctcgaagatctattaagagcatgtgtgctagcattcgatagaagttgggaatccagtctaccctacacagagttctcatacaacaacaactatcaggccagcatcaagatgtcaccattcgaagcgttgtatggacgaaaatgccagacacctctcatgtgatccaacgtaggggaaaagcactagaaggacctgcctttgtcaaagaggcagaagagaaagttgccctgatccgcaggagattacttgaagctcagagtcgacagaagagttatgcggacaataggcggagagagctcagatttgaagaaggagacttcgtctacctcaaggtctccccgatgcgtggtgtcaggaggttccgagtgaaaggaaaactagcagcgcgattcgtcggtccctatcccatcattggcagagtgggacccgcagcatagcgtcttgaactaccagagtccatgtctgacatccacaatgtgtttcacgtatcccagctccgcaaatgcctgcaagcaccaaaaagtcacatcgaagaagaggcagtgcagattcagaaagatcttcagtaccgagagaagccagttaagattcttgattcagctgtccgaaagacccgcacctcagaagtgaagctctgtagaattcaatggagcagagaaggag

SEQ ID NO: 93962 - DNA, 341 bp, Zea Mays
gtacagtgcactcatgcactggacgatgattctccgaacttggtcaggatgcatggcccacacatccttcatgtggctcactctgttacattacaccgggtcatcctgattctcggtggggaagagtccaagtgggtgcatcatcatctccagtgggtgatattcgtagaaggtcgtcaaagcttttggtgctgcggcctcggtggtgtcgtccgccctgaacccgacagtttcggaatcaagtgaacgccacccaggctgcagatggtgagactccagggtcagccaaaccctgcaacgtggcacccgatgctcctcgtacaactgcaccgtgtacagag

SEQ ID NO: 93963 - DNA, 291 bp, Zea Mays
gacaaaacctcgatttgagtctgacttttctgatctggttttaaagttttggtctttgcatgctcaaacttcttgagtcacttattattattctcctctagttgtccacaaagtttggaggcaatatgagcaaacttgctcgagcagctctgccgcacctcgacactgctgggcatttgaacatcacaccgctctactttaagtgtttaccatttgttttttccttggactttatagtgtccaaatcaagttattttggttcaatggatccataatcttcctagggatttg

SEQ ID NO: 93964 - DNA, 305 bp, Zea Mays
cggtttacgcctaattctacccttggcgctccactgggaatcactaatttgatcggaaagccatcctagagctcggcacatgcacatcgtggaacaagagtctttcccgtcgtgttcccgacaacatagtacggcaacatacaaattgggtgcacggtaagctttagcaacgtaccagggctcaagaatggcaactaagtaggcgggtggagggacatgatggagggtcgacggtggggtgctcacggtggggcggaaaacggatttgggggaaaacccgaattaaggcgctatagtggatgttg

SEQ ID NO: 93965 - DNA, 481 bp, Zea Mays
gccgggtgaagacaatgtactacagggccccgataagactccgatagcatgtgggatcaagcaccggggtcgtcgtcagaggaggccttgccctgagtgtccatcagagtcatacagggcttgcagtcagccatgcaagtgcgctcgaggatatcgacatgtactaatgctggtggagaaacatgccatggtgacaacattccaaggtgacccctaggaagtggtgcaactctcttaggtccttcaccgtgaacttttgctggcggaaggagatgatgcaccataggagctcgagggaggagaccttgagaacaatgtcgtcaacatatagaaggaagtatgccacgtccggaccacgacggaagacgaaaagggaggtgtccaccttggcctcgatgaaaccctacgagagcaagaaggtgtaaaaacgactgtaccaagcacgtggcgccttattgaggccatagagggaccgattgag

SEQ ID NO: 93966 - DNA, 323 bp, Zea Mays
gattctatctgggttataattgaccatcttaccaaggtagctcacttcattccagtaaagactaccttcagaggagccaccctcgctcggatatatctcaaagaaatagtaagacgtcctggcattccgtgaagaatagtgtcagacaggggaatgcaattcacctcgaaattttggttgagccttcaggaagctatgggcaccaagctagatttcagcacagcctaccacccccagtcagatggatagacgaaagagtcaacaaagtcctcaaagatttgttgagagcctgtgtgctgaccttcgacagagactgggagtcc

SEQ ID NO: 93967 - DNA, 424 bp, Zea Mays
tgataaatgcaatcggggctgaaccaataatcgcaaaatgaaagtcacgagcttgaagttcggacatttatgggcactattgaaataatgtgtggtgaatgcgatggttcaagtggtcttgtgagagacccatcccacatatgtgttgaataaccactgttccgctatttattttatctggcaaatggcatgaattaaaatatgcagttaataggattctgaagatccgcatgagatcctacaaggactcatatatttgaattataaatatgcaacatataaatctcataccgaataatacattcctgacgaattaacactcttctatgtagagagaatatcttctatttgagattatagttcctagatggaacctttccagaagacataaagtctgtgttaaacaccaaagtttgataatccc

SEQ ID NO: 93968 - DNA, 440 bp, Zea Mays
tctacattgatgatatcgtagtcaaatcggctgagtttagttctcatatagctgatttacgcaaagcctttgataaaatgtgtcggtatggtttgaaaatgaacccacctaaatgtgcttttggggtgtcggttggtaagtttttaggatttatcatccatgaacatggcatagagatagaccctgaccgaattaagtctatttggaatgtggggcctccgacctgtaaagtcgaagtgcagaggtttctcggcaaggtgaattatttacgaaggtttatttctaacctagccgggaagattgatgccttcacccctatccttcggcttaagaatgatgccgaattcgcttggggggcagagcagcaggaagcatttgatctcattaaaaaatacttgtcttcggctcccgtattaaaagcaccacgagcaggagtacca

SEQ ID NO: 93969 - DNA, 367 bp, Zea Mays
acgtgtagcatggtgccccggcgtcgtgcatggtggctcggcggtgaaggaggaccttcagagaagaattccggcgactctaaccaagctcaggatgttcatgccctcacacagcgtgccccagcgatgcaccctggccaccctgagactttaaacagcagtcatcgatctgatcgatgatggcggctcctgctggcttcccattggtttccgcccgtgcacgagattgtggccgagacttgggatttcaggtctactctatcgcttttatatcctgggcagaggctataacagcccaggagattctggtgtggggtttgttatgatcgcgtcatggtttgttggagataatcacgctggatttctg

SEQ ID NO: 93970 - DNA, 429 bp, Zea Mays
atgtccttgttgtgtggcccttgtcctcgccacaaaaaaggcactacaactttcggggttgattgccaaaccttccaccaccaaaacttctttctcctctacctcttggagctggtggtctgaaagtagtctgttgcatgctcgaagtctaagaactatgacggctatgttgagcattgctggccctatcattattggtattgtagttgtggattgatcggacatgcctggggtgaagtcttctgtaacaccccaggtgttaccttggctagagccaccttggcactaaaagctgtgttcacaagggtaaagacttagggcaccacataagaaccttggagctcatgtgctaatcaagttgctaatgacatgaggagcattactctaatccttgcacacttactaccttggataaaggggggagaagag

SEQ ID NO: 93971 - DNA, 522 bp, Zea Mays
gcttttcctagcatcaacatcaccagcaaaatcactgtcgctgaaacctatcagttttgcttcctctttcttcctccgctcaaaccatagcccccaagttttggttcccgccaggtagcgcagaatatgtttcaccgcagccaagtgatccttacgtggatcctccagaaaacgactaacatagccaacagcaaatgctatatcaggatgggtattaaccaagtaccttaggctcccgacgacgctcctgtatgccgtggcgtccaccggtggttcagtgctgaacttgctcagcttcaaatgtgcctccatgggcacttggcagggattacaggtcgccatgccattcttctctagaatcttcctggcataggcaccctgactcagggaaataccctctgcgctctgcttcacttcaatgccgaggtagtagtgaagcaagccaaggtcgctcatcttgaatgctgctgccatttcttttttgaattctttgatgtcgtcagtatttgagccagtgatcac

SEQ ID NO: 93972 - DNA, 370 bp, Zea Mays
tttggagaaaatagctgaaggcaaacttcacggcgagcaaaagcacccaaaagatggagtacttgacattgtcaaatgttccctcacgtaggtcagggcataattgatcttccaatttgtcttctccaatttgtttcgcacccaaggcacaatgaagagcacgatggcaaggacctcagggataacaaacgctgcaactgcatcgaggaagctcctcatctgtgaatcagctgctgacgaccactgcccattgtctgtcctctggttctagaccctcttgtataggacagcgaacgcaacaacccaagcagctgcaacaacgaccttgagcaccatgcacacagcaagcattcggccatccctaaatgtg

SEQ ID NO: 93973 - DNA, 328 bp, Zea Mays
gcattgcgatccctttccacgtgatggaactctaatccttcgaacttgtcttccaacttacgcacgactgcacaatatttgcccattgagtcggtcgagcagtcccaatctttgtttatttgacttatgactaccagtgagtcgccatacaccatcagcttctcgatgccgagtgataccgcgatgctcagcccgtggaccagtgcttcgtattctgctgcattattggatgccggaaacaaaagctggagtgcatacttaagttgttcacctccaagagcaataaagagaatccctgcactcgctccttgtagcttcagtgagccat

SEQ ID NO: 93974 - DNA, 643 bp, Zea Mays
acgttgtgaccacatccagcccagcacggcctgctcgcaagcgtgtcagtcgaccctgttcttcttcctatgttcgcccgcacccacgctagatgtcaccatgtcgtgccgcccatgccacgtcgactcctgtcgatttgttgccttagccggagcactctggaaacctctttcctttccccgtgattccatagcaatctcttccctccccgacacatatttctttcctgtctacatcaccatcaaaggaaagtcagctaaatcttcgatctctcggatccgcgccgattcagagtccaatttgtccttgtttctcccctataagaatcgccctgagctccgccattgattcgacgcaatcatgccttaaaccactctcttctgctccctacccatgctcgtcgtcgcacccgcacctttgtcgctcatggccaggcacctccagctcttccccatcgatgcagaggccacctacatgatcatcatagcacactgccacttccctgagccttccctaccttagtctagccccaacatgatgtcccgaccttgccggagctcaacaagccaatgtcgcccatggctagagtgtttgcgtgatccacgtcgccagcaaaagcgcttttgagaacctacatcgttc

SEQ ID NO: 93975 - DNA, 1671 bp, Zea Mays
aatgtttaggcacatttttataatctaccttagttggcatatttatctttgcggccattgccttagccttttatgcggacaactcgtgctcgaccaaatcaacagtacgtgacgtgaggtcccgtccaatccctttcaaaaatcgagctgtgtcagcagtagtagctttactcttctttatctcgaatgtggacaccaattttggtagagggaatttagatttctttgattgtcgtgaatcccttgatggctgtggagaaggtggtggtgtcctaaatgttgatgcttgtggcggagatggtggattagaaagaggatgaggagcagcatgggaagattgtggaggtgatgatggatgtaaaggtactaaagtttgaggaggcggaaatggttggggataagatgacgatggcattggtggatcaaccaattcgacatcccttcgaggccaaaggatgaaattttttatggtttgtccaagtgtctcgattccttcgggcccagggatgtctagcatgtcgtcctcggatccttggacgaccatcgtcacttctaccctgcaataatcatctggtatgttgcttccatgaaacttacatcctgggatcacaatgcatgttcctactttcttcatgcgattattgttaataccatatcttataaccagtgtgcatgtcactcgccttgttatgtcatcaactgaataacgaaccttatttcccgttgacacgacatagcttgggacggttgtacaatcggtgcaagccggcggttgagctgctggaattatttgtagctgtggagtggtcatctgttgaacagacatcgcacttgccaactgctacatcaattctggtggaggatttgatagcatttgagacatcaagtctttgaactctttctttgcctcctgcttaaaataatccgacaactcttctttgtatcgatcacgtttcttgtacaaaccttcccactgtggtccgaatccttccttccatccttccttagacaagattcctcgtacatggcctggatgctcagggttaccgagaccagccattaggatgtctctctccctttgtggcttaaatgatccttggctctgcttacctgccattgcatatatgtttttcgcaacttcttcgacatttggatcatcaaaagatacaccagccttagtttgcctgggttttctagcacggatccaatttgccgtcctttcaccaagttgctcgtaaagcgtcggcaaccctgcgaccttcttctcggcgtcttcttgtctccatttagaaacttgacgcttgtaaccacctgtgcctaagtggtggtggtacttgttcttcttagatagttctgaatttgtatcgtttagagatatgaatttaggactactcctctgctcaagaaatactgcccactgaccttctgagattttatatttttttgtcgggtctaggcctttctttgcaaattttgtattcatctcagacctccagtttcaaaaattgattgcaagctgcttcatcgtgtattccttcacgagttcttctgaaccccgaggtagaacaaacctcggtaatagcttattccatattttgattcttgacatcatctaacatatctttctaatgtcggattgtgatgtcaagattatccctaactaagaaccca

SEQ ID NO: 93976 - DNA, 837 bp, Zea Mays
agcaaagccatccaataaaggactgccaaaagaatcagctttatcatcaaaaaagtggtctaaccaagcggtaagactcactaatcctgggcctggctgcagctctgatgggcataagctagcataaatagcataaagagtctccaagtgaccatggacgtcagagcaaggaggaataaattcttcataaagacgacctgaaatagggatccccatcgcatcagagatggtatgtagtggatatcccatctccccttgactggtaaccaatgtatgtccgtcaacattccaatatgtcaagaaggcagctaccaatgatgggtcagcttgaaaacaataaagtgaagctagtacaccgcgatagatatcagatttttgcagcatacttcggtcttcgtggttcaccagcatcatacgggcccatattaacatcttccgacatacaggcacatccaatcgaagctgcggccgacagtcgttgaaccaccttgatgagggatgcttgaccattttttgggctagtgtggaggtcgagctaggaatgtcgagtgacctcttggatgagtccagtaccgggtgaagaatgtgtgcacgaccagcgtaatctgacacagacggttcttgtgggttcttttgaatgccaaagggaatattatccggggtggtggtcgagagggtcctcgacgaagttggaacacgacatcgtttccgattttttcgttcttttccaataatttcatgtgctggttcagtaacaagctgataacctcgtccaaggcctaaacaattagccaccaaagtcataaaatcatcaggattttctcctttcgcatcgtc

SEQ ID NO: 93977 - DNA, 532 bp, Zea Mays
gtaacattcattatgtgggatcagtggggtgttatagtttgtatcaaagcaataggctgtaggtcctagcaagtggaataataataaattgacacactgcacatgtaggatgggttttctgctttactattgatatgttatggtattgcatatgatagtttgacattatctgaagaggtgctatgccaatcttatttacttattattctcacccctgtggctgcagctatgccgcctcgtagggctcaggacagtccgcaagttcctagtggggactcgatgagtccggcggcaatgttagccgcgatgcaggccatgcagcaggagttggccattctgaggcaagctattcctgttgcccctgcgggtgctgctcagggtgctagtggtggaggagtgcccggggacactgtccctgtgggtgttgctccaggtggcggggccgaggtgcctcttctagttagtggtctttctctgatgcagtggatgggcatgaagttggatacttttgatggcagtggtactccggtcg

SEQ ID NO: 93978 - DNA, 510 bp, Zea Mays
gtggcccgaggccctaatccaaacaccgtgacctaaaaaatgaaaatggggaggagtcgattgcaatagcgccgtcttaccagtgaataatcgatgccctggtggacggtggttcgagcagcggtcaggacatcccgacaagaaattccccactaccagctagcagttgtcaacgtcgttgatcttcacacgtcataccgacacgcgtgaacatcctagggcaatccataccccaggggaatggcgctgaggaggtggtcatcgtccacgcacggttcggcggcgggcgcagtgctccaacgagccattgcgatgacacctagccaccacaccacatggggatgctatgagagtggtcgatataccccaagcatcatccctgagctcccggtgaacacacaatggcagcaactgcgaggattggccatggcgccgtttgtcacctctgttccgatctcaacgctctagatggtggggaagagggtcacgacctagtttttatagatgagg

SEQ ID NO: 93979 - DNA, 761 bp, Zea Mays
agacaaaaatatttgggcatgaagggggtgaaggatcctctcaaggatctaagaaggggtgaaggttggtgatccgtccctttaacccaaatcactcttttcctcgtccacccgcctatcctttaagttacatccgtcccactgcccctgctcaaaatattcagccgagtgcccctggtacttgtttcccagccctacccagtttatctaatagctgcttcaactgtgggaagtctggacaattcatcaagaattgtccctatccgaagcaaaataaatcaaacttccaaaaggcttctggaagcacatctcaaggcaagggaaatgtggcaagcactcaggcaggcaaaggtgaaaggaaaactgaatgagtctactatactctaccaacctagaaggagagcctgtgatgatgggtacgttttccattgccaatcatcccgccgtcattcttttcgattttggtgcatcacatactttcacgagcaagacttttgttgagaagcattgcatacctagtgtcgaatcaaagaagagtcttgttattcaatcacctgggggtcaaatttttacgaagcaagtagtcttccatgtacccgtgactttagccggatatgatttccccaccaatatgatagttataaagaggcagacgtagatgtgattctgggtttgaattggttagcccaaaataaagctattatcaatgccaatcaaaggactgttcagctaagtcatggacaaaaagaagtcaggttatc

SEQ ID NO: 93980 - DNA, 290 bp, Zea Mays
tagtttatgtcaatgacaactttggggatcagctaacctctaaactggaatattgtaccaaatgtgtttgatagtaatgtgtgtttcttgcatttgattctgccagattcctgtacaatattgttctgtcaataacctcgaagtatgcctgttttgtccgaagtttacgatataattattgcgggtcttatgcatgtttgcccatacacttatgatataatagtcatcattctatgccaatacattattctagttttgtctcaagtgtatgatacaattatcagcgttat

SEQ ID NO: 93981 - DNA, 279 bp, Zea Mays
cacggtggtggctgcaccacaaacacacagttagtgtgatcttgctagaatctcgcccccacttagtacaattacaatgactcacacaagagacgaggggtatgtaggtgttaaacgccactctaaacaaataggaacaaacctagagcaagcggtatacaacggtataactgacctaagcacttcgtaaagctgaaagcacctatactaattatcaagtggttctattaatcacttgggtgatttgagccatggattggtgtctcaactcatacacta

SEQ ID NO: 93982 - DNA, 371 bp, Zea Mays
aatgcacaccactgtagatatttgatagactcttcatggaaagctatcaggaaaaaggaatccaggaactttaaacccaacaccttaatgttagtgcttaaccttctaataagtggagggtaattgtcatgcatgcatagtatttacatgctatgaacaatcatccatgattaggcaatatgaatgaagaaataacgattgtcaagccaactagattattatgccccatgaaaagccctccaaccttgttcctagatgctttggcgacaaagttggcgataagaacaataattggcttaacattagcccaatcgggacccgagtgtacaaaacagaattatgacttacttcaatgtagcctcggcactctc

SEQ ID NO: 93983 - DNA, 1137 bp, Zea Mays
cgcggaagcacggctggcagctcccagcccacaccctgcaggtgcactcactgatgcttcctcttcgccccacctcttctccagtttctggatcgctgctctgcttcggtgtaatcagcgcagacatgtttagtaactggcagaatccgctgtagaattccgtccccgcgccgtcgtggcgcgagaaattcgaagtcctccgtgcttattttgaagatctgctgagaggcctcgggctagtagttgggcttttttgaatctatttttcaatgtggctccttagtcgaaagaaatgactgatgtaaatacttcgcgaattgggttggtatgcgattcttgcagtgtggcggcgattcgtgcaaattgtactaaaactgtcgtgatgtcgggattttcaattctatggtagctcaccactgcccactgggactattttctttctctatctaacaacagaacatgatcatatgtcttgatgcacaatggcttttcatctgctaacttgtccatgaaacgcacacagaaaatgtaacctcttctctaacttcaccactactccactaggcagctccactggtactatagattaacaccgagaatagtgtgaaatgcccttgcacaattataaatttaacgatgaacagacaacagagtatgacttctaattcaaagaaatgactgttgttcatgtgacaaatgttatatttgtttacagttttcttgtatcttctgcctgtacataaaatcatctgggcttcatgctctccatgggaagtttactatgaagttaaatttgtgtgattctaatttacctgtgatttccccagaccccactcatgttggagcctctggcattgggtctgccctttttttatgatgttctctacatagtgcctagatgatcagatatgcatacttacttttaattccttgttatctgtggaattgaaaattacacccatgtgtgatagatgttgtgtttttttgcaacgtacttttctggttcatagtccatactctggcttaaatagctccaaactagttgaaatgaaacatttgatttggaaagattggcaactaactcatcatctcattttgacagatcgttgcaattacagttttcttccttctgctggt

SEQ ID NO: 93984 - DNA, 528 bp, Zea Mays
attaactgtcattagggtacgcacaattgataaattctaggccacaaagctaagtagtacatgccatacttgtcaactctgatttcttggtgaaaattggaaaaagccacttttttctctgaatacacaggagagctacatatcattatattaagaagaaattagggaagggtaaagaccctattacatagaggacacacacaactgtcacctgatacaatcaaacactaccacgaccaacacactaaaagcctaaccaccgacctggagagaggagagagctttagcgtcggccatagaccagtacacaagcccctccttagccattctaacagcagaaataacactaggacgacacttatcaaacacacacttattcctatgcttccaaatgatccaaacgcccaagatgaccatggagttgagacagttcttcaggtggactgcaactctagaacaactattcttccaccaggtttcgaaggagagatcaacttgttggggagacagttcctgcagatttgctag

SEQ ID NO: 93985 - DNA, 2322 bp, Zea Mays
catagtcttcccaggtaacttcatcagcgaaatgcgaccaaaccaccttcacttggaccactggatggctgcccgggcgcaccaatcttgtttccagtatattcacaggtctcacatcagcaccagagaggtccactatctgagacaaatctgagtacacaggggtagaagaaggagtaaaagcattgagttgcgaaacatgaaacactgagtggatctgggatgatggtggaagttccaatttgtaagccaccagtccaatcttctgaagaatcttgaaaggaccaaaaatatttcagagccagtttaggacatggcctgctgacaactgtagtctgcacatatggctgtagcttcaccaacacaaactcacctacttgaaattcccttttagtcctgtgtttgtcagcctgcagtttcatcctattttgagctgaggccaatttttgcttgagcaattcagaataggactgcctttcagtaacccagtcattaaccgactattccccatcaccagcaacaacaggtgcagcagaaaacacaggctcatacccatataaagccttaaaaagtgaacatcccaaagatgagtggtaagaagagttgtaccaaaactcagccaaaggaagccatttcttctacagattgggtgaatcagatattgcacacctcaaatacatctctaaacactgattgactgtctcactctgaccatcagactgagggtgataaactgtggtgagagccagtttagtgttgagtgaggaaaatagagccttccaaaaacagctagtgaaaactttgtctctgtcagaaaccagtgatctgggtgtgccatgcagtttaaccacattatccaaaaacacttgggccacctttgctgcagaggaaggatgtttgaggggaggggggggggaatgagcatatttagaaaatctgtccaccaccactagaatagtgtcaaacccttctgatttgggcagtccttcaataaaacccattgtgagatcttgccaggcaccttgaggtataggtaaaggctgaataatacctggtggatgaaccctctccactttagcttgctgacatactgcacactgtttaataaagcacaccacatcagccttcaaacccttccaccagaatagccttctcactctgtggtatgtggcctggcctcctgaatgacccccacaacactgttatgtagggcatctataatttttgttctcagattagagttgcttgccacccaaacctgatcacccttcctgatcactctctgctgcaaggagaaacccttttcatctggactatgcactgctaactgagccaatagcacttgtgcttcttcatctgtaacataagaattaatcatctcttgattccacataggcttcacttcaacaactgactgcaaagccattaggtgtcccactctggataaagcatctgcagcctggttttgtttacccttcttatactcaattctgaactgcaaatccatcatctttgccatggccttcctttgcagtcaggggcggagctacctagaaactagggggtgcacatgcacccgcgaaaatttggaaatatagtggtttggaccaaattttcaccatatatgcaccacctataaattgttattatgcaccttaaaggtatatgcaccctcccctaatttactctagcttcgccactgtttgcagttctgagtgaagcacttggttctctagaaaactcaatgccttgtagtcagtccagtcctgattataaactcagccctctgcatatatgtcctccacttgtccactgtcatcaacagaaccaagaattccttgtcataaattgacagtcccctgttcttcacactcaatgctttgcttaagtaagcaataggtctattcttttgcatcagaacagccccaatgccatcttcacaagcatctgtctctactacaaagctctcatcaaaattaggtaaagccaacactggagtggacatcataaccttcttcaacacctgaaatgcattctcagcttggtctgtccactgaaatcccttatgctgcaacagattggtcaaaggctttgcaataatgccataccctttaacaaaccttctataatacccagtcagaccaagaaatcccctcaactcagaaatagaagtaggagatggccacttctccatggcaatagtcttggatggatcagtagctacaccattttgagagatcacatgccccagataaagttggattattattgtctaggtacaccttgcgcccctgccaaaaaaattcctaggctgccacctaa

SEQ ID NO: 93986 - DNA, 355 bp, Zea Mays
tgtttatctcaaggtttccccaatgcgtggtgtcaaaaggttccagatgaaaggaaagctagcaccccgtttcatcggtccttaccctgtcatttcccgaataggacccgtggcataccgtcttgagctaccagaatccatgtcagatatccacaatgtgttccatgtgtctcaactccgcaaatgcctaaaagtaccagaaacccgcatcgagacagaggaaattcagattcaaaaggatctccagtaccgggaaaagccagtgaagattcttgactcagcagtcagaaggacccgcaattcagaagtgaagctctgtaaggttaagtggagcagagatggagaagaggaagcc

SEQ ID NO: 93987 - DNA, 308 bp, Zea Mays
attagaggttcacaagaggtagatttttcacaaagagcttatctctattagacatatttggtagtatataattcaggataatcatggagctgcgtctcctccttaatcctctccggatatctctccggatgtaaccacccaatgtaatcctcgtggtgtatataatcaagagcagaccatcctagagaggtgcgctgccttccttctcacatggtactagagccgaaggtttagcatgtccaccaccaccgccgaaatctcctcctcctccccttccaccacctcttccgctatgacgtcttcctcct

SEQ ID NO: 93988 - DNA, 471 bp, Zea Mays
tttgattttgcttgcaatttgttctcttgcttgactttgattcaaatcacttgagttgcttgtcggaatgaggactcgacaatgatgacaccatgcggctctggcggtttaagcttgaggtaggcataactagggatggctggctctagcagcttaagcttgaggtaggtgtaatttgggatggccatgaacttttcataacatagttatcctaggatggcatggtaggatcccttaaattgaccacttcgaatcttggggtctttgtccaatagttggatggatctccaaacatgacaggatgacatggctaggatttgtctccctagtgtacttgggtacattggctagtggtcggaatcgtggagggaaggccacattttgaatgcaggatgaaaggaccttgggtcctggggaatcaagggtcgggctataatctcaatcaaagtcatagtgaccgccacatcgagg

SEQ ID NO: 93989 - DNA, 738 bp, Zea Mays
ggaggctaccacacatattcagctctggctccttggtgccctggtctcccactctgagtttgacatcgtggatttcattatttgtgagatcgaggacaccgttttggatggcattcgtgctcgtcgacagttgccatatgctcactacttgtgccacatctttgcgcagctgattcggcctccacagtttcagggcacgcttgaggcctcacgccttgtgtttggatcctaccgtcctgcgcctgaggctcctgtgccagcttctgctcctgtttttgactctcaggccgagaatgcagctcttcatcagttcgacactcaggatacaacagttgttgttgttgatgatgatgatgattttggggttcctcctccgcctcctatgcctccacgctcacatgatcacgaggctgggagttctagtgctgcccctgctgcccctccggctattgaccctgctattgcttcgattctccagtctctcactcagcagcaggctcacctggcagccgagcagacccggttgtccgagaggatgctcacgatgtttcagaccatacaggacaggcaggattcacttcagcagcagtttctccaggatcgggctgagagtagggcattcatggctcttatgctacaacattctggtgtctcagttcccccagttcagtctgctccacctcctccgcttcaggctccagttgtgccagcgattcagaccggaccccttattccttc

SEQ ID NO: 93990 - DNA, 319 bp, Zea Mays
tttctgttgtcacagggccactaagtctaccaaatctaattcataatcacccgaaaaaagtgatcgtgatttttttgttctaaatccccccatgaccaaatagaattatggggtaatgtagtgtaccatgcgaatgcagttcctgtcaaagataacgaaataaacgtacgcggaacgcctctgtgtcggccaattctcctaattgtgctagaaactggcctatgtgttcccgttttctcttcccttagtcacctaaaaattttgcaaatttgggtatcctggttccctgtgggtatgggtggtggtcaaatcggctgtc

SEQ ID NO: 93991 - DNA, 444 bp, Zea Mays
ctcggacagttgcaacaccaatggatattcatttaaaacttcgaccgcaggatgggacacctctagcagaccccactcgatatcgtcatattgtggttagtcttgtttatctcaccatcaccagacctgatattgctcatgttgttcatatgttgagccaatttgtatccaaaccaacctcagttcattatggtcatttgcttcgtgtgcttcgatacttacgtgggacacaatcaagatgtttactctatgattctgctagtcctcttcagctacatgcgtattctgatgccacttgggcaagtgaccctgttgaccgttgttctactacaggttactgtattcttcttggatcctctcctattgcctggaaatccaagaagcaagcggccatatctcgttctagtgttgaagccgaacttcgggcacttgcaactaccactg

SEQ ID NO: 93992 - DNA, 704 bp, Zea Mays
ctgatgtagacttggatgcagcccacacagacgaaatggatgatggttgggatccactgggtgaaattggaacttgacctccatcaccaatcttggcaacaatcatcttaacttggaagcacacattacctaaagcaatggtgctgtctgtgaagcttacgttgaatgtgtacaccttttccatcagcctagttatttcattgggaataaatccagctggattatccgtgatcaagatgtcaagtggtttcttaacaatgcgttgtgccatacgtccaaatagtatgaaatcagtctcgcctgtctcatctcctactgtgatgagcaacctgtacctacgcataaagtagcagtcacagatgtatgattaaggagtcagcaggcatagatgtaccagaccaagaaacatcacagaccttggattaggcagaccaacatggccacaaccagcgtccgagaatttgtaggcatcaccatgaggctttgttttcttgaggcactttctacaggactcgtaccaccatagttgatcaatcttaagaacggtaactgttaccaaccacccaactttctatggaacagttaaatgaggcagtacaggggttagcattgttattttaggcacataagaagagtgaataaaaagatgtaatcaattagcatgaaaggaaccacctcatgcttgaatggatgcaggtgtttga

SEQ ID NO: 93993 - DNA, 578 bp, Zea Mays
tgaagaaaatatatgaagaaaatagtttgtgtctggtgccatttcctctacttatatggaagtgctaccacaaaataatggtttatagtggattgtcaaaaatatacctaggttcattcatccaccttttatccatgttgtaccttaataaataataagatggattgtacccttcccagcttcataatataggtgaaaaatggtgaaaaaaaggaatcattacaagtatcaaagataaaaaccgaattaagtagatttcctagtgaagatagttctaatcaatagaatatggaaaagttaaggctagagattaccactaaccaatggatgtgatccaagaatctgccgtctccagctatcgacacacactcctcgccagcagcccgcccgcactcgtcctcgcggtagtcgcccacacgtacttgccctcgtcggcagcctgcccacactactttctaaatcaactaaagataggggactgacataggaagtgcatggtgcttactacaagaaagatgccctgaaagaacagggcacacaagtttagattttcactgattcagaacctcaggtgtccg

SEQ ID NO: 93994 - DNA, 1036 bp, Zea Mays
taaaaatcgacccccaaaatggccggttccatagatcgcaccaatgttttcccaagcaacatcatgaaaccgactctggagagtatcagatgaagatcaatagcgatttgaagattacataaatcagcgactatcccaagagcgagaggaggcgaaggaaaaatatctgagcatttgaaggtgggccagtgtcagtccagcaaggagagtttcagatggcatctcctctacctgctacataggcccccaatataagtaaatccgacaacatccaatcgcttaggcattgtatagatgattgtgatcaattaaaacaatacatgaggtgtatggaagagtcctttaaaaaatcgacacgtgcatatgaaaaaatcccccatctccaatttttcagctacaattggtcattcacaaacccagccatcttatgataatgtcaatgaaatcatgcaccgggcaaccatagtctcctccgccaatttagaataaaccagtggtctcgctctttacgacggaccacccaagattgtgctagggccgtcatactcttcacaaagcctaactaacatgctcggaccgttcgactatacacgcgggcaatacgagtatctccaaacgtccgcatttcataccggaccgtccggagacgagtacaaataataggatgtcgattattacatgtaatccttttatctaccgcaacagcacttccccctccctacggctcagcaagaacgtagtatggctctaccttcgtatgggaacgagcaattttgggtcccgggaggctgggaagaattgacacacagtatggggtgaccggtagtaatatgagcatgccagaaaatcacgtacctcatgggcaataggttggcataatgaggcagtacacgcggtggcgacgcagcgtctcgatgcggagccgcttgtacgtgcagcagcgcgccatggagaagggggcgcgttcaatagcctgacgacgactggatggtgcctgaataccgagtcaccgtcgacactcggccgaggagaaggg

SEQ ID NO: 93995 - DNA, 348 bp, Zea Mays
atcataacaactttggatgttatagttttgtgtaccagtatgatttgaggtgtctggtgccaacattctggaaaaaatggtcggactcatggatgaagcaatggttttatgtcaaaaatgatctgagtgagagagaggatgtgaagggcatcatccaacgtcccatccgttcatgcttcggcatcaggaggcctttgatcgcaagtggaaacgaagttcaagcatgtttgatggccttcaacacagtgtgaacttacattggcaccagagatttggttcaagagcacattgcttataaggtatggtcgcttgttaatgactaggagatgccaaaggagaccgctgctg

SEQ ID NO: 93996 - DNA, 601 bp, Zea Mays
ggcgtgtaggggaatcggggagcctaaaattgctcgttggagcaacccaccgccgcggatccatgggatatcgtgggcggaggtcatcgcaggtaagaatcatctcatactatgtgattggttaccgtagaagtcgagccaggtccgtacgagtttagttagtattagtagaaccaagatgagttcgtgcaaacacttttgtttagttgtgtgtatagactcgtgcagatgtttggttggttgcactgaaatgtgtattagtgaagggtgtataaataaatctttacatatttatcatgagtgatttagttttgttcacaaaaatcggaggaatacaaatattaaatggattcagtgattaaatattttaattggaagatataaataaaaaagtaaaataaaaatatctggatttctgtgcttaagcgtgcagtgagcctgcatggggggagatgctcccgccggctgttcgcgcggagcctggctacggcgtacggcttgcatgcatgtagcctgtttgaggagatacggaaaccaaacaaaccatgctttgagactccgcgggttcaagtgcatgagtagagaagccaaccaatcacgc

SEQ ID NO: 93997 - DNA, 657 bp, Zea Mays
tcttctttccttgctttcgtgaaggataacagtagtctggatatacaaatccgatgacatcgaataccctgttcatcctctttttgccatgagccccgaaggcagttgtcatggcgtcatcttcagccttcgaatatgctccaagcatttcatcactagtcgcttctatggcatctagccaatcatcattcggctcatcaaactggctcctgtacctgaaggaatacttcaggtagaataaaccaccttggctagagccagcagcagcctccttcggcatttcccacccatttgcaagtggccacactctgtaagcaatgtgttcttgaaccaggtctgttgagccaatgtaggtgcacactgtgttgaaagctgcctggcatgcttgaacttcattcccaagtgcagtggctggcctcctaatcccgaagcgagaccatacagggtgttgaataatccctatcatatcctccctctgacttaggtcattctttatgtaaaaccattcctgcatccaggagcccgaccacgtcttctgaaacgtacgcactgggtagcttgcctcagatcgaggcacgaagatgtaacaaccaaagttgttgtggtactgctcctttctggtagccttcgtctcataagacaactcatgaatgttgc

SEQ ID NO: 93998 - DNA, 502 bp, Zea Mays
cggaaaggttcctctgatgataaagctacagtcaattagagaaaagaaaatatataaaaaacttagaaacacaaacctgaaattgccagatgaatagccacacgagtagttctctattttgtaaaccaagtctgtttgtgtttcagagaggtgtggtgttcatatttgagcgctcagagaggtgtcttccatcttactcgagcatcgcaagatccgggcggggttggcgggtagaatgggaagaatgagatggcggggtggtcctgcacttgcgatgggatgcgggtcgatgttggtcctgtgcactggatgacgacgaggggattgagttgcgattccttccatagtggcgagacgtggattcagtttgggtgcggaggatatgggcggggcatccgcggtgcatgggaacaacgattgggcggggtggtcctgctcacgcaggtcgtcggcgatgggattcctgcgtgctggattgctgcgaggcgtggatagcggcgag

SEQ ID NO: 93999 - DNA, 486 bp, Zea Mays
agcccatgatggtgctacggtggaaatagcagcacaactggaatcatgagaaggttttctagagagagcatctgctgcactgttttcacttcctttcttgtaggcaaccgaatattgcagccccaatagcttataaaaaactttttgttgccaaattgtatgcagccgctgttcattcagatggactaaacttctctgatccgtgtgaataacaaactgcgaatgctgcagataagctctccaatggtcaacggccattaatattgcgaggtattccttttcatatgtagagaggcctcgagtttgtggtcccagtgctttactgacataggcgagtgggtggccaccttgcattagcactgccccgatgccctagtcacaagcgtctgtttcaagcacgaaaggcttggagaaatcaggcaaggctaaaaccggtgcttggctcaccttggttttcagacaatggaatgcgatgtcctgttcttg

SEQ ID NO: 94000 - DNA, 560 bp, Zea Mays
gatctatcagagcttttaatcagaaatgaagatttacaatggttagattctccattcactaaacaggagattgccaacattatcaaatccctaccttcgaacaaatcccctggtcctgatggattcaacaccaactttattaaaaagtgttggcacatcattgcacaagacttctatgatctatgtgaaaagttttatcaagaagaggtttacctgagaagtattaatggatcattcattgttttgatcccgaagaaggaaaatccgcaaaaagtgggagattataggccaatttcgttactaaacaacagtatgaaaattttaacgaagcttttggtaaatcggctgcaatcaatgatgacacggctagttcacaggaaccaatatggtttcataaaaggaagaacaattaaagattgcttggcttgggcctatgaatacattcacttatgtcattcctcaaaaaaagaaatcattgtgctaaaacttgacttcgaaaaggcgtttgatactttagaacatgaactgattctgcaggttatgactcataaaggttttgg

SEQ ID NO: 94001 - DNA, 546 bp, Zea Mays
cattaattggtcttccttcttggtatagttgctaagaatttcgttacacatagtttcgatcatttctagccactctttgcatggcttcttgaattgcttctcaaatttgaatcgataagggagccgaacaagttcgtactttttgcccccctcctttttcttaggcattccccagccactagaggtcagaaatgttctatttgccaagtactcttgtactagatctctagtgctgatttcggcagctaccactctaaattccacttcggctagctggcatggggagccaagttgcatgtggcacaagggccatgtcatcccgaagcttaattttattggactcatgaccatagtcattaacttctctcttttcttcttgtccacctttatgtgaagtaaaaccattcgcttgtccaaccggtcggccacttggtgcgataggcaattaacggggcctctgtatctttctgatatgcgaagttttagtagccaaagttcttatgaagaccatctattctggccgtcatctggtagtgcagctcgtgc

SEQ ID NO: 94002 - DNA, 467 bp, Zea Mays
agctcactcacggtggagttttgattgatttgggggaacttcaaaattggagcgctcttgtggacaatctgaggcactggctggtgcgttgggtgtgtgattacatagcggagctgatggcacgcttaatttatagggcccgaggacggtggctcctaatttttgcatggcgtgctggaggccagagagaaggaaggttactggcacaagggattcgtggctttcaccgtggcctgaccaccggcgatgaccagacatgctaaggcaagttactgcgacgtggtagagcacctaggcacgtgacgcatggtcggtaagcgaccaacaccggcgaggaccattttgctcgaccgcagcctaagtgggtacgacgagctcaccgtcgaccgggtccgagcctatccagtgccaagatttttatcctgccgtcattatctcctcgctagagagtacgaatcgtggcgacg

SEQ ID NO: 94003 - DNA, 761 bp, Zea Mays
atttaattcaagagcacatagcattcagagtatggccgcttgtaaagagctgggaaatgccgaaggagaccatcaccgaatctagtgaaggtgaactggtctggctgaagtacacattcagatatggggataaattcaatgaaccaaacgatgactggctaaaatgcatcgaagttacaagtgatgaactgcttggatcatattccaaggtggaagacaatgcattatccacagccttcggcggccgaggaaaaaaagactgaacaaagtttttgatgccattggttttgtttaccccgactactgctatccgctacgaggacggggaaagaagaggaaaattgctgcttcggccacaccagatgagcctgcgccgaagggcaaaaagttgaaggtccttacccaccggccacgctatattgaaccggctgtggtgtctgagtttggcggtaaggcttcttcagctgctgaaccaaaagaacctgcttctcccacgcagaaggttgaagagtcggctgtaatgccgaaggcaccttcggttgagctagttgaaacgaaggttgacaaagataaggctaaatggtcaaaaactgaaggagtaacaaagatgcccgagattttaagtccttcaacagaagcaaccgtgttgaaggcagaaaagagttctgccataacccctagaagaaaaagtatggtaaatgtatgagatattttagaaacaacggattccataagccccgctcccataaagaaggttgccg

SEQ ID NO: 94004 - DNA, 497 bp, Zea Mays
ggaaattggagaaaaatgagcccaaagttgggctgtcagtctgcctaaaatctgaattatgatattcagtggcataggatgaactttgggagccatttcgaggatgatccattaggtgtttgagcatagttactatagcaagattgtagctggattatagggctagaactttgttacaaagagattggcaagttgccacatagaatttggaggaaaactgcccaaattatgctctgtcaggcacattgataagagctctgatggtacagtggactgaacgagatcgctggtgcagtgcaccttgccgccggtgactcctacgcctggattcacgacggcgaggtgattcgtgctcaccggtgcctggataacgtttcgtggtgaaaagctctccaccccggatgagcttaaggcactgttcgtccagtcgccatgtccgctctgccccgatcgcttgaaatctaccctcgacggagttagacacctcacgatcttgt

SEQ ID NO: 94005 - DNA, 573 bp, Zea Mays
tgatacccttcacattaacgctcttttaaagattgtaatcaccgtttgttgggtatgccaaatcagagtgacatcgattatataagtataacggggtggatgtccaacatttccatgcatagtgttggtttgcttaacaatgttatcaaattaggatcgaacctttgtcatgatgttgggagctagggcattggatgtcacccaataatcaagagtcacagaggtgactagcaaatgttccttacttgtgttattaggtttctagcagtgattctaaagctcaatagaacttagtgaatatggatcttgtacactatatgcatgtcattagtgggaactggttgcaaaacatacagtgggagattcttttattaaattgtttaatgaaagaataaagtaaacatgatgctgaactttgccttttattttattgtagttgtcacccaacacccctaccattttatatgatgatcaattcttgacaaataaaaactcactagaatgaagtttattgattggtaccataacttgagaattattctcaagtaagagaaaaacaagtatgttctcgag

SEQ ID NO: 94006 - DNA, 542 bp, Zea Mays
ttcaaatcatgaattacctcaggaagtatcactactccttcaagaatgtttctgttttttatgaagactgtttgattgcccccaacagccaccttggctacctgggaaagcctattagaaaggcctttcgtgaaaattgtgaaatcgacgttaagaagacagattggacgatattgcttaatcgaggtggcatctttaatttttggaaccaaggagatgaccccataattcagcctctgaatatctaaatttccgccatggaaatctctaaacattttcataagatctcctttgattaaataccaaaagtttttgaagaaggccaccccaaacccatttggaccaggggcagagtcaacatgcataaggccaatcgcctgttttatctcctcttcatcaaagggcctaatcaggtgaatggcctcctcagtagatagttcacttctaccttcccagaagtcctcgtgtaacttcatcgcacaaggaatagatggcccaaaaagatttttataaaaatcaaccacgtggtttctaatatcttt

SEQ ID NO: 94007 - DNA, 652 bp, Zea Mays
tcagcactcatagacggatctctttggccctgcaagtattcgcaagttaaaagacgctaaattgagttcatagacggatctctttgacaaactaagcacgtaccttacgtttgaactaggaaatgaaatcgggcaatccatttctcgcaccctttctaagaagagtatcatattcctgtggagttgggtcccttgatcgacgccagaattcatgaagaaattgttccatgtatggtgtcaccacttcaaggttggtcaatacatatagcatgatatgccgccactcttcatgtgacagggtcttggtcgtcgagccacttgcgcttctgagttggcctcgaaatatgttgaggttcgattcattgacgccatgattgtaatgagggggtggattatgcacgctcggcagtttgtcaccatagtaagttgttgtgaagtttgacacctcctctagaatgtatgcctctacaatggaagcctcgattttgcatttatttctacatttctttcgaatagtctttagacatctctcaattggatagcaccaacatcccttcacgggcgatgaagaatcaaatgctgcattggattaaagaagccgggtggaaatatcttctcaagcttacacagtaacacgagtgctaatttttcc

SEQ ID NO: 94008 - DNA, 1185 bp, Zea Mays
gccgggcccacctggcagtgatggtgtgtgcagttgggctggcgcggatgagttacttgggctgcgcaaagaattcagcccaaacggctgagagaagtgtcatccttttttattattattatttttattttcctccattgagttcaaatctaagtatggtttggttctaaatttcaaatcaaatgcaacacctaaaaatatccagtatgaggtacatgtcatggttgtcacttcatttaggcagatgcttaatttatagagcacacattattagaaaatactgttttaggtgtatgattaaattaaagattcatccaaacatcagtgttcactacctacttatctttagagtaaagtaagagttacttaaatgctttgaaaagttacttaagggaaagatactctgttttagttagtggattgaagatcattatcatattttctctcctagacccaagttaacttttggttttataaaggttttatatttgaatcttctatcattatcatgtgtccattttttttagagaataattttaaaaaaaaaataaaccacttttgtaaaccatttaatcaataattttttagggaacatggtatagactccaaaataggattttgggtgttacaaatcctaccccccttaaaaaggatctcgtcctcgagatttgtaaggaaaggaatacaaaacgattggcttgtaattcaacttttagtctataattgtttcaaatatccagaatattttatagtcaaaagtgggtgattaggagagcatgggtatatatgggtatacccactttattatgcaggatgaaagatatctttaaagcatatatagttttgggtaagaaggaatgggataggaaaagactccatccaggattgtggatcttgacttatcttggtgatctcacttgatccttgaagacttgagttggtgctcatcccttcttgaggaagttgatcatcttcgatcttcgttattgaagttgttatccgaattagggacatgtagttaagataaagcagtaggtggagcagctagtttagtaggtggttataagttaaatgatattagtcataatctggtttggttgttttgcttctgaatgtttaggataggttatgtaacctattatgtaggtcaggttgttgggtatggccgagttgatctaatttacc

SEQ ID NO: 94009 - DNA, 312 bp, Zea Mays
cttcattatggagattgatcaattgtggttcacatttcatttatctgaagaggtgctgttaatttcttatcattgccttttgtgttcccgttatgtggtttaatgtttgattttatagtttcatcttgcttgtgttcagaataatatggtttaatggttaagcaatatgcattaaacttctgagcttatgtagtgtcaatgttgttggtgcttaaggagtagtgtcgaagttggtgctaaaggcagtcgaatcactagttgctggtcattctgggtagaaccgtgtagcaaaaagatgcattttcatcatca

SEQ ID NO: 94010 - DNA, 479 bp, Zea Mays
tgaatttttactgagtggcctttccacaaaggacatgccagtgaccaaagccgatttaatagatgttctatgtgattacatcatgacaatccaagatgatacgacattagagtaagtgttcattgttttatctattttatatgtaccaactacgtagagttttgatatatacttttgtcatgttgcattacaggatgacatgggtgcgaagtttcaacccttttaagatagaaatatctgtcaaagacctgcaaaacgtattaagggtaaatctagatatgactctaaaatattttgacatggttgttcgattgttggccattaaagagtcacatatgtcgaaagatgaaatgataaaggataaaaaaacattatatggacatgcgcttctgggtaagtttgtttccaatcaataatgtagtaatatattgtatctatacatataatcctcatgtggacatgtatatatatttatctag

SEQ ID NO: 94011 - DNA, 602 bp, Zea Mays
tcctccttgatttcaaccttcaatctcatcccaaccattgctatttcccgttcgtgagaggcacgatggttccaaagaggaagaagatcaccaaccagtacaagaatttggtagacatctatcgtggtttcggaaaactggggacaataaatttttgttcggtgggggatgcaagcgcggactcactccaaatggtgagtcactgggactcggtgagaaatctgagacacgagtttataccggttcaggtcggggccctagtctagtgtagtgctgatcatggaattgcagtagattgtgtgcttatgtgtaggacaataaaagggtttccattttatacttcaagggatgaaacttacagccgagagagagagatttggttgccatggtgggcccttcatgggccctatgtgcggtcgtactcctgacgtggcaccgctcgcctttcatgtccctgtagcgagtccgcagctgacgcctcgtgcagtagtgcacgacgggtcccctagggcagtcttggggcatctttgtacatggcatggctcctcctgtcatcatggaccttgcgtcactccccatcatgatgttgtctagctttcggt

SEQ ID NO: 94012 - DNA, 551 bp, Zea Mays
cgtctctcgggacgaagctttggaaatgggggaaacccctaacgaaagaacgcatcgagaacgacgcaattctcgccgccgtgatcatcgccaagcttaggagcgcgagcgggagcaagccgaacaagacggtaggctccgacgggagaacccgctcctcgcccggaacctataccctgtcttcgctcaggcgctaaacatgccaagcgaggttggaggggtcctagcgtagatagccaatggcctcccgcaaaccccagtcgcgtagggctatcggtgagtactcactcaggtggccaatcaacttctacctctcacccacacgctgaacgatctgcgtcacaccatcaacatccgacgagacgcgcgaagcaacatcaacgcttcacgcgatcgtcgacataaaaatgaaataaggcaccgagaagaatacgatcaggatcatggtgcaccggcacgtagccgagcaactaggaccgagtcagcggcagcctccaccaacagtccggtcctgggacagtcgaggcgacttgagactcgctcacctccct

SEQ ID NO: 94013 - DNA, 443 bp, Zea Mays
gagaattcagccaacgacaagcactcatcccattttttcgaataaactaatacacatgctcgcaacatatcttccaagatctgatttaccctttcggtttgcccactagtttggggatgataagccgaactatgaattagcttagtaccaagagacttgtggaattcctcccaaaatcttgaaatgaactgaggtcctcgatcagacactatggtcttaggcataccttgcaaactcataatccgagcaatatatagttcaacataagtctttgttggatacaaagttctcaccggcaagaaatgtgcgaccttagtaaaacggtccacaattacccaaatagagtcataaccctttgatgtttttggtaaacctatgataaaatccatactaatatcctcccattttccttctggaataggtaatgattgcaatggtccagc

SEQ ID NO: 94014 - DNA, 281 bp, Zea Mays
tcccttttgggtttggtaacccatatgtgtgatgtgtcggacctaaatgttgaccgccaagatagattcatttcagtgtattattggttgagtgtctttatctgtctgaattaaggtcaaaggtgccttcttgcccattatttatactcctcccttattagttcaaacctaaatgcaaataattgcccgcctcgtgtctcatgatatgatttgttaatgtttaaactggaaatgaagaaagcaactgctacttgaaattatgatgacattgtcctttcttg

SEQ ID NO: 94015 - DNA, 485 bp, Zea Mays
gccttgtcttttacgagtgggctcatttctcgctttgttctctccccccgtgtagtgcaggtacattacaaagcagttccattccgttttcgcttttattaggtactgctagtgaaatcgctcttctcctttcgtcgtgccacgtggcggtgccaggcacgttagaaggtgatagcaagcagatgagctcatgagcagagggagtcacggctgagactgagaggattaggtccagtggatagcgtcgattatcagccataccgcacttaatctcctttggaaatggcctcgtttctcgcctgccaaatagaatgctcctcctcctccttcttgtggctccttttttaaaataataataaaatatagaacgggaaggaaatcgtcacgaaattgaggggccccgagggcgacaagggagcgcgcggtgcatgcatccgccgttcctatcgatgatgtcggcacaccagtgggagtggggcaaacac

SEQ ID NO: 94016 - DNA, 494 bp, Zea Mays
cagggatcgtcttctaccttggctgctactgcttctcagtacgtacgtgataccggcctacggcctctaccgtagataccacacggtggcaaccaaggcatgggagaggagggactcaccgcttaaaggcagagccgaccgacgacggaacacggtgcgcagcgaggcacaggagccaaacaccgacaagcagaggattcgcggcggcggatgaaatcctaattacccagcgctctatactctaatccgaagagtactaatcgtagcgcagataaagccgaatttagggagggagccataccgagcatcgatcagaatctatcatggagacgatgtcccacggctccgcgcggacgcgacgaaatcaacgagaatcagccgttcgcccctgtccctccgagctcagagtcgaccttgattgattacaatccccgcgcagctacgaacaccaccatgtcccatactgcgactaatttcagtcgagccgcggtgac

SEQ ID NO: 94017 - DNA, 634 bp, Zea Mays
ctttttgtctttcctggatgcctactccggttttcatcaaatccggatgtctagggaggacaggaagcacaccgcttttgtaacgatagatgggttgtactgttatgttgtgacgccttatggtctgaaaaatgccctgccaacatttgttcgggcgatgagtaagaccttcagggatctgatctgggacaaggtggaggtttacgttgatgacatcgtggtcaagactagaagggggtcgaccgtagtggaggatctgaccctggttttcgacaacctgcgggcaacccgcaccaaactgaacccggagaaatgcatcatcggcatctccgcaggaaagctgctgggtttcctggtttcatatcggggcattgaagctaacccagaaaagatcaaggctatcaagataatgaggcctcccgctcgtgtcaaggacatccagaagcttgcgggatctctggctgcccttagctgcttcatttcaaggttggctgagagggcactgcctttcttcaagcttctacggaaatctggcccttttgcctggaacaaagaggcggagcaagccttccaagaattgaagcaacacctaacttccctgccgatcctggtcgctccagagccaggggaaccg

SEQ ID NO: 94018 - DNA, 868 bp, Zea Mays
ggatcctggtcctcaccgttgtcgtcatcactaggtcgcctgctgaacgctggaggtgggggcggtagaggctccatggtcgtatcatgtaggtgcgccggggtagcgctcacactgatcttgaaagtgaggcatctcttctcaattgtgtgcaaacctggctcgatgatgtggaggtccataacacggtgtagtcttccaggatcaaaacaccaagcactgacatgaaaggatgagaaatctttctcttgcaaagtgtcggggtgcacttccgaaatccagcattagtctctcaagatgttttctgccatagaacgaaaccaagcgtgctctggaatccctctaatctcaacctccaccataccagacatgatcgttgaagatgcatgagtaaacctcgaccagcgcttgaacatcagactaaaatgaggcccctgtatgccttgccatcattgagcacccttgaagcagttgcttcattaggtagaatcaagaggaaatcctctggcaggacttgatgaatccacatggcttcaatattgacatcaaaattatgagcaacttctaacacctcaacgccaagcacctccggcctagtcccatcaactgttatgaacagggcacgatggagagttagctcttcacgcgccatcttggtggtgaattccaaaacacaagaaggctttgtcttctcgatcatctccatctgtcctacagacctatgcgtaggcatctggaccttccgggaggcttcaacatcatcagatgaaaccgacaccaagcatcatcgatccattgccccgtttggaacgtcttgttttcttcttgttgtgtaggcatctttgagagtcgcctatagcaaccatcc

SEQ ID NO: 94019 - DNA, 400 bp, Zea Mays
gtgaaggtttcaccgatttgtgaatttattcgatctcaagaacagcccaatttggagcctgttaaaacttttatttctcgaagcaaacgcaaattcgaaagtcaatctcgtctcgcaactcccgtccagactcatttatccaaactctcgacaattgtgatgttacctaatctatgtccgaatccgctctctcgatagccagtctatgtccaaatatttaatctgaatccgcattctccatcggaatctctatagtatcaacctctaattatttcttatgcaattcagcttgttatatttatgtcatcatccatctctatctatcaagcgtattctaaagatttcttaaagtttgaaccaaatattcgtgtgaaattataaatcctacgcttacctgaga

SEQ ID NO: 94020 - DNA, 377 bp, Zea Mays
tccccagcagcagacccattctgtcttcaagcagtggttggcacctcgttcagtgtcggtaaggtttcccttccacctattttagggttgtggtttgtaaatttttgcagtactatgttcaattccaacagcattgtttgtggtttcgtagataacccgatttgaaacggttcgtagtgacctcgcccaagccattgcaaaatgcatgtagttgggaaggagttgaaagatttggtcggagacgagattatggattcaccagatacggccaaagaggtgtcagtgaacttcgcaatgtggcgcgtgtatgagcttgctcagtcacttgagaaggaagcacaacgtttagaagatctcgaagctggtccgtcgccacc

SEQ ID NO: 94021 - DNA, 398 bp, Zea Mays
gtttgtttctagaaaaggtctctctatggcctaaagttcgctccccatgtgtcgtgtagttggttcgcctcttagattctctccatgagtacatgatctgacacttcactctgtctatcaccatatatatcattgacacaacatacctactactctatgtcattgacattatgctcaccccttcatttgattcttaacattgttgcattatccttgccctagcttaggagttattgatgaaggatctcgacccttagcatgatttcctaggtgtttttgttgaccgtcatgcttatgaactcttcctatcctagtgatagtatatgcttgacatccttgcttgtgctagtaggtctggctgcaaaccttgcactagatgtgccaatactcatgctaaa

SEQ ID NO: 94022 - DNA, 494 bp, Zea Mays
tggaaagtggggatgaagattctgaagaccggccctgcggctaagccataccatcttcggaaagtcgaccattaaacaaagtcaaattgacgccatgaagggaagatactttcgtgacttgtctattgtgagtgttggaggggacaacaccgcccctgctcctgaagaaaatgaggttgttgtctacagaagctttatgaaggcgggtcttcggttcccattgagcaaatttttggttgaagtgttgaagatatttcagatctttcttcatcaaattactctgaagctataatcagaatgggtttgtttgtttgggctgtgagaagccaagggctggaactgagcgcgaagtgtttttgcaatatgcacaaactgttgtacgagacgaaggccactagcaaagagcagtatcacaacaacttcagttgttatggattcattgctcgttctaatgcaagctacccgattccaacatttcggaaaaggtggcccgg

SEQ ID NO: 94023 - DNA, 860 bp, Zea Mays
aagcctgcaggcctgctgcaacccctcccagtacctgaatggaagtgggaagaaatagacatggatttcgtaaccggactgccccgaacgcaaaaagggaatgattctatctgggtaataatcgatcgtctcaccaaggtggcccacttcgttccagtaaaaaccacttttggaggagcctcccttgcccgaatataccttaaggagatagtcaggctccatggcattccgcagaagatagtgtcagacagaggaatgcagttcacctcaaaattttggaaaagcctccagcaagcaatgggcaccaagttagatttcagcaccgcttatcacccccagtcagatggtcaaacggaaagagtcaacaagatcctcgaagatttactaagagcctgtgtgttaacgttcgacagggattgggagtccagtttgccgtacgccgaattctcatacaacaacaaccatcaggccagcatcaaaatgtcaccgttcgaagcattgtatggaagaaaatgccagactctcctaatgtggtccaatgtaggggaaagggcactagaaggacccgactttgttaaagaagccgaagagaaagttgccctaatccgcaagaggttacttgaagctcagagtcgacagaaaagttatgcagacaacagacgaagagaactcagatttgaggaaggagatttcgtttatctcaaggtctccccgatgtgtggtgtcaaagggttccaaatgaaagggaagctagcaccatgtttcgtcggcccctaccccgtcagccgagtaggacccgcagcataccgccttgagctaccagaatccatgtcagatatttacaatgtgtttcatgtgtc

SEQ ID NO: 94024 - DNA, 548 bp, Zea Mays
gctctttgcagcttcgtcttcggatgtttttgtctcaacttgcgtttttggcgcttcggcagttttcttcggagtggtgcttgaagactttattgtctccagcacatctagtacattgaccatccttttcctttttggggtcgctataagatctttttgtgtcttcggcactgttacttctgccgaagggctcagaactgatattttgtcttcgactccagactcttcaattttgttaaccttcggccttacatccggttcttcaatcttctgtgtaaaagtaagttctttggcttcagcagccgaagaggtctcaccgccaaattcgggcacttcggccggctcaatatatcacggccggtgagtaaggaccttcacctttttcctcttctgcgcgggctcgcttggagcagctggagcagcatcttttccggaagtggcactcttcctcttctgcccccacgacgggtagcggtaatcagggtacataaacccaatagcatcgaagactctatttagcctcttcttcttccggtctccgaaggccg

SEQ ID NO: 94025 - DNA, 589 bp, Zea Mays
gtttgggttgccaacgattcttccaagcgcctcttaatgatattggagtgcacgagtgggtctgccttcattgcttgtttgcgcgaagggggttggatcttcatggcgccatatgctatggattccagtatggttgctacaaatctagtctcaccggagactagaacatcatgtgcaccagaaattagtggatcttctatgtctgtagaatctagagcatcgagtacataagtaggagttgatgatgctcagtgtcctataacaaggtctcaacatggtattgtgcaacccagaatctacaaagacgacaccttatggtacaatcctaaaactagtttattaactaccgttgatgaatctaattgagttgttggagcattaacaaataaagatttgaaagttgtaatagattagaattttatgctcctattaaaaataaggcataccatttaatctcatcgtgaaaggtagtcatgttgtaacatacaagtggtttataaaactaaattgacgcaagatggcagtctagatcaatataaggctagattggtggtgaatgatcttaaacaaagatataacattgattatg

SEQ ID NO: 94026 - DNA, 787 bp, Zea Mays
aatgcatgtaaggaggttttaccagcgtgtgtacagtgtcaagcctgcccatgaagcagtgcggctccacggtggtggccttgctctggcgagcaatttgtagtcgtcctgtggcccctcgagctcgttgaattacccttgaaccctacttggttaccggtgatgctcccaaacatctttttggctttcgaacgacgctgcaggcgcaaggccacgccggtggctatttctccttccttcggttcgcggtggtgctctacgatggtggcgcttgacaatagagctatccttcatatgcgttggtccaaggggggtattggttggtacttatacgcatgggataaggatcgggggaaggcattggccgatgctcgcggcttcgtttgcaacaactgaagatggttacgatgattggcatcgagtttgttacgcacagtcggtaggagacgcttctgtgcagcgggacccacacgcagtgtctttggaggcgggcgcacgcgagaccagttgaacgtgacgtatccaaccgagccgtggagtccaagtcctggcgaaactccctgcatctaccttctaatatcgtcaggagatagaagataagcctaacccacgagacccatgcatcactggctcagctgctcaaagggaaaagaaaagggaaggttgaagaagtgggccggtgggtgtaatacttgaccgagaggaaaaataccgacctgagtgcaagtaagttttctcttctttctttttattttattttatgtttcccttttcaaattcaatttta

SEQ ID NO: 94027 - DNA, 669 bp, Zea Mays
caagattgcaaacatattaactcgtaagtacagcatgtttttcttgatacagttgagacttgatgttacaacattggggtttaaaaaaagttgtaattacttttttttgcattttagcctgtcttgtttagaaaagtaaaactgtgctttgggttcatcacacaaccatcacatgatctagtgcactctttattgtaaccttttgtctcttctgttcttcccaaaacagacaccatatcaaaacatatcccactttccacaggagtcgagagagcgtctgctggttgacccatggcactgacccatatagttctgaatatttgatggttcaatatggtttaaggttctgaaaggcctggaggttgaggatgcatcttgttagattcaaccactttataaccctcagctgatatcctttgtcttctaggtatgttttctgctgggtgagttccaatgcattctttttgttttcaatttccccagcattgactgacgatactcctctagacatctaccaggcctctggtgtaaatgttgaactgtaggacatgagtaaaagagagccaatagaccagcgggttttgcaagtaaatagcttctttaactcgtacttactctattacttattttctcatcattagccccatttccaaatgtaattgctttctg

SEQ ID NO: 94028 - DNA, 485 bp, Zea Mays
gagaaccctaatcaatccaaggaatatatactgcctcttcagggttttagaattgtctgcacattttctatggtcatgttcgttgtgaattaccgtggcttctataatattttgcctctatggatcgtagttgtagtagttcgaacagcggtagccaaacaacctatgctcaaaacaggggacaggaggaatcctagcttgctgctgggctggaacaaagtagttaaaaatagccaaggagtgctttatttggatcgaataaaagcgtgacgatggttggttctgtgtatgcatgagctcgtgacgaattggcagcaatttggaccgtaaagcttattacctgaaccacagtgcctattacctctcttctcttctgttcttcatctttcatctgcatgtacagttaaactcaagcttataagaaaccctctcaattgttttggagagaaattaaaactctctcaaattataacactacaactctg

SEQ ID NO: 94029 - DNA, 578 bp, Zea Mays
tagactcagcctaaattcggattcccacgaggttgtgaaccaaataggaccttagagcatctccaccatattgaatacaattaattctcctccaaaactactaataaaaataattcagtaaaataattcctctttttgtcaaactacctatagcaggaaacatgaatcgtctttctctaatctttttctcacttatttttcaaatgagaaaaccacttcctcgaagaaacgacatttgtgtctcgtagtcgtaactcgtaaggacactccaaacccaccggccgggatgacgccggcttccctgcttcatacccgacttctctactgtacactccaccaccagacttctctaccatttcactctaaggacatgtttatttaattatttaagctcttgtgtagcttatcggcgtgaagaaatagaagccgaaacatacaactagctttttgatttatcttctgcattctagaaagttaagagatgagaaacaattaagtttatatggggtgctaagtgatcttagtagccgacataagagaagagaagcgcacagatgaagccggggcggctttaaatt

SEQ ID NO: 94030 - DNA, 288 bp, Zea Mays
caaatggcaccttaattggatttcagtgatggcacagatagagagtgtttttagtttgtttaactgcgtatccaatagttcacaatccaattgttcatctagcatgtgcatggttggtgggacgatggagaatggcatgggccctaatcctcgttgagccccacacaaaggaatgccgacacaatagctaataatctcccggtcaagtaactccatggggccttctctacgaacaagtggtgctccggttatagtctctactggatgctccacaccgtctctactatc

SEQ ID NO: 94031 - DNA, 428 bp, Zea Mays
ccacaataatcaaacccggtataaatgtgtatatcgattgcgcccttcacacactaatttgcattttaacttatacatcacatgaacacccctaattttacccgcgaccataaccatgcgcatttaggccataacaagcaaatcatcgtgattatgagcttaactaaagccgtccaacaattcggctaactagagtaacgatatagcccgctaaataacatacacgtcggctagtccattattatcgcaatccgagacacaacatacactacagcaattttataaacaccatattcacaagtattttcgcacatcgaccaatctatacgaatcgtaaaccactagtctataattcgcaaacactatgcatttacttcccgaattacgaacacatacatatttatcatacgaaccgagtatttcaatat

SEQ ID NO: 94032 - DNA, 2986 bp, Zea Mays
catgaatcccggatgatacgtgacaggcgttttacgcacgcataaaaatatgtagtaatgtgcataaatcatgtatagaaggaatcttttgtgccacgaatcacgggaacaaatattaccatgtgcacaccgtttacgactgcataacgctgtgtaacatgatagtataaaccatgcaacatttaaatctccaccgctttgagataaggaaagacgtgctccacgttcgcgtaaataaaggcacagttacgggaggaaacaaattctaatttacagccgctcgtccacgttcgtatctttgatattggcggcggttaacggcggcggaagggagagcaccgggtggcgattaacggcgagaaaatgtccagcatcggcgctggcgatgacatgcaacctgtagcgtctgtgcatagatcaacatgtacgtctatttcaatggacatgcatcctgtagcgtctgcgatcaccagttacacagagggtgtatctgttactccccccgcgacattgagggcaccttgacatattgatgagcacacaaaatcggtagacgtggtcggcgcagataagcacattcccatgagacatattggggcgcatgaacaggatacacctcatattcttcaaagccatgtaagttctcccaattatgatactattattttcttacatactttttttaatgttgtacctatattacgttagatttaatcgctattgaatcgtaaacgttaaatttttgtgcgcagccggacaatattgatataagattgatacctaaagtcggtatgacatttagtaacgtggacgaggcgtataatttttatagtcaatatgcatacgaggttggattttcgttgaagaaatatagggagcgtaagaattgtaaatggttgaattgttcaatggaaggaaagaatgctgaaagggtagctggaaatccaaggatacataacacatgttcaaaacatagcgttgaattgttcagattgtgaaacttataaagcatagaacattgtcgaatgtagcatacatatatgtgcaactatgcataacatggcgttgtttattgtataaactggtcagcctgtgaagcatgactgtacaaagagatgtttccagtataaaacggtgataattgtatcataaacttgagacaaaacaagcataaaacagtgataattgtattataaaagtatgggcaacaatgcataacacgacgttgtttactgcataaactggtcacacagtgaagtttatgactgtacagcggtgataattatatcataaacttgagagaaaacaagcataacacgagattgttgacaacataaaatttaaatgacactgcacatcatataaagtggagtttcatttgtaaatataaacgacactgcttctatccatataccatatataagacaaattaaattgataaaaaaaatatgataaacgcataaaaaaataccgaacaatgtacaaatggttcttgtccttggcgtatcttgcccttgtcagctcttgtcaatgcttgaataatattcctatcaaaatatttgatgcgtggtgttccacgtttattctgaggtgtagctgaatcatgaagatgatccaaataatacagctgcaaaagcataacatgaatcattgtgagacataacaaaatataatctaaatgtatatgaattttgcataaaaaaatatggctacatataaaagacaaaaagtgacatgcttacaagaatgatgatggaacatccgtaaattgttgtagaaacatttgtaacgctcctagtatgtcacttcttggcagtttggcataaatcattgaatattagctggtaccagtctatctcgtggaaacgatacatttcctcagttaaaagaacctcatggttagttattccccagctggcagtagggaacaacaacctattgcacagtatcaggaagaaggatctgctgcttagatcatcgtcaaaccctttccttaaacgatcttgaagagctgcaacactaaaatcttcttttgataaaccaagtttagcccttaaattgtttgcagcaacagcttcatcaatgcctaatgccgtttctccaccagcatttggtaaccccaaaataagttgcaccgtctcctttgtaattttgagctccttccctgggccggctcaaattgtcatgtcattatggtcaagcttttccatcagccaagctaaatgagatctactgccaagtgcgtcaactctcatatcaagaatactggagaaccccctccgtgcaatagcttggcgctgtctgtcatttaaaatctggatgcttactataacgtcttggggattgcatctcacattaagcctctgctgaaaaaatgtatacaatgaatagcgtaaacatttacatctgcataatcgcaacttaatgtttaaatcaaatctcaaaacaatataatttcacgcagaaaatgatatatcgccattgaccatcaattctaacctgtcgggggggggatccactactttcctccgctttgtaactatcttcttcaagacttatggaggactgtcatcaaagttacgcttcttcgataatggcataaagttatcgtcctcatcaccagcctgcattggtttgtgtctaacagttttcgccggaacacggggtatgtcgacactaaagcactcttgagtagactgaattataatccgctttggattagatggaggtcggtctacgttcttcatgtatgatgttcctgccaaatcaaacaacacatatacataaaaaacgtaatggagcaataaaaattctgctcatatgcaacatccaattaatgtataagctggctatttcgtgcgtactggccctaaatgtacggcgagatgtttatggcataacatgttgacgtatatatcataattttgtcaacaaaatagcataacacggtattgtttagtgcataaacgtgtgagacgttgaagag

SEQ ID NO: 94033 - DNA, 464 bp, Zea Mays
atttgaagagttatgattaaaacaagtaactattgtgttgctgtccaaaaatctgcaagtgctcatttgattgtttagttcaccctttttgctaaaaatgtttggttagcacttaattaatgtagacttgccatgactaagcttaatattgcatgtgtgtcatgttttatatgtttctttctctagttgattgtgatataggagttccatagacattgatgcctatgtcctctattgaacttgtgttgtctggtatgcttttgtgcgatcaatagaagaactaatgaaaagacgtatccaattaaataaatgcttgtactcgtgatgtcgtgtttgtgttggctatgtatatgatagtgtttgtcggtttcttagtagtgttaaattcgtaggtcgataacatatggctaattagcacctacatatgatcgttggcggtaccgtgtcttgcgccttatatctag

SEQ ID NO: 94034 - DNA, 411 bp, Zea Mays
actaacccagtactctgcatcaaagttgtagcttatcaatccatcttgaactttgtcacaggggtttttgccaaacatccattaatccgagctccacatggtcccaaagttgatcctacacactgttaatcaatcttcagactttaggctgactgacagcctaactttgggccgaattatcttcaaaatttgcatggcaccaaggcttaacccctatagcaaaattgtactcctatagtaactttacaagtttggtgtgttgaccctaggcaaattcttaatatttttagatctacagagctctaaagtcagctctattcaactgttttcagacttagtcatgtgagggaagtggagtggctttttgcaaataagcccaattcatatcatttgacttgtaaatcttcaaac

SEQ ID NO: 94035 - DNA, 389 bp, Zea Mays
gtcacgatgatgcggtagatggacagagacacgcggcgcaaggccggaaggcagtggttcactggcgagctaatctgctccagccgcaaagcagcagagtgcggcagtgagtcaccggagtgacctccagctcaccgacggcgaggatccttaccccgcgacgttatccatccaacccaagtgtgaatcctggcgccgatgacacgaatcacgacgagactcatcggcggtgaaatttttctggcgctggcgatctgatctggtgcagacactgtaccatggaaaatggtattcagtcagtctgacagaccgtttttgaacatgattttctcccaaacctgtatggcaacacataccaagctctgcagcaagattgtagggctacaaac

SEQ ID NO: 94036 - DNA, 907 bp, Zea Mays
gatgcccaaagacatgtaccagtccaagaaattgcttgaaggtcttggtatggagtatgagatgatttatgtttgccaagacaactgcatgcttttttggaaggaacatagcagagagcagaaatgcttaaaatgtgggaagtcgaggtacatggagcttgtaaatgaagatggggagaaggtggtgacaaaggttgcacataaacagcttcggtacatgcctctcactcctagagtgaaacgtttgtttctctcgaggaagaccgctatgcacatgagatggcataaagattgtacagacagacaagatgggttaatggtgcacccgtcagatggtgatgcatggaaggctcttgacaattttgatccagagtttgcgagcgatgcaagaaacgtttgtatcggcttggcaactgatggtttcacgcctttcaatatgaccgctgcgtcgtattcatgttggcttgccattgtcataccgtacaaccttccacctgctctttgcatgaaatatgagtttatgttcctatgtcttgttatacctgggcctgagcatcctggcgtacgcctcaatgtgatgcttcaaccactgattgaagagttaaagaagctatggcaaggagtggaagcctatgactgcttcaagaagcagaaattcaatcttcgtgttgcgtatctattctcggttcatgattttatggcgtatggtattttctctggatggagcgtgcatggtagattgacgtgtccttattgtgctaaagatacagattgttttcgtcttagtgttggtggcaagatatgttactttcgattttccatatttgttttctacccttcaatcaccccttcagaaggcagagaaaagagtttaggaagggcaccatcgtcacgaagggaccgccca

SEQ ID NO: 94037 - DNA, 397 bp, Zea Mays
gtgtttccaaaggatttaccaggtatgccaccagagcggaaagtcgagtttgctatagagcttctttctggcactgcccccatctttaagagagcttacagagtatcaggaccagagttggttgaacttaagaagtagatcgatgagctatcagagaaaggttacatccggccaagcacctcgccttgggctgcccctgtcctattcgtggagaagaaagatggcaccagaaggatgtgtatcgattatcgagctctgaatgaggtcacaatcaagaacaagtaccccttgcccagaatagaagatctgttcgaccagttgagaggagccagtgtgttctcaaagatagatctgaggtcaggttatcatcagctcaggatccgaccttcatatattc

SEQ ID NO: 94038 - DNA, 740 bp, Zea Mays
ccaggggccaagatgctttcattaggcatgagttgcctaacctagaggccataatagtcaataatgcggtggaagaaactataaagagggaagtttaggccctccatgacatgagaatagaaaatgatgtactcacctgacttgtctaaggggtacatggtgggaaggtagtcggttggacatgattagaggttggtggtgagatccatccaaggagatcttgaaccttgtccaggtcatcctcattcaacactcctactcaagatagctgatcaagtgccaaagctatagatattgcagtcaacggggacaggaaaaactatcataaaggagggatggagagaagtgtaagacgatcaaagggagaagaaggcaagggcaaatgattgcaagtctacgtgaaaaatgttaatattgtgaggaaacctatttaaagccctactcactatgttcctggttgaagagcctaaagtgtcgcacgcccgacatgacaaggtgagtcatacgatatgacatatgtgcaaatataaactatccaaccactacggatattacacctaagattcttgtcatatgtgataggacaaccctatcatgcatgcttaggaaccgagcccccactcagagttcacgaggattatcgaataaatatccaaactaaaaattagtgattggattttgggcctaaggtatatgccacatcatatcaaaaggggtgcaaacacagatatgactattac

SEQ ID NO: 94039 - DNA, 343 bp, Zea Mays
actcttttgcacaaagctgacggaagaaatagctcaactctaaaagtgttagccaaacatgctcagggacatagcctcgaaccatcgcaggaagaatccgttcaatctatatgtggaagtcatgactcttcatccctaagacttgcatagtagataagttcacccccctactcaggttagctgcatacccatcagggaacatcaacatcttgatccactgaagtacttccttcctctaggccctgcttaggatgaaatagaccttaggccttctccatgtctttccaccacttggcggcttcatctcttggtttggtctatcacataacgctgccagatccac

SEQ ID NO: 94040 - DNA, 407 bp, Zea Mays
gccagtgtatatgggtgacccgattgagttatttttgtgtcgtgagtatgagtatgggatagtaatatccagtggatatttactcattgccatctctaattggcaacaagggaaacgatccaaaaaacggctggcctgctattgtgctgcaggattcagttgctgatgcatgtacgtataccgtatctccgctgctaatgaacaactgttttaccttacggtcgacgcatcaaggaccaagatctatactgtgtacaagtaagcgcctatagcacgaaatgcgtgttaccgcgcttcacctatagatggcattacatgctaatgacatgctgtctacaagtcgtacgtgtatgtgaaaagatagagcgacattatatgtgtgaccgtgaccgtcttgatcagaggcg

SEQ ID NO: 94041 - DNA, 280 bp, Zea Mays
cgcggtcactaaggtacgacgctagtgcatggagaccacgtaacaaggaagcacagtgtgatagaatttgggcgcgggcgacaccgcgacagaagcacacgagccacggtgcacgccggtgagatatttttggcccttccccggcctaatccgcaagatggtgaatcggctcagagttatccgccccggccatctctatctcctcttcgtttggacgtatccggattccacagcgacgcggatcttttcttcagatatttcccagcgcctctgatcttcc

SEQ ID NO: 94042 - DNA, 465 bp, Zea Mays
aataagtaggccatataggccagtcttagaataacagggatgctctagaagcacccctccgattggtgagaagacgttctttccagcatgcatgcattataaaccatgaagaaattagaaactaaggaaaagtgcatctaatcatgaacttatcaggcattgttaataatgaataatgaaaggggttggaatagacaactctaaattaacccacccccttttaataacccgggcaaatgtttttcctttccactgccataacacttacatctaaccctctttcacagatgacttcacccacccccatcaatggaggagacacttgtttcagtttcgactacctttcacatgagggttttccctccatcttgtgggaggtgctcttctccgctggttaccctacaccccctctgtacacggtgcagttgtacgaggagcatcgggtgccgcgatgcagggtttggc

SEQ ID NO: 94043 - DNA, 1912 bp, Zea Mays
gctccaacctcgcgtacctgagcgtagaggtcaatcagcttcatggcgggatccctagcggtctgggcttgctgtctcggctacaagtcctgtatgtcggcgagaacagtctgacagggcatgtaccgccatcgctcggcaatctctcggcgctgcagaggctggcactgtatcagaacaagctggaaggagccatcccagagggcctttcccgtctgaggtatctccggtacatccaggcggcgaggaacagcctctccggcacgattccgcctcgcttcttcaacatatcctctctccagtacttcggtttcagctcaaacaggctgcatggtagactgccaccagacgcaggcaggcacctgccggacctccaagtgctccttcttggtggcatcgggaacaacttttctggaacactcccggcttccctctccaatgccactaaactacaagagcttggtcttgctcacaacagcttcgaaggaaaggtgccgcctgagatagggaagctctgcccagagagcgttcaattggggggtaacaagctgcaagctgaggacgatgcggactgggagttccttagacatttcaccaactgcacccgtctagcggttctagatgtcggtggcaacgcccttggaggagtgcttccacgcttcgtagctaacttctctgggccggtgaatactctgatcatggagaagaaccggatgtctggatcaatccctctgggtgtcggaagcctcgttcaccttgaagacctggaattcgggggaaacaacctgcgtggtgttatacctgaggatattggaaggcttcggaacctcaagtttttcacgctggaggagaatctcctgtcaggaggtatacctacctccttcggcaacctcacgcagctgctcagccttttcctgtcgaacaataggctcaatggctccatccctgagaaccttgggagcttgcgcaggttaacgtccatggcattgtccttcaacaggctcaccggtgcgatccccggagcattattcagcctcccgtcgctagctgattcattgctgctttctcataactacctttctggcgtacttcctccacaaatcggtagcctcaagcatgcgacaacattggatctgtcaacaaacaacttatctggagaagtaccaggagcgcttggagactgtgcaagtctagtatacttgtatctggatggcaatagcttcactgggagcatccctccatcgattggtaatctgaagggcttgagcacgctgaatttcacaaggaacggtctgtccggtagcatccctcaggagttgagccagattcatgggctgcaaaggctttgcctagctcacaacaacctgtctggagccattccacagctcctccagaactcgagcgctcttgtagagctggatctctcctacaaccatctgggcagcgaggtgcccacacacggggtgttcgctaacatgagtgggttttctgcaactggaaatgatgggctttgtggtggcgttgcagagctgaaattgcctccgtgtgaggtcaagccacacagccaccggaagcggttgcgactgaagatttttcttccagccattggcatcgctatatgtttatctcttctattggttgcgctccttctgttcaaagggagaaaagggtcggacaggatcagtgctacgcgaaaccatttgttggagaacaagtatccgagagtttcatacctccagctctttgaagcgacggatggttttgcccctgctaatctgataggagctggaaaatatggatctgtttacaaaggaagactgtctatcacaggtgttggggattctgtagtggctgtcaaagtgttcactcttcagcatcctggttcttccagaagctttttggctgaatgtga

SEQ ID NO: 94044 - DNA, 331 bp, Zea Mays
gctttatagataggcgtgggcatgggcacacgatcgggccgaccaacgcttcgggcgcggttgggcacatgtttggtcactcactagccttgccagccatggtcgaacacgtggtcgtttgcatctgcccctgtccaaacaatcgtttggcggccctagcatgcatatcttggcaagaatcatatgtatggtttcttcactatgccaaggcctctctggtttgtgtgagtcccgagtgtagatatggccaggatcaaaagatcttagggtgtcaagttggcactatctgcagtggcaattccgagacaaaacccatgccaaatcatgtcaa

SEQ ID NO: 94045 - DNA, 1204 bp, Zea Mays
atttaagggtgagagcattaagatgccggtaatccacgcaaaaccgccaggactggtctttctttttgactaacagcatgggggaggaaaaagcactgttgttgtgttgtataacaccattgcttagcatttcttggacttgagactcgatctcatccttcatggctgtagagaatcgataggggcggattgacactggccttgctccctccactagtgggatcgagtgatcatagaaacgactgggtggtagggaggtagggggttggaatagctctgaatattgttggagaagtttgagtacaggtgcaggtgcagatatattttctagtacccaaacttgagctgaaggtggtaactcagttgccatttgtctgacttccaacagtgtcccagcaggtaagcttgatgaacagccgcgcaacaccactgactgacccatataagaaaaggataaccacttgttcttctagtcgacaaacatggggctaaacatttcaagccaatccattcccaatatgaggtcataaaatggcaggggcaagattttgaatgtagagcaaaaagacaacccttggagagtccagtcagtttgaggtaattcggtggtgcactgtaattgactcccattggtaaccttcacagacagtggacactccagcttgaccaatcctgacacaacagcttcatgtttggcatttaaaaatgaatgggaactgccagaatccaataaaatgagtaactcaatgccctgcaactagccttgaaatctgaatgctttggaatgtgatttgctgaacactgcttcttgggataataaaatagaaaattgctttgctgagtcttcatattcaccttcagaatcatgatgttcagtacccagcatgtcccacaactcctgaacagcatgcagttgcacatgagtgttgcacttgtgttccttggaccacttctcggcacagtactggcagagaccgcgtgcgcgacggtaagcccgtagggatgccactttgctatccatggaggatgttggtgtggtaatatgattcttctggttggccgtcagggatttgtcaggacgatgaggaggcttcagtgttgatcgttcatcgaatggcaccacactttggacagcctcgtggtgacgcgaagagtatgcctcctcctgcaataaggccaacgcacaggcaatatccaaatctct

SEQ ID NO: 94046 - DNA, 393 bp, Zea Mays
accccaacaaaaccctattcaaaactgagtttttaaatctggtttggttgcactgatgttttcatgctcatacttcatgaatcacttcttcctcggcgcttgttgtctacaaaatttgggatcattatgaacatttttcatcgcacgacactccaaacctacgcatggcactaccgcttgcttctgcaggtgttttttgaaaactgtttgatgtagccaatcgacactggattaggttgttcctatcgaagtgtgttttggtgtcccttggggtttggattgaatttgggaatcgaatctcgtgtgctcaagtttgagaattttagaggctcacattcccctctagttgccttttcggtccgtcaagacgacgatactctaggtagatatggc

SEQ ID NO: 94047 - DNA, 662 bp, Zea Mays
aatctggcacgcagaggtgtccacgtctgcaaaatttgtctcaatcgttcgattcggcgtgtacgtccaagatgcaacacgtgagtatgaaaatccccacaccacgggatgcttccacacaagactgctaggttccgagtcaaaagcaaaacagtgatccgctggccacaccacgggacgcttccagataaagctgccaggttccagtccaaaggaaaaaacggtggcccgctagcttctccgtggacgcttgggcaaagatctagatagcgctgcacgccgctgcttctccttccccgcgagtgtccgctccgtacgccggcgactacgatcctgtttctggtgcgtaccttacagtccatccttcttcacgtgtctacgctcttcactgcgccatgcgattcctccagtaatagatcgcgccctcgacaggtgaaagggagtgtcgcattccccatcagcactgttactgacggctgccgcgtggtgttcccgacgtgtgctaccatctccagtacacccaatcctcaacgtgccgacgatccacgcaggtacgaagacttctctggctatgtgttcttcgtgctaggttttgtcttttgcatctcattctgattccattgaacacggctagatattagggcttcgattttaggtttttg

SEQ ID NO: 94048 - DNA, 363 bp, Zea Mays
cactcgactgttacctctaaaatgccgacattgccattagtcactcggctgattacctctaaaacaccgatgtcacatccatcactcggccgctatcactaaatcggtaaggtagctccaaaggattcgaccgttacttctaaagcgccagtatcatcagcaaccgtccggtcgttatctctaaaacaccgacatgacccaccataacttggccgtcattattaaagcaacgacaggatttcggatgactcgactgcaaccgccaaagcgccatcattacaaataaggcaatcagaaatgtgattcgatgatcacaaatactcctcgcgcattgataagattggcgaacaacgagaaagcaac

SEQ ID NO: 94049 - DNA, 578 bp, Zea Mays
gaattttattgcacattgtttcaatcatttctaaccactcttggcatggcttcttgaattgtttctcaaatttaaatcggtaagggagccgaacaaattcgtgctttttccccatccttcttcttaggcattccccagccactagaggtaggaaatattctatttgccaagtattcttgcactagatctctagtgctgacttcggccgctaccactctgaattctactttggctacctggcatggggagccaagttgcatgtggcacaggggccttgtcatcccgaagctcaacttcaacggactcataaccatagtcatcagcttctcccttcttttctcatctgcctttatgtaaaaccattcgcttttccaaccggtcggccacttagtacgatagctaagaaccggggccttcgtatccttccgatatgcaaagttgtagcagccgaagttctcatgaagaccatctgctctggccttcgtttggtagtgcagctcgtgcacccgatagaaagcttcggcattgggactcataccctggcttcggagggcccatatgtagacactaagtctaac

SEQ ID NO: 94050 - DNA, 424 bp, Zea Mays
cacctttggctccaatcatacttgactcctttcttcaacagttccgccattggtttggcaatcctggagaaatccggaataaatcgtcggtaataccctgccaatcccagaaaactccgaatttgtttcactgtagtcgggggtttccagtccatcacctcttgtaccttctcaggatcaactgatatcccatcctgagaaattgtgtgacccaagaatttgatctccttcagccagaattcgcatttagacaacttagcatactactgatggtcacgcagtctctgaagtacagtatgcaaatgtttggtgtgctcggcttcattcttggaatagaccagaatatcatctatgaaaacgaccacgaacttgtctaactccggcataaatactgagttcatcaggtacatgaaataagctgggg

SEQ ID NO: 94051 - DNA, 523 bp, Zea Mays
ttctccacattacgcacctcagtgcttaagcaattgacccaattccgccagagaacttgcgcagccccaaatcccctcctcctctgttcttgctccgccgcatgggactccaccgtggacagcactcttcgggttggtagtttctcaattactctctgttctagctcgtgtatagtctcctattgctctctgtactgagcaattggaatttggccgaagtccatcaccagaacgcgcccttgccttgtaaaacgccgccgtgaccccctcaccgtagacccgctcttcgggtcttgttctgcccaaaccaaagtatgtccatggaccttggtgaacctgtgaacctttacccagcctcaatttggccatccccatcgctgtttgatcggaacatgttcatcctcctgtccatccgctcggtcaccgtgaactgattgattcagtgtcccctaggtgaaattgatggaggggaaatgatcggggtggatctaattgtgtccctgtcgcttgggagctccagccg

SEQ ID NO: 94052 - DNA, 666 bp, Zea Mays
ctgttcatttgcaaacccagggggaatctccatatagacctcttcctgaaggtcaccatgaaggaaagcattcttcacatccagctgatgaagtggccaaccaaaattggctgcacatgagaataaggtcctcactgtgcccattttggccacaggggcaaaggtctcatcatagtcaatcccatatgtctgactatatccctttgccaccagtcttgctttgtacctgtcaacctttccttcaggagtctgctttaccgtgaagacccacttgcatcccactgctttctttccttctggaagatgaacaagttcccatgtcttgttcttttgaagagcaaacaactcttctttcatggcatccttccactttggatcatgtttagcacacctccaatccttcgggatagacacattttgtaaagatgcaatgaaggctccatatgctaaagaaacactagagtatgagacatacttagcaatgtcatgttcataacaataacgagaagggggttttccagcatttattctaggttctcttctttgtgcaaggggtaagtttacatgttcatcaggaggagaaacatttaccagttgagactggagaggagtctaggactggagatgggattggagcttcaacttgttcaggttgtggttgccccc

SEQ ID NO: 94053 - DNA, 444 bp, Zea Mays
catgggagtcgggcgactcagaccaacatattggcattgaagactgccctccaaagtcgacgatgcgcgagacaccgctcgagatacctccagtccaccgtttggaacctctaaacaaacagccatcacgtcatcggcagttggctctgacagcatatcctcggggacgacttcctcaagggcttgatcaaaatctgatattgacagtccctgaatactgacaagagccgacagagctggagaaggaatgtcactccccccctcgctacctctataatgccgactgtttttacggatcagcgggacttcttcttcttcttcctcttcgtcttcatcgaatatgaagacagcagcttgtgcacgatcactacccttggcatcaactttaggaagggcctctgccggtatctcatctggaaccggagcagaaggacctgcgccatg

SEQ ID NO: 94054 - DNA, 294 bp, Zea Mays
tagaaagatgccgccgcgcaaaaggaaaacggcgcgcaagtcaactggcccaatcggtgtgccccgacatcaactggcccctcgacatgaggacagtagcagcgggagtaatgatccaataggggatcttgaagcacgagtaaatcaacttcaagcggaagtgcaacataggaccaacatatgggttgcggatggagatagaataaatgaattaagaagggacatccgccacctgcgggatcagcttgctgatcgggacttggcgctcgactgggcagttcagtcccatttgct

SEQ ID NO: 94055 - DNA, 660 bp, Zea Mays
gcggggttatgttgccgaaatcatgagaggaaggtacatgagtcagaccaaataacacacaacgactaccatttttgggtgggtttaggacctatcctcttccttttaggctttgtagttgtgaattggttaataacactccacactgtacatgtttgtcatgcatgatgatgatctacgttcttctattacctttgaaaatgggtgacgtttgaagaagggctgtgtacgatggattcaacggtaactctctagggcactctgatgcatgggttaaggttgctgatgaattcatggcacgagcatttgctggcgagcctcgtgtggagaaatgtccatgtaataggtgttgaaatgtgatccgattgaacaagtttgatctctccattcatatttgcaaatatggctttaagatgactatctggtgtggcacgatcatggataggtggattgttctttggaatcaaacacatatgaggacatatactaaatggaggacaatctaaattacatttgacatgagtatccagcactagagaccaaccaccccccgtaggaggaagtgcatcagttttacaagttgctagaagcctcagatgcaaaagtgcacgagggcaccaacctgactgtacttcatgtcgtaacatgacttatgtggat

SEQ ID NO: 94056 - DNA, 531 bp, Zea Mays
aaaatgaaagataacgtaaaatataacttatgaccaacagaacattaaaatattcttacaaataaaactgattggggctcaccaattttatttggttcagaacttcatctggaggaagcgtcggttctagttgttctttaagaactgatgttgagaagggctggggatttgaactgtgctgttcgaactcctcgatattcaaaacggtctggacaaaaaatatattgattagtattatatatttatacagtaagggttgaaatatgatacaaagttgaggagaaaaaaataccccaacattgacatttagtattagagtgttgattatggtatctggattgtataatacatcatcatcacgaatacattcgataaatccctgcatgaaaatgttctcaaggcatttattagggccaaacgattggacaacaaccaggacattacctccaaatcctccaaaatcaatgatagtcctggaaaaaatgaaactttaattacaaattatctaattatacttaattgaagtttgaa

SEQ ID NO: 94057 - DNA, 441 bp, Zea Mays
ctcgtgcgaacatttagcaaaggctttataactattcatgagattgaactgctagccaaaagcgactgctgtggtcatttagatgtagacggtatcactccattctaaacatattgacatttttttctttagattagttgcttaaagtccagaaaagctactaatcaatgttaggcatgcattttcacattgttaacatgccacagttatgatttttgtctaaagcagaacgatccttacaggtttccagtctaatttattcagttttgcaaggaacttgttcattcttataagcatgttatagataaagcaattgtgcgttctagatattattccaaaagtccaggattcatgatttgagactatctaccaaaaaggaacaagacaagcatcgtctgacaaataaatcacctcattttctctgtaaaacttgtaaagctc

SEQ ID NO: 94058 - DNA, 655 bp, Zea Mays
ttagagttaaattaatcaaataagcactagcaagtagacttacaaattttatccgtgtcattatgagcacaagaagtaccatatttaattaacaacgcattctccccgataatcgatatcgaagtgatgttgacaccataatttgcattttaacttagacctcaaatgagcactaatacttttcatccgcgaccacaaccatacgtatttagactacaacaagcaaatcatcgtgatcacgagcttaactaaagtcatctaacaagttggttaaccagtataacgtttagcaaagtattttagatttcgcaactcaaaaacataggtgggagcaggttaattagtttttcttaaccattttctcaacttaaactggacaacgcaccagtcacttaaaacaccatattttaggagacctcacatgtcgagcatcaaattataacataagtgactcaacctctatcacgcttgacaactaccacatcacctgatttatctatttggaacatcgtctgtctagcgtactactagtaccccgcattttgactcgacttaaaaacatagaggaagcgatgactacttcggcatgtcaccacctcactacacaagccaaaattattattatttaaccacacgcctagataagcatgatttc

SEQ ID NO: 94059 - DNA, 412 bp, Zea Mays
ttgtcctagttgtccacaccgagacaaaacttgtgccaagtcgtgtcaaacgacttagggttgggttcaaacttttctagggtgttctagaggtctttaggcgccgctttgtcaaatgggtcaagtggttttgaagttcgagtaagggtgaacatgtttgatctttggaaaagggttggttttggacttagaaaaattctgattttccttttatgctcaaccctttggtgaaccttttggggtttttctaaaaaattggggtcactttcttactattttttgtagggtattaagtgtactacatcttttataattggcccaagtcatgatcatgtggttttcatagccttttggtcatactcacttctagggctccaattgtccaaaagggtttgaattagggtttgggcaa

SEQ ID NO: 94060 - DNA, 511 bp, Zea Mays
ctctgaactagcttctcctttttctcatcaattttaacataaaaccattcagttttccacccagtcggccacttagtgcggtagctaaccaccggtgtcttcatgtctttgcggtatgcaaaattataacagtcaaagttctcgtgcagcccatcctccctagccttcgtctgataatgaagttcgtgtactcggtagaaggcttcggcaagcggctcggctccttggcttcggagagcccagataaacacgctgagcctaacgatagcgttaggagtcagctgatgaagataaatctcaaaattttccagcacatctgcaatcattccgtgcatgggaacctcaaccctggtttgaagaagctttttaaaaactaccacttcatcattttctggtttcgagatggtctcctccccgccacagcgaatcaacttcttttcggcttccccgaagtagcctagcttcgtcatcatgggcatatcagcttcagacatagtcgatttcccaaaat

SEQ ID NO: 94061 - DNA, 889 bp, Zea Mays
ttgctaacatgttggtgatgtgtagggtattggagagaaaagggcaaactatatacttgagcttcgagaggagtcaccattgaaagaggtaaaccttctatattgaatgtttaaaaagttaagtttaaacaatatgaagcggagaatatcaattaaactattttcttcttttagattgatgatcttaaaagcataattgggatgagcaaaagagaggtaggtaactctactataaatatttgttttggaaacaatcaaagtattgtaattcaaaaaatgttgcatcgtcgctggagatggtggtgcatatctgttagtcaagtatgtgttctaggtgatgttagcacgcatggtagaaaagctgagttgctgccttctgctttctgttccgttcagatcgacaagatgatgtcaaagttgatttcggactcggagatgaacgagtaagggttgtattgatctcttcccacttaggaaaggaggagaaggtcatagttctaaatttaaatatcgatgcttgttgttatcagatcgctgtggaatccagatgattttgggtgttgcttgtgagaatattctgatgttttgtttttttaaaaaaaattacaggaatgtcttctctacgtataggttttatacaggaatgtcttgtctacgtaacgtataagttttgtttttaaaaaaagaatataatcgggtggaaggctttcaggtttgctgtattagacaaaaacctatcagttaccctgtcatattgtgagtgtgcatattgtcatattgttagaactgtgagaacaagatatgtttatttggctccgccaatattgcttagcggcaaagtatctgtatcgtcagcacagtgcctggtgtcctcttggtcacaacaatc

SEQ ID NO: 94062 - DNA, 746 bp, Zea Mays
ctagacaatcctctaggttccgcctcttactcctatcctgcgctatgacaccatctatcatacactgcaatctctggcccgaaagtcgaagcgttggtgttaggcgtgccttgcgcctgttccctttgacagtcaacccttagtctagtggactaatcattgtgtcgaaggaattcttaactacctgataatttttcagtaaggaattaattacggtaacccattcgattcccgagtaaaccctcgggggcgaagtttgatagacaacaatgtctcatcccttacaacatgattacaggttgtagacacccaagtgttttagtggtcacttctagacatttctcgtgtcgcatggcctgattttttatgagggttgtgtgacgcttcagtcgcctcgctcgaagggtggagagagagagagatggtggtttaaaaaggaagtcacacatggtcgtaccctttctgacacgaatttgttgcctccttgcttttagtctttcactagtcatcttcctcctcttactccagcacaatcccattcttgcaaacactcctcataatggcggacccatccatcctcaaacaccttccaaaggctcgcactctgaatgaagaggggctagaccaagtccgagagatcctcggctttcgagcaacgtcttccttctaccttcccaacgtggctccatcaagaggacaacgagtatgttaccttttacgcccaccttgttggagtccactttccc

SEQ ID NO: 94063 - DNA, 362 bp, Zea Mays
atttacttgggatttagccgattctccatcagctctagcattataggaatgaagcctttccggtctatacttatgaattgataatcagaaaaatcaacccatgtgagacatgtggcggtctcataggtccaaagtataagggcatcgaccacagcaatgcaagccgatgcatcagcatgtacctgttctacatcatcgcctacccattgcaacaacatttgatgtaaattagaagatatacattgatttgcatggatccaagctctacctaaggttagactataatttccttctatgtcgacgatgaagaaagcgacaacaagggccttggtccctatggttaattcaaaggacgtaactcc

SEQ ID NO: 94064 - DNA, 367 bp, Zea Mays
agtagggctgccagtacagcactcgcagtggaagccaataatgcaggacatggaaaatcaaaggggtttggaggtgaaaggtcaaatcaagggcctgagaagagaaccaggttggtgatccgaccttttaatcaaaatcgttcttcgcctcgcccaccttcatatccatttaagcagcatgtctttattcatcccactactgccccctctcctaccaatcagccgagtgcccctagtactcgtttccttgctctgcctagttcttccactagctgcttcaattatggaaagtccggacacttcatcaaggactacccatacccgaagcaaaataaaaccaatttccaacagaactctaggaactcca

SEQ ID NO: 94065 - DNA, 1387 bp, Zea Mays
gctttctatatcttcacgttccaaggcatctgggcaaaaaaaaacccattctggctgaataacaatgttgcctagcttgtgactgaggaaatgtacccacaagacatatggaaaactctgttagcttcatgccaaaatcatacttttaataaatcagaaatccaagaagatccacaagaaatgtaacccatccatacagaaacatgttcagagagaaagatgacaagaagcaaagtccaagagtagcactaaataattttcttaattgcatcaacaagaaaagctcataatcagcacaacaagaaatcccagtctctttcttaagcgccagtgaccagacaacaaaccaatactctccatgtctgtaaagcaagttcattgcatggaatttaaccttcttcatcatccactagggctaagagagattgaagaaagctaatcaggtgcttcatcaggtaattttctgccatcacatcaatcaactaagcagaagtgttatttataattgcatcttttttcgagtacagtctgtttgaactttatgttcctatgcaactttgagtttcatctcctaaattttggacgcatcaacatttttctcaacaggagatgctctacgagagttcaagcttataattgccaatgtatgactttacaagccaagtaagcactacatctatacacaacattatgaacataaaacaaggtcactgcaacttttagatgaattattccacgtttcatgcactagataaagttgtgcttttgttggttagttggtcttggaaataacatgtagctgccggtgaactttgggattacttctgggattgttgcttaaaaggaattcaatgattgataaccaaatgcatatttctttaatcaacttcctaaggggaacgaataaaaaaaatcatcaaacttaggaggaacttatgtggcactgtaaattagaagtagggacataaatttgagtcaaacaggactaaagctatgaggcacaaagtttcaagatagctaatgagtgagcaggactttcactgttctgttgaaagaagaactagcagcatgctgaccacttttatcttttctccgctgcagctactaaacaggacatctcagttgtgaaggtacattttggcaattatatttattttgtaaggcaaatccctctatgcatggccaagaaacaaaagtgaaaggtggtgtctatcttttgtagatcataaacttttcaagaaaacaaggtccgtggatctctaacacaatggaaagtcctgagtactgtgagataaactcaaatatgactcttgactacataaaccgactgttaatggaggagggcactgatgagaaggccagcatataccaacaacttgatgcactt

SEQ ID NO: 94066 - DNA, 313 bp, Zea Mays
atggaagccactttcccgcttctgtcccggcctctgagcaaccgaagtatattggtcgacacggttatgcatcgcaaaatgtcatggtcgtttgtgacttcgatatgaggttcacatttttcgtcacaggttggtctggatcagtgcatgatactagagtattacaggatactttgatcacgtatcgagataggttcccgcatccatctgaaggtaaaactatattttagttttgtaccatacgttattaatgtgtatcacatgtattgaagtacaaatttgttttggtgcaggtaaatactaccttgtagat

SEQ ID NO: 94067 - DNA, 385 bp, Zea Mays
gtctccacaaatctgtcatcacatacacaacacgtacgagaagtaccctggaaattgtatctacgacagtagttcgatcagtgtggatttttccgcaatgacggccacacgccggagactacattatggtacacaataaaaccccgtgcttttcggcgggattacattagaaagcagatagagaaatgtatagttgttattgccttttggaaatacatggaggatggaaactgttcaaggtgtgtgatggcagaaaatttagcagagcatgtataaatgggagttgctgaatcacaggtgtctgattttttttctctttatatattttttagacaacaaacaacatccatctatcctaaattcaaccatcatagtttcttgaaaa

SEQ ID NO: 94068 - DNA, 313 bp, Zea Mays
ggcactggatagcggctagatcaaatcttaacctaacccgaatagttatgggcatggatttggctcacaaactcacagagcggccgaaccgcgcccacgacgggatcctagctccgcggtacctgctcagctgatttgagtactagccgaatcaaactaagggaatagggaacatgagcaagaacgagcaacatgatgcttacaataattgacatcagatcaactaggttctggtgggtcgtcaccaaggtagttcatgcggtgtcaagctcgtgttccgtccaagctaagaccgtaaagatcaaatggacct

SEQ ID NO: 94069 - DNA, 567 bp, Zea Mays
aaaaatattattttattgactatgtcaagccatgatgaaattaccgtaaacattgtgacaggtctaatctagcttccgtcatggtcacatgcctctaagatgcccacttcccctacatgtaccctaccctcaccatggtctacctccaccatggctgatctcctcctctaacctcacttcgataagggaagggttgccatgatctaaagggtggtgtttatcaagcctattgtgcccctctaccatagatcatccacatgcatcatgacacgactgagcgtggcacgattatctaaattgagtttgggagagagagaatgaagatacatatgaggaaaagagatgtggggcgccatggaaagaggagacatctaaaaaaccaactggatgacaataaatcagtagtgaggggaagaagcctatgtgaggagaaaaacacaaggacatactattctagatccaaccattgcgtctaactattagctaggattcaaacaccactgggaacattattagttatccatgtttaggtagctataatttttagccaattctaatgattagttc

SEQ ID NO: 94070 - DNA, 489 bp, Zea Mays
tagatgccattgacgcaaccagcgatgacttgctcatgcctactcaagggccaaggatgatgccatgacaactgtcttcagggccgaggtaagaaaaggttgaatagggtttttgaagttattggtttcgtatacccagactacagctatccttcgcaaaagcaaggaaagaaaagaagtgctgacgcttcggtaatttctactacgccgaagccaaagaagattaaagttctgacacatcggcccaggcacattgaaacggccgaagtgctgaagcttgataaagggccttcttctgccttggagttaagttaccccgctcctgtcgaagctaagatggaatcggtcgaagaaccaaaattgaagatagcagcggagcaagtgaaagctttgagtccattgcaagaaacggaacagtcgaaggtacaaaaagtggttttagtgaccccaaagagaagaaggatggctagtgtactagacgctgttatg

SEQ ID NO: 94071 - DNA, 614 bp, Zea Mays
gtcgactcggaccgttgatccgtgtgcatgtgacctggatttgaacttcgtaccggctcgactgggctcaatcctgaccgctgatcactgtgtgggcgggctaggttagatttggcacactttgaatctagtgcgttcatctgggattgtgcggtcagggggcgtaccggttcatgcgcatggctgataagatttgtgcggtctgatgatgatcggacggctaggattagccgatacctcttcggtgggtgattttcataaagagcccctcctctttttcgtagttaacctgccgtccacataggtaaatgtatccttgcatccaagtccttagttttacgctttaaaccctaccctctcagaattttgtacccgacgcccctagaccttagtaaatcatttaaataaatctggaaaagtgattcttagtagaaaaataaactcataatcttgcataattcatatcttctccgtttttactccgatttgacccgttcaagttgcgatagtctcataataaaaatacctacgcattgatagccttagttttgtcatatcacatacttttatagttaggaaactagtttgattaatctatgtttattgcattagcc

SEQ ID NO: 94072 - DNA, 362 bp, Zea Mays
gagatattcaaagttgcttcagcaaagaagggggatttctttatttctttatgaagcgtgaaaagaaggtaaggtgttttttcgcctacggctcaaaaacggtacgtacgaaagtttcacacctcacaaagaaatatattacatcattaaatatacaaatagttggtaattgtttcttacaaaaatgaaattacatgaaaagattctaaattctcaatagacaggccctagtcatcttttaaaactttgccagcagcttcgtctagtagtctgttgatagcttcgtcaatggcttcgttagctattctaattatgtcaagggcccccttcagagctggatcagcttcaggatcatatggttc

SEQ ID NO: 94073 - DNA, 547 bp, Zea Mays
ggtcagctcatcccaggactgctcctgctcgtttaattcatgttccagtatctatatacgctagtgatgctcatcggcccgaccctttttgcttagtcacaatccatcaaccggaacacatgaattcacgtcggtatttttcctccaccgtggtcaggctaaacccggggccgtagctacataattgaaacccgttctagggttgtctcacgcccgtaacactcacccagtagcttaatcgggcagccactactgatcttggccggtccgagcagcaggatcatcgttcttgagcgcgccgccatcggggagctccttggagaagaaatggagatgtgagggtgtttctgcaaacggtcagcgacgtagggtaatagtgattgacgcccgttttgattagtcgaaaccccgagggtctctgcgcaaaatagccagagcgcgcgggcgcgcgacccggtttcctgtagcattgggttgtcccgggccagaaccagcccaatactattcagtcttttcctttttctttttcaggacaactttgaaaacc

SEQ ID NO: 94074 - DNA, 428 bp, Zea Mays
aaatactgaaatgacaatttccaataaattgtctgtttaaatcgatgagttaataattacaggacttgagtaatcactagcttacagtcatttgaggaaacatctagtttatatttccttgatccagaatgagttgaagtttcaaatgcttgcacaatgggagtaaaatatcaactatatttagtaactttttgaagtacaatatgtttacatactggctagctataatttctagactttgcccctttctcaaatgtttttacttctttttgagtggcattaagcatatgtaaagtgtacagtttatattttttgggtagatgctggattatgtgatatacgagtcccgaagaaatcatgttagattgatcctatgccttgtcaacaatcttgataactttggagggaaggcccagtatgttcaatgg

SEQ ID NO: 94075 - DNA, 4812 bp, Zea Mays
gatacacgcccgtggccaacggcggtgagtaccgcggcgtgagggtgctcggcggtgctcaccctccgaccaacttggaacacaagtttgtggagcaggtatttctatttttcttttctgttcgtctctctccacgaggttcaccttatacaagtcttaacagaaagccctacggcctgacagtggaccaacattattacaaatacgtaaacgacaatgaaacacgtattacacttatgccgtaactccggtgatggttggcgccggtgttacatcaccccctcctggaatggaagcttggccccaagcgcttgaatcagggaaacgagcttgcatcaccgtccagtcttcccatgtagccgaatcagctggaagtccttgccattgcaccagcacttgtacaatagccgcgccacctttcttgaccagtcggcgttggagaatgcattgaggctgcaggtccctttgagtaagatcaggtatcttgggaaagtcagcatatactggagagtagtcagcagtatagggcttcaattgggaaacatgaaaaacagggtgcaccaagctcccagccggtaactccagtttataagctgccacgccaatcttctgaagtattttataaggaccaaagtatttgaaggccaatttaggaaagggtcgactggccacagaggattgggtgtaaggttgcagtttcagaagtaccatctccccttctgcaaactgccgatcaatacgcttcttatcagcttgaagtttgatacgagtttgtgcagccagcaagttgtgtttcaataattccagatgaagatccctttccttgatcagtgagggaagatcagtagtggaaacatcagccagcacaggaaaagaaggtaatttcggttcatatccatacaatgccttgaatggggagcattgcaaggatgagtgatacgaagagttgtaccacagctcggccagaggcagccatgccttccacttggctggagagttgtagatagtgcaacgcaaatacatctccagacattgattaacgcgttcggtttggccatccgtctgtgggtgatatgctgtactgactaacagctttgtgtccaacagtttgaacagccctttccaaaaggcactagtgaaaatccggtcacgatccgagacaatagaagcaggcacaccatggagtttaaccacatgagtgagcacggctgaagcaacttgattggcagtgaaagggtgacgtagaggaataaaatgggcgtacttagtgagacgatccaccaccaccaaaatgcaattgaagccatcagagcgaggaagaccttcaataaaatcgagagagatgtcttgccacacaccttcaggaataggaagcggctgcaataatccagctggatgagacttttcatgtttggcatgttggcaagtaggacactgcttaacaaaagaatcaacatcctgtttgagccctttccagacaaacattcgtttgattcggtggtaagtcgcatcaataccagagtgacccccaagagcactagtgtgacaagcagcaatgagtttggtcttcaaagcagagttatgaccgatccaaatcagtgtaccaagccggatcacaccatcaaccaaggaataaccatcagcatttggactgtgcacagcaagctgctgcaataaatgttgggctgcagaatccgtagcataggagttaataacctcttgaagccacaagggttgtacagaagaaatggcatgcaccgacatgtggtgattgacgcgggatagagcatctgcagcaatattttcagaacccttcttaaacacaatcttgaaatggagacccaacagtttactcatggctttcttttggagctcggaatgtaagtgttgagcatccagataacacaaactctgatggtctgttcgaatgatgaactcttggcgttgtaaatattgcctccagcgatccactgccataatgagggccaagaattctttgtcatagatagacaaatacttatgtctgtcgcccaaagccttgctcataaaggctactggctggcccttttgcataagaacagcaccaataccgacagcacaagcatcagtctctaacacaaaaacctcattgaaatcaggtaatgccaacactggggtacaagacatagcctgtttaagagccataaaagcctgttgtgccgcagtatcccactgaaattgctgttttctcagaagattagtcaatggtttagccaacaatccgtaattcttgacaaatttgcgatagtagccagtaagacccaaaaacccacgtaactcagtcacattagaaggtggcggccaatcctgcatggctgagattttagctgggtcagtagcaaccccattttctgaaatgatgtgacccaaataatgaagctggtgttgagcgaaggtacacttggagggcttgacaaaaaatttgtggtgtcgaagcacatcgaatacctgctgcagatggtgcacatgcaagtcaagagcggggctatataccaaaatatcgtccaagaaaaccataacaaatttgcggagaaagggttccagaatatgattcatcacacactgaaaggtggctggtgcattcgtgagaccgaagggcattacacggaactgatagtgtccgtgatgtgtcttgaatgctgtcttatgttcatctgctggtaacatacgaatctgatggaacccagcccggaaatcaatactagaaaagtaacgagtaccagcaagttcatccaaaatttcatcaatgatgggcataggaaatgtgttcttaaccgtcaggctgttcaatttcctgtagtcgacacaaaagcgccaactaccatctttcttttgcactaagagcaccggggaggcaaacggacttgtactgggtacaattaagccagctgccaacaattccttgacctgtcgttcaatctcgtctttatgtaacggtgaataccgataaggtcttgagttgacaggtcgagaatctggaaacaaggaaatagcatgatcgtactctcgctgaggtggtaactcaagtgattccccaaaaatgtcctgataatcttgaagcaaccgagccactggctgtggaacatccgtaagtggaaagctagacatagtattaagtatggccactgaccaaatatcattgcccttgctccatttcagaaattgttcagcaggcaactcttgaagatgaagctggggttgagaaacacccttaagagtaaccactacccccatatcctggaaggttagagacttagcattccaatcacaaagcatgggactatgagatttcaaccaatcaaaacccaaaatagcatcataagcactgaggtccaaaactctcatatcatgcgtgaatgtgtgacctgctgtccaccactgcatatgtttcaccacagcatcagaaattagtgtatctccattagcaaccttgactgtcagcggagataaagcagtaataggtaaatgaaggcggttcacaaacgaagaattgacaaaactgtgggagctacccgagtcaatcagaataaggaatacttgattgcccaccaatgcacgaacgcgcatggaatcagcagattcagtaccggctagagcgtgtaaagacaactggcaaagatcttggactaagacatcttccatctccaactgattgagagtttcttcagtcagggtctgatccaagtcattcaccgccagtgcatgcacctgagccttaggccgcttcagacaatgatctgcatgagtagcatcatatttctccccacagaaataacaaagtccattagcccggcgataatccctcaactgtctttccctccacaagccagaggatgaggcagtagacgatttgtcagatttaggagtggaagaatgatatctgggtgtaaaaggtctagctgaatgcactgaggacctctgtaaagactgctgctggagtttggccaagaaactagcccgagcaacagttgcgggagcttgggaatgaaccacccttttaatatcctccttgagacctttcacataatgagaagtaaagaacagatcatccaaatgtgggttatgcatggccacctgatactgtaaagaggcaaaactttgagtataatcctcaacagtaccctcctgtcgaaactcaagtaactcatccaaagctgtgtgatagtcataggtaccaaactgatcaagtactgcactcttaagtctaggccaggctacaaacccatgctgtaatttgaaaacctggtaccacttggcagcatttccctccagatgtaaagagacagatgaagttttcagatcatcactcacattatatatgcgaaagtattcctcacacttgtcaatccagatcttaggatgtagaccatcgaaacgtggaaacgacattttgggaatggaggattgctgttggtatacctgatcatcatggtggtgacgaccctcagggcgcagccggtgatgaggatgacgcggacgcccggtaggcgcagaagcgaaccagttctcttcctctgcatcggatctgttggagactggagaagaaactgcatccatcttcatttgccacatggtgaggcgcgccacagcgtcacccgtagccttgagttgctgggacaagagaatttgatcctgggtactctggttcatcgccttcgctgtgagatcaatctgagccgccatctgctgttgcgaggtgtccatggaacggatctgcgcaaacagcagatcgagactctcctgcatcttgttcaaccggacgtcctccttgtg

SEQ ID NO: 94076 - DNA, 333 bp, Zea Mays
ggcacgaaacacatggatacccaaacaaaagaatcaagtcaggctcagctatatgagatgcagacacccaatcaaccctcaccccttgttggtcaagcaaagttgcctcgcaaagaactcaaagcaataggtgcttgctactactgcaaaaacgaaggacatattattctcgaatgccccaagaagcgtctagaccgactaaagaagaaagctgccaagcatgacctaagcaataattcagaagaccaaccattttataagtacgatgatgaaggtcacttgattagtatacattgcggagcaaagaagaaaggaagttccttaatattagaa

SEQ ID NO: 94077 - DNA, 952 bp, Zea Mays
ctttggcgtcggcatgaacaaaacaagggtgaggctccagcgaggtcgtcgatggtgaactcgctgtgtgggcccagacatggcgagacgaaccgagacagtttgatgcttcggcacaatcgagctgtgggactttgacggcgcggggcgaactctggcgagctgcagggtgatgaagcgaggaggcaaacgggatgacgggcaatggtgacacgcagtagtagatgttggggcgacggtgctgagcgcgggcatgcgaccgagggagaagagcatgagaagaggtgtggtgttgtgggaagcaagcgtgcaggcagcagtcaagcggagaagcgatggagcggttgtgtagaggatttttgatgtggaagcaacgtgaacggcactagacaagggcaaacagaggagatcattgtaagaaactcaccgacgtggtagaatgatgatagcgagttgtagagtatcacgaaacacagaggcgagaacgggacgctcgaactgagctctccgacaagcgacggaaagcggcacaacagctgcagtacacggcgtggaaagaggcttggcattttatagggccagagacgaaggcgaggagcgccggttgctggcactgatggccgaggaggtaacggcggcgttaatggcattgagcagaaaaaagtaacgcccgctgcggcttcatggggaagaagagaaatgaatcgacagtagttgagagaggaacggacgtctgctagcgcacggtcgggcttcagtgcggcgtaatgggtgaagggtggcggcggcgtcttctgattgggcggtggcgtgcgagctagcgtccagacagcgcgcacaggagtgtttcgctggggaagatgaaaagacagagaggctgagagtatggcaaggagggcccacacataagtgaaaataaagaataaagagagatgagatgaatacaaaaaag

SEQ ID NO: 94078 - DNA, 464 bp, Zea Mays
ctgaaattcctgaaaacacataaacaatttttttaattatcttcccgaatttttttgaattttttgaccgaaccaaacaggccgtaggcgagtttgggtcaccccagaatggagtcaagaatctgctgtaaaaatttgagctcaaacggagcaccgagcgaaaagttatgcctgttttatggaagatacctcaagttatggttttcaaaggtacaactcggcaggaaccgaagcgacggctatggagcacaggttcagttttagagataggatttgttttctggatatggttggtttagatatatgatctgttttgtggatatggtcggttttagagataggatatgttttgtggatattgtcggttgtagagataggatctattttgtgaataggatcgattgtagagataggatctattttgtgaataggatcggttgtagagataggatctgttttgtgga

SEQ ID NO: 94079 - DNA, 365 bp, Zea Mays
ccctgaccaccgccccagttccttcgagaaaggcgagtcccggcatctaattcctacagtttgcaataattgatttatttaccacttgcctatgtttgttgcattaggttgtacgagttgtttgtaaacaaatgttgcatctatccttgattacctttatttatcctatctttgttacctcggtagttaagtacacttaaattgcttaggcctgcttagacagtagaagtcgggtgatttcctgtcacctacgagatataggcggttagcttgtacttgattggggtaaagtcattgggtaatatccatgatagtatgaatgttaattttgagaccgggcggagtcttatgggaaagtaggccat

SEQ ID NO: 94080 - DNA, 598 bp, Zea Mays
ggaagagcaaggcctcactcatagaaatgaatgaacaagaccacgtagctagggggaggggctagaatctcctcagtactgggagttgcgcagtatccatcatccaacaagccaggcctcacaagagctcaaaggtgaccctggtccaccaatgatcgacaacaacaagccataggggagcatggcaaaggcaagatgaaggctaaacaaaggagatgggacaacatggaaggcaagaggaaaatagggagaatgaggagaacaccacaattaaataaaggccacactacgactcctcatcactctgatcgaggcaaggtgactcgtctaacaaggaaacatgtcgggtccattgtcgggtcgagaatagacaagcgcggagcccaccacctctcgaacaaaggcacgagcaataattcttcctgagaagaacaagagaatacatatgcattagataaagccctaggttgcggtgctttttttcatatgggtccccgagcgactcttcattataatcgcgaactcgggtgctagccatggggtcacaaggcgagaaaactagggataaggggcctaaactgcaactagggaagtaggc

SEQ ID NO: 94081 - DNA, 332 bp, Zea Mays
ctttgtatggctacgatccagtgtttgcggctgcaccgattgttgcaggacctgattctacagtggagagcttgattcaggatcggttggcttactcttctttgttgagagagaggttggctgcagctcagaaccgcatgaaggtgcaaactgataagcatcgggtggagcgtgtgagttggtgatcaggtcttactcaaactccagccttatgttcaaaattcggtggccagtcaagctcacccgaagctcgctttcaagttctttggaccctttaaggtgcttcagcgtatagcgtcagttgcatacaagttggagttgccggctacaac

SEQ ID NO: 94082 - DNA, 365 bp, Zea Mays
atctcaatagagtcaatgatgccacccatgagggttaattcggtcggtggtaaagtgcaaacagataagatatgctcaaatgtaagggtggaaataagggggatagggttccagtgacctaatagtaatagacacccttggggtagatgtcatcctagggatgaattggttaatgaaatatgaagcgaatgttagctgtgacaagaggaccgtaacattgaagtccccgtccggagaggaggtagtggctgagctaaggatgcctaaaacagcgaaaggtgattgtcaccagatttcggttgatagcaaggaggccaacccgctcgaggccatcagggttgtgtcagaatttccagatgtgtttc

SEQ ID NO: 94083 - DNA, 635 bp, Zea Mays
aagaggaggaaatccccctaattcggaaaaacagtcggcgctacctggtcaggggggagtagtgatattccttctccagacttgtctgcactcgttggtctacaagagttgtccatagcaaattttgatcaggctctcgaggatatggttcctgaagatctgctgtccgagccaatagatggtggtatgatggacgtttgcactgacattccggatgtggggttagagttatcccgagcagcgtctcgagcctcaacgaccttggagtgcggtcttcagagtcaagaagctggtctaggttgctccattcccatggaggtaactgagaatccttcagccttagaggtggctgttgcaaagaacccagtccccaaggatggagccagcgattacccagcccctgagggtgttgtcggcaatgatcccgcccgggtgggtagtgcgagctacaacccagcccccgagggtgctgccggtggtgatctggcttcgatgggcaatgcaggctgcgacccagcccccgagggtgtccgagcgggctccccttctcatacctccatggatgtccacgtcgggtcttctcctccacattctgattgcatggcagcagcacgtgcttcaaatcaggaagtcac

SEQ ID NO: 94084 - DNA, 472 bp, Zea Mays
aatccgagcacctccacccggcgggcctcttgatgccactaccggtgccgcagggtgtgtggacggacgtcgcgcttgactttgtggaggccttgccgcgcgtccgcgggaagtctgtgatcctcacagtggtggatcgcctgagcaagtattgccactccatcccgttggcacatccctactcggcagagtccgtcgcccaagcattcttcgccgaagtcgtccgcctccatggggtcccacagtccatggtctccgacagggacccggtcttcacgtctctattttggcaggagcttatgcggctaatgggtaccaaactccacatgacgacagcattccatcctcagtcggacggacagtccgagtcggccaaccgcgtcatcatcatgtacctaaggtgccttacgggcgatcggccacgccaatggctccgatggctgccgtgggcggagtacttgttcaacaccgc

SEQ ID NO: 94085 - DNA, 303 bp, Zea Mays
cctaagtcgagtaagcgcgagcatgttgcaccatcttaagtcattgccgacttaagccgattgctccgttagtagggtatagtggtcaccctcggttgagtaagtgttctgatttcaagtttaatcaagtcgaagtcaatggataaccaatattttgaatgctttcgagaatgaaattttttattgatgatgtattttccaattacataatacaacattgctcagatagttcttgctaagggtaaaacttcctgaggtgctctatattccatgaattccctacttccgtgccatccatttgag

SEQ ID NO: 94086 - DNA, 491 bp, Zea Mays
cgcacatgtcagaatgcttagcaaagataatccttaaggacttcatacatggcaaacatgactgtatatctagggccatgaggatcatatggatattgggccccattgtgaaccatatgaagccaaaacatgtactccaccttaagtgtggcatgaagatgtgtagaaatacaatactaggtcagctaggtatatgatacaatgtatataaggtgtaacatatgatgtagatgatgtgtgagggcgtgtagggatgctcctaagacaacaatgcaattgagagcactaggagtaggtacactaagattgcatggccttagtaatatgcgaataacacaagattggtctgaaaagaaaaaggaaaggcacaagtataagcaacatggtcataacagagaagcccatgacaaagtgcaccaatcgaggaaggggtatggtctcgatagtgctagggatggccacaggaggccacattaaatacatcaatacac

SEQ ID NO: 94087 - DNA, 390 bp, Zea Mays
cttgactttcacaccgatatacttttctattctcccatcagggcctggatcacgaggtccatcctcctcctcatcatcatcaactgcatccccatcctaacagaaaggagagcatggatattagaaagtcagatcaaactcactcttaaaacagcatatgtgcaggtgaaggagaaaaattaagggaaatccaagcaattcattaatagcactaaaacatcattagaaacagagtagacgtgtgattgtcattgcatccaaggaccaggaagtgagcctcgcaactagttgggtgggacgtgtgctcatgcactcaaccacccatgttcaagccccctctcagcttgaatttgggtccctatttctcttgatgaaaaaagcacctagatc

SEQ ID NO: 94088 - DNA, 471 bp, Zea Mays
tgggtgaggctacacatgaagaagtgtggtgcaaggcaatgatggaggagttacagaccatcaaagaaaacaagacttggacactcactgagctacctgctaggcgtcgagctattgggctcaagtgggtgtatatggtgaagcaaaatgagcatggtcctataatgagacacaaggtgcgcctcgtgggtgatgggttttgctcaacaacatggtgttgattatgaagaagtctttgcaccggtagatcgaatggagacagtgcagctgttactggctatagcgatgtacaccatatggatctgaaaataatatttttgaatggtgaccttctggaggaggtgcatgtacagaagcccctcagttttgtttgacctagtcataaacacaaggtactgacccttcataaatcactctatggtttacatcaggcacctcatccatggtatcacaaactagatccgagactgg

SEQ ID NO: 94089 - DNA, 541 bp, Zea Mays
ccggatctaaggaagtttgttgccatggttgatccgaccatagctatcttagccctatagcttgcctatttatgtgttgcggtcttcgagctcccgagagaaaaaagggcaagggctacaccgagcgccggcgatgtgagatatgagagagagtagtgctcgtcgccgttgctatcaaagtcgagcaagcccgtggcctagacctcgatattggtgcaagggcgatcaacagagaatgccgcacaaggtcttaacttcatagatgaccgacgtttggcgcaaaacctgccggagcatgagcctcggggcggagccacacgacgtcttcgaccagcctcgctctcacctctgcaactatggtgagacaccccctaccattctatccatgatccccacattgcatagccctattcacataagaggttagttcactggaaagcctggaatgccattgacgaccatggcactgcagtattgcatgcgccagcgctgctacccgggttcgtggggtggaagaagagggtgtttgggccgttggaac

SEQ ID NO: 94090 - DNA, 477 bp, Zea Mays
gtaatgacgcagggctttgtgttgcttggttgctgatgagaatagaagatgaagctaggcggcaaatttatagagtcggcaggccggcctgcggcgggcgtgcgatcctacgaggagaggtgggcaaagtgactttgagtagctctgctctgctctgctctgcgaattgttggcgctagcttcttccttggaccgccttgcaaattgcctagaaattcctgaatgacaagtgtcaagactcaagaacacgtttgggcaagggcaacaaagtagggcacgtttttgtcatgactgcatgtacgatgcaacgatacatcctccagttcaacggtcgcaatattggtcagggttcgtctgctgtcattttcttcggaactattcaaaacgactaacatcactgtctttactcattatatatcctcgccatttctcttaaaccatcacccccaaataatatcatgatagtcatcagtagag

SEQ ID NO: 94091 - DNA, 548 bp, Zea Mays
tgctctatatttggacctatcatttacatttacagggtgtgtgttattattgcaagtgctctatagtgtgccttttgatctatgtcaggttgctcaacttttttctggtttggtgaaggtttgttccttcaacttaatgcatcagtaatggttgcattttctggtagatagaacaataccattctgttctccattccaatttttcacagaaggcactgtatatgatagctcatagcagtacagtttagaaatcaaatgttgccgccataataggtaccacatgatgtcactggttgtatgataattacttggtcttactgatactgcttgttcttcaggctggtaagcaagcacgaccggagaagtttgagatcccagctaaaatcaagctgacactgcagccatggacgtcgagcttaagagggtggtcatcaagaaggcatacgagatggaccttgcccagttgtacatccagtgacactaccgctacaatttttcaaggatatgggtgttgcttagcttgtagcaaccgataacaacatttattt

SEQ ID NO: 94092 - DNA, 841 bp, Zea Mays
ctgggttgtatggctccggtgggggagaaagttcagctacatcataaaacatgtttgttaagttccggagctaaaaatggattatgaagctaaaactaaaaaaggtacctataagcctcgcacgctcagcagcttcttcaactcttttggcttcttcttgagcatcgtgagattctttttcattctttctaatagcttcatcaactatctcacggacgccgttcatccatacctcggagtaaaatttcgtgtctaatgcaaaagctttggctgaagggttttttatgtcgtcggctgagaaaacaaattctggttgaactacaaccttggcatgttcgcaaccagccttctccaagatggatgtagcccccccacgcaccagcaaaggcgcaaaaatctcctcggtcacttagaatttcgtcaaaagcatcggtttccccgcggatccactggacaactccatcagggtcgccacagatgaatctctacttagaggaatatgccccaaccctagcaaagctatcctttaatttcctagcgcatcccaaggatatttcataacacctttctttggaagcacgaagctcctcggcgttcttttgtactctagacctttcgatctcacaaatctcatgctccatcacctcaacttcaaatttttcggttgcttcagcaaccttcctttttagttcttccactttagctttatgagcttcgacttgtgcaacaagtttagcctcattagatctcagtctatccactaaggaaagtaatatcttatccttttcaagagcttcgctccttagtgtgatggctcttgagcgaagattcccaagagcta

SEQ ID NO: 94093 - DNA, 329 bp, Zea Mays
ggggaggcacaagaagtcctgctcgatgaagctcacaactcagcctactccatccacccaggaaccaccaagatgtacctagacctcaaaactagatactggtggagagggatgaagaaagagatagcacagtatgtggcccggtgtgacacttgccagcgaacgaaagccgagcaccaaaagcttgtaggcctattgcaacctcttccagtgcccgaatggaagtgggaggaaataggcatggattttgtaaccggactaccccggacgcaaaaagggaatgactctatctgggtaataatagaccgtcttaccaaggtagcccactt

SEQ ID NO: 94094 - DNA, 291 bp, Zea Mays
aggatatttgtgtgttgggcttgttgtgacctgcattttgtgttgggcatccacgtgtattcaccatgcaatgttggcaccttgagagttatctccaccatgtgttgaacaaattcagtgaaccactgctctgtcttcttgtctattgctttagggcacaatctagtgaagagatccctgctctcgagctcttgctggtcccttggtacctctgcagtttgtgttacggtttgagttcccctctcaatccccaggtcgatttgcccttgttcatgtggttctcgttccgtg

SEQ ID NO: 94095 - DNA, 681 bp, Zea Mays
tagtggtcaccctaagtcgagtaagagcgagcacgttgcaccgtcttaagtcgtcgtcgacttaagccgattgctccgttagtagggtatagtggtcaccctaagtcgagtaagcacgagcatgttgcaccatcttaagtcgtcgccgacttaagccgattgctctgttagtagggtatagtggtcaccctaagtcgagtaagcgcgagcatgttgcaccatcttaattcgtcgcctacttaagccgattgcttcgttagtagggtatagtggtcaccctaagtcgagtatgcgcgagcatgttgcaccgtcttaagtcatcgccgacttaaactgattgctccgttagtagggtatagtggtcaccctaagtcgagtaagtgtgttgattccaagtccaatcgaatcgaagtcaagtgatagttaacagtttgaatgtccttgaaaatgaaaactttattgatgatgtattcttccattatagagtacaatgttgctccgatagctttcgaggccttgctaagggtaaaactttctaagatgctctatgctccattaattccccacttccgtaccatccatttgtgtaagccgatatgatcctggccgagtgaccttcgatacaatgaatggcccttcccatagtggtgacaacttgtgccgtccttcccccgttagaat

SEQ ID NO: 94096 - DNA, 541 bp, Zea Mays
gacagatacaaccaagcacgtctcttcggcacccacacattgtcgcagcaagcgaagtccccatctctttccacaacaaacaatatcacagtttacatacacacaacaaaaggccaccggccactttgcacaaataaatacctaccacattttgttgccctccctctttatcgcgagccaggggagggcagcgttttcactcactaccgcaatacaagagcgagggcagcataaacgctacattggctcaacattcgggataaggcctgcctcacaaaaattaaacaacatcattctcaactcctcaccctcaaatagactctgcagatccccctccccaatacatgtccccggacgacgaggacagcaaatctcgttggtcatcccgatctagccgaaggcgggttcgttccatccccatccaacgacgcatattacttcgcgacgtacggccaacattatgcttcgccaccacccttcaccggcgggactccccggtcctcgcctcagccgaggactcgaatgctccacgcgcttccat

SEQ ID NO: 94097 - DNA, 290 bp, Zea Mays
cataatcaagaatataagaatggactccccctaaaggtatgcacaaagtatttgaaagaattgatttagtgcattcactttaaaagacataaggggagatccattaaacatcttgatctaggcttataagatttgcaataaataacttaagcatggtaatctcataatgaaagaggtttagaatgcttacaaccacaccattgattgttgtgaagaccttattgtccaagtaggtgttgttgtccttgatgttcttcctttttcatttgagagtcctccctttatagttg

SEQ ID NO: 94098 - DNA, 546 bp, Zea Mays
acggtgcagctatacgaggagcatcgggtgccacgttgcagggtttggctgaccctggagtctcaccctctgcagccgggatggcattcccttgactccaagactgtctggttcagggcggacgacaccagtgaggccgcagcgctaaaagccctgacaaccttctacggatatcatcccctggagatgatgatgcatccactgggactcttccccgccgagaagagggatgaccccatgtagtgcaacagagtgagccacgtgaaggacgtgtcggccatgcatcccgaccgagttgggaggatcactgtccagtgtatgagcgcactgtatcgcctacaggccctatagagcgatgtcatagcacacctcactaatctcgctcagactactaagatcgcaccatagcgttgcctctaccactcagggtagacaggttagttttacatattaggaggacaggaacccacgcgagcttagtttggtatcagattttggactaggcttatgggtgaatccccctaaaatgttgtaacccagggaaga

SEQ ID NO: 94099 - DNA, 353 bp, Zea Mays
tacatcatgtagtctatatcatccatatatatcttaaccatatttcctaactccgatgatatacactaacctcgaatctataagaccaagtctggagaagaaaagatcgacatcgacaaggaaggatataacagtcaaagcaaatctcgagatgaatcaggactcaaacatcttggataaagtcttttcttgccataatctattcttgtcctaacctatccatttcttatcccacatagtaagtagttggatacctatgctctcctaatcaccaactattgactataaaaaagtgagactctgaatttttgaaccaattatagactaaaagccgaattacaaaccaatccttt

SEQ ID NO: 94100 - DNA, 505 bp, Zea Mays
gatgtattacaatagctgtgtgtcgcgcaagtacccaaaaatggtaaaatgtggtgtatgttggtatttagaaaatagtcacgtcattaaccaactcgtgttcagcaggagtcgatcgcgttaagtgattgcgatatacatattgtgtctcggagtgctataataatgagttagcagacttgttagatggttttgggttaagttcgaggtcacgatgaattgcttgttgtagtctaaatgcgtgtggttatggtcgcaggtaaaaatttagtagtgctcatgtggtgtctaagttaaaaggcgaactagtgggtgaaaagcgcttcgatatacatatatgtcggatgatgattgtggtgaatgcattgattaattgtgtatgttagttctagagcgcgaaataacttgtataaaaattagtaagtctacttgttagttctcacttggttattttaactctaacaattatcaaagtgttagaataattcaagtatttagaacgcga

SEQ ID NO: 94101 - DNA, 593 bp, Zea Mays
cgaaaatagcgagaagacccttggtgaagatataggcaaactgcgagctcgtcaggacgtagacatcctcgacatcaacatgctcacgaacgaagtgaatgtcgatctcgacatgcttggacggggttaacagagaggtagatgacgctgacgttgtcgcagtaactagagtacttttggtgaggggctgtgaagctcctacagaagctggcgcagctatatcgcctcagccaccccattagcaacaacctagtgctcagcctcagcactggagtgggagaccacaggctgatgcttggaggaccaagagatgaggttggctccaagaaacaccacatagcccaaggtagaccgacgggtgttcgggtacccgacccagtcgacgtctgtaaacgattagctcatgggtggaggatcgtcgaaggtggaggccatagtcgacaataccccgaagatactgaataactgcttgatcgcacccaagtgcggctcacggggatcatgcatataaaggcaaacctcctggacgacatatgcgatgtcgggcctagtgaaggtgagatactagagagcaccggtgaggatgcgatagg

SEQ ID NO: 94102 - DNA, 538 bp, Zea Mays
attcttgtggtaaatatatagcagaaatattagaatgcatgtgaaggcaatattgtactgtctgtacatactcaaatcgctctaaatattcatgttgcgttgagcttttgtactcatgtccagcgattaaatgatatagtgggtactcagacacgtcgaccagactacgttattaatcggctgagcattggctgcgccctagcaacacgacgcagtatttgtgtcgtacgaacttggctgcgtcatgtgattgctatgtcgcgctctctattaatcggatcgctcctgttgagtcagaccgccatcgttgagtcgcgtatttttcgcatgccctgtaggcattatctgtcagccgtgatcatcgagccacaattgcgcctgttgtgcatgttgcgtggacttatcgtgtacccctattaccgagccataattgtgcctgttgcgcttattacgaaagcttgttgtgttgtcgtagccctgatggtcgcacacacgttgacgccatatacactagagcttgtactcgcgtggattgtgg

SEQ ID NO: 94103 - DNA, 811 bp, Zea Mays
acgctatgcccctgaagaagtgaacacggatgagaagcgccaagagcgtttccttgaaggactgattggacctctgaattatcaacttcagagtcatacattttccaatttccagaccctgttgaacaagggaattggccttgaaagtaaaagaaaggagctatctgaccacaaaagaaaatttcaaggtcagtccagcaggaacacccgtccgaacaacgctcaaggttcgcagttccgctctggaaatcaaggcggaaacaattatcaagtgcaacgctctggacagcaaagccagagaaataatcagagtcagaaccaacaaaggagcaactctcagaccaaccagaggtctggtgggagttcacagaaccgtcaatgtggcaccattaacacgcaggccagaaacaacgcacatgtccaacccaatggctgcttcaagtgcggtgagctgggccactatgctaacaactgcccaaggcgcaaccagcagacaccccagaaaaacaataaccagagaaatgaccagaacacccccgctcgtggatctgctcagaacaagactccgcagaaccagagtagaggaagggtcaatcacgtcaccgcagaattagtgcctcaggatgtcgacataatgtatggtatgttccttgttaactccatacctgcattagttttatttgactctggagcatcgcattcgtttataactgagtcatttgtggaaaaacacaacatacctaagtatcctcttaagaagatgttacatattagttcactaggaggtgacatgaaggccacacactcatgc

SEQ ID NO: 94104 - DNA, 437 bp, Zea Mays
tgacagagtccttggttgacaccaactgtttaagtcgcaaaacctcatcttgggatacctgcagctcgtgacgatgatggtctaggtctgacatggtgaagcggtggctcctttccaaaattatcaaggagttactggcatcatggtataacttgtccagattgtcacgagaggccgcgagtgctcgtttttcctcctacaagcaagaaacaacattcaacatccagacaacaataagcttgacaaagtcagctaaggaagtttacctcatgcaccgtcctctcatagtcaagttaggaattgagggaagaaatcaaagaatgcgcgttatccaatgaagcagaggtttgggccaagtcggtttggctttgagaatatttctcctcgaagttagagcactgttgaatcaactcggcccgacttcgagaatacttttc

SEQ ID NO: 94105 - DNA, 383 bp, Zea Mays
ggaccgcgggttatttcctagaaaatcttaggtctcttaagcaaaatgttccagcgaaagggtatctcgctctcacagccgtccgatcaagagctaggggcacatattaaatccactaccctgcgaaccggtacactacctcgtccattggattggagatcaacgcggtagatacgaagtggtgaaatctaaccccgcgcgtccgatcagagatcgacgcacgcgatcaaaccctgacgaacaagtaagttggtctaatcctcaccgctcatttcagatcaagcggtccagatccggttttcccccaccaggtgcacaggcgacagcgccgccctgacctatggtggagcgccatcgccggcgacacgccatcattctcccag

SEQ ID NO: 94106 - DNA, 308 bp, Zea Mays
aggaagttcacattcatttcttagtgctcaggtggcccaacatattcaaggggtatcttccttgccacagatgatgtccgttcaggtggccaatggagatcgtattcagtgtatgcagcacataccccaagctgtttggtcattaggagcgtgtgagttccagtccaacttacgtattttgcctctccaaacttatgacttaatagttggcatggattggttggaactttacagtcctatgatggttcactgggcagaaaagtggctggtcgtcccataccaaggatctacagtcaaattgtttggcc

SEQ ID NO: 94107 - DNA, 316 bp, Zea Mays
aaaaagaaaagacctcttaccctctaaggagaatcttctctcctttcctcaatattaacaaacccttattctcttgctaccagatggaagactcctttctcattaggacatcctactgctcagaggtggaaggattccctcatcttttacatagttgcgtgcttcgcatgaggatccgcaagaagcctgagtacgtttggaaggaataccgcgagaatggaattgagaaatgctctatggcagtctacctgggagaaagccgaaactacccaaatcaccctcccttccaagtcgtcgccactggacaccgcttccc

SEQ ID NO: 94108 - DNA, 466 bp, Zea Mays
gtcgaattcgtcggtacgaagcaccagctgggcgacattctcacaaaggcgcttggtcgaactcggttccaggagcttcgtggttggatcggcatgaaaaaacttgtataaataataatcatgggcttaggaggagattgttatagtaagcccagaattagtgtttatttcttagcaagtagattagcacacaatcaccttccaggtattgtgatttacttaccaatttctactgcatgtaattcctttataaagagatagagaacaaccagaaaatgcagtctgattgacagcaccaaatccatcgtctcctctgtatgtgcttctcgtgtgtcatcatcctcgccggagttctaacacccctcaaggtcaagctccatcgcgccccaccgagctcttcctgcctcgtcttctccccctgtcacgcgctccttcccggcttctccctgcgctctgcccagccgcc

SEQ ID NO: 94109 - DNA, 507 bp, Zea Mays
agaagctgtccttgcttactgcccccatcccaggtctacctattagctagatagctgtagtgctgttttggtagcagtgttttagtcatggatggtttcatttatgcttgttattggccgccgtagggcggccttatctgtatcttggggtcctttttggacctttttccccttcttaatatattttcgcgcagctcttttgcgctttcgagaaaaaaaacaacattgatgcttttgaaggggcaaggctgaggggaatgccaagagcaatgtgaagaaaagcatcagggtgagcagttgaacatgacttgttgctcggaaacagtttctagtttcaaccttttgtagaccatacttggtactctactaagggcctagtagcctaccatcgaaaactagtagctatcggaccagctgacatctagatgcgcttttgccattaagagcaatgtaggtgctcaggtggcttgggtggtatttagagcacactcttatacacatgtttgt

SEQ ID NO: 94110 - DNA, 655 bp, Zea Mays
tctccgggacattgatggccctccctcatccctttcagacgaagggctggaagacctgacggaggtttttgacgaggtggtcagtcatgtcgtgcttagggtgtcggctcatgacgtcattcgtggtgcacgttgatcgtgatgtatcacgccttggcaccacttccttaaagtagtaataaagtaatctttgcttcctgacttttcatgtcgtagggcccttgggtattttctttgtgagctttttcgtgtgccttctctctttaaaagcaagaggggggagggtagtgcgagtgaccttgttcgtggacttacttattagtcggcacctcctttcacccatggattggagcagacctcccaggggcatttttcgaggaaatggtacggtcgacccacccttacctcatgatttcatcttattcctcttctggttaatccttggttcgcctctctatggtagcggccgcttcttctaaggcgtgaaggtgtcacaaccctatgtcttaattgtccacctcgccgacccctttgtgacgagtggcagacatctgcatgagggatttggacgcagcacatgcagttttggggtggctattgctgaagtccaacatcatcgatcacatctagcggctcttaatgattcaaggacaag

SEQ ID NO: 94111 - DNA, 900 bp, Zea Mays
tattcatgaattatcctaccagaagaaggcagttgggaaagagcaatatcataacaacttcggatgctatagctttgtgtacctgatgtgaggtgtcatgtgcgaacgtttcggaaaaaatggccaggctcatggatgaagcaatggttttatgttaaaaatgatctgagtgagagggaggatgtgaaggacataatccagcgccccgtacgatcacgctttggcatcaggaggcctttgatcgcaggtggaaatgaagctcaagcatgtttgaaggccttcaacactgtgtgtacttacattggcaccagagatttggttcaggagcacatttcttataaggtatggcctcttgttaatgattgggagatgcgaaggagaccgttgtttgttccagtgaaggtggcctggtttacctgaagtatagttagcgctacaaaagtcaatttggcgagccgaatgacgaatggattgaagtcgttgaggtaaccagtgatgagctgctggggacttatatgaaggcagaggacgaagccatgaacactgccttcggtgctcgaggcaaaaggagactaaacagagtttttgatgtgattggatttatttatcctgactactgctttcccactcgaaaacaaggaacaaagaggaaaatcacaactacgacctcttctgccacaccgaagccaaagagggctaaagtttttactcatcggtcatagctgcactctttagagaagactgttgcagtgcctgctatagagaagatggaagttgttgaatatgccaaagctacccctcagcttcggagatagtacatgctatgactgtcgaagctactgtcactcaggtagaagaagcagaaccaaagagctcaaagatagagcatcaaccgaagct

SEQ ID NO: 94112 - DNA, 777 bp, Zea Mays
ggaaaacactctgcaagtgatggttgcatccggtaaatggcacaaatttcatgttatattggtttgtagcatatgttgcatcaactgaaacggcatcaccaaaaatactatagttttttctgcttatagcatcagcccaaaaaacacgcattagccttccttgttcatccacctcaaacttataaaaaaaggctgaattcacttctttctttcgctcaagttgagccacaaacatctgtgcatctgcatccttgatttttgacctaaggtcacggtaatagttttgaaggtccctcagtgtgcaaccaacattctcaaaacccccatcactgacatgaagtaatctatatgcaagggacgtgccaatgctagctttatggcaattgaataaagtattctttgccctctcggaaacatgactgtttgatctaagtaaatgccaatgagggggtgatacaagaccatggttgtgctagtcgaccatcctagtaattttgaaccttctgtctttaccaaggctaacataaatatgtgcgtcacaaccacaccttttttcactcaccttatgagtcttctttctctttttctctggggtgttaataactttttcatcttttggtacattgtatccttctcttgcacaataataatacttgcctactatctctgaatccttcttcttatgctgcccaacacgaactgagaaaccaacatcatgtgcatagtccttgtaaaacttctccacatcagcaagattatcaaatatcattcccaccg

SEQ ID NO: 94113 - DNA, 448 bp, Zea Mays
ggcgtactggcgttgtggcaagaataggccgttgctgtcgtgcattaccgagatggtgaggaagtggtgtagatcacctagttagtcatggtgaaccctgagtggagatgtgcgttgatgtggtggagtgttgaggacgatgccgtgaggatgatgttattcatgtacaaaagtaggtaggtggctcgatctccatatatgtaaacaatgagagacgcttcagacttggaagtggtgaagttgattgttagacaaaggtatatgatgtaggaaaatctgatgtcttccattgagcccttaagcgtttatatagagtacatgacgtgggagataagacaatccacaaatacatatggtagtctatgagacacaatatctagactatcaaatatactctaaaacatatggcaggcaattagacataatctgcctactgaccgggcaccag

SEQ ID NO: 94114 - DNA, 444 bp, Zea Mays
ctccaatgatctacaacaaatagaattgctagatactccttctcataggttgacaaccccaaatttttaggtcccaaagctttgctgatgtaagcaatggggtgtccctcctactgtaagacagctccaattccactgccactagcatcagtctcaataacaaaagtcttggcaaagtcaggcagagccaaaactgttgcctgtaccagagctgtcttaagtgcatcaaagacctgttgtgtattactgttccacacaaacaactgaccttttctcttcaaattggtaagaggtttgctaatcatcccaaatccaaccacaaaccttctatagtacccagccattccaaaaaaactcctcacatccttcacacattgaggaataggccagctctgaaaaactttcacctttttagggtcagtagctacctctgcagcacttata

SEQ ID NO: 94115 - DNA, 323 bp, Zea Mays
cccgtatgatgcttaaaccctgggaaatgtgtgttttgagtacttttggggatgttacatggttttcttgtttcccattaggcaatcaatgccaagctagtgagaggttcgagctatagagttcatgtggaccccaatgggcattcaataggtccaacgcctaaccgcatgcatggaggcccttagccgctttatttctatgttaggtgaatggggacttctcttcgttctttaagttactttggggcgttaatcccttcaaacggactaacaaggtcaagcaaactttgcaaatacttaaggaatatcttacctctcccaag

SEQ ID NO: 94116 - DNA, 565 bp, Zea Mays
cttaattttccagttctaggcaagtatatatgtagatctaagaaatttactctaccctttattaacatccacaactcatcccttcgcaaaactaaaacaaacacgcacacactagttagtatttacattatgaacctactactcatccatttcgaagaaacttgctgatccatggagtttatgaacgaaccgcgctggctgctgtgttgtgtcctgagggcttgtacaatggtatgctcctctttttcatgtttcctgtacactctagctttcctttacatttacaagattaagccttccacctgctccttcttgcttctacacttcacaacggtatccatgcctgtagtgtaggtacatttgcaagaaatttttttgtttcacattaccctcagggaagcatagttgtcagtcagttctcaagattagtttggttgttactgaccttaattaacccagtttctgtaccacagaaaaccatgtcgtttgcagtgaacaagctcgttatcttgcttcctgcggatagccttcctactttctgctgcttctccctcaaccatatctg

SEQ ID NO: 94117 - DNA, 493 bp, Zea Mays
cgtagagcatcggctgcctattaagtccggtttcagacctttcaagcagaaagctagaacatttcgtctataccttctcccacggatcaaggacgaaatccaccggctgttagaagctgattttattagaccttgcagatacgcagaatgggtctccaatattgtgctggtagagaagaaggagtcaggtaagcttagagtatgcattgattttcgcaatttaaatagagcaactcctaaagatgagtatctcatgcccatagccgacacattaatcaataatgcatcaagaaatagaattattagctttcttgatggtaatgtcggatataatcagatttttatggctgaagaggatgcgtctaaaacggccttcatatgtccaggcttcatcggtttatttgaatgggttgtcatgacatttggtcttaaaaatgctggtgctacttatcagagggctatgaatttgattttccatgagttgttaggaaac

SEQ ID NO: 94118 - DNA, 491 bp, Zea Mays
gacgatgcatgcactcatcagttggccttgattattgatcacactctatgcacccgtcttctagagcgcttccctaccactctgacctcctcacaataatctgtgtagtaccggagtaacagcatgcctgctcccctccgtccctgccctgtctcgtcgacgcagtgatggcgcatggcggcacggcagaggtaacgcggcgcgtcaccgttccttttcctgataacgtacgagcagccatatgccataatcgaccagctaataactccgtgtactcgtaaggaggacgagcacctgtaacaccagacgcaggcagaggagaacagctccagctagtgagactagaccacacgtcagtcgtactgtcgcctatccacccgcaaaaaaaaaatattctgtcgcgtagagagcactctatctaaaacgcaagtctcttccaatcaagtcccccgacccaatcatcaggcttctcctaatataggagtgatgcc

SEQ ID NO: 94119 - DNA, 573 bp, Zea Mays
cttcagccgtccctgacgtagacgagcctacttcgaaggacctcatcgacggagacagtgtcttcgccctacaggccctaaacaaataccaagctcaaacaaaagcatggcgcgaccacacagtcatcccgagagaattcagcgaaggagacctcgtactcgtccggacaacttggacagagtcacggggcaagctggaaccaaagtgggagggccccttcatcgtcaagacgaaggcatcccccagcgcgtataggctaacaacgccatccggtgaagacttagagcattcatggaatattgacaatctccgcaaattttttgtttgactcctcagggccagcttgcccttgtaattcaccaaacagtttcattccggcccgcactcttttcctcccggggggtgaggtttttaacgaggaggagccatgtaatatacacgcaaaaaatcccccgcaaaaattacaacgtcgaaaaagaccgcatcgacggtcttcggcattcgaccacaacgaagtcaccgtgaggggcagcgctggctaccctcgcgtgcgacactctacgcaaaagtcg

SEQ ID NO: 94120 - DNA, 528 bp, Zea Mays
gacgagtagtgctattaggatcaaaggttagaacccttgtgcaaggatgggttgcccggcggtggcgccgtcgcgtcggtcgtgagctcactgcggtctgttggccgagtggaggaagatagcaggatggcccttgatgcgtgaacatgcattccagattagagttggccgattccctttcacccctttatcgcgtgccgttagatcgtaatctgatggtcgagagttgatatcggttcggtgggcgaaacttctaatcgagaccgctggatcggtagttgatggataggattagatcgtgcgtacaccttcgtcacattaaaatccgaccgcacgttctgatctgggtggttcatactgaacaataccccttcggacaactcttttgcgtatgagcccctgaagaatcaagtatttaacccgaagttcactgtgggagtacactgagtcctagaaatcttgcgctaagacccctgagctttccagaaaatgaggcccagtccaaagataattaaaagcagataattg

SEQ ID NO: 94121 - DNA, 462 bp, Zea Mays
cacagggtcgaggccctcagcacaattgctagatatcaagaaggtatcaagacctggagagacaagtccatcagagccaaagagtttgacgaaggcaatttagtcgtcatccggacaccacagacattagaaagagggaagcttgaaccaaaatgggaaaggccttacatcgtttcgaagaaaacttctccatacacttttgggctgaccagccaaacaggtgtctagctggaccacaactggagtgtgaataatctacgcaagttttatgtgtaaagatgactttggttgtaagggccctcagttgcccatgtaatattttttaacactacacaattgggatcatactcttttcctcgtgaaggggtgaggtttttaatgaggtggagccttgtaataaagcaatgaaaatccccgacttatgtgtcagccaaaacagcttgtcgagcccaacattcggcc

SEQ ID NO: 94122 - DNA, 498 bp, Zea Mays
aaaatgtccatatacaagtgacagtgacagggatgaagacaagaaagtgaaggaaaagatagagaagaaaagatactacaagaagaagggtggcgaggcacacatggggtgtgaatgggactccgacgagagctccaccaactcctcctccaacaaggacgttgtcggtgtttagagcccgagggtgttggggcaggttccccttctactgcttccatggacgtccacgttggaccgccaccattccaatccgaggaggctgcggtgacacatctatctacgactctcgctggtctggttactttagaggctagtgaaccagatgctaggagtctgccgcctgctgatggggtcgaagttcctctgactcatgactttgatatcattcccgctgatctcccctcatcaaacaatgtgtcaactcttcctgctttgggtcttcctttgttcctctccaatcttcaggtgagtcaactttcgcttttttactgttcccac

SEQ ID NO: 94123 - DNA, 372 bp, Zea Mays
ttaggaatcaccaatctgcttttgaaccataatacacccttttcatcttggcggaaacatttatacttttcaaccttccgatggagattctccttgataatctgcactcccttgtcactgagctgggccatgatgatctggtcttgcaaagctggctcgacagaaatgtgagacaaagcaccagaaggaatcacttcaagttgcatcttgctcaactcatcacacaaggtgttgatgcgagaatccatcagaatacaattgcattgcaacttccgactcaaggcatctgctaccacattggctttccctgggtgataatgtacctccaggtcataatccttgatcagctctagccatcttctctgcctcatg

SEQ ID NO: 94124 - DNA, 494 bp, Zea Mays
ctcatgtttaggatagggtacatgtgtttttatatggatccaatatatattatgatatatggattgatcttgtaaccagtattataatatgtggtacaatagaaaccatttaatttattaatggaaacgtggtcgcagaactgtatttaactggggcacttggtacaggctgtacactcgaatgtactactccagttctgatagctagaaatattatatcaatcgaccctgatgggacggtacatatatacgctgtgcgttgtatccctcaaaagcgaacgtaaggatgaataaaaaaggggagaaaactcatgtcctttgtttttggcaggcttttacccccacaaaagctggcggtgaaaaaaaagggagggagccacaacagcaagcattgatgctttttagctgatggagcctgcctgcgtctgcgtgggcgcgcattggcagcactcatgcggtcagctccgcccctgcggatactgcagttggcaggg

SEQ ID NO: 94125 - DNA, 346 bp, Zea Mays
tgggtggtgtttttcctaacactttttatgggcagatgccatagcattggtattattctcagtatcctaaccccagtgctgtgcaatttgctcaccctgtgtctttttattgatgtcggacaaaggcctggagaacatatgacttatggattcctgttgttcgcgccacatgactggaagcaaaaaatggttctctagcctcgtcccagtcattggtaaagaatacatcacattcgagggtaagttaagaggtaaggtaatctctcgtggcaccgtttgagtgaatgagagttttgtcctcaaggatgctgctttggtttggaatttgcatttcaatctgctttct

SEQ ID NO: 94126 - DNA, 945 bp, Zea Mays
cgaggttgagctcactggtggcagtggcgaagaagacgagggtgccgaacgtgatacaacttcctagggcgaatgtcttgccttcggcagaagttgtcgattgggccatcggagtggagggcgtcacctaatatgatagcactcccctacttgctgcgccaactatcgtggttttgtaaccgggggacaataagatttgtgttcggtgagggatgctagcgcagactcactctgaatggtgaatctctaggactcgaacgagagatctgagacacggggcttatactggttcaggccggggccctagtctagtgtagtgttgatcgtagtattgcgatggaatgtgttacagcttgtgtgctcgtgttctagaaaaaggagagcctgccttttatagtttaagggtaggaccttacagaggtgacttgttctctacaggtatgagggagatccattgttctggtttgatgtagtgctcctgatgtagtctgtagggtcgtgcgtaggcgtactcctggtatggcatatcgtctacttgtccgtcatgtgggttcttgtagcgactcctctgctgacatcatcgtagtagtgcatggtgggtcccgtgggtcagccccttatggtgctgtcatgcatagcacgaccttgcctattctcacggacctgcaccacttaccggcgtgcgtaggcatacaccggtatggtgtacctgtcgcatcccttctggtatgcgggtcactgtaaagattccgacgctaaggtccctacgaccggagttgactggccctatatgttagtgtgggtttgcctggtacagtacgtgacgacgtactgtctgacctttattggggacccttcaacatcgtacccgaggcctggatgtggtttggtgatgatccgtcatgtcacgctgacgtgggcctgtatcattgggttgttcctttt

SEQ ID NO: 94127 - DNA, 294 bp, Zea Mays
tcaccacaataatcaaaccgggcatacatatatgtcggtgcgctcttcacatagtaatttgcattttaacttggacatgacctgagcactactaatttttacccgcgaccataaccatacgcatttagaccataacaagcaattcaccgtgtttacgaacttaacccaacccatctagcaagttggctaaccagaggaacggcatagcccgccatacgacatacacgtcggcttgcctattattatcaaaatccgagacacaacaacatatatataacaatcacttaacgcaat

SEQ ID NO: 94128 - DNA, 389 bp, Zea Mays
tttgcaagttgacgcgcgcgaagaggtatgggtggatatctgccgctgaattagagttggacgcgcgagattaaatccagaccccactgaaccggtatgtaatctgagcactcagatctagaaccaacagaccggatttaatatggccaagtttgagttccggacgctagacctcgatcggacggtccaaaacggtggtggccgaaccgataaggcacaacaaatcacagccatccatgcgccgatcaacggccacgaacccatcaccttcaacttctaatcggaactgttccctatccgattaacgaccagtgtccattcttctttcctctacccagctcgacggctgaggcgtcctgcccacggcggcaaggctcgctggagcgcac

SEQ ID NO: 94129 - DNA, 579 bp, Zea Mays
cgagtatgttgcaccgtcttaagtcttcgctgacttaagccaactgctccattagtagggtatagtggtcaccctaagtcgagtaagcgcgagcatgttgcaccgtcttaagtcgtcaccgacttaagccaattgctccgttagcagggtatagtggtcaccctaagtcaagtaagcgcgagcatgttgcaccgtcttaagtcttcaccgacttaagccgattgctccgttagtagggtatagtcgtcaccctaagtcgagtaagcgcgagcatgttgcaccgtcttacgtcttcgccgacttaagtcgattgctccattagcagggtatagtggtcaccctaagtcaagtaggcgcgagcatgttgcaccatcttaaatcttcgccgacttaagccgattgctccgttagtagggtatagtggtcaccctaagtcgagtaagcgtgttgattccaagtccaatcgaatcgaagtcaattgatagtcaacaatttgaatgcccttgaaaatgaaaactttattgatgatctattctccaattatagaatacaatgttgctccgatagcttttgaggcct

SEQ ID NO: 94130 - DNA, 360 bp, Zea Mays
ctcatctcttctcgaaagtattctcatcttatcctaatagatctaactaatctcaaaagagtctaccatgatcttaaagactcatcttgacctaacaagcatacttatcccaaccactttgcttatatcataaaaatgtaacaaacatgatctattctaaaataaattaagtagatctcatctagtctaatctgattacacaatttaattctgatctcatctaatttgatcagatctaacctaatggcaaacatgttatataatgctggcaaaataagattggatcctactcttataaatatgtttaacctaaattggagtcttagtccaacctggccatatgcaaccactcgatagttc

SEQ ID NO: 94131 - DNA, 836 bp, Zea Mays
aagaatatcgcctattggaaatcctgtgactactatgactttgtggtcgtcaaagtagtgccggagcttgcgagcggttagaagtaccgcgtataacaaattctaaacttggggtaccttatctttaagggtccgaggacttcgctgatgaagtaaaccggatgctacactgggtatgtgtgtccttcttccacctgctcgactactaacgaggtgcttaccacgtgagtcgtgtaggagatatatagcaacaaatcttctgctcggcatggtggcttgagtactggcagagtggtcaagattttcttcagtgcctctagagcctcctgtgcttctgtggtccattgaaatttgtccaccttcttgagcaatttatagaatgtcattcctttctcgcctagccttgatatgattcttcttagcgctgccatgcatccagtgagcctttgtacctttttctatgaccgtggcggttccatcctcataatggcctcaatcttctctggatttgcttctattccccaatgactgacaataaacgcaagtagctttccggctggcgctccgaatacgcattttgctgggtttagcttccaccggcagcgtctcaggctgttgaagacttgttgcagatcctcgatgaagttttctgagttttctgtcttgataaccacatcttcgatgtaagcctccactcgcttgccctagtgatcgtctaagcatgtatgaatggctctcttgtaattagtctagtgttatttgaggatgaacgacatggaggtataacagaaagctccaaacggtgtgatgaaggcattcttctcctcgtcctcttt

SEQ ID NO: 94132 - DNA, 305 bp, Zea Mays
tctaccccctagccaccatcaaccttctccacttcttctccccacgccatcctcctctctggtttcccaggacagcaaccaccaaggcgccaacccctgctcgtggtctccccaagatggcacctctccctgttctccatggggctcagcagcaggaaacctctccatctgttgtccatggcaagcacctcccttgctccctcaagacggcatccatggaggcaggtggttcctattttccccatggtggacgccgacgccccctctgttgcagccatggcaccctcacctccagcccctccact

SEQ ID NO: 94133 - DNA, 396 bp, Zea Mays
acaccttcatcgccttatcgccggtaagtagcccttgtccgtgtttgttgtcatcgccccatcgtgtacccccggtcagatcggagtttcgggctatggatcgtggaaggatgtgttctcggccatggcttctccgtaccagagctggccgccaccgtagttgcttcggttgggcgattgtaggagatgaggtgaggggatagaatggccgtctggtgtataatcggcggaaaagatcaaatcccgcattcctattcgctgcggggaatttcagccgttgatcttgcaacctacggtggatattagacgtaggcatacccattcattccttagatctgcgtcgttgatttggttggttgcggctcggattagatcgcgggcttattaaaatccagg

SEQ ID NO: 94134 - DNA, 1058 bp, Zea Mays
attgtgtggtgcaaatgtaattgatgcagtaaaaacattagtaccagagcaaatattcttttgtgatgtagatgcacacaaaagtattgtgacacaagttttaaattcaaatataaagtaggcacatatgttcacgtgctattttagagtatgtagagacctcaaaacaaggggtgatctaatgcattccctgtccatttgtgaaatataacaaatataactcatggaacagttgtatgatttattactaaacacaaacaaactgaaacaaaaccagccaccagaactgaagcagtaccaggtaccagtactaaactctaataatgaactctaataacagaatcctttttgaaagaggcacatgtaacctggtggctgagaactgtattactgaactttaattccagaacttagctttaatagtgaactgaactctattacagaactgaatggaactatagtttttgcattcatttttattcagaacctaaccaattgctagcaataattagaaacgatggttacttacatttgaacctaaccatgtggagcaagatgatttattgtgtggtgcaaatgtaattgatgcagtaaaaagattagtaccagagaaaatattctttcgtgatgtagatgcacacaaaagtactgtgacacaatctcctatatctgcaaatgtagaaccaagttttaaattcaaatataaaggaggtacatgtgctatgtgctaaaaacaaggggtgatctaaatgcattccttgtccattacctgtccatttgtgaaatataacaaatgcaacccttggaacagttatatgattcatcactaaacataaacaaactgaaacaaaaccagccaccaaaacttgtttacatgaccaattgactaccagatgttttcgaggaagctgaggccaacaaggccttttatcaaggtctcctaacggacaaaatattatatgtgatgccaataagttctgacaaattttatgggatggctttctacttatagatgcacaccatcttcttgcctccagtttttcattagcttgaaaatt

SEQ ID NO: 94135 - DNA, 565 bp, Zea Mays
gtttattttttgatctgtaaagccgtatgtaggagactgcaaggctgaaacattttgtttccattatccaaaaaataggccttttcaagcctacaaccgctgacacagtcatacagtttccttgtagcaaatcctccatgtggccagttatttttcttggaaattgatgagatgcagacataaagaacttgcgagctagagggattttactcgaattcaccccaaaaatgaagggaaactagtatctaaggttaggctcagatcctaaaactatggctccggtaccactgagagacctctatgaccttagcttgcaaccttaaccactataactgtagaacaaagggagtgataccttctgaattttgggaagacaccataagagggccagagtttggtactcgatgtcggtgacgacaccggtgacctttccttcactagccgcgtagagattagatcagatctcatgcgagtatacgccggacattggttcatgtgctagccccttatctatttatgtacgcggtacaaaagggtgctacaatcagtaggttgttgtgtccct

SEQ ID NO: 94136 - DNA, 438 bp, Zea Mays
tctgctgggcaaaatcgcagagctgacgttggacttcacctagtgtcgcggcgatggatgccagggatggctggagggcagtggctgtcgtgctatcttcatcatcgtgacctgacatatctgataccatattgtaatggtcccgacttctgagtttgtatgagtgggtagtaaggcgaggccttgaggatcgagggcgagagggagccgtgcgcggttgagacacaatggggcaaggagcaatactcttcttagattgatctttgctaatcctcctaggtacaaactaaggactttatatagtccagtacaggcgcacataaactgctgcttcccctacttattctctaacaaacttctactatctctccttttgatatctaatctaacaaacttattcttatccctctaatcctgatctcctggcgtggcctggcc

SEQ ID NO: 94137 - DNA, 475 bp, Zea Mays
tgataacatagcagaagctgaagctactaggctggaagacgttgacgtactcgaagaagagcgactaaatacggtgattcaatcagcgcgataccagcaaactctgaggcgctatcatgataaggccatacggcgtcgatccttcgcagtaggagatctcgtcctccgccgaattctaacgtgggagggacgacataaattgtcacctctatgggaaggaccattcatagtagcagaagttactcggccgggatcatatcgcctcactcagatggacggaacagaaattgggaactcatggaacataaaacatctcaggaagttctacatgtagctacatcacggaggctcttagaacgacgatgtattctgtaaattgagaaaaatatcatcaataaaaaggtttcaaaggcactcagattgttcactgtcaattggcacgcttacttaactcggggtgaccactatgccccgc

SEQ ID NO: 94138 - DNA, 445 bp, Zea Mays
cttggggtgagagacatccagcgctctcatttgggtcaggttttggtgcagttttatagtgtgctggaaagagataacctggttcttcttgggcctcagcaatacctagatgctacttttactgcgctaaggcataatgatgcctggaatcacagggccctcctttttaaccgtgaatgttggttgatgttgttgggttttcccctggactatcgctcctcagagtacttgcaagctgccattggttcattcggcagattgattttgtgggagtaggacaggcacaatgtgaccaggactctgcttagggtctgtgtcacgtcgcttgaagaagtccctcagttcattgtcttttctgaagctgaaggtttttttggggattcttggactgtgcaatgcgagatcatccagcaaaatctgcttggtggtcaaccccaagatgaag

SEQ ID NO: 94139 - DNA, 595 bp, Zea Mays
aaaatttaatttctctgattttacaatgctctggactgggcctcatttaccaggaaatacaggggctaacccgcaagatcgccaagacacagcgcgccactggtctggaccgtggattagttttacaaaaacagagggtctcttttgtaaggttgacgcagtgaagaggtacagagccatttcggccgttggattagatgtgatcgcaccagattaaatccgaaccaaaacgaaccggtacgcatccaggatcgctcgatctgagattggtggctacggttttatgagatccagatctaatcggagccgtccagagagcgatcaacggccaacgcctattgtttcccccacggtggtcggatctaaaactaacggctctgatgtaatacaacgaaagggataagcccaaactaatctataccgtccaaagctggatttgcggtccctaggctttcttctacctcacgatggctagggacagcggagtagaggccgcgacggtgtatgattggcaggattctcgccagtgccctagtgtacggatccgagattaactaggtgctacttgatacgcgcagtaagtataactagatgg

SEQ ID NO: 94140 - DNA, 680 bp, Zea Mays
gaaggaggtgccttggaggtaggtgccgagggaatcttggggccattcaccgagttggagtaggtcggtccgggtgccttcaactgagggcagttattcttgaagtgactggggtctccgcagtgccaacatgcatttgctggcggttggttgcttgaaacggagggtgcctgaagggagctctgactctgctgactgtagcacgatggagtgggtccagatggtttattgaagcttggtcccctgggtgggagcccaaagggtcgagctctctggtgacgttcttgctgttgagctcggagaacttggaatttcctcttgaggtgccctttttcttcctcttttgccctttccacttggatagctttgttagagaggtgagagaagttgaggaagtcttggctggcgaggatggtcttaagctcgggtcttagtcctttcagaaaacgggccatcttcctggactcggtgctgacatcgtcaggcgcgtaacgggccaactatgtgaacttgtgcacatactcactgactgttctcccgccttgagttagctcccggaattcatcctccttgagttgaattatcctctggggtacatggtgctcacggaaggctgtttcgaattctgcccaggtagcatctctgacagcctcactaaaggtgtcccaccatgctaaagc

SEQ ID NO: 94141 - DNA, 547 bp, Zea Mays
cttcctttgcaaaagggactactggccaaaaagagttgtcacctatcgggtccaccaccctagagtacgttgttgtgaacatagctaccgagtagtgctcgaccacaaaatcctccatccagacatccctaaattcctgagttgttatcaagcatagtgcatggtgacaagttttgtcagtatgttgccacccctttgcatgatcattcccttagttgggcatttaaaatgtgcttcgaatggacattattgttgtccctaacctctgcaatgtagttgtcaactttctttacagctaagtgacctaggcctcttgtcctttcatggaggatatgcagaaccgaaggtaaaatacacccttgcaacctttgtccaatccttttcctcctatgaaacagctccataatttcctccctaatcttgtctgccaggtcacaaactggtagatccttccaatccttaattcaattgtttaaaaccttagctatgttgttggttacatagtcacacttgaaacagctccataaaatacacccttgcaacattt

SEQ ID NO: 94142 - DNA, 847 bp, Zea Mays
gctgcatgcatttttattttattttatgttatattatttatattgtcgcacgagcgtttaagtgtccacattctaatatttttttatctaacatgctcatgcaataatttcaccattatttttctgctttatctccaatgtaaatacttagcagaaaaatattaaagatgcatgtgaatgttactgtgtatatttaaattgctctaaatatttgtgttgcgttgagctccgtactcacgtcgagcgattaaaatgtatagtggatactcggacgcaccgatgaggctttgttattaattggctgagtttggcattggctaagcattagctgcgccctggcaacacgacgcagtatttgtgtcgtacgaacttggctgcgtcatgtgattgctatgtcgcactctcgtttaattaggccgctcccgttgagtcggactaccatcgccgaatcgcgtattttttgtatgccctgtaggcactgtctgtctgccgcgagccacaattgcgcctggtgcgcacgttgcgtggatttatcgtgtatcccaattaccgagcaataattttgcctgttgcacttattacgaaggcgtgttgtgttgtcgtagccctgatggtcgcacacgcgttgacgccagatacactagagcttgtactcgcgtagattgtggtgggttattcaagcccctgaagtcacatcataacgcaaccttcgtaaataattttgtttagctctatattttatttgattgtgttgtgtggcatcatatattatatttatattgccaagtggccataacaactatatcaagctgtatagtgcttgaaaatctgggaaattaaattgaaa

SEQ ID NO: 94143 - DNA, 364 bp, Zea Mays
ctaggatcctataataccgggattcattcacatacctcggattataaacttacgaccgagatcttgttgaatgaagaggtacgcagaatctaatccactctttccgccgagagatctacggtccacgccccaactcttcggatcaaatctcaaccattgccatcaagaccaacggtcgagtgcctgtcttctacctaccgacggctaaacacagcggcgtggccccgcccggtggtgcccctcgctggtgagccataccaggcgccccgatgctccaaagtccaacccgtacgaacaacacatgaatatgaatagcgcgaatgcaagagaggcttcattacctcgattaacacgacgttgcccg

SEQ ID NO: 94144 - DNA, 583 bp, Zea Mays
atgagaacatttttttacaccagatgtgttatgtttatggattaaatctggtattatttttctgcttttgtttccgtagtaaataattagcagaaagatatgaaggatatatagtgcattgttaaatcgctctaaatatttatattgcgttgagcttttaaactcatgatgagcgattaaattgtatagtgggtactcagacacgccgatcagactgcgttggtaatcggctgagttatggcattagctgaatattgactgcgccctggcaacacgacgcaatatttgtgtcgtttgaacttggctgcgtcatgtgattgctatgtcgcgctctccattaatcggatcgctcccgttgagtcagaccgccatcgctgagtcgcgtattttttgcatgtcctgtaggcactgtctgtctgccgcgagccacaattgcgcttgttgcgcacgttgcgtggatttatcgtgtaccccaattaccgagccataattgtgcctgttgcgcttattacgaaggcttgctatactgtcgtagccctgatggccgcacatgcgttgacgccagatacgctagagcttgtac

SEQ ID NO: 94145 - DNA, 368 bp, Zea Mays
ccgattccttcttttccattggcacaatattggagacccattctgcgtatctgcaaggtctaataaaatcagcttctagcagtcggtggatttcgtccttgattcgtgggagaagatctggacgaaatgttctagctctctacttgaaaggtctgaaaccggacttaatgggcaaccgatgctctactatctctcggcttaatcccggcatctcagtgtaattccaagcaaagcaatccgaatattcctttaatagaccgatcatctcatttctaggatcggtctccagggtcttgtttacaaaagtcggccttggagttttaccatctcctatgtcgatctcctccaaaggatcggtcgatgtaaac

SEQ ID NO: 94146 - DNA, 427 bp, Zea Mays
tttaaattcatttgatcttcatcaaactaaaagatgaagtcaatttgcttactttcagcctccagttctaagtttgtgcaaaaactctgaatgaggggtatcaaattaaaaaatagtgcttacatgctagacaattactgttttattttgcttgatgatctattaatgaaagtaaaaagtaccctctcattcatcggtccgccgtcggccacgtcgctctgcgaccccatcttcattctgcacaagcgcccacctcgtccgcagcaccacacaacagctcaggcgaggcacccaccatccatcggcacagatgggatgaggtgaggattagggagacaatttcagagttcagactttgtttcaatgtttcagacattcagagcttacattgcctccaagttagttctatttagatgtaacatttttt

SEQ ID NO: 94147 - DNA, 717 bp, Zea Mays
aaatttgatgaaccaaatgacgactggctgaaatgtatcgaagctacaagtgatgaactgcttgggccatattccaaagcagaagataatgcattatccacatccttcgggggtcaaggaaaaaagagattgaacagagtttttgatgccattggttttgtttaccccgactactactacccactgaggggatgggaaaagaagagaaaatctgctgcttcagccactccagatgagcctgcgccaaagagtaaaaagttgaaagtccttacccaccggccacgttatattgaaccggccgtagtgcctgagtttggcggggagacttcttcagctgctgaaccaaaagagcccattcctcctacgcagaaggttgaagatccggttataatgccgaaggtacccttagtcgagctagctgagtcgaagactgataaagataagaccgaagagccaaaaattgaaggaacaaaaatgttagaaattttaagcccttcggcagaagcaacagtgccgaaggtacaaaaaatctttggggcaactcccaaaagaagaaggatgacaaatgtactagatgcgttagaaacagtaaaggctttaagttccactccttcagggaaaatcgtcgaagcttcaaaaatgcaaaccgaagctgaaacaaagccgaccgaaattaaagctgcagtaatccaagctagtgccaaagctggcccttca

SEQ ID NO: 94148 - DNA, 595 bp, Zea Mays
caacaaatcatcagtagtcgcctcaatggcctcaagccattcatcatctagctccccaaactaacttttgtagtggtatgtatacttcaaataaactagaccaccttcacttgaactgtcagtggtctccttcgacattttccattcattaacaaggggccataaattgaaaactatgtgctcttagaccaagtctctggtgctaatgtagctacacaaagtgttgaaggccactaggcaggcttgagccttatcactgttcaagatcgaaggccttcggataccgaagcatgattgtatcggacgttgaattatatatctcacatcctccctatcaaccaaatcaattttaacataaaaccattgcatcattcaggatcctcgccacttcttccgaaatattggcacaaggcgtctcgcatcagagcggtatatgaatgaataacaaccaaagttgttatgatattgttccttccccatcgtcttcgtctggtaagataattcatgtatattgcagaaatagtcgacgtctggttccagcccttggctcctcattgcccaaataaaaaccccaatttcaattaaagcttcaggg

SEQ ID NO: 94149 - DNA, 392 bp, Zea Mays
cttgaggctaagagggtgaaggtcccttaattgactcgttgggagaaagggccacaacaccaagcatcaaagaatcattcccacccctaaagtcaccttagaaagaagaataccctccatcctgctcatctttcttttgtttcttactcacatgctcggggcttttatcatccggcccagattccttgtctgctccaccctcaccatcattgcaagggtcatccttaaaaatcaccgggggtgcaggaatgaagttctcctcttccacagtaaaagcaatctcatacccccttttgccaaaaacgataccagtggtaaggggggagagggtctctgctcatcattccaacaagcagccggataactcccgtctttctgtacatgtacatatc

SEQ ID NO: 94150 - DNA, 407 bp, Zea Mays
aacttacatgttcttgaccacccttgtttattaatgatccatgagtgatcatttcattttgcacacttgtggtaatctcgttgtttctttgtaacttccttcggtaatgaatttttatttcaaccctttcgttggaacattacctatcttacccttgattgttttcttcactttgtcgcttcgcaagtattgccttaactatatcctttgttatgcttttaattattatcatatgcacccttggcacctctatatcctacattgatgtttgtctcatacctgccctttaaaatcgcccctcttctgtctcataccttctttctcttggtcgtatcctcttctttggctcgcgagtttgtaacctaatcctttgttgtgcttttgtttcttattgcctttacccttct

SEQ ID NO: 94151 - DNA, 622 bp, Zea Mays
ctgatggtttggataactggttaagagacctgcatcctatttcattgtgtcactgacagtcacaattaggcccatgtgttcttatttctttaaaacgccaggtccacgacggtggacggcggagcaagatctccggcgagctcatatcagtcgaataacataactaccggtgctccggtgcggttgacaccaaatttgaccctcctaaccatttcccctccatcaattgtagagttcgagctcttaatcatactgtcgacggtgacagcgcgaggaatggaccgaccgagatgttcctgatgatccaatggattctagctcaattggatgggtcagagagtatcaagagcacctaaggatactgaaacgaggaaccagaggacatgaacggacctgaaacacgttggccacggcgaggttacttcgcgcggtgttctagaccgatttgggggagatcccaaattggggctctctggtgggtaatcggaggcacatgaaggagccgaatgtgtgctaaatttataggatttaggggcggtggctcgtgatttggagttggcgcgatggcggccggagagggaagaggttactggcgctagcaattcgtggcgttcaccgtggc

SEQ ID NO: 94152 - DNA, 597 bp, Zea Mays
gaaattccttctgtaggaaccaaaggggcaaagattgaggatgctttcgatttgatagctcaaaatgttgttcccttgaggccgcttttagaaagtgaggaggatgaggaaaagcggatagctccagtaatgagctctttctttgatattgacgacatggagtttgagtaaaagatattgctggtacaatccttgcagcaaaggatgttacactactcgttatggctgtgaccataccaagaggtctggatgttgatccagcggctacagtcgtgacacctttggcaattgtggtggtcgaagacaaaattggttcttcaaagcccgcaatagcagaacacaagggcaaaaggcctgcaaggaacgaagaggctaagaagaccattgaagatgatatgccccttggtgaagtgccctttgatcaagaactcactcagtcgggtcgtggcccaatggtacgccttgctaggtaaaccgtcaggggcccatcaggtagcccatggaacattttcgtgctcataaggacccaagggatatctatctcccacaaacccttaggctcgagctaattttgagggtaattggttcgagactcca

SEQ ID NO: 94153 - DNA, 555 bp, Zea Mays
gaagaagtgttagtagagttgatcttgtgtggaccaagaaaagaaagttatcaccaagtcaccgcccatattgaagagattaaaccatcataggctatcaatgtagtatcagaattcccagatgtgtttctcgaggagttaccaggtatgccacctgaaaggaaggttgaatttgccatagagcttataccaggcaccgcccctatttccaagagagcctatcgagtgtccggaccagagttggtggaactcaagaagcagattgatgagttgtcagagaaaggctacattagaccgagtacctcaccttgggtagccccagtgttatttgtggagaagaaggatggaacaaagaggatgtgcattgactacagatccttgaatgaggctactatcaagaataagtaccccctgcccagaattgaagatttattcgatcagttgagaggagccagtgtgttctcgaagatagatctgaggtcaggctaccaccagctcagaatccgaccttcggatataccgaagacaacattcatcaccatgtatggactgtat

SEQ ID NO: 94154 - DNA, 512 bp, Zea Mays
ttggagtaggcgggtcctggtggcttcagctggggacaattgttcttgaaatgactgggatctccgcagtgacaacatgcattcgccgggggttggttgcttgcaactgagggggcatggaaagagctctgactctgctgactgaatcgtgatggggtgggtccagctggtctactgaagcttggtcccttgggtggaaatccaaaggatcgagtcttctggtgccggtcttgctgctgagcccggaggacttggaactttcttttgagatgccctttctcttcctcctttgccctttcaactcgcatggccttgttggaaaggtgagacaaactgaggaagtcttggctagccagaattgtcttgagttctggcctgagtcccttcaggaaacgagccatcttcttgccctcggtactgacgtcatctggcgcgtagcgtgctaactccgtgaacttgtgtacatattcactgacagatcttccatcttgagtcagttcccggaatttgtc

SEQ ID NO: 94155 - DNA, 419 bp, Zea Mays
cagtggccttcgtctcgtacagtagttcgtgcatgttacagaagcactttgcgcttggttccagcacttgacttctcacgcccaaacaaaaatacccatcttgattatagcttcgggagtaatttgacgaagaaagatcttgaatgtcttcaaaactttaaccaaaaatttgctcaatgggaactgaaggcctgccttcatgaagcttctataaacaacttcatcttcctcgggtgcagtggcggcactgtctcccccaactctcacaatagacatgtcacgaaagtatcttcccttcatggcatcaatctgactctgtttgatggacgactttccgaagatggtatgacttggctgccagggccgatcttcagcatcttcattcctgctttccacatcgaagtcatcgctatcaccag

SEQ ID NO: 94156 - DNA, 624 bp, Zea Mays
tggctacacagtagcttcgcccctgcgtgaacatcaccaatagcaacacgttctcgaaaagtggagatcaatttcaacatgcttcgtacgatatgttgaactggattggtggataaatagacggcgctgatgttgtcacaatagacaagaatactcctgtgaagggggcatcgaagttccaacaagagatggcgtaaccaactagcctcgacaactccattaccaagtgcaaatgcaccccgacgacatcgccaagacaaccttccgcactcatcgagggcactatgagttcctggtgatgctgttcgggttgatgaacacaccttctaccttccaggctctcatgaatgaggtgttgaagtcgtacatccgcaagttcatgctggtcttctttgacgcatcctcatctacaatcgttcatgggccgaccatctccaacacgttaagaaggtgttccagttactgtggacacacaagttggcgctcaagtgttctaactgtctcttcggcactcacacggtcgcctaccttggtcacgtcatctcgtcgaacggcgtggccatggaccccgccaagattgaggctgtggaggcatggccatcgccaaaatcacttcgagctcta

SEQ ID NO: 94157 - DNA, 484 bp, Zea Mays
agtgggcctcgtaacaggagttgtggtttattatattaatgtaccagggttacattgtgagtaaacatgaattggattgaggaaagatggagcatcatccaaccaaataccatgctgctgtggagattctgaaaggcatgcaatggcaaagagtcccaggaagtttctcacagtagcgaggccgacgataattttaacagaccacaataattacagaaaatggagcaattcgttttttcccaccgaacatttactttagataaataatattcagggtcacaagtcatacttcttgttgaagtattatacttaattatctcatgtttcaggtctactggttgatgtgtccaaaacctatgttacctatgctatcaaatttgtgaaactgcatgatgttgtaagcgaatctgcgctgatagaattagtccttggctaaatgctctctatgttctgtttagttatccaccgtctctatgattctttt

SEQ ID NO: 94158 - DNA, 388 bp, Zea Mays
gcggcgcccatacccgcggcggaggatcatcggagtaagcccgatctggtgctacgatggcctagatgcagcaccaacaattgctagccgatgcggatcccatggtgtacacgtgagtggcgcaactaccggtgataaggacaaatctgcggttgaccacggcggagactaaccccacgacggcgctaggacgcccgtaccaaatccccgctacaaactatcaccactttgactaatcttgggtgcgccaagatggaagagcgaaagcgaaggtgtagggatactcaccgagggtggaggtgagggcagtgccggacacggtggacgacagatgtgcaaacccgccacacaccgacaaggaatcgagtcatcgccgagcagttgtgcg

SEQ ID NO: 94159 - DNA, 362 bp, Zea Mays
tctagaactagcacttgctaagcttggcgtacagctgacactctcgtagcctctgaagtaccttcctcaaatgctcctcatgctcttgctcattctaggaatatacaaggatatcatcaatgaacactactacgaacttgtcgagatagtccatgaacacactgttcattaagtacaagaagtaagctggcgcattcgtcaacccgagtgacataaccgtgaactcatacagtccatacttggtgatgaatgctgtcttcggtatatccgtgggtcggattctgagctgatggtagcctgacctcaaatctatcttcgagaacacactggctcctctcaactggtcgaataagtcttcaatt

SEQ ID NO: 94160 - DNA, 424 bp, Zea Mays
ctggtggtttcagctgcggacagttgtttttgaagtgactgggatcaccgcagtgccaacatgcattcgccgggggttggttgcttgcaactgagggggcatggaaggagctttgactctgctagctgaaccgtgacggggtgggtccaactggtctactgaagtttggtcccttgggtggaaataaaaatgatcgagtcttctggtgccggtcttgctgctgagcccggagaacttggaactttcttttgagatgccctttttcttcctcatttgccctttcaacttgcatggccttgttggaaaggtgagagaaaccaaggaagtcttggctagccagaattgtcttgagttctggcctgagtcccttcaggaaacgggccatctttttgccctcggtactgacgtcatctagcgcgtagcg

SEQ ID NO: 94161 - DNA, 457 bp, Zea Mays
ttagagcataatcatgttcacatgtgaggtacaagcagaaagcatgactgtttgagaaaagtaatctggtggaaacatagagattggaagggcaaaagatttgcaacaggattattgtttagttaactttgaatttttgaccttctgtggttttctttgggaacataaacttgctgtagagatgccttgttttcttattaaagtgcgagtaaatctattataggtttgactaaatgagtttatgaaaatcatgcctacacatcttgtgtagtgttaggatcttgccaatttatcatacacaattaggaaaggttcaaaaaagtgcttaagcacaattaaccgtgattaagcgttttttttgcatataatgtaaaaaatccaattatatatctaaaagatgggttggtcttacaacaataattccttgcctcttgtcctcttcctttctccacaacag

SEQ ID NO: 94162 - DNA, 460 bp, Zea Mays
gaagattatgtcgcaatccaaatatggattgacttctgccaccaggcgcaaggaggcttctgtcacaagccatagtcttctattagaagccactatcccctcgcctatatatatggcctacggggttgccattcctcaccactctcctctcttggtgtacaattcacacatactccattaaccatgcctcctatgtcccacgaacatgattcagactcgagcgacaacgacgacgacgacacactaatgccggtcacactacttcacatatggttgcaaggtaccggtcataggtgtaggccatcgacgatccctcgtagcgtcatccatagggatcatggtgccgaaagtgccttatcaggcatcactacttcaacccaaacctggtttacttgcaaatgtgtttaggcggaggtaaaatacaaaaaaagaatgttccaatttattgtccaacttttgg

SEQ ID NO: 94163 - DNA, 404 bp, Zea Mays
aatgtgtcgcatgactacatctatttgtgtgtgccaatgtcaggccgcacccatagcccactaatttggtgcttaacatagcggcccagcaaagcaagcgtattcgcgtattgtagtactggcgtttggcctccaagtcggcaagtgcaaagcctccaaggtgagcgcaatcggtactggagtccagcggagcgtattacaatgaacccaagtcgctggtcgtcgcgccgccttcggcttcaggctcctcgctgctcgaatgactttgctggcctactgccttgctgctcggatggactggaccttgtcgtgtgcatcatgtgcactgtgcagcgtgtgtgtgcttttgctgcctagcttgcttctgccttctagcctactgccttgctgctgggaaatgtgac

SEQ ID NO: 94164 - DNA, 353 bp, Zea Mays
tgaccctcttcatcaacaaccatttcaatatctacgtccattccgatagcttcggttaagtctatctcaaattgtccttctagcccatcttcttggaagaactctccatcatatgtgtccgggtctaagttataatcttcatcgttaggaacaggtaatctcccgtgcggcgataccttatacacaacatcccaacccttaatatgttctttcgtttggcacgcatatgggagataatacacttgtgtggcctattgggccacgatatagacatcgtctcctggtaaggtggaatcttgtcgaatttcgactatcccaagattagaatgtgtccgtctcgtcacttgagggtc

SEQ ID NO: 94165 - DNA, 422 bp, Zea Mays
cccagacacctcgagaacatctattttgcccggaaccaactgcacgggacactcccgccgcagctgggcgagttcgggaagctcacagttctcggcctggatgaaaacagaatctccggtcagatacctcaggttcttggaaatctgactagcctgacgaatctcaacctgggacacaacgtactctccggtacaatccctccagaacttgggtcgctgtatcagatccttcagctgaacctgagcttcaatcatttgtcgggtccgttgcccctaacatttaggaacctctccaaacttttctcgctcgacttgtcaaactgtagcctaactggacaagcatatgaccttcttgtcaccaccaccactgaccaggtcaccaccgctgtttcgttccccgaaattgagatcctcgccctttc

SEQ ID NO: 94166 - DNA, 394 bp, Zea Mays
aaaaaagaccttaccaaatgatttaagatcagaaatctcagtcatacattgctcaaccagatgttagcacattgctctctttgtcgctggatgacatgaagcaaactatgagataaaaggacatttaaccgctagcaacacgaagttgcgagtataccgagaggttattctgagaaaattttcactatgttggtgtgaaaaccatagtgagttcccgtcgaaccactttacttgttccatctaggacctctatgcttgtgtcgcatacatctctcggaattctaaatacttatagtcactgaattgactcggtatagtcctttgacaagtttggtatacattgtaagctaaatggtaaaggtcggtcctgaatggacacatacctggggtttat

SEQ ID NO: 94167 - DNA, 302 bp, Zea Mays
gttgtgactgtatacattggatccagtccacaccatgtggaatggagtgtcactactgctgggcacagattcaaagacacctgccaagtcgtcgctcgcaaggcattgagggccctgtgtcagatctatgaagaagaagtgcctgacaccccactcagattcttttcgccctttcagagagaccgtcccgcttggatggccaggatgcgtgcattggaggaacaacagctgcttgaggacgaccccacagtcgtgtacctcactgcatacctgctcacccttgatacacagtatgatttctt

SEQ ID NO: 94168 - DNA, 618 bp, Zea Mays
taaagcgcttcagaagctcgcactctcggagcttgtgatggacagggaagccatggttttggcacgacgattccaccggcttttagaagtggtcgccacctttcttcgttggtggcctaggtgaccaatctgtggtggtgactttttcatcgcgctaggggtgctggttcctccagcgcctgttggggtgctctcgacgctccctcttctcgcttcttgattcgtcggtgtcgcacagactcttttccttgcaaaaaaattgcccctactgtgtcctccccatcagtgaacttgattgctatgtggagaggtcaacaattgtttttggtctcccctgcccaagttcatggaacaattactacatcggcgtcggtggcatcggggagtttattgcttttctaggaaaactccaaaagtaatcatggaggctttccccacttctctaggtgcacctcttgaggtcccaagagctcctggggcgcttgtaggtgccatgtaagttcctgacgaaggcctttcgaaggtcaacccagctgtggatggtcctggctggcaggtgttcgatccaggccctcgctccttccacgaggtggatggggaggaactggatgatgggat

SEQ ID NO: 94169 - DNA, 623 bp, Zea Mays
accgtagccctccgatcacatttctacggaacagatttaaagagtcaaaaggttatcgtcgatctaatcataggcgtccaatatggatccaacgaccgcggacccatcttctctcctacttcactatcgcccagctaccctcaggcagtggcggcggtgattctcaatccgcggcggtggcatcactggtgttcaagcaatccggggacccgggctcgatactcgcaatttcttcgcaaaaggtggagaggaggtccaggcgaaccatatgggagggttccacattggcgacgaatgcggtgacggtctgtccatagcgcgtcacgacaacgcgatggtgagcaggagaaccggacgaacgagggggcggaatcgaggatggatgtgttctacacgtggagcgggtagaggcgaactcaaaggaggttttcttaccggtgattatgcagcagggacccccaaccacaccgcagggcggatcccgggcgcccatggattccggcgagaaattcgccaagatccggtcgccaatcgtgcctgtcgaggggaccactcgcaccagagtttcccggcgaagatccccgatcgcggttctctgtgtcgtcggcgaagaggccccggct

SEQ ID NO: 94170 - DNA, 379 bp, Zea Mays
aatagaaatagtaaagtagggtaatgtagtagaaatgatggatgtattttttgggggatcagttcataatgaactgaccattaatgtaatgactctcttaatgaagtcgctagtttgtgccttcttcaaacttctgctaagttttttgagttcctatgttgtctgatcatttgtgtgtagtgaatgagtgaaattgcatctactaatcagtttgaatttctcagaccgaactgcccacatgtggctgagttacagttttcgaagggacgtaatgttgattttgatgagtatatctatctgttcccgctcaaaactctaattatgttccgttgcgattctaacttcacatttcttatttctggttgttgcttcccgattg

SEQ ID NO: 94171 - DNA, 442 bp, Zea Mays
cgctgctggagctaaggtcccactagttgtcgccttgggcatgagctctaatcctcctctagggcttaagtttgctctcgatattggctctactagtgtctcgtcgtttgatggcacgtcggcacctctggctttgggatttgctttgttcctttctaaccttcaggcaagttgatccttaccctactttaccttcgtcaacagaggactcctttgctaattcttgtatttgtagaatgctctgagctctgtgttagctcagctgaggtcgtgcggtgcccctatccccgatcaggttctatccttgctgcagtggaaccctcccctgcttcaaaaatagatagatgacctaaaagttttgaacatcggttagtggattgataacttcctttggttcttgttgctccttcgtttacctcctgtatcctttcctcttgacctc

SEQ ID NO: 94172 - DNA, 415 bp, Zea Mays
gaagaattgggaagggcacagaaacgagtatcaggggcacttggctgattgttaggagcgggggcagtagtgggacgaataaagacgggttgcttcaatggatatgaagctgggcgaggcgaggaatgattttgattagaaggtcggatcaccaacccggttctcttttcaagcccttgatttgacctttcacctccaaacccctttgattttccatgtcccacatttttggcttccactgccagtgttgtactgacagccttactgtaggtgaggtccaagcatgttgccattttccgctgaagcctgtcattgagccccctcataaaacaattctttttcttcaagtcagtatccacctggttaatggcatactgagagagatggttgaatttgttgagatactgcatcaccg

SEQ ID NO: 94173 - DNA, 746 bp, Zea Mays
ctatggtttatttgtggaagagacaagagaaagtgaataaaaaagctaggcatttggtgtcagagatgcttaactgaacagctttatgtaactatttaaacgtctataaaatttcgtttcctttggaagtttcgactcatacactattcaagtgcctataaacatgtttgcttccattggaaattgagactcttacatggaaattgagactcttacacaactcttagtggcatgtcatttattctcatttgttcagtgtcccccataagagcatttgcagtttgtattgcgcatgccgcataccctaaatagcaaaagcatcttctaaatagtcacaggccattggcacagattagtgatcagtgtctttgtaaacagcaagggcgtcttctaaataccagacaaatacctagtgtatttgtaatcattacttcattcttctttgtagattccaattttccaatttgttttgtctatagaaggtcagccacccctgttgtttaccatggttgtaagaggtcagcactagtatctgctttttggagacatgcgaacagtatctgatctatcttttgagactagtgctgctgaaaatgctgctgcttgtggatgtacctagatacttgcatagttgcagtgccgtctaagctttagatagactatagagttgatgctataggtttatttcaccccagaatgtgatggtttcagaaaatagatagccaacgtacaagactggatgcttt

SEQ ID NO: 94174 - DNA, 571 bp, Zea Mays
caactctcgtcttaatccattttaattttagtttagtcgatgtgctgcgtcgcgcgcttcgtcgcgcgacggttcattctaaattcgtctttattaatgtgctgcgtcgcgcgcttcgtcgcgcgacgatttattttaaaatttatatttattaaggtgctgtgtcgcgcgctttgtcgtgcgacgattcgttttaaatgcagttctgttgacgtaagccattgtgcgtttcgtcgcgcaacgcttaacgtttatctataattaatgtatgaatctcgttgcacgctctgtcgcgcggcgagtcgtttatttcttaattcaatttaaatgttgtgtcgcgcgtctcgccgtgcgaccaatccctttcattcatctttatctatttataaggattaaatgtggaacatgaccttactttatgctaaacgcagtggccaaattaatacccttctgttaaacgagtggtttaatttataattatgtaacgtgatcgcttctcgaccgtagactcgaccgtcatttcctctttctcgcttaaccgtaattgcgagccccgcattgaacgtctgtt

SEQ ID NO: 94175 - DNA, 1025 bp, Zea Mays
ttccgggttcttgaatccttgcttccctgcactttggtatgctttacggaagaatgttgaaccaaattagtacttcttaccttcccatcccattcggagacctaaaatttacgtgccttcttgagaacttactcaacaatggttattgtttgtcatatgttgatcttgtcagataacggtgtgttgtacatttgattcagtatctcttggttgatcacaatcaatgttgattgcctgtttgtgaacatcttgttcccattacaatgtgtattcaaaactagcttttgtgatgattgatgattacattccctcgggatcaaatttgtgccaagattacccacttttctggttggatttttgaatttcatatggagcagtagagttttctaggttcttgaatcctgttaatgtagttttcagttcttggtcatttcttgcaatatcttgtttctgaacatttttgttccccatcatgatgtccagagttgtctgtttctgaacaaaactagccattattaagaattgtttagaaatcaaaaccagtgttatagttgtctacttgttcagattttcttacacacagtgttccgtcgtgtgacagagttatctgtttctgaacaccttgttcccactacaatgtgtattcaaaactagagcttttgtgatgactgatgataacattcccttgggatcaaatttgtgccaagattacccacttctgtggttggaattttgaaatcatgtaggtaaagctcatatggaagagtagagttttctggattcttcaatccttgctcccctgcattttgtttgcttatgggaggaattcttgaccaaatttgtccatttcgccttcccatttctttcgaaattctgtctgttgtacatttgaataattttagagttatttttcatagtttttagttcttggtcatttcttgtcagatcatgtttcttaacattttgtgtaggtacacttcatatggagcggtaaagttttctacgttcttgaatcatgctcatat

SEQ ID NO: 94176 - DNA, 345 bp, Zea Mays
gttcgactgaaatacaccttcagatatggagataaatttgatgagccaaatgatgactggctgaaatgtatcgaagctacaagtgatgaactgcttgggctgtactccaaagcagaagataatgcattatctgcggccttcgggagccggaaaaagaagaggctaaatagagtttttgatgctattggatttatgtatcctgactaccgctacccgccaagggggcagaagagaaagagtgcaacttctgggaaggatgttacttcagttgctccgagtgagcccgcgccgaagaggagaaaggtgaaggttcttactcaccgaccgcgctatattgaaccggcc

SEQ ID NO: 94177 - DNA, 546 bp, Zea Mays
cttcgggaaaccaatactctttgatagagtaccgataaccttcgctccggtttgatctcggacgcagcctaacttttcatcatcaacgccaccgaagagtagtgcccccggttgatatccgcaagatatggcatattcttttaactcttctttctcagccttcgtcaactcctgtccaactaagttttgaaaattgaaaatttcctcttccgaagtatcttcggctatttccttctccttctcaggctctggggtcatagcttcttcggtggctgcggcagcttcttctgcggccatgtctagaagtatcttatcaatgttagaaattgtactttctaaatgtacatcttcggccgtggcagcttcggcatctgcatcttcagcaggtacagcttcggtcgctgttgtgctctcaacaactggtgtctttgaagccaaagctgttggtggtgtcctttcaataacttctgtcactgtaacaattcttcgctttttcggcccggttaccttcttcgttggcgagggctccttttccttctgaaaaag

SEQ ID NO: 94178 - DNA, 302 bp, Zea Mays
aggataataaacttgttgataaaaaaccctccgacactgtttgattttaccaaatgattcctctgcaaacttctttcttttagactcctgatgaagccgaatcttgttatcacccaaaacagcctgactgaccacctcattatatctttcagccaaactggttgccatcaagccctgaagtttcttgttgaggccacgtaggaagtagaactttttcttctcattggtatttacaaaatccaagatgtactaggataggcgagtgaacctctcaaaatattccattgcactctcttcttcgc

SEQ ID NO: 94179 - DNA, 438 bp, Zea Mays
aaaagatgcaatcttaggatggatggatggatgtgtggatattgttccaagtaccagccttgggcaagcttgtcgacctcgacgatgaacacatcgacggccctagagtggcctttaacgtcggtcatttcctctagcacgccacggatagaggaagaagaggtcacgtcgtgcctattaaccgcatcttcgcgtcacgtcgtatggttcaatgggtgtgtgggtactgtgccaaataccaaccttaggggcgagcttgttgacctaacgcgacgacgatactagatagatctttgatgccgaccatgtcctccagcatgccacgaaaagaggagaaagagaatgtcacaccgcgtgccaaccgctccttttgcatcgtgtctcgagggtgtctggaatgctctcgacgttggaggagaccgcttgattggcttatct

SEQ ID NO: 94180 - DNA, 487 bp, Zea Mays
tggcggtcagccctccgtggaggtcttcaccaagaattattgtttgcactggcagaagaggaaagttgggaacaagattgtgcagtttgggtcatgcacctttacgccgaggactgggaagacttcggcggaagttgtggagctagttccctacgcccacaacaagtggggcaactggcatgattactggttctatgtggcgggaggcacagtcgaagacctcccaggactcccggcggccttgatgtgttctcacactactacaaatcgtgttatatgagacggttaatttttagttattaagacgcttatgatgtgtccaaatttgatggagtcgcaaaagatgttccgtttttaagatggttataaaccgtcttaaaagatattaaataagacattttttaatttataaccgtctaaaaaaggaatttgttacgtcattttgtccaataaaccgtcttacattaggttttgtttaagacacttc

SEQ ID NO: 94181 - DNA, 566 bp, Zea Mays
ttctggatctgagggtatcgtgtcttggactttgtaaacacctcgctgacgaagtacacaagcctttgtaccttgagtacatgtccctcgctttctctttccactactagtgcagcgttgacaccctgggtggtggttgcaacgtaaaggaggagggtttcacctggatcgggcgcaaccaaaaccggtggcgaggtgaggaacacttttatccgatcaagtgcctcctgggcttcggtcgtccaagagaaatggtcacttttcctcaagagcttgtagaggggcattcctatttccccgagttcggacacaaatcgactgagtgcggcgacgcacccgaccagtcgttgtacccctctggatggggctcgtgcgtcagatggtctctattttttcttgattagcttcgattcctcgatccgacaccatgaagcctagaagctttcccttggggaccccaaaaacacatttctcggggttcaacttgattcggaaccttcggaggttggcgaacgtttcttctaggtctgtgatgaaatcattgaatttttttggtctttacgatg

SEQ ID NO: 94182 - DNA, 866 bp, Zea Mays
agggattagcgtcatagagggtggaattcggtgttagtcaagttagggctctggtctttgagcatatcggcccgtacgagctcgtcggagggcgtgctcaccgttgttcgccatcaaggaatcatgttgtgaagaggaagaagtctagttagggatacttgagaacgggatatagcagataaccagataacggggcagaatcgatgaaggatccggagattctgatgataaagccacaacatgattcacaaaggtaaaggtttactagatctaggtgaaaagagaggtcatcaaacaggatcagctaggatgattagcagaaatgctataaagtttgaggggcaagggtttatggaaagaaacatggccttgataggggttgcgcaactagacaccaaacaacatttttttatgtaacatgtgcagaaggagacttgggttggtctagcggtcaagctgtggggttctataagctgtgcaagtgtaactttatgggtaaaacacacaagggttagaaaacactaacacaagcataaatatattttttgaggtttcactcgctaaactcaaggttgtttaaagtgggggtgtctttttatgagcaagacagacaacacctttttttgcaaaaagggttgaacaattacaatatcacctagatagcaagacaagggaagcacataacacaacctaacaaggttcaccaatctgacacgaggtaaggcagttcttctagttcacaaggtggcaatacatcacattattcacaatttcttattattagaataaaggtgagagaagcatgttgatgcacaagagacaactataatgcgacaatcatgatgcatgctcattctagtcgtctt

SEQ ID NO: 94183 - DNA, 431 bp, Zea Mays
gcttccaggccttccaccggatcgcgatgcagctttcgaaatcaaactgattctgggtacgcagcctattcataaggccccgtatcggatggctccaaaggagcaggttgaattgaagcggcaattgaatgatctactggctaagggtttcattaggcctagcaggtcgccttgggcttccccagtactgtttgttgagaagaaggataaaagcaagaggttatgtgtggattatcgggctttgaatcaagtgacaatcaagaataaatatccgctaccccatattgaggttctctttgaacagttgaggggtgcccaggtgttctccaaaattgatttgaactctagttatcatcaattgagaattcgtgaggaggatattgagaagacaaccttttgcaccaggtatgggcattacgagttcatagtca

SEQ ID NO: 94184 - DNA, 476 bp, Zea Mays
ggcccaagcacttaagcaggacgtcgttgactgttcggcgtagagttcatcactcatcaagacatacttgaaagatgtacgccgaatgttcttatctgtcctgatattgggatttcgtaaataattaagtatatgcgtcctccaatcacttgcatcagcttcattatcagccgattcaattaagagaacatttctggtaaccccggacggttcggcgtctcgacgcggacggtccgcaacctggggaattggccctacaccggttatcagatttttagtgtcgtggaatctccctcactttatccgataacctgatgcatcttgtgccagattgttagctctatgattctcaactatcgaaatatgtcgaatactgaattcgtcaaaagaatggattatgctccaacatttttcaaggtaactattcagagtaccatcaaagcattgatattcttctaacacttgttggacgacca

SEQ ID NO: 94185 - DNA, 387 bp, Zea Mays
gggtgtactaagggttgtagacactcatccaagggtattgagtgaacttaagaattttagtcatctcttatatgtttgtttgggctcttcggggatttaattgcacaccactaatttctcccataatttccttcttaccctttattatgctcatcattaagcaccttgaactatcatggcaatttagaattttccaaaattgttacaaaaattacagtgggtaaacattgacctctgtggtttattctaaaaatttgaggttgaaattaattcagatactccttgtgcaaaaaataacaaaagtaagggtacaagggtactttacactatagctttgcttttggtgaggtttctggactaaaatttatttttgccatgatccatagg

SEQ ID NO: 94186 - DNA, 493 bp, Zea Mays
ataaaaactagtgaacaaagagttctgaaactgggtgcgaaaggagaaaagaagaagactcgaaagtgccaaaaatgtggcattgctgatgaacacaacagtcgaacctgcttgtctatagaggaaaatagggttaaattggctagccttgccgatagaaaaagaggacgactgcctgggtctagaaaaaaaattcaacaatggccccgtagtggaatgagacatccacatcaaaaaaacataaacataccgattctgaagaacatggttcggatgacgataatttggcatgattgtaaaatgtttatacataaataatggatgatattgaaatgttatgatcatgatactatttgatgaatatgactatttacgttaaaagctcattgtatggattatatctattaatgcgacataattatttcttatgagctatgctactgttgggtttgtttggctatataatcatatattcactgcatctcatacagta

SEQ ID NO: 94187 - DNA, 484 bp, Zea Mays
tcggcaatgacttaaggcagtgtgacatgctcacgcttacttaactcagggtgaccactataccctactaacggagcaattgacttaagtcagcaaagacttaaggcggtgtgacatgctcacgtttacttaacttagggtgaccactagaccctaccaacggagcagtcggtagtgacttaaatcggcacgacatgctcgcgactactcgattcagcataagcacgtttgcgattgctcgtcttagggcgatctctatgccccgcgaaataggaagtagtttcaaaaccatcacactacacttacttctgcaatcataacgactgttgaattcaaacaacagaaaaataataatagcgttcagtaccgagaacattttctaacagaatattcgagcacattgaccacatacacaatgcattcagtgtttctacttagtaatgtttttctcaggagaaactggtgaagaagggcgactcgaagg

SEQ ID NO: 94188 - DNA, 1901 bp, Zea Mays
ctcgatcatcgcgcacgtagaccacggcaagtcgacgctggctgaccggctgctggagctcaccggcaccatccagaagggccatgggcagccccagtacctcgacaaactgcaagtgcggtgctaattcttcccgctcactctccttgttcgataacttagagaaacaagcaaatgttggcccttaccgatcaactatcagatggtgagaggtgatcagtcagttaggccatcatttccgtattatgttttcatgatcagattccggaactgcattgatgtctgcattagttttataaatagttgttacattttggcattttgagcttttaccattgcactgccagtttcaaggtctatttgtgggcacaatgttacgctaattccatatcagttgatgactatactgctactagtttcatgactgaaacttctacaatttgtatccacattctatgagtttgtatcttgtagttactgtatttatcttacctacaatataaactcttactacttccagtcaaagaaattattgtttagaacaagattggtcaaatatttaaaaccgcaaacatcaattactattacattatttagtgtggaagtgtgcaagttaaatgccagatatcttctacatttgacaagatttggtcaacttgtttccgaaatagttggcaaaatctcttctattgcaggattttaggagtatattctataagaatttaggggtcaaagatacacattgaagagtgaagaccatgaaaagtcaaatgtgtcaagtatttatgacccgagggagtataacagttgttatgagaagccactagctgccagatcatctgagggttaccaggtcccaaaaatgaatagatctattttttttttcattccaaaggatgcaaatagagttgctgtattcattttctttcagaatttgagatagtacaacttcttggggtgtaatattatgtgattcaactacatttaattaagagtgtttattttcacaacctcaactccttttccttataccctgatttgggaattactttcagaaaactgctttgatattggatcagtctttgatgtttagtttgatattgtgtgtcttctgttgtaacatttatctatgtggggaccaggttgagagagaaagggggattactgtcaaagcacaaacagcaaccatgttctacaggcacattactgcatctcaggactcagatatgccaagatatttgcttaatctgattgatacaccaggccatgtggatttcagctatgaggtatccaggtcccttgcggcttgccagggtgctcttttagtagttgacgcagcacaaggagtacaagctcaaacaatagcgaacttttaccttgcatttgaatcaaatttgagcatcattcctgtgattaacaagattgatcaaccgactgctgatccagataatgtaaaggatcaattgaagaggttatttgatattgatccaagtgaagctctgcttacttctgccaagactggtagaggccttgaacaggtattgcctgctgttattgaacgcataccttccccgcccgggaaatgtgatgcacctgtacggatgttgcttttggattcctactatgatgaatacagaggagtgatttgccatgttgctgttgttgatggtgctctgcgtaaaggtgataagattgcttcggctgcaactagccgtgcatatgaagttcttgacgttggcattatgcaccctgagcttacacctactggagttctctacactggacaagttggatatgttattagtggaatgcgttcaactaaagaagcacgcatcggtgatacccttcaccaggcaaagagtactgttgagccacttcctggtatggcatcccattctcgg

SEQ ID NO: 94189 - DNA, 277 bp, Zea Mays
ctggaacagtcaaggctctggtaccatgtgagaatgtctgctgttacagaaaccctagctacagtgcggttgcggctacagtactagtaaaccctaatgggccaggcccatgtacatatatctgtaacacggttcaatcatggccctttctagaactcaaatgtttccaatttcaagttatagaacaccatatcagcttatctttcacaacaacacatttcccagcaatagcccacttaacaccatatgaaacttttgccttctctatgcaacaaag

SEQ ID NO: 94190 - DNA, 281 bp, Zea Mays
tggaagtggaaagacattggtatggatttcattaccgggttgcctcgcacctcgaagggttatgattatatatgggtgatcgtggacagattgaccaaagtggctcacttcattccagtcaatactacttataagggttctcagctggcagagctatacatggctcgaattgtgtgtttacacggggtattgaagaagattgtttctgatcgtggatcccaattgacctcaaggttttgaaagcgccttcatgaaaacattggtacgaagttgaacttcag

SEQ ID NO: 94191 - DNA, 602 bp, Zea Mays
actgaaccgtaaaattcagtctaaagcctcgcacccacaactttgtcccaccactacacgcgcctctccatgtccgccacattccatccaccatggctgagattcagatttcaaagactaagcgaaaatatatagagagacatcaagttaataaatcctataactactatttaaaaaaaataaatgactttgtaaacaatataaaccacatgaacaactttctaaataaaatcgcagagaaaattacaaagagacatatggaaaattaaggatataggtctataaaaagagacgagacgagacatatggccaaaagacacgtatcagcttgtcagtctctttggcgacttggtcgtatctggccatcggagagatcacaagttcctctataaagaggtctcatgcgcatatcgtgatgacatccatgacaacgctattgctcatatcaagaacttgagagagacaagagggaaaaaataaatctataccgcatattgaatctggtctagacatatactagtttggatgggcgggccccccggactgcaggggccctaagaggtcgcacacgctacccacccttaggaccggtcatgtcgtcc

SEQ ID NO: 94192 - DNA, 297 bp, Zea Mays
ggaaatagaagtcctgaatgatctggggtcagtttctgcgcaacgacgatttatcaaaggagaggaggtcccatctatgccagcaagggagcttggccaactgcgacaacaagatcccatcttttattgttttagtgatatacaacaaaaactcgaatgagatatatgaaaattgaagtgtacaaagaagttctcacttcttagactttgtctttgtgatattcacattgtaatttgatttatataagtttactttattgcttgttggcaaataatttataagatattgaggtcgat

SEQ ID NO: 94193 - DNA, 307 bp, Zea Mays
atgtggttgcggttgcagttgcagaagccaacttgggtgtgtgctcgctgtttgccgacatgcagtgaaaccactggtcacccccgttccaagcctagagtatagtaagtagtatggagcaagcagattgatgcagacgacgcatatgcaggcagcgtgcagctgtagccaccaccactctctagctctaggtagtggtgcattcgtacacgtagctgttcgttgcactgtgcgtggaccttgccctagctactgtctcttcattatccaaaccggctgggtgttggatgcttggttaatttatctc

SEQ ID NO: 94194 - DNA, 809 bp, Zea Mays
ctcaggatttctcttagtctgggggcgcttttcgtgcaacttttcccatttgccatacccgcgcgggatgagcccctgagtctctgctcgatgcagagatccgtctaggggtcatcccatccttttgttttactctcccccgtgttaggctggacgttcgggtttacccaaaaatttgggttgggctttttgggtttttatatttcgtgtttcaagtagctaaacatgaactcgaacccaaaacttcgggtacctataattttgggtatctgcaatatcgggtacgggttcgggtaaaagtaaactacccgatacaccaacccagtcaccgaatagcacacaaaataagtgaaactccagacctgcaacgcttagcggaaaggcacaaagccacaaacaatattgaaattgaaagtttgaaatagtgaaacaatgttccagctccagtcagtctcacattccaatgttgcacacacgtccatccatgagccggaagccactatttaaacgtcacacatcgcagagagccagagagcacacacgtccagtccatgagtgtagttgtccacacaatgacacaacacagtaacaacacacaacagtacacattctagcggtacacgcctaaacggcacaacataggcacaccacacggacacgacaaagtagcagcacaagcacacgacacagaacaccacagtagcacacattctagcaggcagcagcacacggtagacgacacagtagactagtagcacacgacacactggcacagtaggagctgtagctccacgcctccactccatgcc

SEQ ID NO: 94195 - DNA, 427 bp, Zea Mays
cgggtatcggatacgggtagccaaaatacccggattttcggatacagatacaagttttttttgttgtcgggacggatacgggtactacccggttaagaatttctggatacgggtaggatacggaaccgataatacccggcaaatacccgccaacgccgggtcggatacgggtattcaacggtcaggtacccggattcacaaatgtggcatgctggcactggcacccttgcgggctgcggcattggcacattgcagacttgcagactttagggcattagactgagtggctgacagcctgaaaccatgctcaaagccttaatcggtcaaacacagtcgtcggcctccgatcctccctgcactcgatccgagttcggagtgccgcctagtcgcagcaagcagcgccgggccactatcctccctgcactcg

SEQ ID NO: 94196 - DNA, 654 bp, Zea Mays
gacacctctgaccctcctcgtcgccctcatggcggtattgctcctggtacagctcacgtcgcggctctgttccgaccgcccttctcagatgggtcgcgacgctctccgacagacttcaccaccgcaacaaagtttttatatcagcttatgagacggacacttctgccgcggatggggtacagggaggctaccactcatatccagctctggctccttagtgccctggtctctcacttagagtttgatcttgtggatttccttatttgtgagatcgaggacaccgtattggatggtctgcgtgctcgtcgacatctgccatatgctcactatttgtgtcacatttttgctcagctgattcggcctccacagatctagggcacacttgaggcctcacgcctcatctttgggtcctaccgtccagcgcctgaggatcctgtgccagcacctgctccagtatttgacactcaggccgaggatactgctcttcatcagttcgaagctcaggacacagcagttgatgatgatgatgatgatgattttgggattccgcctccgcctcctatgcctccacgctcacatgatcatgaggctggaagttctcgtgctacccctgctgcccctcctgccattgaccctgctcttgcttcaatcctc

SEQ ID NO: 94197 - DNA, 536 bp, Zea Mays
ctcctatcggtcaaaggtggtctcggtttaagcccatggcatcgagcgtagcagagtaaaggatgttgagcccgcttcctccgtccatcaataccttcgtaagtcgtactgaccccatgatgggactaacaatgagcaggtatcgtccggtcgagggttatgatctgggtggtcggtgcgatcataggtgatggcttggtcggactaatcgaggaaaactggagacgcttgccgagcatagagtatttcgcgtcgtcctgccttcagatgtcttcttggcgtgtagtaatctgacccccccccacccgaagatcgttaggcattcagtctcgtccgagaatgtggctcttgccttctttcgcttggcgccctgcctaggcttcgctcccgtttcggccggtgttcctccacccagaaaacttctcagtagcccgtggtccttgtaggcgtgtcgaattggatagcgatggttcagacacgaggcttcgagcagtttctcgaaatggtcattggcttcctcggttggcggttgcttt

SEQ ID NO: 94198 - DNA, 430 bp, Zea Mays
tgctggtggtggaggagtgcccgggggcgctgtccctgcgggtgctgctccaggtggcggggccgaggtgcctcttccagtcagtggtctttctttgatgcagtggatgggcatgaagttggatacttttgatggcagtggtattctgatcgaggcggtggattggctaacttacgtggaggataagatgaatgtcttcgagattgtgtatggtgatcgtgttcgctttggcacaaagctgctgatgggagaatctcagatttggtggaggggcgtgcaggcagctcactcctcttcaccaggagtcctgtcctgggatgtttttatcaggtagtttgagaggaggttctacccggtcaccttcctggagaaaataaagattgatttgcagtcctacaagcaagagaagaagtctgtcatagaatatgaa

SEQ ID NO: 94199 - DNA, 284 bp, Zea Mays
cttgtcgtattcgccgctctctttatggttttaagtaagctccacaagcttggttttagcgcttttcgtctatggtcactatgattgggttttctgctagcgctcatgatcctacactttttgtgcatacttcatctcgtggtcggactcttctccttctttaagttgatgatatgatcatcataggagatgatcctgagtatattgccttcgttaaggcatgtctcagtgagcagtttctcatgtctgatcttggtcctcctcattattttcttgcgatatag

SEQ ID NO: 94200 - DNA, 308 bp, Zea Mays
attttatccctccgtgcgtatgtacaaatgcaaaagacacataacgacgcaaaagggcaaaaatgtctaaaatagcatcgaaaccaagtgtgacatgttttgagtcctatttttgcaaagccaatgttacggatggagaagtgcgaagcacattgtttggagtcccaaaaatccaattttctccttcaacgactccctcacagccggcctcctcagagcaggctctcatgccaacaccgccttcgctccgctccactccacttcatgtgtcccagccatccttggcgtgggatcaagcaggactggtt

SEQ ID NO: 94201 - DNA, 311 bp, Zea Mays
atcgaaattttctgtccatggttttgttaacgtgctgcagcagaacaaagaaactttgaaacatttttcacctagctgtgaaaaaaattaactattttgaaagctgctaggtatattttgccgacgtacttgcaaaagttttagcattgcggtggtgcccgcgcatgttgcattgccgcggccaatttccatcacaacaataatcctagtggcatcaatcattgtactctcaccggtaaactccacacctaccatcgtgtgctcgcaatcaattccgatataaaagtactacaccaacttccccacgtgag

SEQ ID NO: 94202 - DNA, 559 bp, Zea Mays
aagatgcctgtgaagaatctatagctgttgcagtcctcaatgtcttgtcttttcattgtggaagtcagaagtcctctgacttattctgctattttccaatttcaaggtccgatcaagcgcaagggcatgctacaggatgttctcaaggatttggcctgaccgttcgcatcagctgtactcatcttttgaaccacccagacagaaagtatttccttaaacttatcttgcgtcggcgaaatttatcagacatattaattatctaatcatgtaactgcatttttttatgtagatgataaatgatgaagatactgagacacctcaagcgcatcttcctccagttaaaataagtcatcttcaacctagttctttcgttccagctgtaatagataaagttgttaaggtcgattctgggatatcattttcttccggagaccttcaaacatcagacatactatacctccagtgtgatgatataatcgcaaaaggcctagatgcgggcaataacgatgacacactgactattggaagttcttttgaggataagatcacactaagagaa

SEQ ID NO: 94203 - DNA, 358 bp, Zea Mays
gccggcccttctgctcctgtttgtgaagaagtaccatcagaggtccttcctgaggttgatcccaatggtggtgtacatgttgaagctgaacccaatgggtgtgaccgtgcaccagctgatcccaatgggtgtgaccttgttgaagctgatcccaatgggtgtgaccgtgcaccggccattgtccgtatttttgatgaggaagaagaagaggaagaagttccgctgattcgtaagaatagccggcgttatagaggtagtaggggggatagtgatattccttctccagctctgtctgctcttgtcagccttcaagaattgtccataacggattttgatcaggcccttgaggatgtcgttc

SEQ ID NO: 94204 - DNA, 325 bp, Zea Mays
ggacttttgactaattgatttcgttgggttaagaagaaccgtattattaccccactaagaccgactccaacagaggtcatgtaaatcgagcagccattcaagcctttggctagcgtatctggtttgtcagtccaggcatatgacacacgctttcaacagcacagtcaaaaaggcagcggtagtatagtccaacaaatgaagcagatggtggggacatgttctcagacatagaaaaaggaaatggctactagccacagtacaagctattatgactttcttctctctttccatcctttttgcctggctcgtttggctgccctgttgg

SEQ ID NO: 94205 - DNA, 328 bp, Zea Mays
gaaggtcttcaggtcgggtttctactggccaacagcaaagagtgatgcagccgagttagtccagaggtgcgaagcctgccaatacttgtcaaaacagcaacatctgccagcacagcaaatgcaaaccatacctgtaacttggtcgttcgcatgctggggattggatatgattggacctttcaagaaagctcaaggaggatacactcatgtactggttgctatcgacaaattcactaaatggatagagttcaaacccattgcttctctaacttcagctaaggcagtggaattcatacaagacataatattcaggtttggaatactgaat

SEQ ID NO: 94206 - DNA, 1086 bp, Zea Mays
cctcattgttcgcatccctctttcggacgaacacccatttgaacccgactggggtaacattgggggggcgtgcggccgacaggcccaaatacttgcctctttgaaagcgagagcaattccgtctctattgcttctttccattttacccaatctgagcgcttttggcactttgccatggactttggttcaggatcctcagcaatcacaacagcgatcatagagacgaaatcagtgtcgacaactgtagtctttcagttatataactctcccgtctcaacatagtttatggcaatttcttcaactgaattatccggttctttgtgatttcccaagttatttgaaaccggttgttccaaagtccttgtgcttttatttgtgcacacatttgcactaggacattcaccttcaaggtgtgttactgctggaaaatctgaaagggagcacgttgcattctcttcagtaacttgctggtgcaggcatccccgcttagctgatactgaatcatccggttttctcccccttttcctaggatggggagtacgagtagagtccataccctgtagaggtatctccactctctccggtgcatttgccgcaggaatatgcgacttcgacactcctcttatatcagtaaaggcatctggcagattatttgctaagttttgcaggtgtattattcgttgaacttcaagttcggtttctctagtgtgtgggtcaagcgattggatgctactagcactccattctatttctcggcattctttattattaaggtacaatcctccccctaatgccgggaaatgctcttcatcgaagatgctatcagcgtaccgagccatgaacagatccccagttctaggctctaaatatttgattatggacagagattcataaccaacatagatccccaacttccggtgaggtcccatagatgtacgctggggtggtgatatcggcacgtatacaacacaaccgaattttcgcagatggaaaaccactggttgttgatcacacgttaactggtggggagaagcagagtggtaagtagggatggcaaatctgcccgcgggtacgggtatccgcggg

SEQ ID NO: 94207 - DNA, 805 bp, Zea Mays
ggcccattcatggaacctaatgggaccaaagcttccttcgtcccataatgatccacctcttcttactctgcaaccccttcgcctttgcttgtaccaccacttctcaactatgagaacaaagaggacatggtggaccttgacgagaaaggtgatgccggtaaaggatctcaacaatatcaacttgcctgcacaatgcttgacatcaccaccatctcatggatggagaggacaactataacagaaacactgacgcccaagcgggcgagagggtgtggcacaaatgttttattgctagtgccaatgaggacccgaagtcccgaaccacatcttgggtggctaatttaaatggtaaccctcaaaattatggcctacctatttcaattccaatccaacttaacaaccaaacactcaacatgaattgggaccattcccattccacaaagtggggctcaattcatgggaccaaagcttctccaatcccatattgctccacctcttcttagtattgcattgccaacccttgactccaatatccctttgcctctactgccacttctctcaactatgagaatgaatacaaggacatggtggatctaggtgggaagttgatgccaacaaaggatctcggcactaccaatttggccaccacaatgcttgacatcaccatctcatagctagagacaccaactattacatgatttcagagacaggtgggtgtcaacaaggaggtgcaaatgttggccgtggcagcaccagaatcaccaaaaagtggagcttacggggcagaatgtcatcatcactgaag

SEQ ID NO: 94208 - DNA, 1118 bp, Zea Mays
gatgtatttatgcagtaggtgcatcaccccaacatatccccaaactcgatagaagagtgcaaagcaatggaacaagacctgattgactgaaggatccctcttatcaggtacatcaagagtgaggaggaactagatgacaaagcggccgccgagcgccttgcccgatagtccgcccattacacccttattaggaatgttctgtattgacgtgggatcatgggcgttttataaggtgcattgacacattgatgggcaagagtttgttggaagagatatacgccgaagtatgtggatttcatgcatcatccatgacactagtggggaaggcttttagataaggattctactggctaatagcgaagaagcgtgcagcaaacttcgtttagaggtgtgaggcatgtcaattcttggccaagaaataacatctaccaccacaacagctgcagaccatcccaatctcttggccccttgcgtgctgagggctatacatgatcgggcctttcaggagggcgcaaggaggatacacacatgtattggtttccattgacaagttcatctagtggatcgagtacaagccaatagctttgctgacagcatccaaatcagcagaatttattgaggagatcatcttctagttcgaagtacctaacgacatcatcactgacctaggatccaatttcatgggggcggagttttctgagttctatgagaaaaaaatgcatccttatcaagtatgcctcggtggaacatccaagagctaatgggcaagtgaagtgagtgaatggaatgatcctggaggcactaagaaagaaagtcttcaacaagaatgagaagcttgctaggaaatggatcagagagctgccctatgttgtctagaggctcagaactcaacctagccaggcgctgcaaggtaataccccattttcatggtgtgtatggataggagccagtattacctgcagatttggcatttagggcaccaaggttggcttttaaagatgtggcagaggccgaagccacttgactcgaagagattgacatgctcgaagaggaatgactgaatacgattattcagtcagctaggtactagcaatccctgaggcgctaccatgacagag

SEQ ID NO: 94209 - DNA, 689 bp, Zea Mays
gaaatatttgggggaattacagggtgtgattcgtaaaatgtaggacctagatttaatgtttctataacagtacaagacggcagattgattctcataaagggtaagggctcgtttgcactttttctaggccgaaggggtatcctcccaccacaaccgtccgattgtttatgcggtggttaagattttaaaacaggcacgatctaatcctaaccgcacacatctgatccgatggacaccacacacccatagttgaaacggtgcgtggatctaatcccagcccttaatctcccgatcaacggctgaggcgcatcttccacctcccgatccccatagttgaaacagtgcttgaccgtgacggcgccaacgcggacgcgcagtcccagtcgttcttgcgttctatatttggtgtggtgcaacacgcaaaggaaacataggaaacgcagtatggtggtattacttactaacacctaggactgtgacggccaaccactatgcgagacagctccgccgaaagactagaaccccacgacgtaattccctgatcgcttgttcctcccccggttttgtcgaatgatagtggtgtactcgaaaaaggagaagagtttattgtttttttctatggccgaggggtgaagctaatatataggagcggggttaaggttagcgacggccctagaggtggttgcaac

SEQ ID NO: 94210 - DNA, 1238 bp, Zea Mays
tcccagctacccttccaagatagaacacaagcacgcaacatatcttccaaggtttggatagtttgctccgactgaccatcagtccgagggtgaaaagcgacactaagagagagcttggtacccaatgcacggtgaagactctcccagaatttggatacaaatttggagtctcgatctaaaacaatggacttaggcaccccgtgaagcctgattacttctttcatatacaagggaaccaactctgaagctaaatttgtggtcttcatgggaataaagtgcgcagacttagtaaagcgatccactaccacccatatagcatccctgcctcgaggagaatgaggtaagcccaccacaaaatccatggtgatatgctcccacttccactccggaatttccaatggcttcaataaacccgcgggcctcttatgctcggccttcacgcgctgacatacttcacggtggccacatacttagaaacatcaaccttcatcctcttccaccagaatttttgcttcaaatctctgtacattttggtttcgccagggtgaacgatgtaaggcattttatgagcttctctcaagatatccatcttcacctctgatttctgaggcacacaaagatgacccctgaaacgaaccaaatcattctcatcaatggtgaactcacggggtttaccatcgccgaccctatttcgagcttcctgcaacaaacgatcctgctgctgagccatgtgcactctctccagaatggaggattggatgagcatccgagtctcctctctagcggtgccgacatagcacaaagcaacccccatacggtccatatctacgatcaaaggcaaggccacttttggaaccccggacctgctaagggaatcaaccaccatatttgccttccccgagtgataatgaatggatagatcataatcctttatcaattcgagccgccgacgctgcctcaaattcagctccttctgagtgaaaatatacttgagactcttatgatcggtgtagatgtcgcaagattcgccataaagataatgcctccacgattttacggcaaagaccaccgcggctaattcgaggtcatgagtcggataattcccctcatgcttcctcaactgccttgagccataagaaatcactctgccttcctgcatcaacacacagccaagaccaatacgagaagcatccgtaaaaactgtgaaacgcttaccactctcaggcaaagctaagata

SEQ ID NO: 94211 - DNA, 540 bp, Zea Mays
ctttttgggctcccataaattctagttctatgtccgccactgtgtgcgacaaatgggagatcacggtggcgctagacacgaaggccgatcatcaattcatgtcgtattagtccgccaatttccaggggaggtcctcaacatgtagcaggagtgcagacgggctggaccacatcaagggtctccatgtggaggtggagcagaggacaacgacgatgacagctcgtctgcccatggtggcagcagaccacatcaagggtctccatgcggaggtggagcagaggacaacggcgacgacagctcgtctggccatggtggcagcagcaacagcaacctagggctcgtgtcgtccaacaagtccaatgttccgttgtaatcgtgcctcttcccggccaaacccaagaagacgtctctgttggctcatgtcacgcagcggctcctgatcccgaagcagcctgtggacatgatgaggtttttggccaagctgccaaggtagcgagcatgctattgctctgtgaatacatctttgccttgatggtaagt

SEQ ID NO: 94212 - DNA, 681 bp, Zea Mays
ctcattacacgcgagtgctatctagggtactcccgaactccttctctaaagtgtccccaaattccttgagaaggtcatcaaggctggctagggacatctcctcggtgtcaaatgagtttcttatcccgacagggggtagggctggaggggcttcctccttctgctcagtctgacatccttggcttttggtcttcctgcggattcttcttgcgggggcgagcttcttcagtttcttgtcataatccatcttcagagtgcggtaggcctcacgggtattggtttcctcgccttctactatttcaagctctcttgaatggacaccttttcccttgtaagttccctgactttttgctccaggctttccacccgggaggttaggtgagtgcagtggagggcaaggtcatcgtattggttatcgagggtgtggaggtatccagccatgtagacgatggtggggtcatcctcgacagggtctctacttgacagggcctgaagtcttttcctccaggtgggggtattcttgttgctgggtggaaagtagcgaaggggagtttcaaagattactttgttgtagttctggcatagttgccagagggctgttcgggcaacattctggcaggtatctgggaagcggtatccggtaaaagtgacttggaaagaaggatggttcggatagtttcg

SEQ ID NO: 94213 - DNA, 580 bp, Zea Mays
atctccaagagaggccttaaactaggtcctatcttcaaatataggagctaagagaaaaaaatggcttccaagagagtagctattttataaatttgtatcaaattaatataggactctagacctgaggacccaaatatattacctccacggagaggacctatccctcaaccaatgaatctacggttccgtgaagagtcttttgcgacaccgacccacttccccatgcattcgccatcacagaccggagggccccatgcattcgccatcacagaccggagggcctgccttttcggttgactgcataggatgcaaatcaatcacaagaaatatctatccaaatactctaggaacaggataaaaagtggaagggagagatcggctagtaaacataaggaagaaaaaaaacctgatcttcaccgagaacacatccagttgcacagggaccagtgcggcatgatttgtggtcagactggcgcactgaaatggaatcgatgcaacgcttcaaatataggcgtgaactggcgacgcacatggaaaatgtgaagatggtggcgctaaatcatagggataactaactggt

SEQ ID NO: 94214 - DNA, 288 bp, Zea Mays
tggggatcttcctagtgcgagtactgggtataggcggcgaagggtggtgtcgaaacatagtgtgggtgatttttcgcgaagtggtaggcactgtcgtatggggatggagcgtggccgtctccgagtagaccgggttggtaaacgagaattgttgtcctcgccgattggggcgagcataggcgaggaggatcttcggaatctttttgagggtgaggagttgaggttaatgatgttcaattccagggagatgggtatcatcccgaaggttgagccgatgtaatatgtgat

SEQ ID NO: 94215 - DNA, 993 bp, Zea Mays
gtcgatgagcgctaagaaggtccagcaggagggccggctgaagtagcaggcctaatgagcggaacacccggtgtacgggggtcaccggctggtccgctggtggacccaatcgagttcagcgtaggggcaaccggtggaaggccaaggttgctggtggtagctgcagtgaagaaaggtgacagctcgaatggaactgaaaccatgttaggtatgtcgtccaaaaaatcaaaagttgtgcttgtggatctcttcgaagaccacatggcgagagatgatgatgcggtgagagagacgaccaaggccgaggtatcctttgtggtggggagaatacccaaggaagacacatagggtagagcgaggagataatttgtggggtgtagtgggggtgagattaggatagcacttgcagccgaaaacacgaaggtgttcgtacgaggggtgtttgccaagtaaggcgaagtggggtgtgccggaagcaagtgtatttgtgggaaggatattgagaagatatgtggcagtacgagagcagcagcccagaaagtgggagggatgctggcttggaagagaagcgtgcagacgacattattgatggagcgaattatgcattcggccttgctgttttggggggaagtgtaaggacaagacatgcgtaaaagaactccatgggaggagaaaaacttgcgagcgttgaggttgtcgaattcgcgaccattgtcacattggacaccctggatggtgacaccaaattgggtgcgaacataagcgaaaaaatttgtaagggtggaaaaggtgttaatacttaaggcgcaagggaaacgtccacaagtagtgtgaacagtcgtccaaaatgtccagataatatttatgaccggaaacactagtgattggtgaagtccaaagatcacaatgtattaattgaaaattgcgagtggcatgtgatgaagaagaatggaaaggtagacgaacgtgacgtcctagctggcatgcatggca

SEQ ID NO: 94216 - DNA, 628 bp, Zea Mays
gcaccaataagaaaactagaaaatcaagaagccgggaattcacatagaatattcccgtgcaataccaataagtaaattggaatgtcaagaagacattggaataaagtattaaactaccattttgttttgtgatttgtagagcgtgatcaagtcgcactattgtttagtgcactagagaggacttaagtaccatgaatggtattcctcatcctattccgaggcctcaaagaaaaggataggaaatctagttactctaattccaagtacccggggacgcctggagaaaaatggataagagagcttatcacagcctagtcacgaaacaccccaatgaaataatggggaaccagttgagagctggtaactggagagcagccttctagcgaggtgccttcaggatatgaatataccggtaaatgaaaaagaagagaaagctgaaacaaatttgagctcattagctattaataaaggaacttgctaccgtattgagaaatattggagtaaagcaagataaaatgcataaagcactcccgtgaattctgaaaaagaaatggtaatacttgaacaagagcaatagtcattatgtatctatcatataatgcagactatcttgaaaagatggcaatca

SEQ ID NO: 94217 - DNA, 493 bp, Zea Mays
aaggaactccactactttccccactggctacatattgccgactgttctttcgagtcaaagggacctcatcttcttcctccccttcgttttcatcagcaacacagacaacacacccattgggatcagcgacagatggatcacacccattgggatcagcgatagatggatcacatctattgggatcagcgatagatgaatcacacccattggggtcagcgtcggcaaatttaggcacaggcactccctcagcagcaggaaccgaaggaccaacatcccgatccaagctagatactcgccgaagacgcctctttttctttttctgctcatcagcaggagaatcaagttgattggctcgacaagggcgttttgggcgaacactgacaggcctctgaatatccaaggttgtaccagcttccgggagaggcgccaccaccaatgtcctagcaggagcagcatcagaagagtcctcagccagcatatcaagcatagcact

SEQ ID NO: 94218 - DNA, 564 bp, Zea Mays
tcttaccatgacgcagaatcgtagcttttctttggtcagccttacacacatcatcctgcccaccttacgcttcgtgccgtttccgtcagcaggacttcggcggcagtttaaaccgtgcctgtgtttgtcgcggtgtgctgctgtggtcctgtttattattgcccggttcagaatgcaaactttagtggaggatttggggattacacaactactactagcattttctgattaggctagctagttatttgctcttgcgtggctttcagaattagcatggatgaaaatatctgctgtacgctaccctcagtcagtgaagagaacctttttgagatgagatactctctctctttttctgatcgattagcactaccagagatgatgtttaaacgagctgctatttaccaactgtagaaatttctcagcttgctttctgatgaattaattcccaactgtagatatccttattattgagttcgtgcaccagatttaatttctgtaagcgacaaggctgtgcagttggttctcatatttcactgtcaaactgcagtaccaattcccttactt

SEQ ID NO: 94219 - DNA, 987 bp, Zea Mays
ctgaggtgctcaatattccatgaattccccacttcggtgccgtccatctgagtgagctggtaggatctcggtcgtgtaacctctacaacgatgaacgatccttcccacggtggcgacagtttgtgccatccctcccccattagaattcggcggaggaccaggtctcccactgcaaaggatcgatgccggaccgctttgtcgtggtagcgcctcaaggtctgcaggtatttgcccgactaaattaccacatttagtcgttcctcctccagcacatcgatgtcctcaaccctggttgcttctgcttcggcgatgctttcaaaggttaatctgggcgccccaaagatcagatcagatggtagtactgcctctgacccatacaccatgaagaatggggtgtttccatatagagctcggctcggctgagttcataggctccagactacatatggcagttccttgatccacttccctgcaagcttctcgcttttgtcaaacaccttctttctgagtgcattgagtatcatcccgttggctctttccaccttcccattagctcttgggcgtgccactgatgcatacttgatctggatgctcctctactcgcagaagtcaaagaactctgagctggtgaagttagaccctaagtcagtgatgatgctgttaggtattccgaacctgaacattatctcctgaatgaattccactgcttttgctgaggtcaaaggcgattggcttgtattctatccactttgtaaatttgtcgatggccaccagtatgtgagtatatcctccttgatctttcttgaaggacccgatcatgtccagcccctagcatgtaaacggccaggttacaggaatagtctgcaattgttgtgccagtagatgttgttgctttgacaggaattagcacgccttgcacttctagactaactcggcggcatcattctttgtagttggccagtaaaaccggacctaaatgcctttccc

SEQ ID NO: 94220 - DNA, 400 bp, Zea Mays
gttgaagtgcatgctcaatatcatacgtgtctttcctcaaacgtgttcgttaaaatccttgaacatcgatttcctatctcaccatgtgttctcctttttatcttaaggatggtgcgtcataggaatctgtctgtagttgagtctgactccgatgacgacactcaagaggttcgtgaagaaactcctccacggtccagatccaagcgcgggcgcggatctaggaatgtgctgcaaggtagtgaggcctcagggtctcatggggctcgcggtcgaacggcctggaatccctccggtcggtctcgacccacggccaatccacaagcctgggaggcaaccagtgatgatgaaggaggcaaagatgatgaagttgatctcccttctgccaacgcacccattatcc

SEQ ID NO: 94221 - DNA, 625 bp, Zea Mays
gagacaagggtctaaagagacccaaaaaacaacgcactccttatggaagccagtaacactcgtacatgaaaggatccataaaaaacacacactccctacaacaacctatgcagggggcagccaaggagagccctttggctccaacaatttcctagcttcttcttttctcatctgcatgctccataatcaggaaggctgggggaccctccattaaaaatggctctattgcgatgcttccaaatcatccaagatcctaaaatgatgagggagtcaagaccttccctgaccagaccatttgatgtctctgataccatctcccaccaatccataaaggaaactgtatctggctgtggggctaaactatgcagcccaaacgttcttagcaggttgtaccagaaaactcttgagaagacacaacccacgagcaagtggtttagggtttcaccttgcttgtcacataaaagacatctgatagcgtgattcaatccccagtccaacgggcagtccgcgacagtggctgcagtggcttccgtgggcgaaatatgtcttcaacatggcgtaccagacctcgctgcgggacacgccattccgggtcgtctacgagcgcgacccgctgtctatccgg

SEQ ID NO: 94222 - DNA, 425 bp, Zea Mays
gtctttccctccctgatatcagctatgaaatcagcgactttcatgtggaagacacgaacaattacgtcggagcggtcgcatggttgttgtccaatttcaaaacaaatggcatctgctatttctttccacttagtgttgcatgtgaaggtcacaaacaagtcaggagcgccaaagactctacatattgccataacatcttggtagttcatcacatgataccttctaccaccagtaaacgatgaaggaacgatcatccagcttccagcattaaccaaacccatatcaatggcatcagacacaccttgcattgtttcgtatcgcaaatctttctggtggtcagctataaattgcaatctagaggctttgactgtggaatacgcatcgacaccaatctgatcgctgagcctaccatagcaagtgttcgg

SEQ ID NO: 94223 - DNA, 587 bp, Zea Mays
ctaccttgaggaccttcggcgggaaagaagacccccaacaaacagcttccaagacactagccaccctccttttccttggagttcctatgttagctggcagcttcagcagtattgttactttcatcttcggctgctctggtactttttctgctaccttttctggctctagctctttggccgggtctgcaataattccaataggcacaacaagaatagtctttatgctcggggggttgttcccaccctttcacttaacttcggcacatcggccgtctcgatgcgcctaggtctgcgtgtcaaaactttgattttctttgaccgcgacgcaccagtaaatgccgaggtagcggctttccttttcctcccttgcttctgggcgggatagcagtagtctgggtaaacgaacccgataacatcaaacactctgttcaacttctttttgccgcgagcgccgaatgcagttgtcttagcttcgtcttctgccttcgaatacgctccaagtatcttgtcgcttctatggcatccaaccaatcatcatttggctcatcaaactggttcctgaaccgaaaagtgtacttcagataaac

SEQ ID NO: 94224 - DNA, 480 bp, Zea Mays
agctctgaaggtcccgcttcggcgctaccctggcccactacagcctcaacttcggccggttttgtttcaacctcggcaattttccatgaaggaatagaacttgaagcttttactcactctagtacatctaatacacttgccatcctttttcttttcggagtcaccgtaagacccttttgtgccttcggcaccgccacttctgccgaagggcttaaaacttctaatgtttttgtcccttcgattcttggctcctcaattttatcagtcttcggctcagctaacttggccgaaggtgccttcggcattatggccggctcagcaggtccttttgcttcaatagctgaagaagtttccccgctaaactcaggcactatggccggttcaatatagcggggccggtgggtaaggattttcaactttttactcttcggcgcaggctcgcttggagcagccgaagcggtaacctttccagaggtcgca

SEQ ID NO: 94225 - DNA, 380 bp, Zea Mays
attactgcgagggatactaccgagatagccatgcaagatgctgcacgacgtgcactttaacagtattacccgttgttgagcggggtagctgatggccttgaccagaagtactaccctccccgttcgaccgacagtgctggaggtgtgattgtctcgccctttggtgagggcaatcctaggttgaacattatggtcaacttggtcgtcgtgctcaacaccgagctataccacgcccatgacgagttaggcaaggttcgggcggaggttgcggaattgcatgctgagcgtgcagcgcgccactatttggatggtggttctcctgcccctgtcgggattcagcacccttaccattctccgctccgtggtcgctttgattatgg

SEQ ID NO: 94226 - DNA, 1326 bp, Zea Mays
tgaaaatatcatgagacaacatcgtgacctaaaaccgggcgtaggaggtcggtttcaagggtatggtaaagaacacaattggacgcacatctcgtttatctaggagataccttacacgaaggcattgctgttaccacataatatagatttgatgcgccaagaacgtaatgttgcggaaagcatcataagcatgtgcttcgacttcactggtcaaaccaaagataacatgaatgcaagaagagacttagctgaactttgtgatcgttcgcaccttgagcttagaaaaaatccaagtggatctgagagtcggccacgagctccttattgtctgaaatgacaagagcgagaagagatatttcaatggttgaaaaagttgaggttcccagatcgctatgcggctaatataaaacgggcagttaacctcgacactggtaatctcgttgggttgaagagtcattactatcacattttgattgaaagactagtgccagtaatgttccgtggatacttcagtcccgatgtgacgaagatatttgcagaactcagctatttttataagcagatatgtgctaaggaaatcttaaagaaattgatgctgaggtttgagaaggaaatcattgtccttgtatgtaagatggaaaaagtattcccacctggattttttaattgtatgcaacatttggttgtgcatctaccttgggaagcattggtaggaggacctgcacagttcaggtggatgtatagtcaagaaagagaattgaaaaaaactcagaggaatggtgcggaataaggcaagggttgaggggtgtattgcagaggcattcgcagccagagagatcacattattctcaagcaagtatttttcagacacaaacaacgtgaatgcgcaaacgacacggtaccatgttgccgagcaaactccaatcactgatctaagtgcttttaagtgggacagtaaaggtgtcggagcttacacatcacatcttcaagggaacgatagagcgtaacaagaccttgcttttcttgtatgtcaatatgtcagaacttcatccttatttccaaatctttgatagcatatataaacccaacaaacaacttactcaaaagcagttggatgacctacgcttgaaagggttacacggtggcccgtcctttgtgcagtggttccacgagcatgtaatttcctccatgcctatcttttttctaacttaagttcagatgttgcatagtatttatttttatccgttcctcatttttgtagtgtaagaaacctgaagccagtgtctccaaagacttgctacaaatatcacatggtcaattgaccgc

SEQ ID NO: 94227 - DNA, 791 bp, Zea Mays
gacgtcgaagcatgccagaaggcctttagaaatgtttgtgccttcattagcacaagagatataatccaagagcacatagcctatagggtgtggccacttgtggatagctgggaaatgccgaaggagactactgctgaatccagtgaaggtggcctagttcgattgaaatataccttcagatacagagataagtttgacgaaccaaatgatgactggttgaaatgcattgaagctaccagcgacaagatgcttgggacatactccaaggccgaagatgatgccttgtccgcagccttcgggggtcagggcaagaaaagattaaacagtgtttttgatgcaattggcttcatatatcctgattactgctaccccttgaggaaaggaaaaaataggaaaattgtcgcttcggccaccaccgttgtgccgaagggcaagaaaatgaaggttttgacgcaccggcctcgatatattgaaacggtcgtagtgcctgaatttggtgaggggacctcctccactgccgaagcagaacaagccgctcccgccgttcggagcgctgaagagtctattgtagtgccgaaggtgcctacagtcgggccaaccgaagccaaagatgatgcggccaaagagccaaaattggaaaaaacagtgataatgccagaaattctgagcccaccagcagaggcagaattgccgaaagtggcaaaggctcctgccgcaactcccaagaggaggaggatggacagcgtgctagatgctgtcatggagaccacaaaagccttgacccctgctcc

SEQ ID NO: 94228 - DNA, 441 bp, Zea Mays
aaacctgctttccaccgccgtggtatagccctcaccgtggtcagcgaatcccaggtctgttcatgctccctactgtcttgtttcaacatccgtggatccttctgatgctccccgacccgaccaattggactaggacaccatagatcaacgggaacacgcttgattgtctgtagtccgctgtcaccgtggacagtgcgtgttagagcgccattagtaaaattggttgaggggaaaccctcgttaggtcttgaattcggtctctgccaaagtagggcgctggtcatcgagtaaatcggccagtgtaagctcgtcggagcttggcccagcgccattcgccgtcggggactgcaagctgtgaagagatagaagtgcgagggccttttcgcaaatgtcagtgacccagttaaatagtgcgcaggactcttccttagttattcaaac

SEQ ID NO: 94229 - DNA, 420 bp, Zea Mays
ttacagattctttagcgatgtaaagccatcaggcagtagaccggcaagggaacgactgtctcggtattcgttcttgaatcagtgactgagagtaagggttagtgattcatctaatcagactagtggggcatctttcttttcgtagtaagcaactctattgagaaagctctttcttgatcgaagtaaagaatcattgtagttcctctttaggcgagctacttcgttcctattctccgattccgaataggatcaggttgtaatgaaccaaaaatactttgctaaggttcaaccgtttcgctacagttttcttccaatttcttctaaggaaaaggtaaagtaaaataaaagaaagaaaataaaggccttataagctttctctgtatggaaaaaggaagaagatgctgcttcggcttccgtttc

SEQ ID NO: 94230 - DNA, 402 bp, Zea Mays
taagcgccagatgatgaaacaaggaggggctgcaatgcaatgcggcttgcaacctaatctagggctagcgtggcgagaattcacacaaggcggctagcgagggcaaatcaagtaatgtggtgtctcgacttgtaatctgggtaaagtggatgggctagcggcggaaaaaaataacagcaatggagcggttgaactacgattacgacacgacctaaaccagcaacaagactcgaacacggatacaaattcaacaaagcaatctgaaacaaaattgcaaggctaaacagggttataggacagcggattttttttgtatggcaattatctggagttataggatgaaaaacctaaactaaactagggtaagcctgacggtaatacctgagtctttgaataccactt

SEQ ID NO: 94231 - DNA, 471 bp, Zea Mays
tcaccgaccgtgctacattgaaccggccatagtgcctgaatttggcggtgagacttcttcagctattgaagccaaaggacctgctcttacgcagaggattgaagatccagatgcaatgccgaagactgacaaaattgaagaaccgagaatcgaagggacgaaaacattagaagttctaagcccttcagcggtagtggaggtgtcgaagacacaaaaaggtctagcagcgacccccaagagaaaaaggatggctagtgtactagatgtgctggagacaataaaagcttcaagctctactctagggaaaattgccaaggcttcgaaagcgcagattgaaactgagacaaagctgaccgaagccgaagctacaatgagccaggttgacgccgaagctgggccttcagagcccgccaaggagaaatccttggaaattggagaaaagacagcggaggaagaagctatagaacagat

SEQ ID NO: 94232 - DNA, 331 bp, Zea Mays
ctccttcatatccctaccaaccttctatggatgcttcacctcccaatgatgatcctatcatcaacactctcctccgactaaagctcctcccattgaccctcctcctgcaccaccattcacttatgtataccctcctccataccccatttaggcatccatagttgctcctccatatatatatcatatgatgtttctcctccatattgtgcccattcaccatttattctctggtttggtgatcctccgcatatgatgctcgtcctctatttcatcatcttgcaaccatgatagtgtccctaagcagtagcaatgatgctgctttgaaccggtc

SEQ ID NO: 94233 - DNA, 423 bp, Zea Mays
tgtctgcggatggtatgctgagcttcttattgcatgggtcccaagtgattcttgtagctgctcccaaaagcgtgccacaaatagtgctcctctgtcagagacaatggtcttcggaatgccatccaatatcttctttctgagctcagggttcttgggaacaaccagtcggtctccaaaccatagaattcctttgctgccctgacggaagcatttgtatttttctgctttctattcgatcatttccttgataacctgaacacccttgtcgccaatctgtgccatgactatttgttcttgtaaggtgggctccactgagatgtaattcaaagcaccggaggaaacgacctctattttcaacttgcacaactcatcacatagggtggtgattcttgcatccatattcatacaattgcactgggcctt

SEQ ID NO: 94234 - DNA, 318 bp, Zea Mays
acgggattcggccattgattgggccataaactcacgttcgatcgcttgggaccgtgaagcaaaagctcgagcttgtgtggcagagctgagtgcgaccctcgatagcctgcaagtatactgtaatactttacatgaggaagtacatgtactgtatgctcgactgcacccggatgtgccttccgacgctactgcaatgggagccggaccgtcgagaacagcaagtgaaggacctgatggggaattggacctttttaggccccctctttccatgaaccttgctgacgaacggtctcctgcaataggaaatgaagaaacaaa

SEQ ID NO: 94235 - DNA, 731 bp, Zea Mays
agggttcacaccataccctactaatggagcaatcgacaaaagttggagaccaacttaagtcggtgttacatcctcacgcttacaaacaaagggtacacactaccctactaacagagaagtcgacttaagtcaggaaacgacttaagtcggcgtcacacacacttataaaagagggtgcacattgaaccccttaaaatgattagactgaaacccgagaattaacttagtctagtacagcacgctcgcgcaaaaaaggcagggacgcccaccaagtctccccccacaactcatcacaatacaatgaagcaacctcaaagcttatattcaaactaattatcaaatacattcacaaaagggaggagcacttcccacacaagcaacaattgttatacgtttcgagtgtgcaatacatcatgcaggagcatctctaggagtggaatcaaccctagtaccaccaagggcaggagccttagccacagtccctattgtagcttgagttacctcatgatttttcttttacatgtctaactttgactacagggaggagttcatggcacagacaccatcaaggaatttagtgacttggttaagctctacttggtttcgggcgcacctttccttcacatcggagcaacaccgagtcatagctgaggaacaaacacactatcaccaaaaatatgaatgagcaagagaagagttagcaagggatgacataaaagacttacctacat

SEQ ID NO: 94236 - DNA, 387 bp, Zea Mays
gtgctagcacgggtgctgttgtcagatgctgcctcaatgcatgaaaagcatcctcacatttctgactccattcatactttacttctttcttcaacaattcagtcattggcttggcaatcctggagaaatctggaatgaatcgccgataatatcctgccaatcccagaaaactctgaatctgccgcacggtggtaggaggcttccaatccatcacttcttgcactttctcaggatcaactgataccccgtcctgagaaatggtgtgacccaaaaacttgatttccttcagccagaaatcacatttggacaacttagcatataaacgatgatcgtgcagtctctgaagtactgtatgcaagtgtttagtatgcccctgctcgttccttg

SEQ ID NO: 94237 - DNA, 582 bp, Zea Mays
gcgatggtacagtgaccggattggatcgccagctcagagacctcgccaccggtgatcttgcgcccagatccacaccggcgtcgcgattcacgcccgaccaaactcagataagcgctcctcggtaagaaatatcgcgctagagataaactccggccactgttctcaccgccgtcgtgtcccgccatggtcagtcgcattggcatcaccggcgttcaccgttatccggccgggctacgtgcctcaacgttttaccacgtcgtagtgagtcactgtaagtcactggtttgtcgccggtgaggccgccatggtgaaggccacaaatcaccacaccagtgactcattccttctccgaccaccacagtgcccaatccaaattcactggccaccgctcaagcctgctataaattcctgaccccgcctgcttcgttatgtaattgtgcacccagcagagcaaccagtgcctcgaatcatccactagaactcccaatttgggattttccccaaatcacccaagaacaccgagcggtgtgatctcgccgcggtcagctcgtctcaggtccgctcataccctctgcactctcg

SEQ ID NO: 94238 - DNA, 786 bp, Zea Mays
cagcatggtggcacgaagggagtccaggtgaagaggtgccaccgagggcgctggtgctagaggtagaagcagcacggatgaacctatatgggggaaaataaagggtagtggtccagaggaaggcatacggtcaagaagaaagtccaactcaaaaatggagtcgacagaggactgggaggggggtggagaaatgcaaatctgtctccactaaaacgacgtgacatgagatcaagagatgtagtggcaaggtcaaggcatcggtaccctttgtgatcaggggagtaactgaggaagacacaatgggtggagtgaggaacaagcttatgggaagcagtcatagaaaggttgggtagcacactcaccaaaaatgcgaagatggtcgtatgagggagtgatgcggaagaggttattgaggagatcatccagatcactgtttggcgtgttgctctgcacatcagccgatgatccatgtggtagaatcgctattggtagtagacatggatgctcctgcaggttgctgctcatcagtagaaatgttgttgtgactcactaggtagagggcgcccaacttctccaagcaaattccagtctgcaccactggcgagctttgcacactgaacccagcgatagaaattcacaaagcctattgaatgccaactgcccagggatcagtcgcacgctgccagatgggctcacctacttgccggccaaggcagttttgttgctggtataggccatggggttaggccggccctgctccccagccatcaggtagcagcgtctacg

SEQ ID NO: 94239 - DNA, 422 bp, Zea Mays
aaaatatgacaaaacttgataaaaggttaaaactacctaattaaagatgatttggtcctttctcgcctctaatagcttcgcaaacatcagcacgtgtgagcctgctttgagttccttcttcaaaacttgcttgttgcgcttcctactgatgaggaccatgatgaggaccactgcacgagtcacctttcaactttttttatatgaactttctaccagctgaagagaatgttgctcctgcaaacttcattaaatggcctacgacacaagatcatccaatcgagaataatatgcaatgggacaataactagatcgtcctgggatgtttcgctgcagctagagacaacaaacttcggtcgagcatgttctatcaagtgctgcgcagtggggggacgaccgtggatgaaggagctggtttgtttcat

SEQ ID NO: 94240 - DNA, 665 bp, Zea Mays
ttttcatgtaatccaaactgagccaacacaatagatgaaaactactcccaatccccaaaccatgataaaagtttgaatacatgtagccacttggctgccttcccttccatatgcatggaagtagccatcgcccagatagaacgaagtacttgatacatctaaaagtagtcatggcacttgcccaaccatatcaaaggtgattcgccaccaaatttgggaaaggaaaacttcatgaatggaggaggtgcgccaacaatctattgatgttcagctccttcaacccgatgaccaccgcgaacatcatgtcgatgatgaggaggaacatgatgatccgctggaggaacaactcgatcaagagaacctcgaggacctccgatcctagacaaacctctcggtgtagaggtgtaaccatgcttgaatgagccgaggaagatgcagcagcatccaccacaaactgctccatgcttgttgccatctactccaacgtgagtgaggccacccatttgctagtatcaacaatgtgacatgccatctcatcccgatccttcgccgcatgttctgctaccgatttggctagcgctattgtcccaccaattgatgttgagtctgcttaacggactcgatcctctacacgattgtgtccaaagtgctcaacacttgatccc

SEQ ID NO: 94241 - DNA, 308 bp, Zea Mays
gctgaattgggctatgttgctgcagtgcttggttttgctagaacattgacatcagattaacccagggtgggggcactgatgcaccttcaacaacattctctgttgtatgcatgtggtttcggttgttggggatctccaagtggccttgaaattgttgtaccatctctgatgcttgtggatgtggtggtggtgcttgcgccatagtattagtgtcttttttatccttttcctgtttcgtgatgatttctctaagccaccaataggtcttgctgatccacgaatttcctttgccttgaccttgacacccc

SEQ ID NO: 94242 - DNA, 384 bp, Zea Mays
agtgcaagagttcaaataagggggatagagttccccgctgatctgatagtaatgggtacccaggatgtagacatagatgtcatcctagggatgaattagttgaccaaataccaagcaggccttagctatgataagaggactatgaaattagtgtccttgtcaggagaagaagtgttggtggagttggttttatctagaccaaggaaaggaagttgtcaccaaataactgcccatagtgaggtagtcaatccgctcgaagccatcaaagtagtatcagaattctcggatgtgttccccgaggatttactaagcatgccacctgagagaaaagttgaatttgccatcgagcttatccctggcgttgcccctatttctaagagagat

SEQ ID NO: 94243 - DNA, 419 bp, Zea Mays
tttctccccctcccgagccatatgatcctgaaactaacccatctttgaaggaggcgctcgatataattaagattgctaatgaggctattgacgaagctgtcgacaagctgctgaatgaagctgccgacaaaatcctaaaggaagactaaagttgtgtatatttgatagtttagcgtccttgtacgtagctcttgtttttgtaataaacacttatcaacaatttgcatgtatgttgatgtaatatatttctttgtgatgcgtgaaaccttcgtacatatcgtttttgagccggcggcaaaaaaacacgttcccttcttttcactcttcagaaagaaatccccctctttgccgaaatgactgtgtatctcttgccatatacgttgcataagaataccattgtcgaaggcatgaaccccgta

SEQ ID NO: 94244 - DNA, 453 bp, Zea Mays
caaaaaaggacaatccacaaaaggtaggagattacaggccgatttcgcttctaaacaataacatgaaaattcttacaaagcttcttgcgaaccgccttcagacaagtatggccatgttagtccacaaaaatcagtatggcttcattaaagggagaataattcaagactgcttggcgtgggcgttcgagtacattcatttgtgccattcctctaaaaaggaaattatcattcttaagcttggctttgagaaggctttcgatactctagagcatgagacgattattcaagttctaatacataaagggtttggttccaagtggataagctggattcggaatatccttcaaactggcacatcttcggttcttctcaatggagtcccagggaaaacatttcattgcaagagaggggtcagacaaggagacccactttccccattgttgtttgttttgg

SEQ ID NO: 94245 - DNA, 335 bp, Zea Mays
gttccctaagctacgacgcagtagcgttcaattggccgagaccgggagtttcactagcactagaggatgtagaaacatggatcagagggatgtgaacggatctaagaatggctggccatggcttgatgcctcacggcggcgttccgaccgatttgggggaaatctgaaattcacgatctatggttgatgatcaggagtgaggagtggtgcattgggttcgtaacagagagacagagcaaggggaacactcaatttatagcgatagtcctcgtgctttgcaaatttggaatggaagtgcacacggtggtgaatagatgagtcaccggaactcatct

SEQ ID NO: 94246 - DNA, 280 bp, Zea Mays
tgatccttagctaacccgtagcaaaaaagctcacttttgtgaaagttgattttcaaacttgacatctgctcaaaagcggtcaggagaagtttcacatttcgtgcttgatccaagttatgatccagaaaaacaacggtatcatccgcatactagaggatagaaaggccaccatccactagatgaggaaccacacccgtgaattggttattttcctttgctcttaaaaatagaattggcaacatgtccgcaactatattaaagagaatcggagagagaggat

SEQ ID NO: 94247 - DNA, 466 bp, Zea Mays
aatttatagagctccgccactgcggtcggacacgccgccacccctccttcgctggtcaccgccaccactccgccgacgattttgtcaggtaaatccaacctctttcgcaccttcttggtcttgctaggatttattttctctgttttcgctccttcttcttggatggcgacgaacgtgggctggacggatggtaggagcgagcgcggcagcttgtatttcagggtttggggacgacggtgacgaacaagtgttgttggggcctggggatcatggtagaactgactctggatcttctcgaacgcgtgatgttgttctagccacgctataaagcatcccgcacaacacttccctcatggtcgtctgctcgtttggccctagcatttcctagtggtgatttcctcttcttggtttctttcttttctttcttaccctcatgatctaggtagaaatccgttcgttgatttat

SEQ ID NO: 94248 - DNA, 605 bp, Zea Mays
cttccatcattaagttgctaccatttggcaatcattattcctttggtattgtcatgctgcatcttttggattcttccatacccttatcccttaattcaaacacttaaccctgaagactctgttgcctatttttacattttagttttattttcatgaccttcctgtcttttgagatcccttcctattccgttgttaagtcattacctttcaacaatttctatttcccttggtcttagtatgctcgtgtccttggagtcttgcatactcccatatttttatgtatgcttatctttcataccacaatgactgttcaagacattttagttaacatatccttgaccacccttgtttcctaatgatccatgagcggtcattttattttgcacatccttggtgatctcgttaattccttgtaattttcttcggtaatgaatttttacttcaactcttctgtcggaacctcacttatcttgtccctgattgttttctccatttcgtcactttacgagtcttgccttaactctgtccatggattacacatttcatcattatcacctttatccttatcacatctatattttaccttgatgtttatcttataccag

SEQ ID NO: 94249 - DNA, 273 bp, Zea Mays
gagatactgtgtttccgattcactgctagaagcaatcagcatatgcaacaatcttaagagcacttaagagctttctgtgttgtgacaaaccacctctcatgggacgacaaacatataccaaagttacaaggctagagtttttgatgtttgtcgttcatatcttttaattcccgtggaaacccacatacacatacctagtaaacatataagagccattgtaatgttgttcagtttatgacctatgcaataaacataaaagagcaaccacaccgt

SEQ ID NO: 94250 - DNA, 551 bp, Zea Mays
gtgtgatcctgctgaagctgaccccaatgggtgtactgtccatgttgttgatgaagatgatgaagaagaggatgaaatccctctgattcggaagaacagccggcgttacatagctagtggggaaagtagtggtgttccttctcctgccttgtttgccctcattggtctgcaagaattatctatggcgaactttgatcaaactcttgaagacatggttccagaagatctattgtcggagccggcagatggtggcgcgatggatgtttgtgctgatgtgcccaatgtccggttggggtcatctcgggcagcgtcccacgcctcatcgaccttggagcgcggtcttgggggtcaggaggctggtctggattgcactgctcccatggaagtgactgagggaccttcagccttagaggtggctgctgcagagaactcggccctcaaggatggtgctggcgcttacccagcccctgagggtgttgccggagatgatccggcttggatgggtaatgcgagctgtgacccagcccccgagggtgtccgagtgggttctg

SEQ ID NO: 94251 - DNA, 395 bp, Zea Mays
ttgcttttgtctctattatgagtagcactagggaatcaaagtctgaatgtttgtgcgcaaggatgacgaactccggtgatgtctcctccgtggctggggtcactccgtcgatagggtgggcgactgattaggtgtggggggaacaattagcatcggtcgttgatctcgttacgtgtgggcgagattagaagtagggtaacgattcgcccagttaattcccagttgttcgatctatatcggaggtgtgtggataggttggccttcattagttttggacccttagatcttgatctgatggtcatgcttgcgtaccggtttgggcgcggctgatttgatctatgcggttggatcatgattgaacggctcagcccgtccgatacccccttcggcgagta

SEQ ID NO: 94252 - DNA, 281 bp, Zea Mays
ataaatatgtaaatatatacataacgagctctgggcttctaataagtaaaggaagccctaaccaaaccgagcaaatctggttgggctcaatccaatcgaacatctagtcataacgagcgaaaccaccccctgaactattgtataaaaccaaccgccatacccaaccttccgtgacggctagtgtggtgagagtatcagggtctaaggtttcagtggtggttgctatgcaaggcgcaagcgagcggcatgatccgatggcagcgacacaagcccaagcagcc

SEQ ID NO: 94253 - DNA, 435 bp, Zea Mays
gaaaaatgaatataaaacttacggcggttaccgatccaccgatcagcccgtacacgcgtctcggtggttcaccttcttcacatgcgaggctatataaacagacaagttggtgagaagttaccacaacattcattgccactgcgtcattctgctactaaaattttttactgaagccgaagctttatgctttctgtgaacttgctatataagcttcggataatcgttgaatccatcgagtgcagcttcgtctaacagaatgcatgaaggagaagagactagagcttctgagatggtccctatttcgaaaatgatgaaacgttccaggttagtcgtacaagaataggaagagtcaattcccacatatgttgctattgccgaatctagaccaactaccgccgaagctgactgtgggggacaggtatcccccgggtccac

SEQ ID NO: 94254 - DNA, 334 bp, Zea Mays
gcccgcgttcccattcaaacatgcccgaattggccaaatggttgccacgatgagcttcatgggtacacagagctgctaaaacaacatacgagaagtgcagagccatactagagtggtccggccacggagcgcggagaacttgtgctcaccggtgacagaaaaggggaaaatattgctgcgacgagctcttgtgaaattgggaggtgagattggggctacacggtcacaaagtgctaccgattcactgtgcacactcaatttgggaagagatggcagaggcagtgtgaattttgggcttcaatcaaactcactggtggagatgtgaatacctcgc

SEQ ID NO: 94255 - DNA, 497 bp, Zea Mays
tcagcccctgtcggtgccatcggaggtatggagtgacatctccatggactttgttgaagaattccctaaggtcggcggaagactgtggtattgacaatggtggacaggttctctaagttcgctcactttattcctcttggccatccatatatcgtagtgtctgtggcccgggcattttttgaagggattgtgcgccttcatggtattccttgttcagttgtgagtgatagagacacagttttcactagtgctttctggtccgagctctttcaccttgctggggtcaagctgttacttagttcagcgtttcatccccagacagattgacaatccgaggtggtcaaccggattattgtcatatacttacgttgcttggcgggtgatcagcctaagacttggttacaatggcttccatgggctgaattttgttacaatacttcataccaaactgatgtcaagtgcaccccattccggattgtctatggtcgggatcctcc

SEQ ID NO: 94256 - DNA, 414 bp, Zea Mays
caagcgtcaagtttctaaatggaggcaagaagacgccgagaagaaggccgcagggttgccgacgctttccgagcaacttggtgaaaggacgactaattggatccgtgctagaaaacccagagaaactgaagtgggtgtatcttttgatgatcctaatgtcgaagaagctgcgaaaaacatatatgcaatggcagctaagcagagccaaggatcatttaagccacaaagggacagagacatcctaacggctggtctcggtaaccctgagcatcctggtcgtgtacgagcaatctcatctaaggaaggatggaaggaaggattcagaccacagcgagaaggtttgtacaagaaacgtgatcgatacaaagaagagttgtcggattattttaagcaggaggcaaagaaagagttcaa

SEQ ID NO: 94257 - DNA, 643 bp, Zea Mays
gtgaggtatgacatgtctagtttatgagtatcattaatctgatgttctacaataaaatccgctacaacctggcctctcatagatttcaatggttcataggtcaagtcatattctataagtgcataagcccacttaccaattctaccactcataattgggttatgcaacatgtatttaattacatcggcttgaccagaaacagtgcaatgactagacagtaaataacatctacacttggtgcatgcataaaacaagcataagcataacttctcaataaaagtgtaccttgtttcagcatccaccaacctccgacttagatatgtcaccacatgttcctttccttcagtttcttgtgtcagaacagccccaatgaccttatcttcagctgcaatgtataatcggaatggtactcctactcgtggtgcttttaatacgggagccgaagacaagtattttttaatgagatcaaatgcttcctgctgctctgccccccaagcgaattcggcatcattcttaagacgaaggataggggtgaaggcatcaattttcccggctaggttagaaataaaccttcgtaaataattcaccttgccgagaaacttctgcacttcgactttacaggtcggaggtcccacattccgaa

SEQ ID NO: 94258 - DNA, 701 bp, Zea Mays
gttgacttaaagtcattttcttatgcacccttatgatttctcgtgaaatcccaaaacgagaatcaagggcttccgataacctagcctcatcagtgcgcactgagctaggttgtgaatgtcttacattcacaggataatccatatcctctaggtgtctaccaacactaggttggttaccaacgaatagttggtctgcatttactatctcagaaggtcttgccttcagctgcttgcaagcatcttaatcccagtttgtgtccatacttctccccctcttatttacaacatcgttgcaatagggagttaagtggctttccatataaccactctttctggcacttccacataggattaatttaagtgacacctcataataaatgcacatggcagtcaatttgcaacttcttgcaaatcattcgaacctaaaggttcagttttagtacgtgatcctgagcctgaatgcttactgcattcattataatttcctggcattcattttggtactcgaaatctccccctaatgcctggaaaagctcatgattcaagcaagcgtacgggccgtaaatagactctcatgaagagattctaaaacttaatgatcgacagagaatgaattctcacatagatccccagctttctgtgtgcccatacatgtacgctgcggtggtgagattgggaaaaacatacccaatgtacgcatg

SEQ ID NO: 94259 - DNA, 427 bp, Zea Mays
aatgatagccatttatgtttccagtcaactgtcattgggctaaacatctccagccaatccatgcctaatatgacgtcataatatggtagagggataactttgaaggaatagcagaattccagaccatggatataccagctagcttgtggcagctccactgtacattgcacaacttcaccattagccatggtaacggataagggagtgtccagacgtgccaacccagacaaggcagaagtatgattagcactcaggaagcaatgagagctaccagagtctaataaaattaccacatcaatgccttgaagttgaccgcgaagtcgaaatgatttagaggtagtctttgtagaagctgcttccgtggatagcaatatcatgaattgttcagcagaatctacaaattcggcctcagattcaggttgatctg

SEQ ID NO: 94260 - DNA, 597 bp, Zea Mays
cttgaggtgctcgtcgttagagatatggaggttcgtgcgaaggtcgctgagcagctcctccttctcccagctcagcgcgttgccacacgcatggaacgccttcatcagagcagcgtaggcctccagctccagacggtggatttgttcacgacgtgattcagctacgtcgtcacaacgtggttcttcctttatgggtggttgttctttcttgacgggtggcgcttctttcttgacgggttgcagctgatcattggtcttctcaacgttacgaggcctgctgctgggagctgcagggcaatctgaagacgagtcggaataactctggtcatcgtcgcctcggtcttcctcatcgtgttcgtgctgctgctgccgatggtcactatcatcatcgggattaatgcctgttctaacgtcgttgtaacaatctttgccgctcgtctcgtcctgcttgttgctcaggcacacgtttgggactagcgcttctgctccacaccggggcttttgcttaaacctcttggtgtcgtcgtcgtcaaatctcttattggcatggacgatgcttgtgtcagatgccaacatgccgaaacacctcttcttcac

SEQ ID NO: 94261 - DNA, 445 bp, Zea Mays
gaaaaaacgaagaattattcatatagttgaagttatcgagcagacgccgccgctggcatcggcgtcaaagactccagctattgagagtactgctgctgctgaagctggacccactgaagccgaaagtgccgaagctgaaaccgctgaagatgtgaatctagacgccacactatctgaaattgataccatgcttctggatgcggccgcggaagaatatgctgcagccgctgaagagattccgggcacagtggatggaaaaggaaaggagaaagccgaggatatttcgaaagaagaggacttcaattttcaagatatacttgggcaagaattgtcgaaggttgaaaaagaagaactgaaagagtatgttatatcttgcgggtacagaccaggtgcgttactctttgggggagtcaacgaagaaagcttaggatgccttcgggaccac

SEQ ID NO: 94262 - DNA, 347 bp, Zea Mays
tcgtaacatacaacaatcctttgctgatggcgcgtgtatcgacaatgtgtttatgcaatgcttcattgagtgtgtctgcgatgactgttctaaacatattcctccattgaatgctcaccagctcatactagatgttaatgttggggtatgacttctacctttataccacttttatttaatgcatagcatatggaaaatacataatactactctatcctattaggctatattgaactttgaggagcaggagcaacatagtaagtctcctcgtccatttgacccttcaattttggagagttacctcttgaagacactgccttccttcaagcagctggattcagggtggg

SEQ ID NO: 94263 - DNA, 522 bp, Zea Mays
ccacaataaaggcattatcctctgcagtgggagatgcaagactactctgagtcctcatagatggaggaagcggcctcaacatcatatttgacaaaactttcaagaaaatgggcttgacaacaaaagctttcgggtcgagtcttgccccttctatgaaatcatccctgggcggtcaaccatgccattaggacagataactcatcaattatgtttggtaccaaggccaacttccgcatcaagtgcctacacttcgaggtagtcgacattgatgcaactcatcatgccattatagggagactgggactcacaaaatttatggagatacctcactacacctacttagtactcaaaatgtcgagacctaagggagtgatttctatcaatggaaagttaataagtcctacaactacaccaaggagggatgcagcctagctaagtcccaagtcatacatgcggagtgtgacaacctacaagtggccctagcattacacccctcaagtagaggaacaatagagagctctc

SEQ ID NO: 94264 - DNA, 485 bp, Zea Mays
cgaaaaccattcggaataaaagggaccaactttctagaagactggaaggaagaatcagcacaactaaatgcatgtctgggaaacaacgacagtctcgaagtcaagccaatgctagaagacctcatctgcaaagctcaacatctagactcagagacagcaaggctcgtggagaaagcccgcaaggaacaactcccggacctcaggacagatgaccaaggagtcctttggttcaaacaccgtctatgtgtaccaaaaggggaagcccgagaggtcctactcaaggaagctcacgactcagcctactccatccaccctggatctaccaagatgtacctggacctcaagaccagatactggtggaaggggatgaagaaagaaatagctcagtatgtggcccgatgtgacatctgccaacggacgaaggccgaacaccaaaaacctgctggcctattacaacccctcccgatacctgaatggaagtggga

SEQ ID NO: 94265 - DNA, 654 bp, Zea Mays
atgacgataggtgttgggcagacccacaatgaaatccatgctgatgtcatctcatttccacgaaggtatagataggggttgcaaagctccagctgatttcaagtggcttgcctttatcctctgacaggtgtcacattctgatgcatactgggctatttccctcttcattctggtccaccaatacaaaggcttcagatcatggtacattttggtgcttcccggatgcatggagaatttggagagatgagcctcatccaagattttcctcttgaggtcctggtttttaggaatcaccaatctgctttcaaaccataacacacccttttcatcttggcggaaacaattatacttctcaaccttctgatggagattcttcttgataatctgcactcccttgtcactgagctgggccatgatgatctggtcttgcaaagctggctcgacagaaatgtgagacaaagaaccagaaggaatctgtgacaccccagtgtcacctagggtttctctcaaataccaacccaagaaccattattttatgtgaacccaagtaagcatgagcatcaaattaacttaagtaagaaagaattcaccaagtatatacttaaaagtatcatgatcaaaacaattgagtcttttaaaaagataagaatgtac

SEQ ID NO: 94266 - DNA, 276 bp, Zea Mays
agagaacaagctaaggtcaagaggaaagttctagatcctccgcctcaagatgacctcgatcaggaaatccaagatctcaaatccatctagtagcaagttgagcaatgcaaagaaaagatgcttcgggtttctcaactacaaaaccaaattgatgaagcatcagagcaattgcgtaacataacgcaacaagttgagaccctagaagaaccacatcatcagcaaaaccttcatcattaggaactcgactacaatgattatccctatgatggaacttcc

SEQ ID NO: 94267 - DNA, 443 bp, Zea Mays
gcctcaaatcgggtgcgcgctgtgctccagtgatggtccgccgtgtgccctgggtggtgccgccgtagctcgacaagggtattgggggagacacctgggccgttgatgcggagatggatggctaggatcagaagccgggtaacagttcgacctaggcttgttaggaccgtccgatgcggggcgagcgcgtaggatttaatgcaaggcaaaggagtctggatccatcggatcgcgatctaacggactggaccgtgtaccgattggggatggggtcggtctaatctgtaccgccagtctctaatccaacggctaggaattaaccgtaccccttcgaccagcgctaatgcaaaagagcccctgtattttaagtgattcaacccgcagtccatcggccgcgtgtctgagtctcggtaatcttgcgccagtgcccctgagttctttgg

SEQ ID NO: 94268 - DNA, 423 bp, Zea Mays
gactgaagttgaaaaccagttagacaagaaaattaaaaggctgcggtctgatagaggaggtgaatacctttccaacctttttgatgagtactgcaaagagtgtggaatcattcatgaaaccactgctccatattcacctcagtcaaatggggtagctgaaaggaagaaccgaacggtgtgtgacttagctaatgctttgttgcaaagttcggggatgcctgacatctggtggggcgaggcagtactcacggtgtgctatgtcctgaacagggtgccgcctcgcaaccgtgaggccacgccctatgaaggatttaaaggaaggaagccagatctttcgcatcttcggacttggggctgccttgcaaaggtgaatgtcccgttgccgaagaagagaaagttaggccctaagaccgtagattgtgt

SEQ ID NO: 94269 - DNA, 504 bp, Zea Mays
aaccaactcagctagatgcccttttatgacgggtcataactaaagatacaattattatatgcggcaatttacccacatcagattatacttctgacatatcaacttagtaccgagaagattgctgaaaatattttgattgattttgctagcatgtctagggatagcccgcttctatattcgacaagctgatgcttggagcatttgttttttttatcggattgcttggagcatttgttactttggttgtcaacagaagcttttgtggatctttaggttttagtttatgcactggatacaatattgcttacatgaatgggcatggtatcatcacaactaaataaatatcatgaagcttgtccatgtagaaagaaagttcgattcaattttcatatgcttgctaatcggatgaactatttgcattagtttcttcttttgctactgttgtcataaactcatttatgctcactttatgttttagcatcggatgacataagttaattaaat

SEQ ID NO: 94270 - DNA, 640 bp, Zea Mays
catggtttacccttcggtaatggtatttcttttgtcgttttgtttcgaacttagagctagaccctctggatatcatgtggattactcccctgaagggttgatcagcgaagtcttcttgctttggtagtggtaggggttggtttggatgctgaggtggtggaggcgacaacactaggatttcttggtgttgcaggcactgttgttgaggaaataggttgtggttttgctgctgggggtaatagtggtgttcgttttgaaattgatgttggttgtattgatggggttggtaagtgtgagcggtgactctttggttgtcagttggtagggtcctgaccattcggtcctttgttgctttagtctctgggaagtacctggttgggtgtgatgagtcttcgtcgtggaagagacaatagaatcttcattgttgttgaggtcctcggcctctgcctctacccctggtcgctttgccaccgtgaccttgctgcagggggtaatcttgacgacgaggggggttatctcctgtttgctgctgatttgcgatattgtgcacttgggactgggcgcggtcttgccgagctgagtctggttgcgaaggcctgatccacgttctactggattgtggagtctccttgggtttccg

SEQ ID NO: 94271 - DNA, 764 bp, Zea Mays
caaaatttaccagtctcagatatatgaagatcccgggcttcatccttggtgggttgacgaaagtcatgaattttaatcttgtccccagaaatatcttcatcagaaaatctaagtatgtgagcaaacctccggtagctcaccttgtaccagctgccttcgatatagaaatttagataaggaaagttatagggactttcctcatcggccagcttgatccaaagagtagaatagaactgagcaataacctcatcattccaatcatattggaatgtcataatgttcttcattttcttcctctcacaggccctcaaagcctgtgtcatctctggatcaccaataaattcacatccttcccagttaatgtatctctgatgcagaataggctgatgcttcttgggaagaatcatagagttataaaaatcaacacgctgaagggtccagaaccgattaccatcgatcctagcatcacgaatacgcaatgtagggttttggaatcggatgtcctgaagaagagcggaccctccgttggcagtaaaatctgtgacagggctcatttgcagatcgacgagcctctaccctgtgaagaaccaacccccggataatgggtgcgttggtagaggggaggtcaacttcatcatcattgcctccgtcatcatcacttgttggctcccatgcctgtggatttgccgcgggtcgagaccgaccggagggattctgggccgttcgaccgcgagcaccatgagaccctgaggcctcaccacctt

SEQ ID NO: 94272 - DNA, 371 bp, Zea Mays
gggacatgtatgtggacaattttcttgcacgtagtgcgcatcttgtacttggaatatgacatgcctttcattgcggtgccttttgaaatgtatatgcactaagttgcagttgtggatgtcttcgcgcgcttaggtgttgttaatacgtttatattgttccgattgcaacgttaggcgattggtggtagggtattatattctgtctaggcgatgacttcgcctttttgtgatgcgcctattgtgtgaatccagctgcacccttaggcgacttttgcgtggatagaactatgcgtctcgaggacgacttcgcacccttgggtgttgttacacacttgttgtactgatctagctgcacccttggatgacttttg

SEQ ID NO: 94273 - DNA, 389 bp, Zea Mays
catggtgaccccgacgtcatgcggcacaggggcctagtcaacccgaagcttaaactcagcgggcttagcactagcgtcttcaacttctccctcttcttctcatcggccttgacatagaaccactcacttttccaactggttggccacttggtgcgatagctaagcaccggggccttcatatccttgtgatatgcaaagttataacagccaaagttttcatgcagcccgtcttctctggccttcgtctagtaatgtagctcatgcactcggcagaaagcttcaacatttgggtccattccttggcttcgaagggcccaaatgaagacgctgagcctaacgataacattaggggtcagctgatgaagatagatttcataattatccaaaac

SEQ ID NO: 94274 - DNA, 336 bp, Zea Mays
tgtcacatttctttacaaactccgctttgttcgaagctgcctttgaccagtaaaaaccttgacaagagatttttcccagtaaagccctaggccaatatgcgatccacatagtccagaattaatttctcttattaaatcttgacctttgtctctagagatgcactttagcaaaggtgagcagacaccctccttatataattccccatctatgattttatacggccttgcccttgcatgtttcccttggtgtatactttatcatcaattagatggtttctttaaaagaaggttataatttctgttctctagtcttcactatgtgtaggggagacaatt

SEQ ID NO: 94275 - DNA, 307 bp, Zea Mays
acgtattcgtcatggagtttcaaaagtggggtttgccacattccttgagcaatatgaccttttgatctcagtcgagatcccagacaaaaagtaccctgaactacgaaaaatggttatcaagcatatgatgcatagcctgtgtgggtcgctaaaccctaactgcccatgcactaagggtcgtgcatcgtgcaagaatcattacccccggcctttcagtgacataaccttacaagggaaggactcataccctgtttacagacgttgtgacgatgggcataaggaaaaggttcgaggatgcgaattggac

SEQ ID NO: 94276 - DNA, 393 bp, Zea Mays
atttttaacgtgtgcacgacatcattacgaagttaacacaatatgaacagcaaggaacagatttataaaacaaattatagcgtgtatttcgaaattctaggatttaatgtgacatgtcgtgtttgtattggccaaaggctaactacttgaagggctacgaggtcgtggccacagaagatcggcggcatgggatttagtgtgatggagaggaaatgttcctctttctctcccctggaatcacgtcctcacgcattgcggcaattctaggcaccgctcatcctgaccaatggagcacactaccgggagcaggagagatggcgacgccggtcagggtggagctcgcgtgtcacacccgggttctaggggcaccaagccccgggcgtgagataatca

SEQ ID NO: 94277 - DNA, 449 bp, Zea Mays
caggacaggagtaggtgttttctgtttcatgggtcaagaaaacttgtattctaatttctaaagattctgagttggcacattgtgctttccgggtccgattaagaccttttgtcaattattctgcattggtagctgactagctatggatattgggtgcatgactcacttatttaagggattcagacggactgctttaatcttgccagagatgcagtctgcctaacttctataatagcaagaacgatcttcagtaatcggagttattaaaactccacccagtttgggtgcctcctcgcaatttgtgggctcgggccacgcacgtgtcgacgcgagcccgtgcttcggaagcgaaattttctttgattcaatgagaccttcgtcatgtccacggttcgcccttccctgtccgactcggacccacgaccatcacccatccagattcatgtgtc

SEQ ID NO: 94278 - DNA, 461 bp, Zea Mays
agtccatctttaaggttcgataggcctcacgggtgttggcctcctcgccttctgctatgtcgagacactcctggagagatgccttctccttcttaagctctttgacttgctgctctaggctttccactcgggagtttaggtgggtgcagtgggaggagagatcatcgtagtgggtatcaacggtgtggaggtacccggccatgtagacaatggtggggtcatcctcggtggggtctctccctgagagagcctgaagtcttttcctccaggtaggggtatttttattggtgggtggaaaataacaaagaggggtttcaaagatttctctgctgtagttttggcatagctgtttgagggcctttcgggcaacactttggcaagtgtctgggaagcggtgcccaatgaaggtgacttggaaggggggtggtttgggtagcttcggctttctcccaggtaaacta

SEQ ID NO: 94279 - DNA, 321 bp, Zea Mays
caggacatcgttgactgttcggcagtagagttcatcactcattaaatcgtacttgaaagttgtacgctgaatgttcttatccgtcctaacactgggatttcgtaaataattaattatgggtgtcctccaatcacttgtatcggcttcattatcagtcgaatcaattagaaggactttcctggtaaccccggacagtccggagctttcgctcggacggtcagtgacctgagagattagccttgtaccggttatcggatcttcagtgttatgaaatttccctcgctttatccgataacctgacgcattttgtgccaaattgtt

SEQ ID NO: 94280 - DNA, 309 bp, Zea Mays
tcgtgcttcgacttcagtaatttccttctgcttctggatcatgacttggcacatccttgtgtgtcccttgtccgcgccacagaataggtagaacaattcctgggctgattaccgtaccttcctccgccaaagcttctccccctctacctctcggggctggtggtctgtagaaagtttgctgcatgcctgaagactatgagctgtgctgactactctgagcgttattggccttgtcattgttggcattgggattgtggattgtcctgacatgcatgggatggagttttcctctaaagcccctagtcatct

SEQ ID NO: 94281 - DNA, 493 bp, Zea Mays
ataccaagtatcagatctatactgctttcctctaatactataggcatagaccagaattcccttcccatgattgtcaatgttaatctgttggtcatataatttgcttcaataggccctttaggggttattactatcatgggtttttgcatattttgaagtggtaactcatttgtattgacatagcgagcagaaatgaacgaatgtgtagctccataatcaaataatatagctgcaggaactgaattaatataaaacgtaccgatagcaatattagcaccatcagcaataacatcagcactgacttggttgactctgcaatgttgaatcccttaccggaagctggaatctgttgcttgccttggacattgcttcgagcggatgtgttggggttcctcttcggacaagcattggcatagtgcccaacctcaccacatttgaagtaggtggtgactgtagtagtaccttgtccagcaggtctcgccggggtgccagt

SEQ ID NO: 94282 - DNA, 899 bp, Zea Mays
aagacagagtttgaaatgaaagacttgggagaaaccaagttttgcttgggcctgcagatcgagcatctcccagaaggaatatttggacaccagtcgacctattgtaaaaaggtccttgagagatttaatatgattaaagctcaccctttaaagaccccgatggtcgtgagatccctcgaaatggatactgacccatttagaccaaagagcgatgatgagaaatcgttgggacctaaagttccttaccttagcgctattggagcactgatgtaccttgcgaactgcaccaagcatgatattgcattcgtagtaaagctactagctagatatagtgtagacccaaccataagacattgggtaggtgttaagactatatttagataccttaaaggcactcgagctcttagcttgtttttcccgaagaatcagcacgagactatggtgggctatgttgatgctggatatcagtcagatccccataatggtatatctcagactggctttgtatttctatgtggtggcactgttgtatcctggagatcgtgcaaacatacattagtaacgacgtctactaaccactcagaaataatcgcgctatatgaagccgcacgagaatgtgcttggctacgacggatgactaactacatccagaagtcatgtggttctaacaccgcaaatacccccaccattatctatgaagataatgttgcatgtgttgcacaaatggaaacgagctatattaagagcaatatgactaagcatatctgtcctaagtatttttatcctcatgaactccagaacgagggtgaggtaaaaatcctgcaagtcaagtcttgtgataatctggctgatttattcactaaatccttacctgcagtcacattcagaaaatgtgtacg

SEQ ID NO: 94283 - DNA, 723 bp, Zea Mays
gaaaggggcatcaaaaataaacaaaccaacttacttgcttgcttcatgctcttcttctcttagaccatatcgagcagttcaccaatatatttactgttagggagaagatcgcgaagaccatgttgagcggagtccaaactcgccctggttccaaactaacggaaccccccaccatttattgtcttcgtaggttcgctggtgcagagactccgatcaagcgggtccagcattgaggggtcgcaccggacgacaacaactaagacttcgccacattccgagagagaagtcctatcacccttcgtggcgcaccaaaggaggagccctcaccaaacctctgttcggtctagccaaccgaagggcatctggcggcttcacaatactacggaggcgactcttcccagggccggtcctgaggtttcatagacccagggcaaaacaaaaaattagggccctcaaaaaattttgaatgataaaagtctataatatatatactttcttctaagtacataagcaaatttttgaatgataaaaatctataatatatcaaaacaacttcaaatctttgtacatattatctcaaaaatttcttttaatgtttcttgatgcgaagtcattgataatagtgttgctatcaacctcgtctaataatttttctcaatgtataaagtagccaatccgttgaggcgatcttgagacattgttgaccttaatagttcttcaaca

SEQ ID NO: 94284 - DNA, 444 bp, Zea Mays
cagacattgagctacaaatactcgatcgatttgcttgggtaggcaggtgctggccgtgcgaaaaggtttgcctcttgaatcttccttccacggccagcgtaccaatgggatggcggcatgtacacagtacacccctccaatgaagcacgtacgcgtcgctgtcacacgggcacgactacggctacgaacttcagctgctggaagctggatgcagtcgtcctgctccgattagtggagaggccaggaaactgggagctcaagtaccatatgcatgcatgcatgcatggcgtacccagacgagtcggaaactttgcgccggtacgcaaggtactcccctgcacaaaacgtctgctggccgctttgacttgccggctttggcaggcaggggggatggggagggcgtcatgtgtgatgtgcgcgtggctgcccgagtcattgttggct

SEQ ID NO: 94285 - DNA, 631 bp, Zea Mays
gcgagataacatgaaggacaaataaaataagcatgaaacaaaagtaacacaactatatggtcgtagaagcatatgaatcatgtttgaaataacataaaatggttgtccatgtgcgagaggagtggtgggaaatgcatatatgcatatgagggtggagtggtggttgtcctagccgtaaaggactaatggtgatggtggtatttcacctagcagggcgggccaagtgtaagtgttgttggtgtggtcgaagcgttgagtagggaagttataactagagctaacagagtagtggctatcatcatcaacaaaaagcaaaaccaatcgattcaatcacttctcatctctcgttgtgattgaagtgcttcatggtctaaatcttgtgtggcatggctaaactaactctccccagtgaatccccaacccaccatacaactccccccgacataactccatacaacatcactaccccactaccatatgttccaccacctgtggcattatcatcgcttccatcccattactaccatcatcatcttctccgccatcacgtccactagggttaggtgtgctatcgtcactcccaatctcttcctctttatattcattagtgaatatgaacttttcccttttt

SEQ ID NO: 94286 - DNA, 376 bp, Zea Mays
agtctgcgacgatatcggtggaagcttaatccagaaaaatgtgtctttagagtgtcagcagggaagttgcttggattcattgtcagccaccgagggattgaagctaatcctgaaaagatcgaggctatcatgaggatggaagcaccacagtcacagaagaaactgcaaagacttactggatgcatggcagctttaagcaggttcatatcacggttaggagaaaaaggcttaccattctacaaactgctcaagaaggtggataagttccagtggacctcagaagctcaggaagcccttgatgcactaaaaaagttcctgacaacaccgccagtgttaaaaccaccatgccgagccacaccgagtcagtcgaccgaag

SEQ ID NO: 94287 - DNA, 421 bp, Zea Mays
gcaaagtgatgccatgacacacctcactggactcactcaaattgcaaagatcaccctcgacgatagggaggacttcgtggtcgacctgtcttcagaattagtggagaaggatctacaggttgaatagatgagcaaccgcatccaagatttggagcagcaggtggaaatccgggacaacaccattgaagtcctagaaaatcaactccatgatgcgcaagaggaacttgaggaggcaaacgctcacatagaaatgcatcatcatgacatggacgatttggaggcaggcagtgaagaggagcaagatcccgaggagattgagctggcttccagtctagacacgccctactccggagtaccccctacacctggggacaatgttgcctctgctcctcagggttaggtgggttagaattaaacatgt

SEQ ID NO: 94288 - DNA, 387 bp, Zea Mays
catccgatgctgctcctgatggtacgttggcggtggtgtcccttccagaggttgatacaactttggatgtcccgaaacctatcagtactcgctcgaggcgccctagccgaaccagtcagcccgagccttctgctgatgagcaaaagaagaagagaagacgcctccggcgagtatccagctttgatgaggacgccggtaccttagctcctgctgctgaagaagtgcctgcaactggccttgctgacactgatcccaatgggtgtgctccatctgctgctgaccccaatgggggtgctgcttgcgttgttactatggaagatgaggaggaagaaaatgaagccccattaactcggaaaaacagtcggcagttcatcgccagcggcggaa

SEQ ID NO: 94289 - DNA, 386 bp, Zea Mays
cgctcggtcagacagactgaatgagatcctgatggtacagtgtctgcataaatatatcaggttcagcccccccctcgccgccggtgatcttgcactaggattcacgctggtgtcacaattcacgcccaattaaacgtagataacgatccccgggtgaaaagatcccgccgtggatgaacttggagcacagtagctgctctgtcgctcatccacttgccagcgacgtggtcgtgcgaccatcattgtcgtgctgccgtccctcgcgtttaagccacaccgtcagccatcttaccacgtcgcaattgatcacaatacacatcccttctattgcctaaggccttgccacggtaacagccacggtcaccgcgcctgtgactcagtccctc

SEQ ID NO: 94290 - DNA, 583 bp, Zea Mays
aagaagttaaatcatattaattatatatcttatccctcgtttatttatgttgcagtggaagaagaataatgacgagagaatggtaaagagcattttgatcttcttacgagtcatttaatagggtgtgagtacttttggtccatgtaactaaataacgcagtgaggggctaaactttactagtttcctagaccaaaggaactaaggggaccctacgtgagtttgaaatgcataaaaaatggagtaatcctttgttcatctagatctgtagctgcgatgcgacgtacacaggagttgggacgcacccgcatcattgggggcatccatcgtctcggctcccctacgtgtgtattattgtccggcctcagctctaccctacttattaactcatcctgcacgtgccacgtacttcacgtatccatcattgcctcgcgattcctggttcagattatgccggtcttgactcatgacgagacgctcttcgcgcccccaaccatccatcatggcagggcttttgtctgagctggctttcgcgtaccccaagtccaaccgcgctgaggaggatgcgtcatgcgtccacgtcag

SEQ ID NO: 94291 - DNA, 718 bp, Zea Mays
attattataaattcctgctacgatccagcaatttttaatagcagtgttgtggccgagttaatacatacaatccacggtaaaattaatctagagatattttgtaataaaaagtcacatgccaagatcaataggtttagtactagcagtgaggcggcacagataagttagatcggttatttcttgttttcctccttaactatgctttattcttgtatgtatgcaatctgaatttattttgttgattctttatgctttgatgtgaaagctgaaatgggcgcaaataattatatggtttgatactctgaatttgattgtgtgtgagccaagacacgggatagataggatatacattttccacatgttctatatggattataatctggccagctttatttttctcccttgtattttttcctaggagacgaccgcgtaatcctttcatctgtacccattgtgtgttcgaatgatcccagatttaaatggtcttcatgtaccttccggccatatatgtgtttctggtcttcattggaatagtgtggtaaattaagtttgtagtggctaatagaaccaccagtaaaaaacaacttttacaggcagctcatgtttacctcagtttctttacatattttttatctaagagataagagatgatcatagtttctcagttctgtgcgcttgtaatttcattattaagtgtggttcataataacgtatccgg

SEQ ID NO: 94292 - DNA, 412 bp, Zea Mays
tgttcttatgcttgcagcaacctatctcgaacttcactaaggaatagatcacattcactaagcatttcatcaactgtctggtttgttgttgtgcccgattggtaggtaagcactggaggaggatccctgccataaactactcgaaatagggtagtgtgcaatgctgagtgataagctgtgttatagcaatattctgcccatggtagccactcaacccatgcttgtggacggtctcttgtgatggaacagaggtacattgcaatgattttattaacaacttttgattggccatctgtttgtggatggaaggttgtactcatccgaagtttgacacctgatagtttgaacagttctcgccaaacgttcccagtgaagacggggtcgcggtcactgacaatagactggggaaaac

SEQ ID NO: 94293 - DNA, 2439 bp, Zea Mays
gaacaaatggcaggtcaatataatataaaactaactgctccgaaagcagtcatcctgcctgacccgatccaaggacacatcgtattccacctttattttttatattagttattgaaaagtctaattattgtgcctagctttttccatggttcgtaaccactcccttatatttcttgtacaagcactccacctcaatcaggttgcaagtcctacttttgctagttcgcggtcggaagaagccatagccatccaggaagaagaagccatagcaaaagcagctgaggggggattagagaagaacagcagcgcatcagatagggagaattgaagctgatcttttgtatcatatatctttcctgcatgcttcatcagtccgacacttgagagaggttcgagagagaagttattaagctgcctccacactggtagcaagtgattgcatgcatgggggataggacatggcagcagccacatgcgcaggcttcttccccagacgcagggaccaaggtccaagcttcatcatcgtccgtccatggcaacatcatgtaaaccctaacacacatggatatatagctggattcggatcttgctctattttcttgcgaatatatagatatatagatggatcggaattgaaggtttgctttttttttttttgcttgcttttgactcctttcttctgatttctgaagcatatggtggattatatatactgtggcgtcaatctcttctctggttttcatcagatttttaattttccacggtggatttaatttaactgttcaacatagaatttgctcgatcggaaattttgtctttacataaacttattttttttattggtagcatttccagtatatcattttagtaactgaccaaactaaaatgatgattgataccagcctaatttataattttgcgtgtattgatttgtgcaagtgcagcagaaaggagccagctggaggcggcggatacgacgacatggccgagttcgatcaagcgctcttcctctatcttaacagcagccaggatcaagcatcagttattcaagatcaacctcgtaagccacacacttaactcccttagcttatgcatgcatatacatgcacgggctgtatatataaggggataaactttattgcatagtataggttagatcatattgcctccattttttatttatttgacgctaattagtccaattttgtactgaccggcgacaaataaaaacaaacaaacggagtaagggagtacatggcagattaattaattaattaaactcaaacatgccattctgtgatgcatctaccctgattggacatggctcaaaacaagaatgagagcaaattaaagatgcgatacaatggcgtgaggatcagacctctcaatcgtctttccttcttttttgtatgcaaagcttgttctctctgagtccgacaaaagccaattttcagagaaggaaaaaaaagaatctctgctagttcaaggagagtgacatgtaacaaacacttgctcgagtatgtgctcatttcattccagataggtcattttctttctgctgaaataacgcagttgggcagagatgtgatttctcatagtctagatagctctttcccttcaccacgtatccacttccaacaaccatatacacacgcatatatacgtgcatacattattcccattctccgcccttatatgtgacaatctaataactagttcaatggactaattagcttagagcttgtttgatagcaactaaaattagtactagcggattcaacctgcaaactattagctaggaattgctaataactgtttaggattgttaatagtttataaatatgtacctttgatttattatccaaccacctattagcagattaattgaaacaatcttcatttaaaatcatctatagctaaaaaaatagcagctaccaactcttaaaaactatattagattgtattttaagaatatattacatctgttcttcaatatttgtcgtctgttaggtaatttttgaactaagaaaccgcgacaaataaaaaagaatggatcggtcatttgttagcatcgctatgccatctctcgtacatgtacacttattagcttctagtttaatcgcagaactttgtgcagaaactctcaacatcttcccttctgaaccaatgcatgtcgtcgagcctgctgcaccaaaggtacgtacgaaaaaaaaaagattagcgacgacgaccacatgcattggctctcgatccagtctccatttagataccttttctcactttcctgccctcattatatatatattgatctttcgtcttatcgtgagctactttaattatttcaagcaggaatctatgggggctacgactaacaacacggcgtggaacaacgccggcgcaggcccatccaagcagccgccatccaaccttccgtcgagg

SEQ ID NO: 94294 - DNA, 458 bp, Zea Mays
cgtgaccgcattgctctgctgtgactgcctgatgcattgtctccatttcagttcccaattccattttgtaccttctgtcctaggctatcaactcgacattttggtatggcggttacgggcttacagccagggtggttttacttggtgctatcaaatgaagacccacatgtttacccacgggggatggaatattttcttaggttcttggcactttgcccagtgattgcatcgtgccacttggattggctcgatgctttctgatgcgcttgttgtccaaagttcctgccctgatgcctctaggtgcagcctcttggggcctagcatactctgtctaacaatatattgctgttcagtgcaaattctgacattctttcatttgaatacattatcgcattgctgtgctgcgatttctcggtgtgttatcttcttttcagtttcccatttcatttgtacctgat

SEQ ID NO: 94295 - DNA, 472 bp, Zea Mays
agcttcggcaactttcttcgtaggaataagagtcaaggcttttgtggtctccatgacagcgtctagcatgctggccattctccttctcttgggagttgtgacgggagcctttgtcacctttggcaattctgcctctaccggtgggctcagaatttttggcatcatcactgttttttccaattctgactctctggccgcatcatctttggcttcggctggcccgactataggcaccttcgacactactatcgatccttcagcgctctgagcggcgaaagcagcttcttttgcttcggcagcggaggaggtcccttcaccaaattcaggcactacgatcgtttcaatatatcgaggccggtgggttaaaacctttattttcttgcccttcggcacagcagtggtggccgaagcggcaattttcctcttttttccttgccttctcaaggggtagcagtaatcaggatatatgaag

SEQ ID NO: 94296 - DNA, 757 bp, Zea Mays
aatttctgtgtcgtccatctgagtgagacgatatgatcccggccgagtgacttctgctactatgaatggtccttcccataagggtgacaacttgtgtcgtccctctcccgttagaattcggcggaggatgagatctcccactgaaaaggatcgtcgtcgcacggccttgtcgtgatagcgtctcagagtctgctggtatcgtgctgattgaatcactgtgtttagctgttcttcttcgagtacatcaatatcctccagcctagtagcttcggcttctgctatgctttcaaagaccaatcttggcgccccaaacttgagatcagcgggtagtactgcctctgacccatagaccatgaagaaaggagtgtttccatgcagagctcggctaggttgagttcttaggctccaaacgacgtagggcaattcccttatccattttcctgcgaacttttcatttttatcgaagatctttttcctgagtgcctccaatatcatcccgttagctcgttcaacctgctcgttggctcttgggtgtgctaccgaagcatacttgatctgaatgctcttttgctcgcagaaatcgaagaactctgaacttgtgaagttggatcctaggtcagttatgatactgttcggtattctgaatctgaatatgatgtcttgtatgaattccacggccttggctgaggttaaagaagcaatgggtttgaattctacccatttagtgaatttgtcgattgctaccagtacatgagtg

SEQ ID NO: 94297 - DNA, 848 bp, Zea Mays
cttgagtcctggtactgaagagaggcacaactgttgggtccctctgagatatcaaccaggactccatgggtacgtgtctgaaccgacgtacccgagccgcagtgactcgctgaaggtcgagcagacagggatcagcagctaggggtcgcacctcagtctcgtcacgctccctgaagcgaggtggtggaatgggagcgggagggggaacagtggaagctggagtggtggaggtggtgggtatagcggaagtggtggatggctctggagcgataggagctggtgaagtgggaggtggagaagacattgtggcggaaggtgtggagggagcagtggagcgaggccgagatgcgaggcgacgaactctgtaggctatctgatcagaagagatctgcaactgtcctccccgctctgcctgctctgatgccgctgccgctgcaaatgctgcacgagctgctctgtccatacatcgcttcttcctgccctcctgctgctcaagataaattgtctttcccttgactcgcctgaaggggcgaggagggtcctcgtcgtctcctcccctgatgatgagacattctttgcctgcaccatcctgaccagactgctgcacgatagagtgaaaagctaagtaggagtagagagcagctagtaggatctcaaatggagtgaaggctacctggaaatctcacgggagagagagaatccaggcaggacaagagatgggcacgcaggcagacgagatcactgaaatgacaaaagaggtgagcacgtattagtcacatagtcataagtatatgaaatgtgaagaaatacatacacagagagttaagacacaaaaacaaagtgatttg

SEQ ID NO: 94298 - DNA, 608 bp, Zea Mays
aaatggcataaaaagggaatagcatgctcagtgccttatgttgcttgcctacttggttgtgtgcaagcaagcttgctaattgggtgctaccttgtgatcatatacaacaacgatcttatagccaagaaaatattgatatggaggagagaaaagagaagcaacaagctaggcatgagagtttacgttgtagtggactcagatattaagtgcatgtgaggtgaattagaaaagggagtggaacatggacaaaaaataataatagtagtaaggtttgtatagacaaataaaaaatattatattaacacttattatattgtttacatagtggagtttaaaatagggagtgacatagatgctggagatagctagagaatgtaggctcttgttttctagctatattcaaatctagtcgcctgaccaaccttaacgatatttgctaattgtttggaggaaattcaataatcaatggcactccttaacttgaccatataagaaatgcccctcattagtaaggcatgagagaaacactactctcactaccacgattctttctagattatagcacattgcctagctggcctgttttcctttttctaatcttaaattga

SEQ ID NO: 94299 - DNA, 301 bp, Zea Mays
gccccatcacttgtggatgatgacgatggtgatgtggactacgccactgctcttcctctgcctgatgctcgtgttgtccacgggcttcgttttcatgaggctcgcgatgttcgtcgtggcggagagcctcctgtgaactattgtatcaagggtggctcagcactactgtaggacaagaggtatgccaatcctcgtctctttgcgagggatgatcgaattgaagggaaccgtttttgggtgctctttcatgtggacttctacaattcggtcatcatgtctaagaagcatcagcccatcattc

SEQ ID NO: 94300 - DNA, 521 bp, Zea Mays
ggagttttcatacaacaacaactatcaagagagcatcaagatggcaccttttgaagctttgtatggatgacggtgtcgtactctgttaaactggtctgaaccagaagaaagatggtttttcaggcctgatatggtgaaagaaatggaagagaaggtttaatgaattatacataatttgaaggaagcccaagctcgccaaaagagttacgcagacaaacgacgccaacccttgtacttccaagttgaagattatgtctacctcaaaatctcaccaatgaagggtgtatctcgtttcggggtaaaagggaagcttgcaccctggtacattggtccttttcctatccttgaaagatgtggaccagtggcataccgactcctactacccgaaacattgtctgcagtgcacaatgtgttccacgtatcccaattgaagaagtgtcttcgggttccagatcgaaccattcaagtaacggatgttgccttagaaccggacttgacatattcagaacatccaattcgag

SEQ ID NO: 94301 - DNA, 920 bp, Zea Mays
caaaaatcgtctgtgtgtaccaaaaggggaggcatgagaagtcctgctcgaggaagctcacaactcagcctactccatccacctaggaactaccaagatgtacctagacctcaaaaccagatactggtggagagggatgaagaaagagatagcacagtatgtggcctggtgtgacacctgccaacgaatgaatgtcgagcaccaaaaacctgcagacctattgcaacccctcccagtacctgagtggaagtgggaagaaataggcatggattttgtaaccggactaccccggacgcaaaaagggaatgactctatctaggtaataatagatcgcctcaccaaggtagcccatttcattccagtgaaaactacctttgggggagccacccttgcccgaatttatctcaaagagatagtcagactccatggcatcccaaaaaagatagtgtcagacaggggaacccaattcacctccaaattctggacaagccttcagaaagctatgggcaccaagctagatttcagcaccgcttatcaccctcagacagacgggcagacagaaagagtcaacaaagtcctcgaagatctattaagagcatgtgtgctagcgttcgatagaagttgggaatctagtctaccatacgcggagttctcatacaacaacagctatcaggccagcatcaagattcaatgttcgaggcattatatggacgtaaatgccagacccctctcatgtggtccaacgtaggggataaagcactagaaggacctgcctttgtcaaagaggcggaagagaaagttgccctaatccgcaggagattacttgaagctcagagtcggcagaagagttatgcggacaacaagtggagagaactcagatttgaggaaggagacttcgtctacctcaaggtctccctaat

SEQ ID NO: 94302 - DNA, 676 bp, Zea Mays
gaaatcatggtctataagaatgttaatgggaatttagggtgaaagcccattagcaagggtcaatatatacgaaggggttgtcatgcttgtctctctccctaaggttgcgggtgctcaagacactcgtttctcccgctgcacgcgcagtgctaccacaccggtgccgtggtgtttcattcccacatgtgtaaataccgcgaagacgttgttgttgctactgcagcgttgattagcaacggacttgaagaggacgggtgaatgtgtggttggtggtacgcaagaacgttcgactacttccactacatcgatatattcttcttccattacgttgcacgtctagtgtaaaaataaacaatctacgatcctctactcgcatgctatcttggttcgccatggtagatgtgcatgtgctagtctgtagtgtatacgttttatagtatttttacatttgttcccccctttttggcctcttttaaccccatggtatctcataggtgtagcggtgcattttggtgctatcaaatgctactccataactagatatagatataaaaacatttttcggaagtaccataaaacataggatgggacatgagcagatcaagatacaatttgtccctcctacatagcatgagatatatctttggaccccctccatgtagtaggattaagaaat

SEQ ID NO: 94303 - DNA, 411 bp, Zea Mays
ctcacaaagccgaagtcgaagacctaaggaaaaagcttgccgaaatgaatgaagattttgaagttgcaaaaggaaagcaagaaataagtgaatgaacaagttcaagattgcaaaagaatgtggagaagctttgtgaattcaaggagagatgttatgagaaatccttggattgcacaaagaaactgaaagacagttttgcaaaggtgggtgcatactcatcggagcaaaaatttatccgaggcgatcccgaaggagtcgttcaatggatcaacgaagaagttgaagattttgaagaaacactttgcgaccgtggggatttttgtgccttcgccggtgcccaaggggttgcagcggttttggagaaaactggctgtgaacatgttaaaactgtagcccaagcagaagtcatct

SEQ ID NO: 94304 - DNA, 613 bp, Zea Mays
acggaaccgcacatgttttccattccttttccttcaaactcaacagtgacaaaaccccatttgtttcgcatttgatgctgaaatgctatagttgtcgggctgccagtgatgctgtagctatcaaggactttagtacaataacacataggttcttccgaagttacagtagtttatcaactgttgattcgcgctactcatagaaacaagtatcgtttcatgttatgtagaggaattgttcagttctcttttatctttcttgtgataagtgcagagcatattccttggttatggatatgtgtattgggtaactgggcattcacgttttgtatttgttgttgcaaggtccatatggatagtccgactgatctcggtatctctgatatgctgtcgttcattgctgaaaacttttgtgcctgttgttatctctgatagcctgttgttcattgcctgatatttgtttcatatattaaaaggtatctgttgtttccgctattttcattctgtgatatatacttactttttcggtggcgacgatagctctttcttgccaagctaatttgtgtagtggtcatcagcctgtcattaagaggacaaaacatttaaaattattttg

SEQ ID NO: 94305 - DNA, 534 bp, Zea Mays
atgattactagggcatgaacaacaatagcgaccaatctatagggataaactagaatatctagttgtggtcctttgttaagtgtgagacacaatattgtctttaagtacatttaggttatgacttctgtcatatgtgaacttgtttcttatgtcgtaccttgccgagctatatattctaatcgtgctgaacaccgatgggaactttctgtacttcttgcatggactttataatgtttccccgattagatattatatgaaatgatgaactcgttcgttcaatcatgtgcatagatcggaaatggataatacctttgaagaaattgacgaaaatgttctagagggcgtgcactacactcctacaatcaacttggtcgatgacctctctgcctcagccgatccaactcatttcacccaggttttggaacctcgtttctgtaattttccatgtcttctgtgcatttccattttaaacacacacctctaaatgtgtagggagttccagtcgagcttcaatctccccgtccccaagggtcg

SEQ ID NO: 94306 - DNA, 389 bp, Zea Mays
tacagttacaccgacatgcctagtgcactaggacatgggacaccagatagtagaattccttattacgaaaaggactagcaccaacatgtctaatgtgcactagagagagttgtaaaatagaatgagatatggcacccgatatggcactcgatatggcagccaaagagggtcgtagacttgtgcaagagacagtgtactcactagacatatatggtgaggcactcagatatacctataattgtgcacctcgaagcgttatactcaccaaacttgttgagtgagcatcagttaggagcatcatataacggtggctaatttatgaactagccattgaaacatgtagaggacattatgcaggagattagtgtgcaccatacatcttcgatgcc

SEQ ID NO: 94307 - DNA, 467 bp, Zea Mays
cggctggcagccgcctggtgaaactaagccaaagaatttgatgttgcctgcacagcaaacccacatggaaaaaaagtcgacatgcagtgcagtggtggtttggcgatgatctaggcgtgaccagtcatcagctgcccttcgttcgttcatctaccactaccgctgccggtatggatgcacacgagtggtgtcctatggtttgcgagacgttcacaatcgagcccgtccatttgtttattccaaggcggcaatgcaatatgcggcagaagcatctggacaaccggccggccgtgcccatccatcatcagcctcatttccgaaagcttatcccggcgaaaacgaccggacgcccgcggcggcccagccaatcctttttcctttgttcgcgttccttccacctccagcaaccggtggttgcgcaagagaaccgagaacagttgggggtatgtacaacttgagacactagt

SEQ ID NO: 94308 - DNA, 370 bp, Zea Mays
ccccatggagtcgtccgggtcatcggacgacaccacaggggatgccagagcaggggagcggtcatactcggaggagaactcctcctctggccatcactcttttggatgtggatgaagtggagaagaagaaagcaaccgagcaagaacaagtgaggagagcaactagagcaggcgggctatttaaaggagccgggagacgaccgttcgcttcgtacccgttcaccaaacggtcaaaagaattcaatagaggctcaagcctccaagaaatgagtcaggcatctgtcaacatttcacataacacggcaccggatggaatcaaggtcaatcgctcagacgcagcgttacacctccccatcgcatcaggttacta

SEQ ID NO: 94309 - DNA, 394 bp, Zea Mays
gccaaccaccgctcttaggaacgatatagaggcatgccagagaagcttcaacattgtgtgtacttttattggcgctagatacctgattcaagaacacatcgcctgcagagtatggccacttgtgaatgaatgggagatgccgaaggaggctgctgtcgggtctagtcagggcgacttggtctatttaaaatatactttcagatatagaggcgagtttgatgagccaaacaatgaatgattaagcagtattgaggcaaccagtgacgaattgcttggggcctacacaagggccgaagatgatgcaatggcattggtcttcgaaggccgaggcaagaaaagattgaatagagtttttgacgtcattggttttgtataccctgattattgctatccc

SEQ ID NO: 94310 - DNA, 483 bp, Zea Mays
acatgcacaacatgaccaaattaaagaaatgttaaagtacaaactgaaagtaacaagtaaataaaaaggaatcaataaaaatcaagaaaatataccttcaagtttcggcatgaacctgatccaacgtgtcgcatgaactttagcatggcagatccaaaacctctcttaggcttttctccaacactgagtggtctgggaggtatagaatcacagcagttagtgccctcaacaattctcgttaataatgacaagcctttaggtctgttcgactccgatgcctatagcaatttagttcagatcagcagaagaaggatgcaaggaaggcagagaaggcggagcagtgccaacgccacaaggtctgaacttcctggtaagaccagccttctgaaacaatgaatgtacagatccaaaaagaacatgcacatcacgaccaaattaaagaaatagagtacgaaaaacaattctacaacaagagaataaaat

SEQ ID NO: 94311 - DNA, 589 bp, Zea Mays
gtgacgcggtggagaaatatgcagtcgattaaaacttggagatctctgattaggtgcttgtatgcccaaaaccaagacagcagttgcagccggctgggtctttcctttagggtcataaatagagggccaaagagagccagcatgctccatttttcacctgcatgacccccacgtaagggtacaggcacagggaaaacatcagaggtggtcaatcctcctatggacagcaaaccagcacagtaaataagcaggtgagtcatggctgtcaggctgcagattgatctaatccaaaagccccctgggctgtaaaaatcactcctgtgacccccctttttaccagaacgaaattcttgttgttttgcacttatccaaagtcatctggaaacagctagtggaggtagatctttttcgtgagatattttcagactgcctgatctagttcagtcgactacagacccagcttcagcctcctttttctcctatttaaccataagaacagagataccctcccacatcaaacttattcactaaacattggtcttttaatttgttgtagacttccagagtcaataccttacaggtttcgagt

SEQ ID NO: 94312 - DNA, 420 bp, Zea Mays
aaaaactaccctgaactgaactatgctgcaattttgcaaagtgtagaacgaagacggagggtgggggctgcacatggagggccacagcgcaatgctgggcacaaccctcaactacgttgctctgagactgatcggcgagggcccggacagtggtggagatgatggagcagccatggagagaggccgcaactggatcctacagcgcggtggggcaacctatacaacgtcgtggggcaagttctggctaacggtagggacattagtttcttgttgtttattactgttaattttcacagcctagtttaattatggagcttttcaaggtgctcggagtatacgattggtctggtaacaacccgctgccaccagaaatgtggctgttgccctatcacctgcctttccacccaggttcctcctgac

SEQ ID NO: 94313 - DNA, 413 bp, Zea Mays
cgaaataggcccttcaaaaatggctcactccgccgattaactctgtgagacagatcggatgaccaactctcggatgatgaccaactcttcgtagatgaccaactttccgatgatgaccaactctacgagacggaccagatgactaactctccggtgatgactaactctccagtgatgaccaactcttcggtgatgaccaactctcggatgatgaccaactcttcgtagatgaccaactttccgatgatgaccaactctacgagacggaccagatgactaactctccggtgatgactaactctccagtgatgaccaactcttcggtgatgaccaactccgccgaccaactctacgagatggaccagatgaccaactctccagtgatggccaactctccgatgacgaccggtgat

SEQ ID NO: 94314 - DNA, 528 bp, Zea Mays
ggcttctagtatattcatcatgcgatgtttcttctggacccgtctctcccatcagtagccgaagagatttcctttttctgtaagaggctagtcagttccaaccccagaggacttagcggtgcgaacgggaaagactcagtcattaccttcaatatttccgagacctccgcagcagaagacgaagggcttgcaatttgctttggcatatcttgtgtcttcgtcttatcaaaggatttctcagcaagcttccgttttttgggagcagatacttttggcttcggcacagttttctcttctttgaagtctcttggtcttctttgacagatcgaatagcttgcctactcagaataatgacaacccttttcctcgtgactcctccgaccccttcatcaagcctttcgtagttagggtactcaaagttaagagcatccattacatggttcagccttcgttttggccgggtaccgaaggcagcattcattagttgatctttttttcttgtatagttcccaagaatttcgttgcaca

SEQ ID NO: 94315 - DNA, 295 bp, Zea Mays
gaactgctgaagctatggaagggtgtcaagacctatgatgctgtactatggtgtatacatgattatccagcgctggccacgttatctgggcgaacaacaaaagggtattatgcatgtatttattgcgacaagaatcagttgtctctggcaataaggaacaagttatgctacattggacatcgtcgttaccttaaaaggacacattcatggcggaatagcttggatttcaatggtaagcgtgaaaacaaagttgagcctggcaggttcactgtggatgaggtcctacaagagctag

SEQ ID NO: 94316 - DNA, 303 bp, Zea Mays
atattgatgtgtggtgttttacttgagtggacataaacacaatctaaggatgccatgaatagacgggattattggaaacctgttatcacaaaaggtcattagctagcccaataacgtcttcatctactagttgtcctctaataccctctcgtgcgaatacaatgccctcaatatcatagaaacactatttttgtgtggtgttttacttgagtggacataaacaccatctaaggatgccatcaatagacgggattattggaaaccaggtatcacaaaaggtcattagctagcccaataacgtct

SEQ ID NO: 94317 - DNA, 283 bp, Zea Mays
tagagatgaaggtggcatggtggaagtagggccatgaatcacaggagtggacggaggtgtggtgacatcagcgttggtttaaaaaggatgaaggcacaaaaaggatgtgggctccataggttagtatgggggcttagtagaggggttataaaagaaaggaaaatccttaggtcacatcatgcgaaatacatattcgacgagatagttgaggcattagacaaactagatagcacaacataggcagagtggcatcacgctgatgccagatagctagacatggcag

SEQ ID NO: 94318 - DNA, 450 bp, Zea Mays
gttgctagtgtacaagggttacagacgagctgtgggcagtggagggtgagttctctagttgatctagttgtggcgtggttgctatgggaaagctagtgagctatgaggcgacgatgggatgtgacgagctgagagatatgagccgagatgagatcgtaggggcacctcctcgaccttatatagacgatcagagggttatcccttataagtcgtgatgactataactctacttgaatcctcattttaatgcggcatgcattcttacttatctagatttcagttgcccttcatctgagtcatctccgagtatctagcacttctggtatgctcaaccttcttgcccgaggcatcaacgcatgactcggtcgtccggtcttcacctcccctggtcgagctcatccagcttggtagcggccctagggcatgccttgctaagcaagtcatcgggag

SEQ ID NO: 94319 - DNA, 312 bp, Zea Mays
gcacaacccgtggtgtagtgccctgcgggaggtctgcgtactcaggcctagtccgataggacataagtgtgctataagccgagtggtgcttgggccattaatgcaccacagtctgaggggctcataggtcatgagtgctctgcagactgatgtgctcgtaggtcatgagtgggaagtggaccgccgccgcgctgtggctcggtcccagcgtggttaaatgcgatcaactatttatggcgagtcaatctagaccggacgcgggatccactcgaatagttcccttccgacatgcccgacttttcctgacaggtt

SEQ ID NO: 94320 - DNA, 409 bp, Zea Mays
atattctgcagtgtctttgattgcttcactgtacatgctatagtagcattactgccacatgctaggtagttcttattttgtgacatccaaaattaagcatgcacaacactctagatataatatttgctgagaactgcaacaactttgtcttcaatggtgcaaatccagtatctcaatggtgctgcgaagtcacaattcacaaatgaatgcatccttcgctatactgctggagtagaaggcctccaggagttccttgccagttccattaggctagtgcagtagtgctcttgacttatggtcatcttgggtgtgtattttggggttttctataatcccttttgcactctcttctttcttaatcgaatgatatgcaattttcttgcatgttcgagaaaaaaaatatatttgc

SEQ ID NO: 94321 - DNA, 394 bp, Zea Mays
catcaaggtaagatagaggtgataagggtaaatgtgataatgatgaaaagcataatccatggacagagtcaaggcaagactcaccaaatggcaaggtggagaaaacaatcaaggataagataagtgaggttccgacagaagagttgaagtaaaaattcaccactgaaggaagttacaaggaaacagcgagattaccacaggtgtgtgaaatgaaatgatcactcatggatcattaataaacaagggtggtcaagaacatgtaagttgaaatgtcttaaacaaatactgggggtatgaagataagcatatataaaaataagagtatgcaagattccaatggtacgagcataccaagaccaagaaagtacaaattgccaaaaagatagcgacttaa

SEQ ID NO: 94322 - DNA, 692 bp, Zea Mays
gggttttcactgcctggaacctgccatatgaaacgccctgtgcaaatatttctcgcgcgtgaagttgatggactcaattcgttgctcgccgagggggacttcaccatggagctcgaacgggtggggatcgccgggcggatcggacccctggtcggcggatacctccactagcggggagcaaccattgctccgtctacctcgcgaagggaagatgatggaggatcgttggatgcgccatcaaggattgaggtaagaggattgttatcggccgtggatcagaaatccaaaggctagaatggtttaatgcgggagagagattttggaccgtggatcttggatcctgtggtgcctaccgtgtattgcttcatgatctattctgagcctttggatcgggatcggatggctggcgatcgaagataccccttcgtcgtggcctaattgctaaagagccctctggtttttgaaaaacaaacctgtcgtccaccgcgggttaaagctgtgtctgggaaaatttatatcttagcccctaacctttctggaatttgacgcccggtccagtgaaccaagaaaatagtaaaaataatatagtaaatactttttagtacataaataaacctagaaactcaataaattcatagaaaattcattttaaattctttttggtccattcttgtggcattaattttgtatta

SEQ ID NO: 94323 - DNA, 728 bp, Zea Mays
gtcgccactctgtgtgatgagttatgcaagctgaacatggaagttgtttcctcaggtaccttgaattatatctcggtggagcccaccttacataagcagataatcatggcccagattggtgacaagggtgttcaagtcattaaagatatgctcgaacaaaaggtggataagtacaaatgctttcgttaggacagcaagggagttctatggtttgaagaccgatcggttgttcctaagaatcccaaactcaggaagaaaatattggatgaagctcatctttccaaattttccatgcaccccggcagtaacaagatgtatcatgatctcagatccttgtattggtggaccagactgaagagggaaattgctaagtatgtatctaaatgcgacacttgccaaagaatcaaggctagtcatttgaaggtagcaggtaccttacaacctcttcccataccatcttggaaatgggaggatatttgcatggattttaatgtgggattgcccaacacattccgacaccacgattctatttgggtcattgttgatagactgaccaaaacagctcatttcttgccagtacataccacccacagggcagaaaagtatgcagagatctatattgaccaaatagtgcatttgcatggaataccgaggaccattgtgtcagaaaggggagcaccgttcgtagcacgtttttgggagcagctgcaagagtcactgggaactca

SEQ ID NO: 94324 - DNA, 372 bp, Zea Mays
gccgatttccgaagcaatgaagcgttctgggctggtttcatcagaggacacacctgttgccgaagcaacacaagctaatgttgaagaagctggttccgaagatgagtacagctgtggggcgccaagtaaacctagtcatctggactttggaaagtccaccatctctgaatctgatcttcctaaaatggtgaagctgggttatttcagtgaggccaagaaaaaattaattcattttggtggagaagaaactatcccaaagccaggaaaagatgaggtagtagtcttcaaaagtttcctgaaagctggtttaagattccccctaaacaagatgattgctattgtactgaagaagtttggggtttaccttcatca

SEQ ID NO: 94325 - DNA, 422 bp, Zea Mays
caatcggtggaagatggcggttgagctgctggaattatttgcatccttggactggtcatctgctgaacaaacatcgcactcgccaattgctacatcaattctggaggaggattcgatagcatttgagacatctggtctttgaactctttcttagcctcctccttaaaataattgacatttgttccttgtatcgatcacatttcttgtacagaccttcccactatggtccaaagccttccttccatccttccttagacaagattcctcgtacatgaccaggatgctgagggttaccgagaccagccattaggatgtttctctccctttgtggcttaaatgttcattggctctgcttagctgccattgcatatatgttttttgccgcttcttcgatagtgggatcatcaaaagatacactaacc

SEQ ID NO: 94326 - DNA, 548 bp, Zea Mays
acccaacctaactggcgcaccaactatcatcgtgtgatagtgagggatagaggaaatgtacctcgtttaggtttggtagggttctaggcgcaccacaatatcacctaccacaaccagttggcccagtccgaaaaacataggagtgaacacgacaaacacaagggaaccacgagggagacaattaaaggacatagataggttccgaccaccagagcataagcgtggaaaggacatagataggttcaagggaaacacatagatacatcctctttgaggcggattgtattgcttggaaatagctaagtgccacaaagatggctaccagacctaagcgtagaaagcatgaaaaatggatccccgtgtagggggtcaccctctcctttttatagaccaagatagagagggttacaactaactactgggctaggaagccagcatgacccgtcctattttaatggagatattgttgacatcagtatgaggtcctatagaggcatgcccctgcacgtcacagatgacagggtcagtgcaaggcgtgcacacatcgc

SEQ ID NO: 94327 - DNA, 1293 bp, Zea Mays
gattcttcaaaccaaacactctctaaatgtttggtgattcttcaaagaattgactatgatgcaacattaacaacaaggtgttttgttcccatgcaaagttggggtagtctagaaatgaaatcaacaagggactaaaaacaaacaaataaaaaattgacacaattttctcatacatttgcagagttgaaaattgattcaacgtatgaaacacatttatctggctaacctgcagttcccagcattgatcgcatcacagaaggaccaaaaatctttatatgtgtggtttcttggatcttgatccatccgaacccaaaaatagaaggaatctccatgcttttgagattgaacagcttctaagattgcaaattcggcattgtttgataagtttgcctgttgagggaaacagctactcagtacaaataaggtgttaattgttctggaagacaatgtggatagttctcacggcattcaatgcacatgtttcttacaaaggaacactttcctaatcatgttttcaatccgattcatgaaatccatggtacccaacaaaaaagatttttttaaaaaagaaagggctccatagcatatatgggcatgactggtttgttggtctttgttcgtttcttagattgttttcagtgattagtgctgtactgttagtccctctttaggggtcctcttcttattataatgatactctgctctcctgtgtgttcgaggaaaagaaaaggaaaacaaacatacttggccattacctttcttgctgtacctctccaggactgaaaccctatccaagaatttttgtgtattcggtcaattctgttggcaagagcaaagaaagctccaaattcaccaagaatatctctgtagtaaacattgttgagaagtggaagacgagaagaagcatcaatatcatctgctcctggtcttcgaccttttgaagactaatgaaaaaagagaagtaaattatcaacattatccatcaacatatttgcaaagttacaccatatgttgttcttgttagtgccacatccattccactagtagagtaattatgctcgttttagtcttagcaactattttgcccaaacataaccagctatcagtaactatgtcaaattaagtaaaggtaaaatatctagcgcaaatcaaatgttggatgctaaatcatgaattcaccaattggattctcggatgtagtttggatggatcaagttttgaaagggatagtggacaccatataagagcgatggattccaccaccaatgattcagaaatcaggtggcattctac

SEQ ID NO: 94328 - DNA, 423 bp, Zea Mays
cctaggtattttatcataggccttttccaagtcgataaaaaccatgtgcaagtccttcttctgctccttatatcgccccatgacctgtcttattaagaaaattgcttccatggttgaccttccaggcatgaatccaaattggttcatggtgacatgcgtcattcctctcaggcgatgctcaataactctctcccataacttcatagtgtggctcatgagcttaatccctcgatagttgatacaattttgaatatctcccttgttcttaaagattggcactaatgtactcctcctctactcatcaggcatcttgtttgatctaaaaatatggttgaacaacttggttagccaaatgatagcaatatatttaaggcatttccacacctctattgggataccatctgggcccattgtcttgccccg

SEQ ID NO: 94329 - DNA, 371 bp, Zea Mays
ctcctttaccatgtagattgccacccataaatattttattggccgacataacatctgcaagagaacaatctcaatgtatggcacgtccaagcttagatcaaacttgcaggtgaatccattcaatgatcagaaaggcaacaattggactatgtggcttattgtgtaggcatacctcatcttctttcgacaattatctccttcgaaaatgagcttgcttggtattgatgaattgaagtagcatctagaacttcttgtttagggtttgttcggttagaagtgaattgaaggagattacatcccttgctagacaaaattaaatggaaagagatttaatctccctcaatcctgttctactcccatgctcaatctca

SEQ ID NO: 94330 - DNA, 378 bp, Zea Mays
caataaggaatgaaatagggagataatcagttattttgttgcagacctaaaaccacccttttttaataaaaaatagagaccgagaatggaaaaggttatttgttccggcctttttagtgtgttttcctttctggcagctaatcgatctagtttttatgatttgtaaacatggatttattattattggtttccggcagcatcagtgaagttggcagtgcctgcatgcgatgatttccattcgcttttcttttcttttctcgtgcagaaaaatattcctgaaactccactgggctttcgtgcatctctcccatatgccatgtctacaggctagcgcgttacttcacaagtactctctgattagttgctgtaaagtttagc

SEQ ID NO: 94331 - DNA, 1804 bp, Zea Mays
ctggccgcccgcccgcccacgcatctcaaccgcctcccgacgctttctcttccatgcgcgcgtcttggtcagagacaggtgcgagacacgccttcttggctttcccgcttgcaagctactgctacatttttattttctcttgggggagcggccatggcttccacgcctccacaggagtaaacgacccagcaacacgtcaaagctttttacaatgttcggcaacaaccgaagctaagcctaagctagagctcgaatcatgacgcacagaatacattgattctagatctgtgccgtccaatgttgtccacaatactggagattctgaccacagcatataaaaaaagatatgtgttctttattattcttattattatttcttgggtgcaggcagatgcaggtgcgcgtgcccaagtcaacatttccttctacttctaccattcgccgactccttgtgccatccggcctaacctcttgtgatgctcaaagtaaaagcatctgtgaccttgatttcagctcactattctttgttgctaatcaatgtgttggtgtttgactcttctacacacttcacactagcaaaccccaggccgtctctaaggacaaatctagctagtctggtgcagccaaaaggaatcttcgtgttctacactccacaaagaccacaaaaagtgtcatctttttcttccttttcttggtcgacgaaaggaggaggaggaatgagctcataggaggcaacaagtgatgaggggtttaggattcgtgttgctgttggtggcagctgcagcattgatcaggccatcagaagtagtaggggcagaggaggaggactgggagcttttcttgttgcagtggaggcagcataattctcttccatccccacttctcaatggggatctggtaagtcatccagacactattgtttatagcatctgagagcgactgattcatggaatgcctgcttcctttgtgcccgggatctgccagaaatttgcaatgcgaattccttttgtgttctcgaaaatttgaaattagctgctgacctgctacttaaaataaaaaaggtcctgaattcaccaagtacttcacttaccaaactaatgcagggacagcttttcagaatttgtcagtttgtttttccctgtattctgggtacttttggttggagtattgctattgaactcttttcttctgcaagatccaagaaagtgaggcattagcaaaggtagactgatgtaggatggttcttggatggatgcaggtggatagaatatggtcaatttgcttaccagacatggccggtgcacaggaaatattgggcaatccactgcaatttgcttcagatcagctattgagtcagccatcagaaaatgctttgaaggcaatgctgtttctggagtttctgtctcttctttcccctgaaaaattatccagtacctatggttgcatccatgcaaactacttcggtttgggcattccacaagaactcagtgtttcactggcaacctaccttgagagccatcagctgttgcttggttcgaacttctatgcgagacggcatttggctgacaactcaattggagatgctccttccatggctccagattttgcgccgtccatgtcctctggcgatgacgtgaagcttcctcagtctgttacagaaacaccgtatgcaccttccagctcttacaacaatgaaaatccaaaccgacctcatcacagtaaacctgcacagaagcatcggggagtacctccaatttcacttctggagaagcataaagactatgttagattagtcttgatcgtg

SEQ ID NO: 94332 - DNA, 336 bp, Zea Mays
agtggttctaaaatattttctaagattgatttgcgcagtggataccaccaaattagaatgaaattaggcgatgaatggaaaactgcttttaaaactaagttcggcttgtatgagtggttagtgatgccttttggattaactaatgcccctagtacttttatgcgtttgatgaacgaggttttgcgcccatttattggaaaatttgtggtggtttattttgatgatatcttgatctacagcacttgtttatctgaacatcttgaccatctacgtgctgtttttgatgctttgcgcgccgcgcgcttatttgctaaccttgacaaatgcacctttttg

SEQ ID NO: 94333 - DNA, 572 bp, Zea Mays
aaagagtgttaaaaatgcctattgagaatagtctaagggcatgtttaggagtaagtggaatagagtggattggaggggaataacaaggggatttttgctcctctaatccctttcatcccatggctcccatccaagcccttaagtggctaggtcaagagataatgactgtcatggtttgctaagtaggggagtagccacatgtaataaatttgctatccaaaacaactccagaaggaaaaggcaccttaggattacctgtggatgtcttcaatagcctcacatcgttagtcgctcgaggtggcacttcttataatagaacatgttttcttgagcttggttggttgtatataaagttacaatactcaccttacatttagaaaagctctatttataaggtctcaagaggcaaatagtcattgtaccattatggtacagacctttaggtcatcaagccatatcaccagggtccaatgactcgagagcatgccatgtgtatctagccatttgcatgttaccattatggcccatgcggctatattagtgtatggttcgatgcattttgtctaacgata

SEQ ID NO: 94334 - DNA, 323 bp, Zea Mays
cccatgaatctgtcgtttacgttccttttcttattcgtggtcttgctcttcccgtctccccctttttccgcggtcttcttgatttctatgagttgaacttgacgcatatgaaccctaattccattctacaaatttccattttcatacatctgtgcgaggcctttctcgggattctcccccatttcggtctctagaaatacctttatcattgccggcccgagatggctgggggacagcaccagcttgttggtagcgcaagtctggagcttcgccgggggaggaaagcatagtacctcgacattcctctcaaggacagcatcaag

SEQ ID NO: 94335 - DNA, 319 bp, Zea Mays
ctcttgtaatagctcaataagttcctgttcagggcctctattgtgaaaggtcctcaaagcattgcattatcaatcaaacatgtttttaggcactaccaaaagatagcgaagctaaccttcttctgaagctacacgtgaggaaaggatgaatctagggagcttcagtcctatgaacatgactgacggacaggaacgaaggagagaacgaacttcgaccatgtggtattatcacacagagcagaagtagacgagaagaatccataaggttggccagcgccacacgaggaaagaaaggacaatgttacccctacaaaaagtt

SEQ ID NO: 94336 - DNA, 434 bp, Zea Mays
ttcatatttagaaaaattgatccaatcacatgaaaatatacatgtatttatcaatcagccaacatggcagtttttaaggtcgcctaacctatcagcattagtccaacacttggttgttggtcgatctgatggtcatgacttcattgtagtgatgtgataagtgctagtggagatcttggagtgtttcaaataagagttggttagcatttggccagtctctcttggcattctaacctattgaacacctttttgaacctaagcaaacacctccctcatcacatctttttgtctattgattgatccaatataagattgggagtgattctagtgaatttttattgagttattgcatttagtggccctagtgattgagttgagctacaatattattattactcttgatggttgccaccacctaggcaactttaaggcag

SEQ ID NO: 94337 - DNA, 489 bp, Zea Mays
tatccctggattctttaatactgttgtttcaatacctacctctaataaaaactctgctggctatttaaacatttcagtttatatgtccatgatcttactgtcttttgaaaccctttcctatcctattgttaagtcgctatctttttggcaatttgtactctattggtcttggtatgctcgtaccattggaatcttgcatacttttatttctatatatgcttacctttatatcccaatatctatttgagacatttcagttaacatgcccttgaccacctttatttctcgatgaaccgtgagcggtcattttatttcacacattcctgctaatctcattgttccttataacatccctcggtaatgaacttctttacttcgatcgtcctgatggaaccttacttatcttgtccttgattgttttctccacttcgtcactttgcgagtcttgccttaactctatccttagattatgcttttcatcattatcac

SEQ ID NO: 94338 - DNA, 403 bp, Zea Mays
atggcgtctccgccgtgggctggtgcagcgccgccgccctggtggtcgtaaggagggagaagaacttgtgccgttggatcagtttccagcggatgagattagaatcggtatagcgatttggtgaaatcaatctggtgcctagatctaagatcgggcggtctgaagtgggtgaatcaataattaaatctggaccgttcatttataatcggacgactgtggactcaagataccccttcgccgttgcaagttcacgaaagagaccctggaaaaactgtgaatcaacccgcagttcacataacagtactctgtgtcttgggaattcttgcgcagaagaccctgtcttttccagcatttgacgcccagtccagagacataggaaattgaataaattaatacagaaaaa

SEQ ID NO: 94339 - DNA, 481 bp, Zea Mays
gagagtttcaagccaatccatgctgtgccagcacgtaccttgtaatactaatgcttctctcgtataacataaaacaaccagactttctaacaataaaggggaataaacatacataagactttggccttggaaacaaatttggtgtgaaacaccgcaggaaaaataaaacaatcaggcctagtattatttaaaagaaccagtaaatgttctcactgaactagctatggaatttctagttcacaaaccaacaagtgcatcatgcacctccctttattcaaaactggaaccccataaggaaacaaactattgttaccaatattttatttttcaaactaatgtagtgctgtcaagtcccttttgaatattatgttgttaatatagtttattactgagcgaaaaatactttgctgctataataccaccacactttcttctacacaaaaacagacacactcaagttttcacacaccaatttgttgca

SEQ ID NO: 94340 - DNA, 448 bp, Zea Mays
ttcaccccccctcgccaccggtgaccttgcgcctagattcacgccggcgtcgtgattcacgcccggtcgaacacggataacactcctcagtaaaaaaatcgggcaccgtggatgagcttgagaccctattccgcccagccatcgtgtctgcttgactcacgaccagttcagataagctcaccggagatggatgcctgccaatcggatgccacgtgccttgaagcttcatgcgtcgtagtaaaccgctccatattgctagctcgtcgccggtaagcctgccacggtgaaagacacatagctcttgcgccagtgacctcttccttctccggctgccaccgtgccatcccaaattcacaggccaccaccccagagcctataaattgagtgtgttgtcaggttcataaggtagtcaagcacccaatccaccaagccgtgcctctaattgctc

SEQ ID NO: 94341 - DNA, 789 bp, Zea Mays
gaacaacaacacctacttagacagtaagatcttcaaattaatcaatggtgtggttgtaagtattctaaacctttttcattttgagaataccatgcataagttgtttattgcaaattttatatgccttgatcaagatgtacaatgcattcccatatttgtctttaaaggagagtgcatctaaccaagtcattcaaatacttgatgcacatctttgggggagcccatttctatatcttgattatgttgagactaacactttctcttagtaatcttatgtagtctcaagtatgagaataagtttctcatgaagtatactactacaactcaatccaatttggtaaagaagtatcacttttatccaggattgcaactttcattattcaagtagcataatcactagattctcctgttataagcttatttgataacctagtgcatatgatttgatcacatctgttatacttttgatcattgaatagcttcaattgatacttatgttgcttagtgcttcatgtactatcaattgatgtctcttgtgtatatgcactaagttaaaaggagagtttaggataaatttatgcaatttttgatatacttgatatgtgataataatgatttgtttaaagaaaaggataactagttgtagaattctctctcgtgcaaaaataattctatacattgtcttgagcataggacttaagtaaccaagactaaggacaaagcacaatgatgagagagtctccatgtaaaggtacaaaagggtaaacttgtacatatattgcatatctt

SEQ ID NO: 94342 - DNA, 532 bp, Zea Mays
gtcatcgccggccatggctccgccatgggggctatccatcccgccgcgttcctgactggggagatgagcgagggggatcgcgcctggccgttggatatggggtaggtgggtgagattagaggagggaggtcaaagttataccagccgcagaattcctgatctacggctcgtatcagctctggcgtggtgacgagattagtgggcactggaccattgatctggtgtcgtgcggccgtgatcagatcgtaggatggttgatttgggtcggtatctgtgccgtaggttgtgagatggtcggcacagatctaatctcgcttcgtaaaatcctggctgacgattgttgatccggtggacagcatggtgtaccggttcgtttataagattaggatgatctgcgccgtgagcttctgttccaacggttgtgatccgagaataccccttcagtcagataacacatgcatatgggcccctcggttttataatattgaacccgccatcctagccgtgggaaagctcttgtactggggtccct

SEQ ID NO: 94343 - DNA, 278 bp, Zea Mays
cgaagagcaggtttctaaagaaccttaacaaacaaacccacgccatgaaagcaagccataaccttctcttcaccctggaggactccgacccgaatcttgggacgagattccttaagggggaaggctgtaacaccccagtgttacttaggggttttcccagtaccccatcttgtgaccattatcacatgtggctttataaggcaagagacaccgaaactttagggattaaaagcctaagttaagtctttttgaactcaagaaacatactctaaatacat

SEQ ID NO: 94344 - DNA, 718 bp, Zea Mays
aaagcaagtgccacattcatcgttacaaaacagatcgttgatttacgctaaaattcgtattcatttacgttgtttcggatcacgttttacgcttaaatccacctgagctagaacccgagcacgatcggagcgcacgattttcacgccgtaatttaggctccattcgttgttacgaaatagattgatgatgtacgctaaaatttgtacccatttacgctattttggtcacgttttacgttgaaatctgaccgagccagaatccttgcacgatcgaacgtgtgcaattttcacgccgtaattttcgggccctaatcgctgttacgaaacaggtctataatttatgtaaatttcgtattcatttacactatttcggttcgtgttttatgattaaatccactcgagccagaaccctagcacgatcggagcgcgtgtttttcgcgccgtaatttgagcctcattcgtcgttacgaaacagatcgacgatttacgtggtaaccgtcccacatttatcgtgaacttataacactactttcctaatttgaaaccaactcagatctacgcacacactggtcatgtgtatacaatagcataaatggtctgacgtcgcgatattgcatggtttatactgttacgtttcatgttcttatgcagtcgtaaacactgaacaaacttgtaaagccatcccacgtgatttgcacgtcagcagatttttttgcaa

SEQ ID NO: 94345 - DNA, 478 bp, Zea Mays
cttcggttgttatggattcatttctcgttctaatgcaagctacccggttccaacatttcggaaaaggtggcccgggtcctggatggaggaatggttttatgtcaagaataatctgattgaaagggaggacataaaggggattatccaatgccccatctggtctcacttcggccttcgaaggccgaccgtggcgattgaaaatgatgccgaagcatgccaaaaggctttcagcaatgtctgtgctttcattggtacaagagaccttatctaagagcacatagcctacagggtatggccacttgtggataactgggagatgccaaaggagactgttgtcgggtccagtcaaggtagattaattcatttaaaatataccttcagatacagagaccggtttgacgaaccaaatgacgactgactgaaatgtattgaggctactagcgacgagttacttggggcatataccagagccgaagat

SEQ ID NO: 94346 - DNA, 309 bp, Zea Mays
gttggcgatagtggtcccaataaatctagtccccatctctacaatggccaagtgggttgaattagttgtgttagagatgatgattgcttttgatccctggcacacttttgacaattctcacatttttgcaccaggtctgctgcatccgatgcagccttcgatcagtagaaaccatgtctaaagaccttgcctaggagtggcctagacccagtatgagctccacatattcctgagtgtatttctttctcaacttttgaccttcggttctggataagcatttcagcagtggggagcagaccccttgtttaa

SEQ ID NO: 94347 - DNA, 856 bp, Zea Mays
cgtcgtcctgctacaccgcctgctgctggacaaggtcatcctgctgcgccgcctgctgtgcctcgtcctgctctgcctcgtctgccatcctgctcctcctccccctcctcctcagccaattaccgcccaccatatttgtccaaaaacctgcaattaagagtaaacaaataagcacatataaaaagatgtatttaaaaacaggtgcgaaataaaaagtcatatagcattacatcgattaaaaataatcttcatatgtgtcggagttagccggatcataactctcatcatcactatcaaccatttcaatctcaacaccatcgaaagacgcaagttcgtcattaatgtcattgccttcaaggattactaagtcattatcattttgcaccttatcattctcctcatcaacaaccatttcaatatctacgtccatttcgatagcttcggttaagtctatctcaaatcgcccttctagcccatcttcttggaagaactctccatcatatgtgtccgggtctaagttgtattctttatcgttaggaacaggtaacctcccgtgcggcaataccttatacacaacatcccaacccttaagatgttctttcatttggcacgcatatggaagataatacacttgtgtggcctgttgggccacgatatagacatcgtctcctggtaaggtggaatcttgtcgaatttcgactatcccaagattagaatgtgtctgtctcgtcacttgagggtcaaaccaatgacatttgaatatcactggagtaaaaggtttggaaccataaaaattgagctcatatatttcttcgattcgtccaaaataatcgacatcgtcaaggccgggcgtaaa

SEQ ID NO: 94348 - DNA, 284 bp, Zea Mays
cgcggaagtaacgtcatttgaaaatgtgcaggctggtctataggtcagtgacagcaacgtactggttttgatgctgccatggtcacggatgtacgtacgcttgctgctgctcgcaggcccggtcgctgtcgacatcatctcgccacaaagaattgaacctgaaaatgaaagcaggggtttgcttttgtgatgtgaaagaaccgaagcgtttctattgtattctgctggcgtttcgcatggaagcaccgtgcaaacaactgagtggccagtctctgcactgcaca

SEQ ID NO: 94349 - DNA, 336 bp, Zea Mays
gatggtgggtttagaaggaacaaacctggttagcgagtgagatggagtgatattgcatctgtgggctttgcctgatgtcacctagttttgggtgctagaaatgaactttttggatgcaagcatcaacattgtttgcattgcagccatcactcccatcaagcattctagctcagactaatgagattgttctatagaaacatcacctttattattaacaattacaaaaagaaggcagctatttaagagggttcattttagtcgtgtaggctcttcttgttctagcagatcagcaagatgtcatattagagaaattgttgtataactgcaagaaggaaa

SEQ ID NO: 94350 - DNA, 1767 bp, Zea Mays
ctaccctcctcctccgccggggcaggtacgttgggtttaccctgtatgggtttcgaatttccgccgatgcattgacgttcttgttggggggcaatatgtagctggttttgtactagggattgtgagtaggtgtggctttgagtgttaggttagttgtaaggggattccactcctagtgcccagcacaatgggcatgtggttgttcgggtgtaagcttatgcttccattctactcaattgttgtatgccttaatggctgggcacagtttgacattgatatgattgtacacaacggtagatgggatgattttgctataatgctatcagtttttcacctttttcatggtttcactggtactattgatctggatctcaacttttcatctttgattgaggtgaccttcatttgtttcattgctctaaactttcacggaacatgaagttcattgctgggtgttgcttattttgcaggcttggaccaatcactcatgggctcagaatcatggatatcaaggtttactcttatatgtacctctgtttctttcatatataattttgcaaatcacgacgagtttagtttgatatgctatgttgtggaatttctactaaacattctatcctaatgcttattgacgtgggagtttttttttgctaaagattctattatacacacatttcaaccttgtttgtgaaaacacaatatctcaatactggtgtataacacatttctgaaactgcaaatatatatccatcgtggccatgttaatactggtgttgttattcaagtttaatcttagttggaaatttctttgcaccacttgattgtggtgctactgctatctgtcatgtattagtgactacacaggagatgtttactttaaaatatttagcctaacagatttactgtcgtgtaattcgctttctgtatacaaatctcttgagaactatttgttgataaatcactattaagtgattggttttgcatactcttgacgtgactgttattttcttatcttattatgagtgctttcttacataataagttcttggtagtttttggtgcgatactttgtttttatactggactaaaacgttttcttgtttgtcgatggaccagttgttcatttggggggccttgtcattaaatctatttaggctactctcaatgaaataaactttaaacatagcgtaagatttactatagtcaatcaactttagagagacttctgaagcagaataaatttcttgcgccgataaatcaattgttagtatgacgatagtttctctatttccttaaaaattaaataatggaaggtcatgacaatgaggaagattgggctacaaaggctaaggcatgggttgctgctaaatctgttatgggaaaccaccagattcaacagcatgccatatccacaagtagaactgaaggtcatcataatggttaccatgatcagtatcagcaaccagctggtctgccaacagaagttacagaagctttgcacccaccagtacctcaatcaagtattgatcatgtgccatttccaatgacaggtcaacagagagaaacaaaccatttattaggtaaagtatcttattgcccttgatctatatattttacttatggatgtgtaagtttcagaatggagctgaagattatattgcagatagaggtccaatggtgtctccagcaaagaattttggttcattttcgtccacctatgagcaggaggtatcttataattattcttctgctccaggtatgccttgc

SEQ ID NO: 94351 - DNA, 814 bp, Zea Mays
cgcgccaatgccccaatcctcaaatcccgatggctctacgtgtagaggagaccaaggcgaactccatggaagttatcttacccgagatccttgcggcagtgaagctttcatcggcccgcggtggacacgacaacatcgagggattccagtgagcaatttttttgtcgtcccgatggtcgatcctttccattgggcccccagtcgacaccaccacccacaagcgatgctccccggcctgaccacttgcatagagcgatagtgcggcaagttaccagggcactagcacacgatttctctctttcccttccaactctgcacgccatggctgctggattagcacaggggttcgcggcgacctgcacttatatagcccagcatcgtcccggccctccgaaacacgcgcgtagagatcaggcggaaaccgcaggatccactagagtttgttacggagtccgtttcctgtagaggagctcgtcgcgttggttggggatgagggagacacagctgaccactgggtcccatcgggcggtgtcacacccgaagcacactggggaaatgagcgcatgacaccatggcccacatgtaagcgccagaactaaagaaaaggggaggggaaggagatgggctgtgcggcgtggatgaagggtgaaatgggccgagggtgccagaatcaacccaggtgcgttttctcctttttttgtttttatttttcttttataatttctgttttaaataaaaattcaaaccgaattcgaatttggttttaatctctaggttctaatcatcaaaccaaattctaacacatctactactt

SEQ ID NO: 94352 - DNA, 414 bp, Zea Mays
cgtcgactaactgtttataaaactagcctatccttcgtactatcactttcgccacatcatgcatacggaaagccaatttaagcacacttcctcatgcacaaatgttacactgatttcaattatcacggatgtcactaacacaatacgacgcgtctactactcatttataacaaagtcatactctatgcgcaaggaggcctttcaacaaactttaaatggtgcattcctatgaccactatatttggcatacatacgcccatcaaaaatatatatacccagcataccaacctacgagttttaaatctattcgccacatcaaacaacgcaactcgtcggttctccaattctcgtaggcatccacgcatacaactcatcgacttgccgatcacaaacacacaagtactcagttctcct

SEQ ID NO: 94353 - DNA, 289 bp, Zea Mays
ggtggtgatccggctctggtgggtggcgcgagctacaacccagcccccgagggtgtccaagtgagctctccttcccacacctccatggacgtccacgtcgggtcgtctccaccacgatctgagggagtgatatcaatgcatgcttctttaacttcgagcgagcgagtcgccttggaggttggcgagccggatgccagaattctgatatctgctagtggggctaaatcaactcccgacgatgctcttcaaattgttccagttgatcttcctttgtcgagctacaacgcag

SEQ ID NO: 94354 - DNA, 301 bp, Zea Mays
cttgtgtggacatgatgcaatgaagtggtctggtttcttacacttgaagcatctccttttgcctcttccctttttgtgcttggagcacatggagagattgtcaccaaacacaacatgattaattgaacttttgccttttaccttgttcatgttgcttgcttcatttattgctttaggaacttgcttcttgtggagattgacacttgctatagtttctcccttcttaagcttcttcaccacacatccatgaatatcttgaggaggttgagcatgatgtcttctccttagttgtctcattttc

SEQ ID NO: 94355 - DNA, 541 bp, Zea Mays
cgtcgatgtcggttaccatatgattgtgtttgcagccatccctcaatgtcatctgcttcgtcgcgtgtatattattgttctctccgattaccatgacaggtcgtcggaggctgacgtgcaggcgtctctagcaaagcagctcacccacatcgaggttgtcgtggtcatggcggtcagagccgtgtcgggcaccgtagtcgatgggctcatgggcacacttacgccgaccgacagggccaattcttcgcataatcatttcacagactaaactgccattcagaaacacatcattttaattaatattattataaatttgtttagaaccttaggaaattattacctattttttaatgaggcgttgtttataacgtctaatatgaaatacgaacagggtttacaacatctttttgttgagatgataaatttttagtttacctcggaaacaagcaaccactgtctttattcaagaacaaaaacgaaatattttttattctatgcaatagaggacatttttctttatgagcgacaagcaaatgctctt

SEQ ID NO: 94356 - DNA, 302 bp, Zea Mays
tgcttctggagttttcgtttgatatcactgctgtcataattttaaagatatgaaattgtcaagcagcgccgctgcagtttggtgggtgatggggagagttatcgctcgcgacgggtttggaattgtgcataggtgcagcgttgtttatgagcgtttgttatgtagatttgtgcactaagatgtgtgtcaaaaacaggtggtagacttccaaatcgtacttagggctttttctaaattctcggtgaagacaagtaaaatagtgatggttgataccgttggtcgatttatgagtcctgttcttg

SEQ ID NO: 94357 - DNA, 441 bp, Zea Mays
gctcgcctaaaaattctgaatggcccaataaagtgaggggataattttcctttgactttaaatctcttcattcacgaagtggtgacaccttgaggtacacatgattaccttcctcaaactccagtggtctccttctattattagcatagctcttttgcctggtttgagctaccctcatgttctcccgaattatacggacttgttcttctgcctcttgaataagttcaggcccaaagaactgtctttctccagtctgatcccaatatagaggagttctgcacttcctgccatataaagcttcaaatggtgacatcttcagactggcctggtaactattattgtatgagaattctacatatggtagacttttatcccaactgcctccatgctaaagagcacaagctctcaacatatcttccaatacttgattagtccttttag

SEQ ID NO: 94358 - DNA, 708 bp, Zea Mays
gtcggccgacttcaccctctccgtcgtcttcttgatttggatagcaagcactgtcatcgtccagcctcttcctcaaccctcccttgatgatccttcgcctctgcgtgccctcgacgctttgtcccaggttttgtgcaaacccaaccacgtcgttgtattcgtgtttggaccactccggtgccaacgtcatatacctcctagtcgtcggcgtcgcgttcacgtcatgcttctcccatctatcgtcgatgacttcacccttgcgtgtgcgtgccttcgctctctatcctaatgccatgcgcgctagagctttcccccatgtaccgtgactgctgctgtgctgccccgtctcgtgctcactattccacgccttgacgctcgtgctcaatgccactgcatgcactgttctgccaagtgtcgtggacgcgcatcaagtgctcgatgaaatacccatgccaaaaataatcatcgatctcatgtcgccatgctccctttgagcctgtgaattggtcgatgatgtgcatgcgagtgtggatcgaagatttcaatggagaagaaagcaagtgaaaaagggtgagatgttttttgatgttttttcggctcttgttaggtgttatattgtgatgtgtatgaagtgttgacgaaatttctcatttgcacgcaatggcgtgaactcgtatgtgattcggagaaacgggcgcgttgtgtttg

SEQ ID NO: 94359 - DNA, 851 bp, Zea Mays
aatcaaagtaacatatctttccaccaaactgcaaccgaaagcataaagtgtcttcaacgcatatcggacatgtcaaaatcccctgacaactccatccagcaaagataccataagcaataaaatcatgaatagaccataaaaatgcagctctcaggttgaacttctgtttcttgtaacaatcgtacgcctcgactccttcccacaaaattttcaattcttcaatcaggggtctcatcatcacatcaatatttgttccaggatgatccggaccaggtattacaagacacaagaaaataaattcatatttcatgcaaagagctggtggaaggttgtatggaacaacaaagacgggccaacatgagtaggacgttgcagttagattgaaaggcgagaaaccatctgttgccaaaccgaagcagtcattccgcacttcatcagcaaagctcgaatcaaaggcatctagtgccttccatgcatctatatcagctgggtgcgccatgacatctggattctcacgtaccccttctttgtgccacctcatgtgtctggttgtattcttggagatgaacaaacgtttcaaccgaggtataagaggcatgtaacgaagctgcttacgtgcaatcttcgtcgtcactgtcaaaccatcgttgttttcaacctctaggaatctacggtcaccacatacattacacttcttctcactcgtggtctccttccagaaaagcatacaattattgtcacatacatcgattttttcgtagtccataccgagaccagagagcaactttttggactgatacatgtcctttggcatcttgtgattctccggaagtacatcactgatcaagttc

SEQ ID NO: 94360 - DNA, 1418 bp, Zea Mays
gctaccggtaaagaacaataccataacaacttcagttgttacgggttcattgcccgctcaaatgcaagttactcggtgccgacgtaccgaaaaaggtgacccggggcctggatggaggagtggttttatgttaaaatgatctgattaaaagggaagacatcaaggagattatccagcgccccatctggtctcgcttcagccttcgaaggccgaaggtcactattgaaagtgacggcgaagcatgcccgaaggcatttagaaatgtttgcgccttcattggcacaagagatatagtccaagagcacatagcctatagggtgtggccacttgtggagagctgggatatgccgaatccagtgaaaatggcttagttcgatagaagtatacctttagatttagagagaagtttgatgaaccaaatgatgactggttgaaatgcattgaagctaccagcgacgagctactcgggacatgttccaaggccaaagatgatgccttgtccgcagccttcgggggccaggggaagaaaagattgaacatggtatttgatgcaatcggctttgtataccctgattatcactacccactgcgaaggcaagggaagaagagaaaaattgtcgcttcagccaccactgttgtgtcgaagggcaagaaaatgaaggttctgacccaccggccgcgatatattgaaccggtcgtagtgcctgaatttggcgaagggacctcttcaactgtcgaagcaaaacaagctgcttccatcgtgctgagcgctgaatagtctattgtaattacgaaggtgcctacagtcaggccagccgaagctaaggatgatacggtcgaagagccaaaggtggaagaaacagtaaagatgccagaaattctgagtccaccggcagaggcaaatttgctaaagatgtaaaaaggtcctgccgcaactcgcaagaggaggaggatggccagcgtgcgagatgctgttgtggagaccacaaaggccttgacccctgctcctattaagaaagttgccgaagttgccaaggtccaggtcgaagccgaagctgggcctgtagtgcccattgagacgaaggtggtcgtgcctgaagacaaagctgatcaacaaacttcagataccggcatggcagcagggtagggtatggcagaaaaagcaaaatcccctgcccctgaagcttcagtcgaagatgttgattacatttttcgacatgcttcggggaaaaaattatccgaagaagaaatcctggaagccagacactatgcccaaaaactaaaatattcgaaaggggccttagtgtttaatggcactaacgaagataatttcctaaactatctcccggacaacaaagaaatatccgtttgctgggagatagctaaaagtatgggatttccgaagcttgaagaaggcc

SEQ ID NO: 94361 - DNA, 303 bp, Zea Mays
agcgtactgagctgggcgtggtcctcctcctggacgagctggtgtaccctggggcggaatgcagtgaggacgaatactgctgctgccctgcccttgggcaatggccttcctcttcaagtctcccagttgaacatgcttgtgttcaatagctagagctttatcaagcagcctctgaaatgatgggaaggtatgagcaaccaatgcatactgtagtggcccattgagtgcttctatgaagtgctcttgctttctctcatcatcagccacctcattaggagcatatcttgatagctgaatgaattt

SEQ ID NO: 94362 - DNA, 727 bp, Zea Mays
ggaaaaaggaaaaaagtattacctccgaagctaagagggtatcttcggtagactcaacattctgtgtctttgaacctccagcagtaggcagtatagcagctctctccaaaaaatacgacttcagctggtgagttgcaactttcattttctttggctttggcgcggtatagggggtcgttgatgcaattttccttttcgtcccctgctttcgagccagaaaacagtagtcaggatagacaaaaccaataacatcaaatactctatttagccttttcttgccacagacaccaaaagcaatgttcatggcttcatcttcagctttcgtgtatgcccccagcaattcatatgtagtcacctcagtggcctcaaccattcgtcatctagctccccaaactggcttctatagcggtatgtatacttcaaataaactagaccaccttcacttgaactattagtggtctcctttgacatttccaattcattaacaaggggccataccttaaaatctatgtcctcttagaccaagcctctggtgctaatgtaactgaaaatagtgttgaacgccaccaggcaggcttgagccttatcattgttcataatcgagggccttcgaatgccgaagcgtgattgtattggacgctgaattatatctttcacatcctccctctcaatcaaatcattcttaacataaaaccattgcctcatccaagatcctagccatttctta

SEQ ID NO: 94363 - DNA, 1229 bp, Zea Mays
cttcagtggaaagcaggcaacatggatgatttcctgccagatcatatcaaagacgttgatgctctctgagctgctgggcttcatgaatgagagcaaaaccttgctctctccaagaatattcatctggttaccccctttaggaatgagggtcatcctgctgagggagttgatgtatctgtaatacttgtgcatgttggtggactcccaatattttccagactcagagagatgaagatctctggctacatctttggtaggttggcggaaatcatggatcttgatcttatcaccagaaatatcattgtcagtgaatccaagaatgtgagcaaaccgacggtagctcaccttgtaccagctgccttcgatgtagaagttaagataaggaaagttgtagggactttcctcatcggccagcttgatccacagagttgagtaaaactgggcaatgacttcatcattccaatcatattggaatgtcattatattcttcatcttctttctttcacaggccctcaacgcctgtgtcatttccgggtccccaatagcctcacatccttcccagttgatgtagcgttgatgtagtatgggctgatgtttcttggggaggatcactgagttgtaaaaatccacatgctggagagtctagaaacggttcccatcaatcctggcatcacgaatgcgcaatgcaggattctggaaacggatgtcctgaagaagagcagaacctccgctggcagtgaaatcagtaactggctcattgccagcacgacgagcctccgcccggtggaggaccaaacctcgaataacaggggcgtgggcagggggaagatcaaaatcatcatctttcccaccctcatcatcacttgttgcttcccaagcatgtggatttgtcacgggttgggaccgacctgagggattccgggccgtccgaccgcgagctccttgagacccggaggcctcaccaccttgcatgacattgccagatcctcgcccacgtttggatctggaacgtggggggagtatctccatgaatctcttgttcgtcagaggagtcagattcaacaacagaaggattcctccgacgcaccatccttaaaaagagaagatagaacctatgatgagcaaggatcttaacaaacacgtagagacgcatatgatattgagcatgcacttcaaccgttcatgcgagcggttcaactacaacgaacaatatcaaaccgctaaactct

SEQ ID NO: 94364 - DNA, 393 bp, Zea Mays
gaaggcatcctcagccaaattagttgagccgaaggtggataatattgaagaaacaagagtcgaagggacaaaaatattagaagtcctaagcccttcggcagaagtgacagtgccgaaggcacaaaaaggtcttacagcgacccccaagaggaaaaggatggccagtgtactagatgtgctggagacgataaaaacttcaagctctactccagggaaaactgtcgaggcttcaaaaacgcagactgatacaaggctgaccgaagcagaagctacaaaaagccaggccaacaccgaagctgggccttcaaagcccgtcaaggagaaatccttggaaaccggagaaaaagcagcggaaaaagaagctgtagaacaaattttgcctaaaaagctgtc

SEQ ID NO: 94365 - DNA, 416 bp, Zea Mays
cccccgcaaaaatctacgtcgaaaaaagacagcgtcgacggtcttagacattcgaccaatacaaagtcaccgcgaggggcagggctagctaccctcgcgtgcgacactccgcgcaaaagtcacctaagggtgcagccggactagcacaacaagtgcacaaaatcgaagtcttcttcaaaaagactatccgtgcaaaagtcgcctaagggtgcagccggactagcacaacaagtgcgcaaaatcgaagtcttcctaaaaagactatccgcgcaaaagtcgcctaaaggtgcagccggactagctcaacaatcgcgccaaaacgcaaagctttacatccgtgcaaaagtctacaccaagaaactgtccgcgcacagaccaactacaaggcgcagccggaccaacgtatgaaatgtgat

SEQ ID NO: 94366 - DNA, 287 bp, Zea Mays
ggaaattaaggaaagaaaaatgaaagatgtgaataaatgttgtcccaaaaactttgtaatcagtccactaaaatatatcaaggcaatatcaaaccactatgttatcctcaaagaaaacctaagattaaagggtcataagtctatgtatctacatatatataccactagaagccccacgtgactaagaaaccctaagttacttcttgaattagtttcttttacataaatgttattaaatcatgcataatcatgacatacatgttcattgcattcgatagactgtaatc

SEQ ID NO: 94367 - DNA, 431 bp, Zea Mays
accttttgattcggatagagctgggtactgtaagcccggacgctgagagtgaataggatatggatctatctgatgcctggaagacgcgacatctcccaaatttcagagtgcaccccattccgcattggatggtggtgggcgatggatagaccatctggcgggacccggatcatccataaccataaacaatcagattccagtttgatctgctgtttccttttcgaggattgcagggacgtgctagctaatgcatggcgctttccaaaagcgtgcaactgttttagtttccttttgcgttgctggcctgcactagcattggtacgtgaatcatgctgagagcctgagactactacgcacagccacactactgcagggagtcgtctcctagcttccacccttcttcggtagggccaagaatgtccggatcttct

SEQ ID NO: 94368 - DNA, 333 bp, Zea Mays
gaatcgattgtagtgccaaaggtgcctacagtcgggccagccgaagccaaagatgatgcggtcgaagaaccaaaattggaaaaaacagtgataatgccagaaattctgagcccaccagcaaaggcagaattgccgaaagtgcaaaaggctcctgctgcaactcccaagagaaggaggatggccagcgtgctagacgctggagaccacaaaggccttgagccccgctcctaagaaaattgccaaagttgtcaaagtccaggccgaagccgaagccgaagctgggccttcagtgcccattaaaacgaaggctaccgcgcttgaagataaagctga

SEQ ID NO: 94369 - DNA, 524 bp, Zea Mays
agggtgcagccggactagcacaacaagtgcacaaaaccactctccgtgcaaaagtcgcctaacggtgcagccggactagcacaacaagtgcaaaatatcgaagtcttatccaaaagaccctccgcgcaaaagtcgcctacgggtgcagccggaatactagtacaaaaaatcgaagtcttttctaaagaactccgtacagaagcctacgggagcggcccgatcaacgaaagcgcgcagcttcatcacataagagtatggttacatacatacagcgagggcatcgcacattacattggctcaaccttcgggatgatacccatctccctatagttgaacaacattatcctcaattcctcacccgcaaacagacttcacagctccccctcacccacactcgccccaaccggcgaggacaacaattcccacttgccagtcccgtccacacgaagacgacaaccctccatctcaccacgatgacgcctatcactttgcgacaactcacccaatctccgcttcgccaccgc

SEQ ID NO: 94370 - DNA, 285 bp, Zea Mays
gacgatctcattcattcttagcgcaagcctgtttgctaaaatcttggtcaatattttcatgaagctattgatgagactgatcggtctaaacatgtcaatcctgtcagcaccctcccttttttgtaaaagtgtgatatttgcctcattaacgaggttcaggtttttgcatctatggtgataaaaatcatgaattgcactggataaatcatctttaatcagttcaaaacaactcttatagaaaatccctatgaaaccatctagacctggtgccttttcagagtgcat

SEQ ID NO: 94371 - DNA, 429 bp, Zea Mays
caagaagatttttttatctgttgttgcacattttgttaactctaattggcagttcgaaaaaatattcttgctatgcgtctcattgattgttcccactctagcaacaacattgcagagaggatttatgctgttgttaatgaatatgaattgattgaaaatgtttttgccattaccttggataatgcatttgctaacactagggaaatggaccaccttacacctttgctatctgcttatgttggtcctttgttattgcatcaacgatgtgcatgtcatatcattaacgttgctgtgcatgccacatttgtggaaatgaaaccttttcttgaagattttagaactgccatatctattttgaactcatccaaccaaagaattgttgcacacaaaagtttttgtgttgctatgggagtaagatctcgtaagttt

SEQ ID NO: 94372 - DNA, 415 bp, Zea Mays
gtgaagccaaacaggagctgagaaatggatgagaactaccagagttgaccaatacacgaacagatttgtggttcaacactccatccaagcaaaatgtacgaacaccaggcactccagaaactgcagctgtagacagaataatgaatacttgttcttgtgaagagccagcatcatctcccatatactaacaatcctcctccaactaaaacaactcaaaaatttattgaagtgcattgagttgaatgtacttagcacaaagatgatccttggaccacttttctgcacatttgatgcacaacccgcgtgcgcgacagtaggcgtggatggttgcccattcgtcatccaccgacttcgaacgctctgaatcaaaggcacaacgatcgtcgagtggtggaacttgtggcttttcctgctt

SEQ ID NO: 94373 - DNA, 856 bp, Zea Mays
cgtgctccaagttggattgaatcccccacagacttggagataacagaagccagggttctgcttgctgaggtttgtttgttgaaggagagaggtatgactgctgaagctataattgcagactttgtttttaagaatattcagccactgaaggacagagcgtactcggcttatttgtatagtggtgtcactgattcaacccgggttaccaacaagaggattcctgctgtggatttagtaagccgattggagatgattcttagaggcaaaatatcaaatattggtgctcctgttgcatattctgcctggaatctgccacctgccaagtcttttttcgattttgtgtccaatcctcctgctagtggcagtggtttgggtcttagagtgcgaccctctcccgaagaagttgaggctctggttgcttcacttggtgatctttccaatgatgagaggcaagttcactttgagatgcctataaacccgagcgatgcagagataagtgctatgctggacatgttcgctgaggattcttctgactcagtccctgctgaaacactagctgttgcaaccatcttagagcctgtaaaaaccttgaatgctcaaaaatctgatagcactcgcccgaaacgcctttgtcaggccagtcatccaactgctcctaccgaggggaagaagaagaaaaagagacggcttcggcgagtgtcgtgtttggatcaagatgctggcccttctgctcctgttgctgaagaagtaccaatgaaactttttactggagttgaccccaatgggtgtgaccctgctgaagcagaacccaatgggtgtgaccttgacgatgctgatctcaatgggtgtgatcctg

SEQ ID NO: 94374 - DNA, 483 bp, Zea Mays
ctgtaaacatgaccctttagaaactgtaaacataaacagatactgttggcagaccaaccatttgtgattccatatccagatccagtttctcatgcatatccagtttgtgacagaaacaaaattgcctcagaaatcatgagagtatgcagaccaacaaacataaacagaaactcatgagagtaatttgcctcagaaattattatcaattacaatcacttgatcaatccatgagagtaaatacaataaattgcctcagatttgtatgaataaacacctcatttgaccatacatgggaaaacatagggcagatggagaaatcagattaaaggatagagtatgtttggttgcctgacccaaaataaaaccaagagcaaggaaaacaaagcagtaagtcaacctcccatgaatggtcatcagtcaaatatatttcatcacaggcaaaattcacaaaatgagcaaggaaaacaaagcaacaagtcatac

SEQ ID NO: 94375 - DNA, 437 bp, Zea Mays
cttaaaaataatctcgtcctcgagattagtaagaaagggatgtaagaagccttatttacagtttagcttttagttcctaattagtttaagactaagaagtttcctattaattagaaagtgattatgaaagcatgggtatcttctatgcctagccacttttttaggcaatatgagatttgttagagcaaggatagttgatggtaagaagtactgggtaaggaaagacttcatcctggtgggtggatcatgactactttcgtgatccagttgactcttttatcctttgctgatgaggttaatatctttccatcttgggtcttggtgtctccatccgagttaggaacatgtagttaagatagctggggtacatgggtaggtcaaaatcttgtttatgaggttagaatagatggattatgtaacatattaggagtgcatgg

SEQ ID NO: 94376 - DNA, 578 bp, Zea Mays
gtagagattacagatacaagccacagagtggtcaatcaaactactcaactctgctctgcttcaaattcatccttccttagttctgcccctttttgcaacaagtaccaaaaaacaaagagatgcgcaagactcaatagccaccagggtcactaccaccatagggacccagaggaggaggatagggaggatagggaggatacacgacaaagaatgagtgaaccatctcttcttcatatgaagagccctgtggagggttgtcagatgaaggaaaagtgggcaaagattaaggaccctgaaaataaggtggaggaggaaggtgaccatagcctgaaggcctagggtcaccagggataggtcctggagtagcgtcaggagcagactgcaaaaatgagtaatcaaactcctcagcttcatccttaggagttatgaagggcacaccatactcctgttggttccattcattgagagtctcggggtaggcaggagttggaggaggagtagggcgctgaggcatggggtggcccatggaagctatgaagcttcgcatgtcatcatgaagcgcctaggtttggtgtttg

SEQ ID NO: 94377 - DNA, 903 bp, Zea Mays
cgagcttaaccaaagccatctaacaagttaattaaccaaaggaatggcatagcccgccatacgacatacacatcggcttgcctattattaacgcagtccgagacaccacatgtatatatatcacaatcacttacgccatcgactcttacttaacatcagttggctaacgccgtataagacttagcaaaccattttagacattgtaactcgaaacatgggttgaagcaggttaattagtttttcttaaccatttctccacttgaattagttaacacacaagtcacttaaaataccatattttaggaggtctaacatggaggcatttacacatggcgtaaaactccataagactacatttgctactgacaccaatagtacctactaacctattattcaccatacgaacacaattactcgccgcctactagtttctaacataatccttacataactcgtaatcccactactaactaacaataaatcacgcacgacaactaccacatcaaccggttaatttatttggacaccgtctgcctagcttgccactagtaccccacattttgactaatgctcaaaaatacatcctttattcgattatacaacagcgacctaagcgtcatgttacccagtgcatacatctttcttcgtcgcgagtataaccatattacggcatacacccgcacacctcaatcaaatatcttacgccaccaccactataatacaccacggcacacacacgcatacgtgtccccactgcattctcatgaccaattttagcacaattaattatgacaatgtttatcgactagtcaagtgaaacactaaccgatccttcgcacatctcatctttaaaacacgaatcacatgtcacataatttatatttccgatccactctatcctac

SEQ ID NO: 94378 - DNA, 510 bp, Zea Mays
agcgagagacacgagaacaaagtgtttcgtgccttactgttcgaatcatggaactccatttgaataggagtgatccgagcactctgggcatcgaacgcaacatcgatacaaatgtcccagatgcaatacccaatactctcaagatatgccgacatgccgatctgacagtttgggtaatttgacccatcgaagaacggagattttccaagacctcgttccatgccgccttcgtggatttcaggccgattagggcaaggaaatccttaaccagctcccataccaattgaaggactggtgaggcgactagatgatgtgaatgggagccactaagaattctctttggagacaactccatgactttgatctcaacttgaagaaactctacaggatgactgaatttgtgtagcatagtaatactcagtccaatgtcaactaaatatactaaactgctactcagggaactgccccagctgtctgcagaaaatcaaaggcaaaagcacaaagcaacac

SEQ ID NO: 94379 - DNA, 393 bp, Zea Mays
gccggatcatctccggcaacaccctcgagggctgggcaaacgctagcaccatccttgaggaccgagctatctgtggcagccacctctaaggctgaaggaccttcaacaacttccatgagaacggagcaatccagatgagcctctcgactcttaagaccgcgctccaaggtcgacgaggcacgagatgctgctcgggataactctaacccggcatcaggcacatcagcgcaaacttccaacattccaccatctgccggctctaacaacagatcttctgggaccatgtcttcgagagtctgatcaaagtttgccagagacaattcttgcagaccaacgagagcagacaaagctagagaaggaacaccactactctccccgctggctatgtagcgc

SEQ ID NO: 94380 - DNA, 734 bp, Zea Mays
caccgtgttgcgaggagggcgtccgtggcctcagcgggtggctccggcgttgggtgaatgaataattgctcaccggagcacctgctctaccgtgttcgccgtgcatcgtggacagtagcaactttcacctcaaacgccggtaagactacatctataacattagtcatcccctggtattcgagttggtgccttcagattgacttttggggctctagggcactatctgattggggctcactggcgtgctccgccgttggtggcggtggtgccgtcgcgcctctactcggagggagatgatgggtatcctctgttggatttgttttggtcggtggtgattaaatctggcataacacttcgaccgaggcaagttgtgactgtagatctttgatcggagggttgggtgctcatgggggtttgggaacgattggaccattggatcgggattcgatgtcctcagttgtgtatcgattcgtttatgaggagatataaccatagccgtgtgatctaatcggacggccagatttggcccacaccccttcgcgcgcgttaagttgcaaaagagaccctgacaaattgacaaataaatctgtcgtcccacgtagtgtaaaggttaatacgattaggtccttaaaattgcacagagcaccctggaagtcttcaaaatattgtctgcggtccagattgattagggataatcaaaaccaataaataaaatgaatataggtataaaaaat

SEQ ID NO: 94381 - DNA, 299 bp, Zea Mays
cttcctgttcatgttccaagggctgctcaagccctttttgatgtagccattcaaatcaacataggtgatggagaagaggtgctgttctggactgatcggtggctggaaggaaattgtgtggccgacttggcgcctaatcttgttttgacagtatctaagttagtaaggaagcgacaaaccgtttctcaagccctaaccaatcgaagatgggtttctgacatcaagggggttttactgtcctagttctaattgaatatctaaaaatttgggagttggttgatggggttattctgcagcca

SEQ ID NO: 94382 - DNA, 355 bp, Zea Mays
gaaatcaattcgatgcgccgaatgatgactggctagattgcattgaggcaactagctacgagttgcttggtgcctacacgagggccgaggatgattccatgatagtggccttcggagggtgaggcaagaagagattaaacagggtttttgatgtaattggttttgtgtacccagactactgttatccctcgcgaaagcatggaaagaaaagaaaggctactgcttcggctatctctaccacgccgaaggtaaaaaaaggttaaagttttgacacaacagcctaaacatattgaaacggccatagtaccgaagcttaatgaagggccttcttctgctcctgggtcagactacaccg

SEQ ID NO: 94383 - DNA, 2838 bp, Zea Mays
caaccggcatcacccactgctctcaacgctaccacgcacaaaagagctggtcgcccaccaagaaacaatgttcccaagccaatccagcgcaagagcagtcggctggcggcaaaagctaacggaaatttcgtggatatgactaataaggcggtcaggttgaaggaactgagggataccctacaaggctgctctacagcggtgaagggggaagtccagaaaaaaggtttgctcagtcgttcaatggcgccgatctccataccagctcttcgcaggcttgttcgcgcggcaggattggggtgctcagctgcgaatgctgttggggtggtgccgctcgccaaggaatgatagtctgcacctttgttgctcatggtgcagtgggcacgtcagtctgcacctctctgtgtgtcccgtgggggtctgtattcggttcttttgtgttcagcctgctctgtgcgttcaccgggctttgcttctcagttgtcccagtgtctgtgtgctttagcatgatggtgtctgtgtgttctaaaaatgagtagcgtcaagagtctgtctgtgttgtcgtggaatgttcgtggtcttggcgactcggaaaaatgtgaacttgttcgtgcagctattgcctctttgtctcccactgtagcgtgcctacaggaaaccaaaacccaagaaatttctaagttcaaagctcgatcctttcttccaccaaaacttgctgatacattcctagacatcccttctactggcactaggggaggcttaatcacggcttgggacactgacgtcctggagctcagttcttttgttactcgccaatatgctttaacctgtcactttcttttagccaacacaaactctgaaatcaccataacaaatgtttatgcgccgtctgaccatagggatacaacaacttttcttgacatcctgggggaaatccactcaaacattgtgggaccttggtttatcattggagacttcaatcttatcagggatgcctcagaaaaaaataggggcagaaccaatcgacatctctgtaacctgtttaatgacactatccatgaccttgggcttctcgagctgcctctgctagactgcctcttcacctggacaaacaaacgccgcaccccaaccctggcacgcctggatcgtgccttcacaaatgagaacttcaccacttgctatccatcggcctctcttagctcttcagtcagaactacgtccgaccataaaccaattatagcaaaaatagctactacaattccaaaatctacaacctttagatttgaaaaagcttggctaaaaaacccgaatttcctaccggacattctaaacgcctggcagcctatcacccattcgactgatgctgctgcttgcctcgcgagctgcctcaagaacaccagagctgcagcgaaggtttggtctaggcgtaatagggcgccccctttctttgtacaaaactgcaaattcattattatgatgttggacttcctggaagagtacaggacgctatctgaagctgaaatgcaggtcagggaattatgccaaactcgtctccaacaacacatcagagcgacggctgcatattggaaacagcgagggaaacagaaggcgatcagggaaggggatgcaaacaccgcgttccaccatgctcaggcaactcaaagattgaggcggaatcatattggcaagatcacgcacagggagcaggaactgttcagtcatgagtcaaagatagcagcagtcacagactatttctctgggattatgggggaagcaggaaactccacatggaacttcaacatacatgaactctacaatggaagacagcttgcgtctgaaagtctaacagccccctttacagatagagaagcactacaagcaatccgatcaatgaataagctgagtgcaccagggccggatggttttggacccatcttctactcgtgtgcatggacgactgtcaggacacaggttatggatctgctcaatgcctttcagcagggggaagctgaactggaaagaatcaatcgagcatacatggttttactgccaaagaagccgggatgtacaacagtggactccttccgccccatcaaccttcaaaactgcagcgtcaagattattaccaagattatgactacaagattgcaacaggacatctgctcactcatagacttggatcaaactggtttcatccaaggccgctcgatcactgaaaattttgtctatgcaatggagttaatacaatgttgccacaagagaaagactccggccctagtaatcaagctagactttgcaaaggcttttgataccgttaattgggacgggttgctcacagtcctgagagcaaggggtttcaatcagaaatggcagagatggatattgcagctgctagcatcttccaaaacctcggtattgcttaatggagtacctggaccatggttcgcgtgcaagagaggtctgagacagggagatccgctgtcaccatacctcttcttacttgtggcagatgtcctacagagcttgatcaagcacagcaggggtgttagacatccgctaattgatgaccgaccatgcccagtgctacaatacgcggatgacaccctaatattattgcgtgcagacctagaagatgtcaagacacttaagaaaaatttagatgacttctctgatgcgactgggctgaagatcaacttctcaaaaagcaccgcagttccgatgaacattgatgaacaacacctccctctcatgattgccacccttggttgcaggctggagggtttccctcagacatacctgggactaccgctgtccccaaacaagcttcgtctatcgtctttt

SEQ ID NO: 94384 - DNA, 654 bp, Zea Mays
gaatcttccacgccaccagacacagtggttccctcctaaagatggcaacggggcctgttacccgttacttgatggataattactacattagaggacaggtttggtcgtaactttatacccacgggtctgttaatgggagaaaaggatgattcaatgggtagaatgggtatgtgtacatactcatttaacccatatccgtgtacccatgggtataaaatatctcgaatatagccaacaattatctaaaattttatcctaccttaatgatttgtcttaagctcctaactcttgagcataactatatgctatataggccttggaacacatgacaacagtaccataggccttgggacacatgacaacagtaggtagacaaccggccaaaacagtaaagctcatccaaagctccaagattatgtgatgctactattcgttaatgtgcaatccaagcgaccaagtcacatgcggacacgtgtcatgctcgcatctggaagatgaaacacggaagtccaaacattgctgctcgatgcacaccattcgacataaaataagttgggtaaacaagcatagctccaccactacagacgggtacagatacccttcgtgtatagaatacccgacgggtccgtctatgtgtatggaattgtaccccgc

SEQ ID NO: 94385 - DNA, 462 bp, Zea Mays
tggcaaggtcgaggcaacgataacctttatggtcattggagtatccaagaaacacacagtgagaagaccggggagcaagtttatgaggtgtggtggaggagaggttgggataacatcgacagctaaagacacagaggtgggtgtagtcgggaggagtaccgtgcaaggcctggtaaggggtggaaaaggagatggttttaatgggtgacggttgaaaagataggtggcgatgtgaagagcctcaacccagaaattaggggggagatgtgtttgaaaagggagggaacgaataatgttgttcacagtccaaaggacacgctcaaccttgccattcttctgttttttgtatggacaggacatgcgaagaatgaggccatgggagagaaataaggcgcgtgaagatgaattgtcaaattcacaaccattgttgcattgcactcttaatggtagtacgaagttgcg

SEQ ID NO: 94386 - DNA, 545 bp, Zea Mays
gtcatttaacatgttcgctaccccaacatcaccatcataatcctcgacacgttgtttcaccacctcctcatacgatgtgcttcacctcagtagatccatcgtgtatagtctgtcgtaaatccattcttccaaagatgttccgccattactttgtttgtcttttccgtttgctcatttggtgtagggacatgggacttgactcgctccattaggagcttcgattaatgcttgttccaagaaaccagcggtgttgttgatccattcattggtgacctggcccttacttacacggcacgtgtacatccacttatggtcctccttcctctaacatttatagcaatgagtaatataaatatctcatgcatctgcatgacgctcctactatctaataggtgaggacaggtcctaatcccacccaaggaaccgtatatgaggttagtttccatactctctactcctatctgagacacaattttggtagcatatccctgcttttctctaagtgcatgtcctggaaggctgattgtcggtgttttgggtctgac

SEQ ID NO: 94387 - DNA, 981 bp, Zea Mays
atgtagatgtctacctccctaaatagttgttcagaggtggcgggtgtcttttggagtatagctcggatgaaagccgagtcattggatccccgacagaagtctttgatcacggctgccttggcaacctcagggatgtggttcctcatcatttgaaatcttatgagaaacgagcagagagtttcatcgttttggcgcttgatggattttatatcccatggttgcgccggtttgtcgaagagggattggaagttcgtgataaaccggcggctaaaatctccacaatcgtcgatgtagtgtcgaggtagatgtcgaagccattgcagcgtgtcctgccccaggacaatgggcaaggtatgctagcatgacgtcttctgttgccccagtagctcgagcggtgatggtgtagacgtccaaccagcccctaggtcttgcttgggttcgtatttgtcgacgttggaaactttgaagttaggaggccattggatggcacagagccgggggtgagcgtggatactccgcatgtttcctcctatcgatgatcatgctgccagtcccggggaggggagcgagtctcatgtcacctcgaccgtccccggaccggactgttggtggaggctgccgccaactcgatcctagttacacggtcacgtgcttgtgtaccatgatcctagtcgtattccttccggtgcgttatttcattttcatgtcgacgatcgcatgaagcactgacattgctccgcgcgtctcattggttgttgatggcatgacatggatcgttcgaggatgggcgaggggtagaagatgattggccgcttgagtgagcactcgccgatagcccttcacgtctagggttcgcggaggccaaaggctatctacgctaggaccccaccaacctcgcttggcatgttcagtgcctgggcgaagtcggggtataggttctgggcgaggagcggattctcccgccggagcctagcatcttgt

SEQ ID NO: 94388 - DNA, 1153 bp, Zea Mays
gcttcggcctccgaagactgaaggtgaatattgatagcgacattgaagagtgtcagaaggcctttagcactgtgtgctcctttattggcatgagggatttaattcaagagcatatagctttcaaggtatggccacttgtagagagttgggatatgtcgaaggagaccaccgccgattccagtgagggaggtctggtccgattgaagtataccttcagatttagggagaagtttgatgagccaaatgatgactgactgaagtgtatcgaagctaccagtgatgagctacttgggggcatactccaaggccgaagacaatgctttgtccacagcttttaggggtcggggcaagaaaagattgaacagggtatttgatgctattggcttcgtataccatgattattgctacccgctgcgagggcaagggaaaaagagaaaacctgccacatcggtcaccccagctgagccaaagagcaaaaaggtgaaggttttgacccaccggccgtagtacctgaatttggcgtagggtcctcttcagctgccgaagcaaaacaaactgctccgattgtgcatagcgttgaagagccgactatagtgccgaaggtgcctatagtcgggccaaccatatctaaagatgataaggccaaagagccacaggcggaagaaacaatgaaaatgccagaaattctgagcccttcaacagaggcaaaactaccgaaggtgcaaaaggcctctgccgcaactcccaagaggaggagaatggccagcgtgctggatgctgtgctggagactacaaaggccttgagccccgctccttcaaagaaaattgctgaaggtaccaaagcgcaaactgaagccaaagctgggcaagccgaagccgaagctgggcaaaccgaagccgaagctgggccctcaatgcccagcaagacaaaggttgttacgtctgaagtccatgctgatcagcaaactttggataccattctgacagcagggcaagatatgtctaaaagggcaaaatctcctgcctccgaagcgccggccgaagctgctgattacatttatcgacatgcttcgagaaagaaattgtccgaagatgaaatcgccgaagcaaggcattatgctcaaaaactgaaatatccgaaaggagccttagt

SEQ ID NO: 94389 - DNA, 429 bp, Zea Mays
accctgagttttggactcatttgcaaaaaggaccccaactttgattcctatgctaagtctgaaatcagggttataggcccaactttggggctgtgtagctttcaaaagagtgagaattcatatgaggtcaccacatcaaaattgtagcctaattataggagaacaactttgcttaagagtgtaagcacagttgttaagaaaatattggagataatcaagtctgaagttaagctgacaggctgttatggtctgaattttcagactgacagtgacattggatcatctttggaaacagtttatgactaatctagcaagattttgcccatggctgctgtaacaaagatgaagatggtataatggacaacaactttgctgcagaactttaagtatgttaccatagagatttgtgagcaaatcgggcctaaatac

SEQ ID NO: 94390 - DNA, 796 bp, Zea Mays
cccaaccctaatggcgggccacccggacatctagcctaaggggttcggtgctgccacctgctggccaatgccggaggagacgaaacctcccctgaacaccatctggaccccagccaaaggaagtccggagctgttacgaggaagggtaatctcgatcactgctcctcgcacaagacgaggtccggtgttagcacgtgttctacgacgcgtgacgtaagctatcgggaaaggcctgacgtcaaactctgagtgaaaagtgcctctgcattaactgcggacgagacatatacctgtctgccccagtggcaggtggtgcgtccgcagtgcataggccacacagtaagacctttgactctctgcgccgcttgggctgctatcattatgactctcattgtagcccgcgcgttaccgaggcgaacgggaacaggcagagaggacaggacgacgacgcctgagcacccctacatgcggtagcgcgttagcctatgccgcaacctacacctgtgccctgactttgattagacgggacaaggtcgcggcaagccaggagatcttcacgaagaccaagagaagatatctgttctccatgaaccgacgctccacttactccatatctaacaatagattactaggcccacttgtcggggctcgatcaccatgtacgtgtctcacttgaactataaaagggaaggcacagacacggtagacgagtgggttccaaactcacacgtactgagagagactccctcggagaccctcggacggagactcccaagaaatacaactcacaatggat

SEQ ID NO: 94391 - DNA, 326 bp, Zea Mays
ctccccttgagtttgggactctatgaatgattgggctttgaacatatagttaacgtccatgtactcatcattctccccttcttggttttcagtaatcctcgacccaaagtagttggttcctacatcaggtgttgttgtaggtcttgacatcatccaaccttgctccccttcttgaagttgaccctgttgttgcaatacatacaaagaaggacaagtggaactagacatgatgtggttcgctttaacacagacctctagtattgtttcatgacaaagggaaaattcatatttgaacaaatatatactcgatgtaccatatattctcc

SEQ ID NO: 94392 - DNA, 790 bp, Zea Mays
aattcttaatgcttcggccgggacgcgacgcaagcacatggagtgatgagtgaagcacaagatgcgtcccgaataccagtaccgctcacaacaacaaaaaaaaaaaaaaaaaaaaactcacacgctggcaagcggcgacgcgagccttcaagattaaactagtcaaaacacggcaggtagctgggatggaaacatccgtcccagaaaaggggatggtgagtggctacagaccgaacgtattgtattgtccacaaaaggctcgtggcaggttgagttgcaaaacgaggcagcccccctccgatgcagcgacggaataagagacgagtgtctcatcacggaagtatttgggttcagtaggccaattctgagtcgctcacctaaacattcacacagatccaacaggtattcttttccgacccatggaatccatggcagataggcatcagaaggtttcctacgcaagtattctttctacaaagggcaaagatctacaacatgcttctgtggttgcggtaaaccatgctgatcatgcatgtgattcagcgatttggtggggtcctcctctagtagtatgatacagtgggacagcatgagaagtgcaacagcagcacatccatagctagcagaccatccacttcacgaaccaaaaagtccaaaccagccaaaattttcaagactagagaaccccaatgccagtgttggcaaaaaaccattgcgacgaggaaaggcacagaatcaatcccagcacattgagatggttactgccactcatttccatgaaccagaaaag

SEQ ID NO: 94393 - DNA, 713 bp, Zea Mays
agaggatatgttgtctattttggctcaaaccttgtctcttggaattctcgtaagcaatcaaccgtatctcgatcaagcactgaggctgaatacaaatcaattgctgatgctactgctgaattgatttggttgcaagtactgctaagagagcttcgaatttcttagcctcgagctgcacaactgtggtgtgataacattggtgcaacatatctatgtgccaatcctatttttcatcgccgatctaaacacattgaggtggattatcattttgttcgggagcgtgtggctactagacagttggatgttcgtattgtttcaacgaaagatcaagttgctgatgtgatgacaaaagccttgctagcttcatcgttttcattgtttaggaccaatctgaacgtcacttccctgcgtccagattgagggggtattggaagatattagatattgtgcttatcagataagctaggattgttatcctcttcgagctgcatctccatctctatctcttcccctgattttctccaaccgtgtaacagccatgcatggctcatctatataaagaatacatcggcaccatcttcaggtgtcgagtcttgagccatacctaccccacgccatggcaacaggagcacggtggataacaagacaacagacatatctagacgcaacaacatgattacaccccccgctatagtacatgcacgccggctgcc

SEQ ID NO: 94394 - DNA, 619 bp, Zea Mays
tgtaggcttacggtatagaaccatgctaagtggatacccagctccggaccacccccgagaacgtggttctttcccctggctggaggtccttagcagtccgatccttgttcaacaccatatggggcaaactaagcgacaatctagttacatgatcacaacagaagttagaaaccacatggtggttagaggaaacaatatatgtaaattaaagcaggaataggattgaaaatcggatacgtaagagttaagcgatggacacgagagaccgggtttatgagggtggacctcactgggtacaaaagaattgtgcgatggattctagtgaccaggtttataagggcagacctcaccgactgggtcaaaggtaaatgctatcctattacaaaggaagagttcactctcatgctaccttttggatgaatggtgcaggcgccccgctaactgcccgagcaacaacgagcattagacttctccagttaggcggtgtcttgggccgtcctcgtaggtgtcgagggtgtagcctagctggtggccgacgatggcaacctcatacaccatggggctcgactaatgatcatcatggtggaccatgcagatcttgacgctacccttgcaaccc

SEQ ID NO: 94395 - DNA, 557 bp, Zea Mays
caaataatggcttttgtgtttctgtgcaacggactaatccgaacttttgctccattacccttatccactcatcagcttcaagcgggtcttcggctttaacaaagagtggatgatgcatctcggagaattccaggtacgaggtttcacgcggcccttgtggaggaactctcccgccatgctgctggaactaatttcccgctatctcatgcaggaagcgagtattatctgcagtagcattgaccaaggcagtgatagcctcggctagtgtcgatggtacaggcggtgggttgggtgtatcttctagaccacgggaagtccccgcaccgtcatgcacatgagtccgtgatggcatctgaggcaaagaaatatttggaaaaaatataacattccagtacataccatcatattacattaccaaaatgtaattatacagactccagcgtacaacccgacttcattacttattttacataagtataataactaaaatatactagtctagtcttcgtcatcctttgttgcttcactgtctgctgcaggagaccgctcgtcagcca

SEQ ID NO: 94396 - DNA, 568 bp, Zea Mays
tgcttctttgtcatcgcctgccatcgaaacacaaaaacagaaaacaaacggtgaaggttatccctaataatctcactacacgctcctctcgggtggaacacaggaacacgctctaatgtatcttaccaagctcttacaagtgtttgacgaaatacaagcaaagaatggtacaatcagaggctggttcgtgatacttaccaagaggtagtgaaaccgcgattgcaaggtcaaatctatattgatcagaagatatagtatgtggagctgtaggacaggcacaatatgtatgtgaatgtggaacaaaatcgagtgcagattagcgaagttcaataagtgtccaaagcacaagtcacaattgctggctaagaggtgtcctatcgaagcacaagaagataaaagtaacaaactagcagaatgacagttctgtaaatagcgcagatttttcagcactagtagaaatcaaatgcgcgtttccaaaggagtaccaacaaacgagctcgaaatattctgaattttttatcactgatccaaaatcacaattgatggaagcacacaaaatttcacttga

SEQ ID NO: 94397 - DNA, 342 bp, Zea Mays
caccaaggctagtcttcgaaagcatagctgaagcggaagctacgagactagaagatattggcgtactggaagaagagcggttgaatacagtaactcagtcagctagatatcagcagaccctgaggcgctatcatgataagactatacgacattgatccttcatagtgggatatttggtccttcgccgaattctaacgggagaaggacggcacaaattatcgccgctatgggaggggccattcattgtgtcggaggtcactcggccgggatcatatcggcttactcaaatggatggcacggaagtagggaattcatgggatatagagcacctcaggaagtttt

SEQ ID NO: 94398 - DNA, 373 bp, Zea Mays
ccgaagatgagtacagctgcgggatgccaagcaaacctagtcatttggagtttggaaagtccaccatctctgaagctgatcttccaaaaatggtgaagctgggctactttagtgaggcaaaaaaggagctggttcgtttcggcggggaggaaactattccgaagccagaaaagaatgaggttgtggtgttcaaaagcttctttaaagctggcctaagattccccctgaatgggatgattgctattgtgttgaagaagtttggggtttaccttcatcagctgacccctaacgctattgttagattaagtgtttatatttgggccctttgtagccagggagtagaaccgtttggtgaaggtttctgccgagtcca

SEQ ID NO: 94399 - DNA, 491 bp, Zea Mays
atagcaggttccatgcagaataagataaggggcaccaacattcaaaaccctgcccttcagtatcatatcaagtcggcttagcaggtcctcattgggaatttgcctgttagtgactcgggtagaatcgttgacgccagtatacaagtaagcagggtagactctgtccttcagaggttgaatgttcttgaagacaaagtcagcaaccatggcttcagcggtcaggcctctgtccttcagcaagcaaatttcagcaagcagcactttggcttcagctatctctgaataagtgggggactctacccagctgggcgtgcgaacgtcgggctgtcttcccgatcgaggggggagagatttgttgtgattctccatggtgaaccactcgaggcgccatcgcttgatgctgtccttgagggggatgtcaaggtattccagattcctcccccggcgaagttccaaactggaaccaccgacaagctgatgttgtcctccag

SEQ ID NO: 94400 - DNA, 574 bp, Zea Mays
cttgaggaggagctctgcctccgtgctgttggaactgattgcccgccatttcgcgcaagaagcgtgtattatccgcagtggcattgaccagggcagcgatagcctcgaccaaagtcggtggtactggtggcgggttaggagtatcttcccgactgcgggaagtccccgcaccatcatgtgggcaagtccgtgatggcatctaaggcaaagaaatatttggaaaaaaatataacatgccagcacacaccatcatattacattaccaaaatgtaataattatacagactccagcgtacaacttgacttcattacttattttacataagtataacatctaaactatactattctagtcttcgtcgtccttggttcttcttttcctattgcaggagaccgttcatcagcaaggtttatggaaggagggggcctaaaaagatccaacttcccatcaggtccttcattagctattcctgaaggtccggctcccattgcagcagcgtcggaaggcacgtccgggtgcagtcgagcatacagtacatgtacttcttcatgtaaagtattatagtacacttgc

SEQ ID NO: 94401 - DNA, 345 bp, Zea Mays
tgggcctaaaaagcggagaattgttactgttatgcaagctattgaggaaacgccgccaccggcctcagcatcaaagatgacaccagctgccgaaggagatacttctgccgaagctggggccgccgaagctaccaatctggagagtatattatctactattgataaagtgctcttgggtatggccgcagaggagactgatgcggctacagaagaagccctggccgtagtgcctgagaaagggaaagaaattgccgaagatacttcggaagaaaaaggcttcagctttcaaaatctagttggtcaagaattatccaaggccgagaaggaggagctacaggagtatgc

SEQ ID NO: 94402 - DNA, 305 bp, Zea Mays
tgtttatctaaaaagtcgtagtgcaagaaaaaaatcgtaatgcaagttgcttatttatctagaaaatgtaatcgtcctactttccgttattctcaatgttcgcttccaacgaactgaatctctgattgaacagggcggttggcatagtacagctctctaagctgattaagtaaaaggtttacaagctgatgtacagctctagtgctggtaccacttggacattcgttaatcagtgaaatgaaacacataatgtttggttaggcttaattactagtttactactctgtgctcatgcttgataccat

SEQ ID NO: 94403 - DNA, 375 bp, Zea Mays
ggcggacgcaactcgattgttctgctgctggattgaatgaattattcgggtccgagcccacgccacgtgttggcatgcgatgtccaccgtgcgcgtgaaatgcgggggtggcttcaatccatagcgtcttttaactaaaggtaattacatcataaatagtgtgtcgtgattttagcatgttgaggtcggtgccaagaccaaggcaccagtatttttgcaccaatctcgatgccatagtctagcgtgtcaacattccagccctatacacaatatctcatttctttcgttgttctctctctcttcttcatcttgctctactgcgcatcaacgctcattgcctcgcgctcgtcttgcccctgcatcgttggtaccgga

SEQ ID NO: 94404 - DNA, 691 bp, Zea Mays
gccataaacaacctcaaatggagacattcccaatgatgaatgagaacaagtattgtaccagaattcggctagtggaagccagtgactccgtttggttggacaggaatgagtgaaactgctcaagaaggtctccagtcactgattgacctgttctgtctatccgtcgctctgaggatggtatgttgtgctcattcgcagtttggtgcctaaaaggtgaaagagttcttgccacagatggcttgtgaagatacggtctgtatatgagactagagcatgaggtagtccatgaagtttgtagacgtttgccatgaaagcttgagcaactttgagtgtagtgaatggatgaagcaagccgatgaaatgggcatacttactgaacgtatccaccactacgaggatacatttagctgcactggatcagggtaactcttcaataaagtccagcgagaccacttgctaggcttggtcaggaacaggcaacggctggagtaacctgggatacttgatgcggtggggcttcacttggtggcagactgccagactgtgcacaaaacgacaaattccttgaccaacttcttaagccctggccacgcaaagagctgcttggccgtctgtggtgacgggaaagccagaatggcctccaagctcactgtcgtgcagtgctgaaaggatgtgaagctgaaggtctcga

SEQ ID NO: 94405 - DNA, 515 bp, Zea Mays
gccttataagatgatttagaagagaactgtccagaggaagaatgaatccacacatgtctatcagcctcctgagtgagcaccactccccttaatgcgtcccaaaggtttagatattgttgtatcccagacaaattaagaggggtctcaatgtcgctgacccactgccagttctcaagagcatgggccaccgtcctggaagaaatagcttgtttccctacattagccacaacagcaggggcaaaatcttggatacaagacccatccacccaccgatctgtccaaaataaagtattacacccattgccaaccagggtaacaattgaagaagaaaagaagctcttgacatgctgctgaataggaaattctagactagaccacggcttgttaggatctgttttttccaaccataaccatttagcttgtggcgcccaactttggtacagcaggttagaaatcccaagcccaccgagatttaaaggccttgtaacaatgtcccacgaaacaaggcaattacc

SEQ ID NO: 94406 - DNA, 611 bp, Zea Mays
aaaggagctcctcgatattgcgactaaccacaaatcgggggaagatgtggtgggggaaattttcgaccaccgcaaggaaaaaaaccaaacgcgacaaagaacccgacgggggctttggcgggcaacctgacaagaggaagaaaatggacaggcagtgacacgatgaaatgctagtagtcgcagccagccaaaagggagggaagactccagccaaggatgccatagaccacttcaaaaaattgttcgaggccccatgctcgaaccatcactacccagttcaacacacttataaggattgcaggttggttaggaaattcctaagcaaagaggaactgactagaaaaaggactgaaccccggaaggatggttagtaggagaaaaggggtcccactttcctcgatgaaactagatgcctgctgatcttcagcgggttcaactactatgcttagaaaaggcatgggaagcttgagcgacgtgaggtattcagcgttcgggcggcggtcctagtgttcctcgaatgtcccaaccaagctattactttcgaccgctccaaccaccccaagcacgtccttggcccaggtgatatccgcttatcgttaatcccttcatcg

SEQ ID NO: 94407 - DNA, 377 bp, Zea Mays
ttggtcaaatccagcccaacctttgatcaattattgtttaaatatgtgaaaaagaaggccgaccccagtgatcggccaccaaagcggtctcgcttacccacccaggagcgacagtaggttaggccgattggaccacctcaccaatcggaaaggacgagaggtcataatgtccaactaagacctaacgtacatgcatggacaccgccactcccatacacacctatgtcatatcattatacatacataccaccaccaccatatatcccgaatcagatgtggggtatgccaccatatcctttcaggacaccacaatactccgcttggggggcaccccagtcatctgtctttgccaggttgacgcctccagtacaagaccg

SEQ ID NO: 94408 - DNA, 302 bp, Zea Mays
gttgtaaaagtgatcaagagcctccaaatttgcgtggagtgccttgtgagagagattgctctcactatttgacaagagaagaagacaagttctatcttggtgatcgcttgagtaggaaagggttgaaacaaacccggttctttatgaacttctcaatagagacataggattctttgtcaatttgaacttcggtaaataatcctaagtttcttatacattctacttcccatttgcatttgcttttgttcttctagataatacttgctattcatatcattttatctttatctcttataacttat

SEQ ID NO: 94409 - DNA, 539 bp, Zea Mays
acattttgatcgtccaaagtcttcacaagtcaccatatcatgagatcaagggacaaccaaaacaagctacacaaaaggagataataaagtggaacatcagagctatcgtaagcatgaatttgaagttgccaaattggagcaaaagaaataacttcagcatgacagaaaccatatttggatgttgcatgaagtccctgaagatgcagtgacctattcaatagaaaattcaaacatatagtagattatgtgtatggagtcccaaacttcagattcatcacagatttcctaagcaagaacaatcccctcttattctgatgattcatttgaacatctatctgcggattcatccacctcatatgcatatgaaaaagggagcattcttgtaaacaaaacaaaaactgcacagacgacttgagaatttactaggcaatcaaacacaaaataatcatcagaataagaggtgattacgataatcattagaacaagataatcatcagaataaatggggaggcaacccctgcagcttcaccattacagat

SEQ ID NO: 94410 - DNA, 431 bp, Zea Mays
gtaagatatagaggtgataagaataaaggtgctaatgatggaaagcataatccatggacaaagttaaggcaagactgacgaagtggagaaaacaagcaagggcaaaataggtaaggttccaacaaaatggttgaagtaacaaaaattattaccgaggggagttataaggaaacgatgagatcatcaaggatgtgcgaaatagaatggtcgctcatggatcatcaagaaataagggtggtcgaaagcatgttaaccggaatgtcttaaataggcattgggatataaaggtaagcatatataaaaataagagtatgcaagattccaatgatacgagtgtaccaagaccaagagaatagaaaaggccaaaaggtgacgggttcacaacagaataggaaaggggcctcagaagacaagaagttcatggacatata

SEQ ID NO: 94411 - DNA, 387 bp, Zea Mays
aagaaatgtcaatgatgtgtctaagctcctatctttttttgcattgtgtaaaaaagataacccacagtttttctctgacttccaactagaccaagaaggaaagattttgagcatttttggtcccatgctagccaacaagcagattacattgactttggagatgcagttacctttgatacaactcataagacaaatctatatgacaaacccctgggaatgtttgttggttgtaaccaccatctgcagtgcaccgtatttggtttcacattgttgggtgacgaaactgtagacacattcgagtgggttttcaatgcattcaaaacgtgcatgggagctgaatgaccacgagtaatgcttacaggtatgattaataagcttaacaattat

SEQ ID NO: 94412 - DNA, 653 bp, Zea Mays
ctcgcacccatttgtcggtttccaatggttcctctgccttgacgaagagcggtgggagggtttcggagaactccagataggtagtatctcgtggtccttgagggggaactctccctctgcgttgttgaaattggttgcctgccatttcgcgcagaaagcgtgtgttgtcagtggtggcattgaccaaggcagcgatagcctcggccatggtaggaggtaccggtggcggattgggagtatctccccgccgcgggatgtacctgccccatcatgtgcacggatccgggatgacatttgaggcaaagaaaaatttggaaatataacattccaaacatacaccatctttatttcattgcggaacagtaataattatacatactccattatacaactcgactttcttacttattttacataagtacattactcagactatactactctaatcttcttcatccttagctatcccactgcctacttcaggagaccgttcatctgcaaggttcatggaaggaggggctccaaaaatgtcaatcccccatcagatcctccatttgctgtgccagatggtccagttcccattgctgccacatcgggtggcacgttcgggtgcagtcgatcatacaatacatgcacttcttcatgcaaggtgt

SEQ ID NO: 94413 - DNA, 353 bp, Zea Mays
gttggttaactgcttgtttttggtagcgccagtttgcacagacagagttattatggcaatctgattcagacatgattttaagcaagcgggcagagtacgtggttggcgtttggcagcagataagctgcctgcctgaaagattgaaaggtgaatagaatagctgcgtccattccattccaccggagcacggtgcactgtgctactgcaactgcacacatacattatacggacagaggtggtaatagattgagatcgagcatcttcaagagctgcatcttcaagagctcccaagaagtctttcctaaatcaagtttattctaaaatgatcacaactttttcatagtcattaaaac

SEQ ID NO: 94414 - DNA, 942 bp, Zea Mays
agcttagtaggagttctattgataagatgtgttgaggtgaggaacgcttggtcccaaaacttgagcggtatagacgcattagcgagtaaagagaggcccatctcaacaatgtgcatgtgcttacgctcgacgaccccattctgctgatgagcataggggcaggacacaagatgagtgatgccaacgatacgaaaaaaggaattaagccgctcatattcgccaccccaatcggtttgcatagcaatgatttttctattgagcaagcgctcaacaaggctttgaaattctttgaagaactgaaacacctcagacttatggcgaagaagatagatccaagtaaatttactataatcatcaatgaagctgacataataccttttattacaaaaagaatcaatggcgggtccccagacatcgaaaaacaccagatctaaaggagcagcagactgactggtcgacttaggataaggcaactgatgggccttagcacgaaggcaggcatcacaaacatactccgaggaatctaagcctgaacacactaaattattatttctaatgacacgagcgacaatatcacgcgatggatgacctaatctgcaatgccaacgctcataggatggctttattgcggcaaggtcgtgcttctgggtaggtgtgcaagagatgtcaatgggtagaggccacccctacatggtccgcgcaccagcacttgcctcgtggcctgatccttaatcaagaaaaagaacggatggaactcaataaaggtgttattatcaagattgaaacgatgaatggaaacaagatttttatgggtatgagggacacgaaggacatgatttaggtgcagagggcggaaggaagtgggcaaaacagaataaccaatgtgagtaatctccatacctgcaccattagccgcccgaatctgatcattgccattgtaac

SEQ ID NO: 94415 - DNA, 345 bp, Zea Mays
ccgaagaactcaggggcactggcgcaagattaccgagactcagacacgcgtccgatggactgcgggttgaatcacttaaaatacaggggctcttttgcattagcgctggtcgaaggggtacggttaattcctagccgttggattagagactggcggtacagattagaccgaccccatccccaatcggtacgcgatccagtccgttagatcgcgatccgatggatccagactcctttgccttgcattaaatcctacgcgctcgccccgcatcggacggtcctaacaagcctaggtcgaaccgttacccggcttctgatcctagccatccatctccgcatcaacggc

SEQ ID NO: 94416 - DNA, 564 bp, Zea Mays
ttggtagaccctccttgagtgatgtgtttacaaaggctaaacaaaagctaggttaccatgaagatgatgacattgcggttgatggagtgattaacattggtcatccaccaattgtcataagacgagtcatcccaattgattctcaactggattgggatagttatgttacttcagctatgaagacccagttgcaactcatggaggttgtgttgcgaccggttgtagtagaccgaccccctgaagactatgatcgtgttgtggatgacgtgccaactatgcctgatgctcaatctggacccaatttgatcccattaagtcagccaggagatggcctgcagacagattctcctgcgtgtatctctttggcacaaaccaactgcagtaaatttcattggcattacatcttcattttggaccatgagcactttgctcattccatttgtcgtgggactgatgatcttgtacatgttgcaggagagactgctgctcttgtggttgatcctcagaccgtggcatgtggctgctttggtgatggatttattgccttgaacagtcttgagttta

SEQ ID NO: 94417 - DNA, 815 bp, Zea Mays
caggttagacatgaaaaaaggagcccatttcttggggatctgcacagagagctcaggattaccagcaggagcaaagtagttggcccagattctatagaattgggcattcctttgcctttccaggtgactcagaagaacagggtcaggccgccaatcctgggcaaacatataattcatctccacaatattggggtcattgatgttaggcccccctggctgggcatcaggtaaaacaatatcccctggcacatgaggacctccctggataggggacccgtcaatctcctgaaggtcattcaagggaataccatccacaacaggaatggcaggggcattaaaggggagcgctagcccaacaacatctaggtcagcaggaatctgcccattctgaatctgtccattctgcaccggaacacccagagcgggaccagaagaactagccgaggacaagtcagaatgagggttgctgacttgttgctcgtcaggtggcaggtcttgatggggctgtagcacaggcggtgcattcacaatccattggtcccagtccccctgaatattatcagcaggctcggcctgggcattgtcaacaggtggcaaattgaggtcccaccccacagcaggcacaggttgacccagaccaaagaactcaaggggaagctgctgaccatcctccggggccaccgaaaccgggtcctcatcctgggcctgaccccccagcaaggtttgctggatgatttcgcactgaactgtccacgagtctccaataaagccatcagcttccgaaaaaacaataaactgtgggacctcctcgcgag

SEQ ID NO: 94418 - DNA, 896 bp, Zea Mays
aggatcgagtggaacattcattcttggccaggaatcgatccacgtgaggggacacttggatttgttctaggtggagaagtgagaatggggagtcaaaatgagatggatttgttctcgatccgggtcaaaacgaacaactagatcggattccaatctaggccaatttgttcaacctggaaggaggctggaaacatgccaattcgaccgatacgaacgcgccatgggtgccgacggagttggcttccgagcctgctacgaaaaaggctaaccctcatccgccttgtccaaattacttgcgggaaatgaaaaaatgaaccggaaacactagacccgacgacctcggtcgagggtggcggggaaaaggttcccgacgacataatcgtgctgcctctcccattgaaagcaggcaccaccctcctctttttcaagatcacctttctcagatacgccgtgggagccgcgaggcgaagagtgcttccagaaggaaaaggagccgactcaagaattgcaacaaaagggaggcaaacaatgggccaacgatgctcgccgcccgccgatcgcatagtgacaaacctacgcttcttatgcagtgccccgctctcccatgacttcctgttcctgatggagtgccacacccgccacctacgacaggggcgaccaggggagcccctagagatacgacactcggggcctccgacatgtctgccacggcagggacacctccactagccgccccaaacgacccacaagaaacaagttcgacgagcgagggagctaacaccaccggagccgctggaccaggagaaaggacagggagatccaagaaatcagcatcatccacggcggagaaaatgttagccgccctcctattataagattagagatgtcaatgggca

SEQ ID NO: 94419 - DNA, 466 bp, Zea Mays
aactgccttagctgaagttagagaagcaatgggtttgaactctatccatttagtaaatttgtcgatagcaaccagtacatgagtgtatcctccttgagctttcttgaagggtccaatcatatccagtccccagcacgcgaacggccaggttacaggtatggtttgcagttgctgtgctggtagatgctgctattttgataagtactgacaggcttcgcacctctagactaactcggctgcatcactcttcgccattggccagtagaaaccagacctgaagaccttcccaaccagagtccttgatgctgcgtgtatcccgcattgcccagcatggacctcttctagcagttgcttccctgtaaccgaaagaatgcattttatgaggattcctgatgcgccccttctgtatagtgttttcccaatgagagtataatgagctgactgccttgcaatgcattctgttgta

SEQ ID NO: 94420 - DNA, 507 bp, Zea Mays
atttcagaaagagaaaacactaaaaaatagaactcgaagaaggggtcctaaattagttagctgttaaagcgattaacaaaccataattgctcttcaagccgaggaaaacatttgttttttgaaattctaagggaatggcaaaacatcggactcttcatgatggggaaattctttttcttttgaaataagtgtatataccctacaatctaaaaaaagtcaaagccaatgacaactttatctagcagacaaatggaggtaataatttgatggcagatcgattcactactggatgaaattgcattttcacaaattgtagccgccctaagctcttggcacgaacgaatcatatgaagtcaaaaaatttgaactcccctgggatgggacaggcgatctcactcatcgatctcactccccttcgttccatcgacccacagccagcctccctcatatgatctcataaaaattacactaaataaagcaaacaaatgaacttacaagtgcttctct

SEQ ID NO: 94421 - DNA, 425 bp, Zea Mays
ctccatattttcagggcgtgaactatggctaccaattccaagtcgtgggtagggtagttctgctcgtggggcttgagtaagtgggatgcataggcaataactttctcattttgcatcaagacacaccctaagccttgccttgaagcatcacagaagatgacgaaatcctggtgtatatctggcagtgtcaaaactggcgcggttgtaagcttttccttgatgatctggaaactttcctcatattttggagtccacacaaacttattgtcctttttgagaagcttggtcataggttttgctatgctggagaatcccttgataaagcggcggtaataccccgccattcccagaaagcttcgtatttcactgacgttggatggttgtttccattttgaaatggcttccaccttggatgggtccacttc

SEQ ID NO: 94422 - DNA, 842 bp, Zea Mays
gtggaggtggcggcttccctcccctttccccctcggcggtctctaggttcaggtgctctccttcctcccgctcccctgctctctggtcttctcgattcctccggaatggacttagcaaatttggattttcggtcggggatcgtcttcgaggattctcttaagctttgtctggcctcttcggtttgtcctgctcgtccgagccttccgtcgtctttctggttggtggtttcttttggaagatgcattttcaagctgaactcagattctgttggctaccttctccaagctgccctgggaggttttgcggcaggctttgaggtgcatcagctttctgattgggttttctgattttcggtttcctcgaaggctgtgggttttcatatctacaattctaagtgtatcgatcatgcggaattcagagcctttttcaatctttggaaccgtggtggccctaactggattcatgaattcaagaaatttattggtgaggagaatgcttcttggttgactgttcggggcaagaagagcttatcttatgcagatattgttaatctccctctctctggtgctaatgcggtcccgatcctcagcaaaaacaagttctcttgcggtgttgggcatccagttcagactagaatttctgtgttcaatcgcctgggttcttctattcgtaattcaggatttcagggatcgtggttctcgtctcctcagcgaaggttagggcctactggtcttcggattccgtcgactgcgaagatcaagccaactcccatgattgctcctcgtcggggggcgtcttcctcggtgattcactctgatcttaatggaggtgtttgtggcag

SEQ ID NO: 94423 - DNA, 501 bp, Zea Mays
cgagaagtcacacaaggcggctagcgagggcaagtcgattaaaggggtggatcgacttgtgatctgggtaatggtggatgggatagaggcgaaggtgcagttgaactacgatgaagatacaacctaaaccagcaacacgactcgaccacggacacgaactgaacaaagccaaactgaaaacgaaattgcaaaggctaaacaagggttctaggacgacggaatttttattgtatggcaattatctagagttataggatgaaaaacctaaactaaactagggtaagcctgacggtaatacctgagtctttgaataccacttgataggaatgggggtgcccaatcttccgtcaggtgaaggtaactattgatttggtggagatgtcacacagacgatccggcttccaatcaacacgactagaaccccgcaatcgcagcaccacttctcctctggttatcaaccatgcactgcgcgattgacctcgccacgagggctaattcctg

SEQ ID NO: 94424 - DNA, 1005 bp, Zea Mays
caaccttctcctggtcgtggctctcccactccacgtggccgtggtcgtggtcacggcctaggagtcaggttggctcatgggattgcaacatttttctctatgtgcaggaacatttctactgacgtgcatgagcttgccaggcggtagcgagagacggatgacaatctccgtcgtcagtttatcaccatgggaattccctttgctcctcgctcgcccgatgtgcctcttcatgcaccccctctagatatcaatgaatggcaccagcaaacctatggtgttccatttatggctgccgaagatgaagatgttgaggaagagttctttgatgatcgagatcagtttgtcccgcctccccaccagggtgatccgggcccctcatcgtcttatcttcccccaggaaccttcaggaagcactcctccccctgctaaccccggggaggaaaacattgttgttaatctggcgtctcggttcttcgacccctctccatcttggtgatatgtggttgtgtcttctcccgtttttttggtgctcgctgccaaaaagggggagaagggttggtggtggttggttggtagcccaaggggctaaactgctgaactattttatttatgtaatgaacatgatggtttgtaataacttcacatttgtctgtgcttgtgatgatggcctagggccatgaactacattatgtgatggtgatcgttattgtaatagctagtttttatgatcctctttatccatcatatatgtgttatgctatgacatgatgaaattgtgagagtatgttattttatatcatcatctcttatacaacattgttgcatccttcaaataattatgcgatgtgttgactattcactccctccaaatatgttgcataattaacatatcaagtcaatatgaagatcacaaaatacatgcacatatttagggggagccacacatacacaagtattcacaatctcactagtaattttctcttatatctttactctagtttgttt

SEQ ID NO: 94425 - DNA, 308 bp, Zea Mays
tacaagaatgaagggtttgacaagaaaattagaaaaaaatagggttcaaggactaaaggttcacttcatgtccctaataagatttattccaaattatgtcactcttgccttggcaccacccaacatatatccttcgttgcctagcagttagtggtgtcatcgctgtctcaccacatccactagatcacccaacacttgtccttcgttgcctagcaggctagtggtgtgtcatcgcagtcttgagcatatccactaggtcaccctatcatcgtcaacatcccctcgaatcctgatcatggaaaaaagtt

SEQ ID NO: 94426 - DNA, 664 bp, Zea Mays
ccgcggtgagcctccccgtctcccttcttccacgcctgcaattttgtgttttctttcctatgcgttattaagcattcgtaattagtctactgtaaactatatatgttatgtgacttatatatgtttccttctcttaattctgtaaagtgatagtactgtaagaactcctggttgctattttttgttattcataattgtcggtttagcctgtgctagttaatagcaacttgtgcttttctcaaggtcatgagcttaagtaattaagggctatagactgaaaaaagtaaatcactttgttgcattaaaggcaaaacctttcatgagcaagctctatttgccttaagttatgctagtccaggtcagttgtcacttaggaaagcgagatattcttgagaccaaaggcttctgtggctgctatttgtattcgtgttatagttctttctcgggatccatccccatcatatgcatgcatgtgtacttgcagctgctctaaccatcagtgcatgcttcatgtccatgtatgttcttttggttctttcgttgctctctgataataattttcttgccccaacccaagagcagtgcaaagagtattctcgtatatacttagtttgattgttttaattcaaattcatatttgtctccgagttattttttaatgttt

SEQ ID NO: 94427 - DNA, 349 bp, Zea Mays
ggcagcatcggtgaccgaagcagcgtaggtggatagcggtgtcagggactcatgagcagacagagtcttgaatcccctatcccctgcatccatcactctgacgtggatgtgagtgttgtagtagcaagcccggggaggctcactcacttgccttgtttcgtacagggggcggacgtaggttcccaacgcgtgcaccacttcttgcagcaggttggggaagtgccccgtctcgaacattgatgtgtaattttcgacgacaggaccaaaccccatgaagtagtcctactgggcgtagttggcttactcgttgacttgttcttcttcgtcctcgttatcgtcgtcatcctcg

SEQ ID NO: 94428 - DNA, 452 bp, Zea Mays
cacgcatgagtgtgatgctagaagattctctaattagctaaggaatccaccgattattattcatcaatattagattgaggagctggtatttctaaccctaatttcttaaataggtagccccgttatccaatgttggagtttctattttgtttaagtgattggaatgggcaataaattggaacattgtgggccatggattgttgtgataacatgatgggctattttgtgtttgtgtacggagattacacccaattattgatctttgtatcaacaccggatcctcatgaagaattatgattggttacttacatgtagttagatagacaaatcataacattcaagtttgtcatgataatgaaataggcataatagtctaaaaaaatactgtattctgacatgcccaagtttggaaaacacattttttaaatcgggtaaccctgcttattgattcc

SEQ ID NO: 94429 - DNA, 637 bp, Zea Mays
gccgaccatgaaccaccgagctgctagttgcatctactactcctaccttgttgaggctcacacgcatagccattacttacctccagacctgtgcagcgctgatggagacgatcagcagtagcagtatcggtactgttgaagatggaggatacggatgtccttctcttccaaccggccgacgtgcaccaccggcttcgtctatcggagctaccctgcgtgcactaaattctgtgcactgttgtttcctgcctcacagatattgcgttgcagtgtttatcatgaatagctaggacactgcttaccattacattagtgccacgcaggcaataatactacaagaagtgacgatgtacagatggttagtacgtaaagcgtcgtcgatcccaacttgtgaatccgttcaaggccaacgtgtatatattctgagtctgatacacatacaatgtgtaaggctgtacgtcttcaattcaacaggcaacgtatcttcctcatccatgctcttccggcgatgtgcacgtcttggagacccctatttttcacgtacggggcgccggagagctcctaaccgccttaactccgatccactactcctcagttacagctcctgccaaccttctgaacaggcgaaccaccaaca

SEQ ID NO: 94430 - DNA, 572 bp, Zea Mays
agctgaagagggaggtgcacaaaattctatgtttgcagctgtattggatgagatgaagcaagaacttcacccaggcgcatcatacacaagattttcttttgtagtgaagttacttcatatcaaatctcgttaccagattagtaatgttgccttctctgctattctaaagttgttgtcattggctttcccacattgttatgtaccaacatcttataaggaagcaaagaaacttattaaagcatagggacttggatatgagtcaatccatgtgtgtcctaacaattgtgttttgtttcgaaaggattatgcaaaaaataatgagtgcccagtgtgtggttcatcaagatggaaagatggtgaacaaagaaataagagtcctcagaaggtgttgcggcattttcatttgattcctagattgaagaggatgtttgcttcagaaaagaactctgaggatgcacaatggcacaagttgaagaggaaaaaagtggaaaatgagcttagccatccagctgatggtcaggcatggaaagactttgatagaaaacataattggtttggagaagatcctagaa

SEQ ID NO: 94431 - DNA, 737 bp, Zea Mays
agtgagtgcccctgcacctacgcagtgtgcactttgtgagggtttgcaatctgcccttgattcttgcagacacggcaagacaagaatcgaggaagaaaacacataccttcgatctatcttgagttgggtgtcgtgcagtgagccctagttggccatgatggtcagtcagttcaagaggggaactggcggactggggttaggctttgctactaaggatgggagtgtcactctctttgggaaggttggtgagtgcagtggtttgacaccttcagagaaaccttcatccactcccaagcttatcaaaaccacttttgctaagcctgtcacccctgtgagagatggtgtgaatggtgaacctatgatagatcctcctcagaaacaagtgtggcttccaaaacctaaccatcttaggaacacacttgacacctttcccgacatctctagcgatccccttcctagagcccctcagccatccgaaaagaaaatcctcttccacaaacaaaatccacccaacagagaggtgaggtaccattgtgaatattgtgagagggatgggcatctaacttctttttgctttaggaggaagagagatgagcggcgggtttctgagtcgagcaggaaggacatgaaccgcccctctcatggtgttcatgctcagcctgttcagagatgtcctgggaggcctagaggtgttttgcctcttgccgctaggtctcaggcagtgagactacgtggtg

SEQ ID NO: 94432 - DNA, 380 bp, Zea Mays
cggctgggtgatgacatggcacgccagcgttttagaaataaccgctaggtgatgacatggcacgcctgcgttttagaaataaccgccgggtgattactgggcactttttagaaatggcgtctggcccgggaaaaccccatatgtactgcactgtccaacgcctccatgttctgtgccctagtttctgcttttctgcatccaggctttctctgctctcctgcaatattgcttccgctccattcgctagcaaggttgagatggcgcccaagcagaaagcttcgagttcgtctatcgcaatcattccccccatcgatcccaacagtcagttgcctttcaccggtaaccatatgtctgttgtctctgaatctgaccttcttcat

SEQ ID NO: 94433 - DNA, 635 bp, Zea Mays
aaatgatcaacaaattaaatcctctatgatattgttgagaccttggttcccctttcatacacgagttagacacacacttcttgtattttttaagtttacagatgctatgtagcctttcgaacatttattatgaaactatgttcatgatttgttgtgtgatcacaaacaactctgggagttagggcctacgccactgcagagagctccgggagggaggttgctggtcaacggcagtcacgcggccgcctccatggcatggaagcttgaggggtcatatccatgagggagagcggaggagatccgccgagtccattctatagagtccagactccagaccaggatagagcaaggctgaggcgtccagtttcatcaattcatcacgtcagttaccaggcgcacgccacatggctgattaccaaggcgagcctttcctgtcctcttctcacctttcttgatgtaatgtccagctcccgaacggaaacaccattgaaaatgtgttccttgtttgtgcgtaattcaaaatttactgttagccattgttcctgaacaacccttgattttatttcttgaatgtgcacctgattcatctaatgaaatcatggaaccacatgttgtgctactattttggttaagag

SEQ ID NO: 94434 - DNA, 412 bp, Zea Mays
cggctgtgcctctcttcattactaggactcaggagtccttcttccgggcacagctgacagcttagattgccttgcgagcgcaccagcttttggatttacctacttttctgcttgctgatggtgccgattcagagggacatctcacctatctgccaggactgctttctctgttgatgtcgagtggcaagtataatgaggagtgggtcagagtgtctatgctacagtgttgattgaccctaaccatcagtggttgcaattccgtttcgagagagaggatgtcactttgcatgccagtcagattcgccagctctttggatttccagagtcatcgactaggctccacagtttgtgctacggcacctcggatcctcctcgtcgccctcacagcggagttgcacctactacagctcac

SEQ ID NO: 94435 - DNA, 441 bp, Zea Mays
gggcgtgttgtgggctcgagacatcccatcttttcacagagtcgctcattgtggtgtgtggcgtgaaggatcgtcgggtggccaggaattgctcaccagagcaatgccttagtgacggatccaccccctgtcgttgacagaagatctacaccctgtcgactccggtaagagcgctccttcgaagttcgcagtcgtctcttatatgtgctgaagccctcgtctgatcatttggacctaggatcaccggaatctgtcgtgcaccgacgataggccactgtgtggtactctgcattgtcgctctatgaccgtcgtgcggagggaggagagccaaagacaattgatttggatgggagcggccaagataagattaatgggagaagagttgtgggtcgttgtttggttgatgtgtggctctgattagaagtggcgtacccttcagct

SEQ ID NO: 94436 - DNA, 429 bp, Zea Mays
agaaaaaaatgtgtgttttattaaacacagtcacacagatgtgtgtattctttgcaggttaataacacagctttgtttgttcttattattattagttacaacagcagtaggtggcaatggcaaacaagaacctgggttccaccgcggtctggcagatggtaacaaagggaggcactggacccaaggcaaggaatgaaggggaagggcggacaagaccgcatgcggagatgagaggaaagggtgaggcaacaagagcaagagacgagacagaaccctcgctgtccatcctcccacgacagagatggcatgtctgcccctccaagctccaactccatccagcgagctggacctggaggagactggacccagagagggacatcatcagaccagaccagaacaggcgtgggaccgtgggtgccgttgccttgc

SEQ ID NO: 94437 - DNA, 811 bp, Zea Mays
ggctcttcagcgctctgcatgatcggaacagtttgttttgcttcgacagctgaagaggaccctacgccaaattcaggtactacagacggttcaatataacgcgaccggtgggtcagaaccttcacctttttgctcttcggctcagctggggtgaccgaagcgacaatcttcctctttttctcttgccctcgcagcgggtagcggtaatcagggtatacgaagccaatagcatcaaataccctatttaatattttcttgccccgacctccaaaggctgcggacagagcattatcttcggccttggagtatgctccaagtagctcatcactggtagcttcaatacacttcagccagccatcgtttggctcatcaaacttctccctaaatctgaaggtatacttcagtcggaccagaccaccttcactagagtcggcggtggtctcctttggcatttcccagctctccacaagtggccataccctgaaggatatatgctcttgaattaaatcccttgtgccaatgaaggcacacatagtgttgaaagccctctggcatgcttcgacattgccatcaatttccaccttcggccttcggaggccgaagcgagactagatgggtcgctcaatgatttctttgatgtcttcccttgcctttaaatcatttttaacataaaaccactctcccatccacgacccagtccatctttttcggaatgtcggtactttgcattggggcgagcaataaatccatagcaaccgaagttgttgtggtactgttctttaccagtagccttcgtctcatataaaagctc

SEQ ID NO: 94438 - DNA, 520 bp, Zea Mays
ctttggtcccggctcttctaccaagcccgcactagcttcgattggcatcacagaagctgtttctatggctagagggccagcctctccactttcaataagcttcggcacttcggccgttccaataggcttcgacctacgtgtcaagaccttggctctctttggcttcgacgcgatagaagaggttgaagcagtagtttttcttttttcccccttgttttcggacgggaaagcagtaattcgggtaaacaaacccagtaacatcaaacaccctgtcccgcctcttctccctatgagcgccgagggcaactgtcatggcctcgtcttctgtcctcgagtaggctccgagtagctcatcatttgtggcctctatagcatctagccagtcatcatttggctcatcaaattggcttttgtattggaaggtgtacttaagataaaccaagctaccttggctagagccacttgtacttaagataaaccaagctaccttggctagagccagtggcagcttacttcagca

SEQ ID NO: 94439 - DNA, 916 bp, Zea Mays
caatttttgtaccttcagactgttatatgcgaggctatctgcaagatcgtccttcgtcatggcgcagaggccagcttcaagcttcgggaaccccatacttctggccatctcccgatagacagataattctttgttgtctaggaggcagtataagaagtcatcttcgtctgtgccattaaacactaaggcccctttcggatacttcagttctcgggcataatgtttagcttcaaaaatctcttcgtcagatagtatttttcccgaagcatgtcgtataatataatcaagaacttcggaaggcgcttcgggagtaggagtggcagctttttcaggcagaatttgttctacagcttcttctttcgctgccttttgtccggtttcctaggatttctccttggcgggctctgaaggcccagcttcggtcttggcctggatctttgtagcttcggcttcggttagctttgtctcagtctgcgcttttgaagcctcgacagttttccctggagtagagcttgaagtttttatcgtctccagcacatctagtacactagccatccttttcctcttgggggttgctgtaagacctttttgtgccttcggcactgtcacttctgtcgaagggcttagaacttctaatatttttgtccccttgactcctatctcttcaatattatcggccttcagctcagctagtttggctgaggatgccttcggcattgcaaccgactcttcaatcctctgcgtaagcgcaggttctttggcttcggtagccgaagaggtctcaccaccaaattcaggctctgtggccggttcaatatagcgcggtcggtgagtaagaaccttcacctttttcctcttcggcgcgggcttgcttggagcagctaaagcaacatccttcccagaagttgcactcttt

SEQ ID NO: 94440 - DNA, 344 bp, Zea Mays
cttagatcaaatggtaggtgtttaatttcaaaactaaatttcgatgtagtgaaacaaacatgtccttacctaacccttatgggctttggagttaaataagaagtgagttatgggcttaaagcatgtatgtttgagagctaagaggaacgaaagagattcgagggactaaaatctccttagtccattatgatgtcacccaaacaagattaaacaagaagcgacagacgtatatgtctccttagtccattatgatgtcacccatgtctccatgattcatgattggcagtatatacagcaggaccaagcaatttactttagggtacctgttggggacttgttctcaa

SEQ ID NO: 94441 - DNA, 567 bp, Zea Mays
tgcaattcacgccgagcgaccctatctatactaggacaagggtcgctaggagtttcatattcttcataactggaatgttcttgagaaacacccttgttcatgtggtcgggcattaacccttgttccttgattagagaactcattgagctatatatacaaaagattgcaacaaagattcaaaaaaatgaacacaaagatttgaaaagaagattagaacacaatatgtataatatcatactaagttcttacataatacgcagtccatcatactaagttcttagatagtacgtcatccatcattctatgattagaacatatatcataatttatactggtcgtcgtccatcaatgtcgtctaatcgatctccccatcttcatcgtcagagaggatgatgactgacgctgccggctccacatgcacaggtgcggagacaacctcgcgtgtagtcgttgaagtagaggagcccacatcatggtggtgagttgatgggcccacggcggcgacacgttgacggcgatgcttcaagagaactctgcaggcacacatgaaaatatggcgtacaatgt

SEQ ID NO: 94442 - DNA, 470 bp, Zea Mays
gtgggatgccgccataggcttgccgacggtgtcgccgcgtgcggtagtgagatggggaggaagaagggctcgcgccgtcagatgggttttggatggattagattagatgtcgtgcgccgattgggtgtggagtgagttggaccgtctgatcgggatcgaggggtccgagtagatatctgcgtaattaaatctgggccatgtatcgcggatccgagggcgggtatcgcgtaccggttcgcgaagtgggcagattaaaccgtgcgctcgcttgatgatccaacggttccaagtgatgcagcctaatacacagagtaatctaatccgagccacaagatctagatcctacggttgacaatagagaataccccttcgcgggtacgttttacaaaagggtcccaatcctttgtacatataaacccgcagtccactcagaagtctccctgtgtctcagtgttttcacgagttagccc

SEQ ID NO: 94443 - DNA, 297 bp, Zea Mays
gtgttgttgtgttctctattctatacgtgtcataagagttagatataataccatgagctacataaagattaaaagatatggaacctacattcattacctcatacgtcaatccaccattaactccttcattaatcggcccaaattaatggtagggttagctcaaccatacaatataatattgtagtgaataatactttcgtacaccacgagtgcactagataggttctgagaccgtctccaacaatgcacaataaagaagttgttaccatatatttagcattttttcgaaggtaaggc

SEQ ID NO: 94444 - DNA, 273 bp, Zea Mays
atcatcatttaggaattctccagggtcaatcctgcaaaatccaagacccctgagtaacggtttccttaataacttggactgcgggttgtttccggagaaacataaggactcttatgcaaaatggtacggctgaaggggtacgaatggttctcggtcgtcggattaaaaccctacggtcccgattagatccaaccacgaatgaatcagtacaacgcagcggccgttggatcgaacatctgcgttccagattcaaaataaccctggccacttctc

SEQ ID NO: 94445 - DNA, 439 bp, Zea Mays
ttcggctacggtggtggtgaaaggccgactgcaataaagaatatgatggtgaatgtcgaagctagaaacaatcagcgaagcaaaaaactttaaataaaagtacctataatcatggcgcgttcagcagcttcttcatctcgttttgcctcctctcaggcgtcgtgagattctttctcattcttcttaataacttcgttagccatatcacgaccgcccttcatctaaacatcagagtaaaatctttcgcctagtaaagaagctttggccgaggggtccttggtgtcgctagctgaaaaatatattctggctgggttgcgaccttaacatattcacaactgtccctttctaaaattgccgcaatccctcgcgcaccggggaaagcatagaaatcccctcgatcgccgagtatttcctcaaaagattcgacttctttgctaat

SEQ ID NO: 94446 - DNA, 392 bp, Zea Mays
ggctgaatgcagtaatccaatcagcacggtaccagcagactctaaggcgctatcacgacaaggccgtgcgacagcgatccttctcagtaggagatctcgtcctccgccgaattctaacgggggagggacggcacaaattatcgcccttatgggaaggacccttcatagtagcagaagtcactcggctaggatcatatcgtctcactcagatggacgacacagaagtcgggaactcctggaacatagaacacctcaggaagttttatccctagctgtatttcaaaagctatcaggatgacgatgtactctgtaaaatggaaatatgtcatcaataaaaaagggcttcaaagatactcagtttgttcacgattgacttgcattcttacttaact

SEQ ID NO: 94447 - DNA, 599 bp, Zea Mays
gatgcttgggatgacagatccggtgtgggttgggtggcatggacagtgtgtccttatgcaaaattatattgtaaataatgtaagtcaaaacttgcattatagatcaaatgttgctgcatatactaaaaataacaaaatgttgtttactgtacatataaaaaaccctatgcacatgtagtctgtgaaaggttctgaatgtataaaaagtgataattatatgactgacctgctgaatcaaccgaattcctcgattgttgtggctcatctgtctcgttttctaaattatcagactcgacacgtagtacctcgtcgattagctctataaagttgtctgctatgtcatattgcttctcaataattttgttaatgctgtcttttatggctaagcatgccttgtcaacctccaagtcatatacaacaagtttctctgtgaatttagatcgatgatgaggtgggagctggttgatcttacttgacatcatctccttaatcgatgaaagttggatgttaaaggtgggccgaggagtaggggcagggcgcgatgcatcaaaaatgttggtcctgcacttcagctggttgttcagcaaaaataataagaa

SEQ ID NO: 94448 - DNA, 449 bp, Zea Mays
atccggataagcaaaatacaaaggctccgaggaaagacacccccgcttccaagcaagagaagtgtaagaagtgtggatgcttcaaccatcctactaaaaagtgtcgcattcctcgtcatttagtggcactgtaccagcaatctcttaagggctaaaatgctgaaggacagggatatgaagctcacttcaccaccccacctaacttgaaggatggagctagttgctcaagcatggcgacaatggaaccaagcacgaccaatcctccacttctgaccgacaccgaatacatggacttggacaatgccatcatcgaatatgcttcgagtgatgtgtttggagacctcaactaggatccttatgctccaccagatatcatctatctgtagtctatgagtgtgtgcaacaagtgtgttgtaataagtacctagaccttggtatttgtgtgtata

SEQ ID NO: 94449 - DNA, 391 bp, Zea Mays
ctcgaaagcagctactgccgagatgaggatgaaaatgatgatggcgaggcggaggccaacaatgagaaccatggagggaaacgacgacgctgctgcatacggaacaaaggcgaacgacaacgactcgaggtgatgacgagacgaatggcctagaaggtggcatgagtaggatgtggatgaagagagcgccacctcgaggctgtcgtggaggagcaacagcatgtaatggaggagcagtagcaggggatcacctttggccgtggacaatggcgcaaggcgaaggccggagacggcaaggaatcaaaatcaagtgaggcaggatgtggaggagcgcacataggattcctagccacattagggcgtccacagcctgtgacgtcgatgatcaggg

SEQ ID NO: 94450 - DNA, 726 bp, Zea Mays
cccgcctatactttctgctggaacgtgcctcactctgcagctcgtcaattgagagggaggaggagataagggaagagaaggtggcggtgctagcatctggaatgtgccccatctcatccaacagctcccaccccttctgctccacagatttgtggctcctgatgctgctccacagcctccagacctctgatctgtcagctcatcatgtcctcgccctctgatctgtgcctccaacctgtggttattccctgttgaggtgtgcctgcttctgcttttacatgggctcagcaactcctgcttgcttccctgccagtaggccaggcccagcacccttcacgtagtctcacaattacctattctcccttcgtctgctcttcctccccttcctctgttttcctctcctgttcttctgttcagaagtctggactatattgcttatttgcttatgctttggatcttggacttggatatggatatactcctgtgatgtggtatgctgctagtgcttggatagttgggtatggtactagggtataaactgctctgtctagtgagtggaggctgcatagactctaaaatggacagcataaaggtgcacatcaatgtatgtttgtcttactctaatgtaggtgagggtatgtgtatggtgttgcctcgcggttcaccttattcacttaggcgtctggaaggggatcagttgccacgcctcaacttactgccttaata

SEQ ID NO: 94451 - DNA, 517 bp, Zea Mays
agctgtggtcgctgactttgttttcaagaacattcagccactgaaagacagagcatatccggcctatctgtaccgaggcttcgctgattcaacccgggtgaccaacaaaaaaattcctactgtggacttggtgagccggctcgagatgatactcagaggcaaagtgtcgaacatcggcgctcctgttgcatactcggcctggaatttgcctccttcccaggcctttaccagtttcgtgtcaaatcctcatgctggtgattgcggtttgggccttagagtgcgaccctctctcgaagaagttagtgctttggttgcctcactcggagaaattcctgacgacgagaggcaggttcattttgaggtgcctttgaatccaagtgacgcagagataagtgccatgctggatatgttagctgaagattcttatgatgccgctcttgctgaaacattggtggtggcgcccatccctgaggccgacaaagctttggacgctcagaggtctgacaatgttcgccca

SEQ ID NO: 94452 - DNA, 346 bp, Zea Mays
gggggatgttggacatgctttatctgatcctaactaggttaatgttgtgcatgaggagcttgaatattttgaaagaaatcaggtttgggttttggtgccacctccttctaactgccatcccatcggtacaaaatgggttttcaaaaataaacagagtagtgaggatggtttggtagtgagaaacaaggcgaggttggttgcctaagggtattgccaaaaagagggaattgattatgaggagacctttgcccctgttgcccacttagaggtcattaggatccttttagcctttgccgcttcaaagggttttaagctttttcaaatggatgtcaaaagtgcctttttg

SEQ ID NO: 94453 - DNA, 558 bp, Zea Mays
atgaagacgacggcggaaaggataagcgaggaagagagacgtcgggcggtgtgaaatatctccagccaaaagaattgcgtagagagcggtggctgaacactaggagtacagggaagctaggcgtgaagataaaagagaaaggtgatttcgctttctttttttaagcgtaaaggtaaaggtaaacacggattctatgattgggatttaaaaaaggacaacgatgggtgaattgaaaacaatattgaacacaatattaagactgaatttgattcagtggatattttcggtgtcagatgaattctttgaaattagatgaatttgtatcattaatttactttttgaagatttagatcgaggcgaaaagcaacagactaaattaaacggatttcggcttcggtatttcaatctgcatttgattcagttaattttagatgaattccgtttgctattcgaacactcgattagagaacaatttaattaaaaatcagtagacgcgatgtcactgatgacaaaaaggggattaaattattttacactgaaagcttagtcgtcgagttc

SEQ ID NO: 94454 - DNA, 795 bp, Zea Mays
ctcgtcgtagtccactgtttccgcggatccgcatcgcgacgtgggcaggacattgggccacataccccacggtgaggaatactccctgtgattcgccttagcctacgcattatttagcactagatgatttgggggtagtgtgttggagctcggtggggcaccgcactggggtatggccgtcacgggggttgaacggggaggcatcccttgcttggtcgtaaggaagaagatggcctcctcgcccttcaatctgtgatgagcggtccagattgggacacaccatcccttcacgctatcaaatctagaccatcagatctggatcagaccgtctgcgtagcgtaccggttcattaagctccccatctaatccgtaccatcggattgaaatccagcggctcagaaagaaccataccccttcgcgggtatgttttactaaagagcccctatagttttacggaattaacctgccatcccctccgggtgtttactgagtctggggatttattgcaccaaggcccctggactttctggtaatggtgcgctcagtccagataattagaaaatcagataaattcattaggaaaatactttttagtgtaaaaataaatgctagaacttgtttaatttatataaaatgcatacttggtccaaattgacccatttcagtctctataattttgtaacaatgttgtttatcatatattgcctctgtttttacatgaaaataataataaaattgatctcttaatcaatcccatatcaagtacaataaaatctttagaaattcataacttaa

SEQ ID NO: 94455 - DNA, 356 bp, Zea Mays
cccgtaagcttctggacgtccttgactcgggctgggggcctcattgcttcgattgctctaatcttttccgggttcgcttcaatgcctcggtacgaaaccaggaatccaagcaacttcccggcggaaatgccaaaaacgcatttgtccgggttcagcttcgtgtgggttgcccgtagcttgtcgaagaccagggctaagtcttccactagggtcgaccctctcttagtattgaccatgatgtcatcgacatagacctctactttgtccctaatcaggtccccgaaagtcttactcatcgcccgcacaaaggttggcagggcatttttcagaccgtacggcattacaacatagtagta

SEQ ID NO: 94456 - DNA, 330 bp, Zea Mays
attgttaacaggaggataatttcgggagctttaacaaacagaagatggatcttggatgtgtatggtatggttacttggcagtttttacatgaattctgtggtttatgggaggccttagaaaggattcagctgtagtaagagatattggataagcatttctggcgcctctccgctacagggcaattttcggtcaatcggcttatgaaatgatcatgcaaggatcaataatctttaagccttgggaacatatctgcaaaacttgggcgccgccaaaatgtgcattcttcatgtggttagtggcccacaacatgtgttgcagttggacaactg

SEQ ID NO: 94457 - DNA, 485 bp, Zea Mays
tgccattttagagccgttgcaccggctggcgccacgacggagccgctagtacaatgtcttatcgcagccgtgcttcgctctcttcccaaattcggaataaccgcggccgacctctataaatcgagcacctcccttgctttgtctcctcatcacgagcccaatgcaactctaacctcggccagtcatccaccatagtccgagtaatttcgtttcgcccaattctgatttccgcaccgccgtgggcacccctccgtcgaaccactgtcctgtcccttcaccctccttcctagctaccgttcttgagctctggtccgttgctaaaacttaccgtgcccttaatttggatgttgttgtactatatcgtcaggaacacgacgggaaagactccatttccgcgggtgtacgtagaccaagctttagggtagcattccggttaaattagtgattcccagttagtcgccaaggtctgaattatgcgtagacca

SEQ ID NO: 94458 - DNA, 641 bp, Zea Mays
ggggctgggtcatagctcgcgctgcccacccgagctggatcatcaccggcaacaccctcgggggctgggtaaacgcaagcgccatccttggggaccaaattctctgtagcagccacctctaaggctgaaggattttcaaccacttccataggaacagagcaatccagatcagcctcttgactcttaaaaccgcgctccaaggtcgatgaggcacgagacgctgctcgggataactctaacccgacagcaggcacattagcacaaacttccatcattccaccatctgtcggctccgacaacagatcttcagggacaatatcttcgagagtctgatcaaaatttgccagaggcgattcttgcagaccaacgagagcagacaaagctggagaaggaataccactactctccccactggctatatagcgtcgactgttcttccgaattaaggggatttcctcctcctcttcctcatcctcatcaataatacggacagtacacccattgggaccaactctagctggattacacccattggggtcagcatcatcaaggtcacacccattggggtcagcatcagtcgggtcacacccattgggttcagcttcagtaaaaatcggcactggcacttccccggcggcagg

SEQ ID NO: 94459 - DNA, 473 bp, Zea Mays
taccggcaacaccctcgtgggatgggttacagcttgcgatacccacccgagctggatcattactggcaacacccccgggggctgggtaatcaccagcatcacccttggggctgggttttctacaacagccacctctacggctgaaggatcctcagtcacctccacgggagtcgggcaatatggaccaacctcttgacattgaagaccgcctcccaaggtcaacgatgcgcgagatgctgcccgagatgcctctaatcccacatctggaatgtcagagcaaacatccatcatatcaccatcagtcgactctgacagcatatcctcaggaaatgacatcctcaagggcctgaccaaaatctgttatggataattcttgcaggctaacaagagcagacagagctggagaaggaatatcactatcccctctactacctctgtaacgccggctattcttgcgaattagtgggactttt

SEQ ID NO: 94460 - DNA, 511 bp, Zea Mays
ggatggaggaatggttttacgtgaagaatgatttgtcagcgagggaagacattaaggaagtcatcatgtgccccattttgtcccgcttcggcctccgaaggccgaaagttgaaattgatgacacagccgaagcgtgtcagagagccttcaatactgtttgctcttttattgggacaagagatctaattcaagaacatatagcctttagggtgtggccgcttgtagaaagctgggaaatgccgaaggagaccatcactaactctagcgaaggtgatttggtccggctgaagtacacattcaggtttggggataagtttgatgaaccaaatgatgattggctaaaatgtatcgaagctacaagtgatgaactgcttggagcgtactcaaaaaaggaagacaatgccttgtccgcagccttcggaggtcggaataagaaaaggttaaacagggtatttggtgctattggcttcatataccctgactattgctacctgctgcgagggcaaggggt

SEQ ID NO: 94461 - DNA, 528 bp, Zea Mays
ggatgaactacaaaatcagactcacgttgggattaggatatggaactcactctacgaatgcgctgtaatttccatcaagctgtgacctgtcggccatctcattgccgtccattttgccgcctctcatgccgtctgtgcccttccacccgctgcagatgggatcatcccccatcttgttgaagctgttcatgtccatcgtcgctcacttctgatcttgtgtttgggggattttgtggttgaagtgctaatcagccgccgccatcagccatgtatctagggttatgttggcgcttggtggcagaagaacggaacaagaaaggcaagggagcacaggagagacgaggggccaactcagtcttttggctttgggggcaagggaaagaaaaaaaatcggaagggataggaaaggacgatgcgtgcagttttctgactgctgctagtgcctgaagtgttattccgtgaatacttagattaccagtgttgtttgctgaattagctcatagaccggtgctattttatggatttccc

SEQ ID NO: 94462 - DNA, 1139 bp, Zea Mays
gcattttggttcatatcccacgtttggagactgagatagcttaatctcggaggtgttcggtagtgaactcatctcaggatagttacgaaggtaatgatcttcacgtccacatagataacaagctttcttgaagttatttcttgactttttccatgtttccatttttgtttcttggacctgatgcgacgacgaggctgaaactgtgtgcaggtgatagttcatccatcaatgtaacactcatgtgcttctttttggagttaggcatccttgtgatgtttcttttttggaatacctgacaattcatcgtctggtagtgcatctgctattagttgttcttggggagaccattgactttttatgccagaaaataaaatccggttcttctgttttgtagtttcactttcgttcgtactgatctggcgacaaggaattccatagtactcgcaacaacatgttccaaggtcacttatctgttggtttggttgtgcatccttttgtgtcttgaatgtttgttcatcagctgttttatttatagtattgttttgactttccaacacaccacattctttgcatttagtgacatcgcttgtagttgacattccaaagtctgacatctataagggtatgggagaatggaagggacgaaagggttgagtaaagacagattatagagagcagagaaaacccatctatctaaggttttacctagctaactgaggtcattgtggacaaaagtcacacaatacaccaacaatcatttcaaagaagcaaatcaatcatgaacacaagggacaatatcagcacaacacaatccaattctactcattcaaccaaaacaaaaggtgagacaaggtctagaataagaaagatattataaagtcaaggagttgggtaagaattatcaaggagttagacaagatatatttattggtgaccaagagtgaaataagataaccattaaagtgaggataaatgatacaaccaaggatatgaagtgagttagggagaaagcattatcaaggagacaaaatagagaggcattatcaagtaggaatagggagacaaagaattcagtatatcaaggtagatattgcccaagaatggcaattcaatggcaagaaaataagagtagaagaagt

SEQ ID NO: 94463 - DNA, 854 bp, Zea Mays
agggtgtcataattatgttgttgagaaaccttaatcaaagcatgggcctctgcaatggtacacgactactcgttaccgagcctggacaacgtatattgctctcacaggctctaatgtgggtgctgttgttttaataccaagaataaccctcaatactactgatgtaaaatggccattcacactccagagaaggcaattcccagtacgagtatgctacgcaatgacaattaataagagccaaggacaaaccctgtccagggttgggctttacctcaagaaaccggtcttcactcatggacaactttatgtggccgtatctaggactacaaccagaggtggccttagaatcctgattgagaatgaggacggttcgtgcggggtacagactcgaaatgtggtgtaccacgaagtcctcgctgtcgctgaagcggcagccatactagccacctaatttttcatccatcttttgtgttgtacatagcaatgatatgtaaatactccaacgctgctgctactcagacgattgtgtctcttctcatgcttgttatctttgttttttcttgctgcgtgtacagtatattttgctttgaggtaaaattgttctactaatgtgcagtacgtatactggccttatctacttccctgctgttgtattctctaatgtttatgccatttttggtgtcaacactgcagatgggagacgtgttgattccaagcctgcagtgtgggaacttatttgtgacgatatgcgtccgtgtttctcgtttttgggacttttctgatcctcaggatgatgcaaggctgctacactgtgatatggtgctgctcgatgaagaggtaaagtagcaacaacc

SEQ ID NO: 94464 - DNA, 297 bp, Zea Mays
ttgagtatggtagagattttgtgaataaatcagtattgattatcacaagactttgtttgcaagatgtttatatctccatttttctgaagttcatggcgataaaacaatttaggagcaatatgttgctcctgatataacctgtttccatctgaacaacacaagctcaattatccttatagataattgtcggtggttcaattgaaccatggtatgacattgttctcccatggacctctagtccaaagaacaataatatgtctatagtcatcatctcaaaaaccccagtgggaaaaataa

SEQ ID NO: 94465 - DNA, 353 bp, Zea Mays
caagggcgggttcagagccctccccttcatcttctgtgagttccgccctcgatctcatcttactggtcatatggcaagtaaaacgttcttcgttcattgcgttctctacaagcaagtctgtacttgccagtacgtatagcatgggatcttcaagtagttcatcttatgaattctcactggacttaatgcccaaagaattctcaaccacctcgcttcccttcgacttttaatgggcaataactcattcgttcggtgttttttggatgcctagcaaatgagatgctggagaaagttgctggattcgggctcaacaccaacatgatcacgtacctgaccgacaagtaccacctcag

SEQ ID NO: 94466 - DNA, 1011 bp, Zea Mays
gaaaatccgatggcaccggcgtcttacccggatgttgaaccagtcgcttacacgccaacttcggattatctgcctaccaacctggaagggtcccctgaatcgactgtgattccatctgatcagtaggcgcctacaggtggtactgcaaatgaaaatttggcccgttcgactgaggtttttcccccttctgctcccgcacatcgctatggaacaagacttcaacataatattcgacgaccaaaattgaggattgatggtacagtgtcttattctgtggcctgggtttcatctgctgaaccgacatctcatgttactgctttaaagcatcctctatggaggcaggctatggctgatgagtttcaggctctccttaaaaacaagacttggcacttgattccccctcgtctaggtctcaacattattgactgcaaatgggtcttcaaattgaagcagaaagtagatggttctattgatcggtataaagcctgattagtttctaaaggatttaaacaacagtttggcattgattactctgacacatttagtctggttgttaaacctactactattcgtttattgctctcgttggcttgctctagaggatggacacttcggcaaattgatattcaaaatgcctttttgcatgggtttcttgaagaggacgtttatatgaagcaacccccgggctttgtggataaggcccaccctaattatatttgcaaattggataggtcactttatgggttgaaacaagctccgcgagcctggttttctcgtctcagcaagaagttggttgcccttggcttctccccgtctaaagccgatgtgtctctgtttatttttcacaagccaaatctctttatgtatatgctcatatatgttgacgacatcatcatcataagttcattttcatcggctattgaaaatttgcttcatcagttgcgaactgactttgcggtcaaagatttgggacctttggcatattttctaggcattgaagtgtctcgtatg

SEQ ID NO: 94467 - DNA, 442 bp, Zea Mays
gaagttcgcgcctaggttttgccccctcaaatccgggtgtgacacttcagcacctttgtgtggagaatggagtgattctggaggacagctcataggagattctagcgacacacactctgttgtcggagtcacaagcctttgtagctagagcttcatcttcaacaccgccagcaccagtagctcaagccccggctcctggatgcgatgatccggatgattttggtgatggtggagaagatgatgatgaagaagaagaagaggaggaaatcaacaatgaagaagccaacgatgagtaggaggacaatttcgttgggatatggcctgccactgagcattacacctcaatgttcgagataggacacttcccaaaccagctataggatgtactgcatgcgctatgaacctacgtccgacctctatatgacacaaggcgagtgtctga

SEQ ID NO: 94468 - DNA, 380 bp, Zea Mays
gttggaacgactttctttacgagagcaggactcaagaccttcgtcgtttccagcacaacatccagcacgtttgccatccttctcctcttaggagttgcagcagaagtcttttgtatctttggcagatttgcctctaacggaaggctcagaatctttggaatttttgttatctcgtcaatctttggctcttcagccttttcagccttatcttcggctggcccagctgtatgtgtctttggcattacagctggttcttcagcgccatgtgtagtcgaagcagtttgtattgctttgaccgctgaagaggatcatgcaccaaactcaggcaccatggccggttcaatgtaacgtggccggtgggtcagaaccttcatcttttt

SEQ ID NO: 94469 - DNA, 363 bp, Zea Mays
ggaatggacaacctctccctgggggctcgggcgtatggacaatccatcggcctctgccttggctctgagcgggaaaccagcgggcgcaagtcaacaacatagtgtaccgtcacgtcggcttgcagggcgccaagacatctctccttcaaatacaacaccaggcttcactgcagacatccccttcatgtataaatagggcagtagagtccctccaagggacagacaagaaggacacaccgacgaacactcacttctccacctagtcttcagtattggcacttgcctcaatcatttctagggacttggggacttcccctctcccgccgtgcttgtaatccctactgcagccacctcggtgcgagt

SEQ ID NO: 94470 - DNA, 594 bp, Zea Mays
attttcagaatttgtttttatgaattataagtgctgaaggactacgggtgtatttttagcaagggcaggggctaaactacaagttctaggaccttttcgtaatggtttttcatgacacggtggacgtcgggttgagtttttttgaaacccgagggcctttcataaaatggccatagctgctacaacgcgggccacgaggggccacatgctcctcgatcgatggtccataatagattgcgaaccagtatgtgctattggcctttggatctggatccacgacccgaaatcaattaattgagatctcctcaggtccatccgatcaaagatctacggtcagatttaactcgaagtgaaagggtatgggatcatctaatctggcccgttgccgttgatccaacgactggcacattccttccccaaccggatgcacagccgtggcggcacccccaaggcggtggcagcgcagactcctgcaactacgattcacgcgccccaagctttaatctcccgttgagcaggtgatacatgaagatgggggaatgtcgaacacgataagcgcacatacctatgacagaggatgccatgatgggccgg

SEQ ID NO: 94471 - DNA, 381 bp, Zea Mays
atatatcgtggtgccagctttcccttgatgccaaaacgacttactcctttcgtaggtgaaaccttcagatacacaaaatcgccaacttggaaaaataagggttgtcttctcttatctacataacgtttgtgacgatgttgtgcaatcttcaaatagtgttgaataagtttcactttctcttccgcctcttttactaaatctggcccaaagaaaaaccgttcgccgggccctgaccagtttagtggagttctgcaccgctgaccataaagagcctcaaaaggtgccatctggatactcacttggtaactattgttgtaggagaattcagccaatggaaagcactcatcccattttttcaaataggctaatacacatgctcgc

SEQ ID NO: 94472 - DNA, 909 bp, Zea Mays
cccattgggatctactctagtaaagagttccactggtacttcttcagtagcaggaacagaagggccggcatcacgatccaagcatgacactcgccgaagccgtctctttttctttttcttcccctcgacaggagcagctgaatgactaacttggcgaagacgtttcaggcgagtaccttcaggccttcgagtatctatggttttctcaggttctgggatagttgcaacagtcattgtttcagcagagaccaagtcagaagaatccctagccaacatgtccagcatagcgcttatctcggcatcacccggactcataggcatctcaaagtgaacttgcctctcatcattgggaagatctccaagtgaagcaaccagaacctcaatttcttcaagagagggtcgcactctaagacccaaaccactgtcactagcaggaggatttgacacaaaatcaaaaaaggacttggaaggcggcagattctaagcagaatatgcaacaggagcaccaatgttcgataccttgcctctaaggatcatttctagtcgactcaccaaatccacagtaggaatcctcttgttggtaacccgggttgaatctgtgacaccactatacaaataagctgggtatgtcctatccttcggtggctgaatattcttaaaaacaaagtctgcaaccacagcttcagcggtcagacctctctccttcaacaagcaaatttcagcaagtatagctttggcttctgctatctccaagtctgtgggagactcaatccaacttggagcgcgaacatccggctgtctccctgaccgagggggagagacttgccatggttttccacaatgaaccactctaagcgccatcctttaatgctatccttgagtgggatgttaaggtattctattttcctc

SEQ ID NO: 94473 - DNA, 576 bp, Zea Mays
ccatcgcaagccggacaccaggagaacaaaagaagaacacgagggagagaaggttggccgccatggggaaatcggagttcggtcgtcgcgtgggcctccaagctttgctggggttcatctccatggcgcggggacggttaccatgaccacccggtgaaggaccgcgcctcggcgactccccatggtgatctcgtgctccgccgcaagaccaccgacggccatctggatctccggtacgttaaccctcctataagtcttatacccacgtaacccgtgcctagctgctacgatagttgtgactgttcgtcgtgggcctttttcaccggggtgctcctcgccgtggaagggctaccggcgccggtcagccatgaagagagagaaaggggggatagaagggcgcgggaggaagaagaatagcctaggccgtggatctgtggccaacggtggggattagatggggaaataactcttcgatgcattaaatccgggtcgttggtgcgatcgcgggcggatcggatgtagtcgtactgtgggccgtagatctcaaatcctggggtctgtattgaatgtcgttcg

SEQ ID NO: 94474 - DNA, 1068 bp, Zea Mays
gtctgctgcatgcctacatgcatgtgggatcatgtgcaataggcaattaggcatgtgcttggtgctacacttcgacgacaccaacaagccgagcgattttaataaacagcggtggccggcgtagcttcgtagaaactggaaattaaatccctgtgtttgtttttttgtttttttataggatactggtttatacgtaaggtgcaaatacgtacgctaattgcttgctctaggttcgacgactcaatgtgcaccaaaatccaaggagtattcgggaggaacgaccaagtttccgtcgagcaagtccacaaagtgggacgagtacgtcttcgccgaataaatctacgaggaggagagaacgaccaaagtttccgccaaacggacttgcaggaaggaacctagaccgacgccgctggcccacgtcgaccgcgataagacatgtcatcaccaaatcacgtcgataccatacgtatagtaccaaaagtcgtagagaccttaggatcgaagtctctacagtgacccatacaccagaaaggacatgacaatatcccatatcgggtgtatacctacgcataatgaaaagtgacacaagggtatgacagaagattaagctatactgaacacgatcatggacctcaccataagtccactttgtgggacccgccaggtaccggtaccaaaatgttgacatcgaccaacttacatggatctgtatggagaacggaggggcagatgccatatcggggatacaacaagacacacccctacggacgacaccaggagggctagagcaacctaggggcaacaagtaaggacccctgagtagaatacaatttctgactataaaagccacctttgatctataaaagggcaggacaaccttctttctcgacacaagcacacttactctaacacgctcctgaacaatacatcgatcaacactacattggactagggccacggtctaaaccagtttaatcccttgtgcctcaactccttagctcggactcggatcctcgtgattcaccatttgaagtgactccgtgcttccacccccagcgtacacaaatc

SEQ ID NO: 94475 - DNA, 275 bp, Zea Mays
gtggacgaggcgaagaacaattctgattgaaaggtcggattaccaaccttgttcgcttctcaggtccctgattggacctgtcacctccaaatcccttggattttccttggcctgtattcttggcttctactgccagcgtcgtgctgacagacctgctgtgtgtaagatctaggtaggtggccattttcctttggagccggtcgttgagtcctctcataaagcagttcttctttttcaggtcagtgtttacttggtcaattgcatattggaataaa

SEQ ID NO: 94476 - DNA, 526 bp, Zea Mays
caacgttgttgttgttgtgggggctgcggtaggtaggaggagtatatatacttaggttttaatggtgttgtttcagtctctcaagggccagattaggattcttatcctttgggttttcgacttgcggttgagtggtctctcggcagctccaagagctggtggctggttccctgaccctgctcaagctgtctctgtctggttttcttctcctccttttttccccttccttttccattgctgctcagctcaaccggattccctgagcttctctcaagctctcttgccgttcttcccagcgcaaggaaaacgttttcgctgtcgatgattagttagtgccactgttatggtgggccttgccggcgctaaaccacgctatgggagtgagaaactaatgggcctaaggttcagcccaaaggctggaccttatcttgcaagtcactgaagcctgaagatgtatgccagggcagattcaatataagaggctctcgcaggagtaaaatgtggcatcatatttgatggtatattt

SEQ ID NO: 94477 - DNA, 664 bp, Zea Mays
tatgagatgagtggaccattcttgaagagagcaaagcaaaaggtattggatagattcaagaatcaccatgaatcatggcagctcacaggttgctcggtgatgacagatgcatggacagacaggaagggtaggggagtgatgaacttggttgtccatagtgcacatggggtctgtttcttagatttagtggattgctcagcagtaaagaaagatagaaaatatgtgtttgaccttgtggacagatgcatccaagagataggggaagaaaatgttgtccaagtggtgactgacaatgcaagtgtcaacaccgcagcagcaagtctaatggcggcaaagagaccctccatattttggacaggatgtgcagcccattgcttagatctcatgcttgaagatattgggaagcttggacctatagaacaaacaattgctagtgctagacaggtgaccacattcttgtatgctcatacacgagtgttggatctaatgaggaaatttcttgggaatgacttggttcattccggggttactcgatttgccacagcatatttgaatctaaaaagtttacaggacaacaagaaggatatagcaagactctttagatcggatgaactcaatgagttgggttacttaaagaaggcaaagggaaagaaagcaaacaaag

SEQ ID NO: 94478 - DNA, 1216 bp, Zea Mays
gcaaggtgctgtagatgatcctcccaggatcgactgtataccagaatgtcgtcgaagaagaccaatacaaatttgcgaaggaacttagagagtacttcattcattaaggcctggaaggtcgaaggagcattacacagtccaaaagccatgaccaagaattcaaaatgcccatggtgagtgcgaaaagccgtcttttccacatctgcttggtgcatccgaacctgatggtacgctgatcgcaaatccagtttggtgaagaattgagccccatgcagttcatcaagcaattcttctactactgggattgggaatttatccttaatagtcgtggcattcaactcacgataatccacacaaaaacgtcaagacccatttgccttgtgcactaagagcaccggtgaagagaatggagaacgactaggccgaatgataccttgtgccagcatctcaatacactaacgctcaatttcatccttctggcagtgtgggtaccgatagggtcggacaaccactggatccgacccttccttcaaacaaatgtgatgatcacacggacgggagggtggtaggccctgtggctcgtgaaacagatccttaaatgtgtccaggatcccctgcagatgaaggtcatgttcaacttccaaagtgcgtaactgaactgacttcccatgatgtagaaggccttacaaactgacatgtccaccctcgaggaaaaaagacatttggagggagtcaaagttccagctgatatcacccaatttctagagccattgcaccccgagaactacatcaaacccttccatgggaatcaccaagaaggaatctgagaaggaatgatcctgtataccaaactgaacggccgacagacgccccaaacatggcaatcgagctccattggccacctacacctgctgcttggttcctaacagttgtggaatctggagcaaggaagccgcatggctgctaatgaaattgtgtgtgcttccactatccaccaagcccactagtcgatgttgccccataatcagaatgacctgcattgtgcggctgaccttcaacccatttatggctagcgcagaaagggttggttccttctcaatcacatcatcctcttcatcctcgttgagcactttgagatcaaacaaacgctggcagcgatgtcccctcgagtatacctcatcgcagttgtaacaaagacccttctccctgcgttcag

SEQ ID NO: 94479 - DNA, 428 bp, Zea Mays
agtgcaaagaatgcggtgtgttgacaagtcaaaacaacactataaataaaacaactgatgaacagacattcaagacacaaaaggatgtccaaccaaaccaacaaacaagtgaccttggaacatgttgttgttgtgagtactatggaattccttgtcgccagatcagtacaaatgaaagtgaaactacaaaacagaagaaccagattttattttctggcataaaaagacaaatgtctccccaagaacaactaataacagattctctcatacctaatgcactgtcagttgatgaattgcaaagtattccaaaaaggaaacatcacaaggatgcccagccccaagaagaaacacatgagtgttacattgatggatggactattacttgcacacagtttcagcctcatggtcgcatcagatccaagaaacaa

SEQ ID NO: 94480 - DNA, 449 bp, Zea Mays
gtgacgatagaacaactgaccatagtgaacatgatggtggagaagatgatgatggtagtcatggggatgggggatgtgatggtggaacatatggtgctgggggtagtggtgatggatggagtgatgacagatgcagtggtatggtggattggagattcactaaagagagtgagttcatccatgccgcacaagattgacatcaaggagcacctcagtccgaatgagagataagaagcggtcaatgtcgatcgatttcgtttcctgctgatgatggaagccacagttcagctagctccagttataactatctaactccacgcttcaaccatgtcaacaacacttacacatggctagatcctccacgtgaagtaccaatatcattcgtgtatgtgtttggacaaccaccccttccaccctcatatgcatatatgcatccaacaccacctgag

SEQ ID NO: 94481 - DNA, 304 bp, Zea Mays
aacgtttcttgcatcgctggcaaaatttggatcaaagttgtcaagagccttccatgcatcaccatctgatgggtgcaccattaacccatcttgtctgtccgtacaatctttatgccacctcatgtgcatagcggtcttcctcgagagaaacaaacgtttcactctaggagtgagaggcatgtaccgaagttgtttatgtgcaacctttgtcaccaccttctccccatcttcatttataagctccacgtacctcgacttcccacattttaagcatttctgctctctgccatgttccttccaaaaa

SEQ ID NO: 94482 - DNA, 598 bp, Zea Mays
taaggacgaacacaaatatcagatcaatatatgcgatttcatatgtctgttcgaacacaaattttggagaaaaaacaatacagaacctagtagcagtgacacaaattttggattaaaatagaaacttaagtctgttcgaacacaactcgaaagaaaacattgacactaacacaactatatcagacaattggactgctagcagtgacactgtaccacctagaacctgcaagtagacatgtatttgtgtatgtaaattgcagtcgctagtaataagtaattgaaaatcaaatcatttgtacctaagcatcagaaagttggaccataatcttagcccgcaacctcatgtagtaggtcttttgttcttctgtcactgcactaagatccatagtcattatcctctcttcgtctctttgcttctgtaattgaatctcctctttcctcacctcgacaagtgctttttccgtgttaactcgatcgacttcaagtgcaaacgctttattgaacctctcctctttttcagctctttctcagcatcactttctttctttccaacccacaaatgttctattgcagcagtcacacttttcttcttctcttg

SEQ ID NO: 94483 - DNA, 418 bp, Zea Mays
caagttatcaatccttctccccctttttggcaactagcaccaaaaataggaggagagaaacatcaaccacaaattaccaaggaggagatggatcaaagaactgagacgccaaattagctgcaaagttttcttccctagactgagttggggggatagctgccagatggatcctggggaggaggatatgaagaagatggacccggatctccctggtggggaggcgggacatactgctctctatcatcaaaaaattcttcctcttctccttcttcatcttctgctgacatgaatgggaccccataggcttgctggtgccattcattgatctctagcggaggaggatggaggggcacatcaggcgagcggggagcaaaaggcatacccatggaagaggcctgacgacgaaggttgtcgtcag

SEQ ID NO: 94484 - DNA, 939 bp, Zea Mays
tgtagattgagttgtagtaccatatattgcctaccaatgtagggtgttagtcctatgtactgtatataatcagcacatgaggcttaatgcaaaaaagtctactgttcccaaattatagatattagaaaaagattatcaatagtatgaagatggcaatggtttatacagcacaaactaaatattgtagaaatgttaccttaaagcgagttgcaattgaggattttgatgattttgtgttctcttctgttgcttgtggaaataaccctgatacaaaagagcacttagaagcattaagtaattcctgatgctctgctaccacatagtccttgttcttgtccaggaattgatcagattgatatgttacctagggaataaagaagtaaaatgatcggactcaggcaaaaacatgagcactaaacaacaagaaaagtcttgtattatagtgggaaatatgtttttctcaaacacgagggggaaacacttacatctccagcataatgttgaattgtaaatgcagtacgagaaagctttggtttggtaaatcttttgtggttcttgaacttttcgtacagcttctgagacaatgtctcgtgtgtggactttggaaacatgctgatggacgtatttcagcacaaaaagaaggtagctgttgttagatgcttgtattcacaaaactgatgcaagaatgaaaatccttgactgatatgtgaaacaattaatttggaagtgaacactggatgttcaattcagtaaaattcggaaaggagggtctggaaatgcaccagctacaaacagtcctactggaagcatctaaagttctaaacaatttcagttctcaccaccaggcatacataagcatagcaatagcttggtcagatgaaaacatgaaacatgtaaactcaccaggcttcatcaagaagcgcaataatgccacctggt

SEQ ID NO: 94485 - DNA, 475 bp, Zea Mays
ggttcagcaatcaacccagaaagttgtattgtcttttttgtggcaaggacaagggccacacaacaagaacatgccaggtcacaattcagaagcagaaggaaattgtcgaagctgaggcgtggcagagtcagccaaagcaagtcctccacactgcttcatgttattccccatacatcccagaatacgtaggcaatcaacaacatacgacttttgttgcttcggcaagccattccccaacttcctggccctagttgccaccaccaccaccactgatccacaatcaataaccagaagggcgcaatcatactccgcaatagcgcgaccttcgggaggagtccgaagctcgcacaatcaacagcactgtgcctgagtcgaagcatatttactaaaacgactatagtggctcagccaaggaatatgatgatttgatgtatcttaactctttctgccttttatattttcttgaaagaaaaac

SEQ ID NO: 94486 - DNA, 456 bp, Zea Mays
ccccagtcaccaaggtgatgacctcgacgaattgcttcatatggacactattggtctagctcgggttttctctttcggggggatgtcgtatgtgcttgtggtcgtcgatgatttttctcactattcttgggtattcttcatgaaggcgaaggatgagacttttacttgtgcttgagatttgattcttaggttgcaaaatgagtttcccaaaagtgccatgagagcgattcatagtgataatggcagagaattcaaaaatactgattttgagaccttttgtgcttctttgggactcgagcatcaattttcctctctgtatgtgcctcagcagaatggcattgttgaacgcaagaatcagacccttgttgagatggccatgacgatgcttgatgagcataggactcctaggcgtctctggccgaagcgatcaacattgtcgttatgtgtcgaaccaca

SEQ ID NO: 94487 - DNA, 306 bp, Zea Mays
tcctacatggggactctgcctcgcccagggcctctgttggtcctaacccctcgacctagttgctgagggtgattttggttgcaagggggctttgacatactattgttgattggtgatgttgtggacttactattatggtttgctgctagattgcgaggtctctttgggctttcgcgatgtttccggcttgtggtaatgtagctcctctgatcatgcatatttctcgtgaacttatatagttcctagagcatggttggagggtccatagtgtagtggctatagagatggccagctcgaaggccactg

SEQ ID NO: 94488 - DNA, 617 bp, Zea Mays
gctggactcactccgtcacgctacagtcagcagagtcagagctcccttcaggccccctctgttgcaagcaaccaaccgccagcaaatgcctgttggcactgcagagaccccattcacttcaagaataactgcccccagttgaaggcacccggacctacctactccaactcggtgaatggccccaagattccctcggcactgcctccaaggcacctccctccaacagtcagcagagcaggacccagtaccagggcagagcacgagtcaaccacctcgacgctcaagaggcccagcaagctccaggagtagtgctcggtgagttccttgttgaatttactcccgctactgtgctttttgattcaagagcatcccattcatttatagccactagttttgtggaaaaacatggcatcccctctacacccctagaaattcctttggtcacccgaaccccggggtcagaccttctatgccagctcaagtgctcccatgtcagaatccttttaagtggggtagtgttcctggcagacttaatcgtcttgccatcccaagggattgatgtgatcctaggaatggattggctaactaagcacaagggtatcataagttgcgcaagt

SEQ ID NO: 94489 - DNA, 463 bp, Zea Mays
aacgactcggattcaaagtgccgaagggttatctgttgttctaatcttgatcgtaccttaccgatctaacggtcaccgtttccaacccacgccatcatctccaaccagccacccatagtcaatcggacggccagggggttttcttccccacgacagtccccagatggcggtgcgcgagaaccatggcggtgatgcattccggtgaaccggtgacccgaggttatggcaccccaaatcggtcgtagaccggcgctacacgtatagaggatgagctgagtcaacagagtcgatcctcaccgatgaagaaagcaggagcagggccagccatggcgcagggcggattagcagccgcgcccgtactccgatgaggaattctagcgttgacgccacccaatcacgccgatgtggccaagaacttattcctggagactaggcggagctcccccagaccctgaccgaggac

SEQ ID NO: 94490 - DNA, 434 bp, Zea Mays
gccttctcttcccgcccgatactgggctgaggcgctgaacacaaccacctgcctcctcaaccgttttccctctaaggcgccccccatcgcacttcgttcttcaccccctttggcaccacccccctcttatgagcaccttgacatcttcgtgagtgcttgcaatcccaacaccttcgccaccgctcatcacaaactttcaccccgattctctcactgtcttttcctcgggtactcctctgatcacaaggggtaccagtgcctagatcttctcacccaccggccaccgtatcatcatctctcatcatgttgtctttgatgaggatgttttcccccttctagctcctctccacccgtcgacccaattcccttctcgatgtcgattgcgtcgacatacctgctcttcccctacccctttcgcgtcgcacgcaaccgcg

SEQ ID NO: 94491 - DNA, 966 bp, Zea Mays
cacttcatcatttaaagttagcttcatcagacgagttagcttcgtcaaattgtaaaaaccatcaaaatggccagagtgcgatcaactgcaagggtgtctcgtgagggagaagagaccgaggtaactgggacagcaccaatttcagaagtcaaggaacgattaggtctagttgtgaccgagggggctattgacgaaggtgctcctaatgccgaagctgaacagactgttgttgaagaagaaaatgttgatggaagtgaagaagattacagtattttgatcccaacaaagcccagacatctagattttgagaaatctactatttctaaagacgacatgcccatgatgatgaaaatgggctattttggggaagctgaaagcaaatttgtccaatttgccggagaagaaactaccccagcaccgaagaataatgatgtagtggtttttaagagcttcttcatagcaggactgcaatttcctctgaacgagatgattggaaaagtcctaaaaaatttcgaaatatatcttcatcagctgacccctaacaccattgttaggctcagcgtctttatctgggcccttcgaagccaaggaatgagccctgaagccaaagctttctgccgcgtgcatgagttgcactatcagacaaaggccagggcagatggtcttcatgaaaattttggttgttacaattctgcgtatcacaaggatacgaaggcaccagtcctcagctaccgcacaaagtggccaaccagctggaaaaatgaattgttttatatgaaggttgatgagaaaaatagagagaagctgatgaccatggtcatgagtccgctgtctttaaacttcggaatgatgaggcccctatgcaacatgcaactagggtcgccatgtcagttggccgaagtcgagttcatagtggtagctgagcaaatcagtaccagggacctggtgcaggaatatttggccaac

SEQ ID NO: 94492 - DNA, 671 bp, Zea Mays
cgcaaatcagctatatgagaactaaactcagccaatttgactacaatatcatcaatgtagacttccacagtgtttcccaatagctcgtgaaagatcaaattcataaccctctgataagtagcaccagcatttttcagaccaaatgtcatgacaactcactcaaataaaccaatgaagcctggacatataaagaccattttagacgcatcttcttcggccatgaaaatctgattatatccagcattaccatcaagaaagctaataattctattttgtaacgcattattgatcaacatgtcggctatgggcatgggatattcatctttaggagttgctctaatcaaattacgaaaatcaatgcatactctgagcttacctaattctttcttctccaccgacacaatattggagacccactctatgtatctgcaaggtctaataaaattagcttctagcaaccggtgaattttgttctttattcgtgggagtaggtctggacgaaatgttctagctttttgcttgaaaggtctgaaaccggatttaataggcagtcgatgctctactatttctcggcttaatcctggcatctcagtataatttcaagcaaagcaatccgaatattctttcaatagaccgatcatttcatctctaggatcggtctccagggtttt

SEQ ID NO: 94493 - DNA, 330 bp, Zea Mays
gtggtggtaaaccctaaggaataacaaacacatcagcatgatcactgagaagctgctgtaattcagaaggaaggtggtgtacaatgtcctattccttgtccgacagtgagtccaacatacaaacttccaatgtctggccatgaactgagctagcacccaaacccagagcttgattttggaatgaaggtaacgaatgaccaaacatttagcattgcaatggatccacatcgggctgacggaaaaagccaatccatgccaagaataaggtcataattggatagtggaagaaccttcaaatctgaagaaaaagggaaaccaccaatgtaccaa

SEQ ID NO: 94494 - DNA, 596 bp, Zea Mays
atgcatgaaatgattgctaaagtgttgaaaaagtttgagatatatcttcaccagctgacaccaaatgcaatagttagacttagtgtctacatttgggccctttgaagctagggcatgatcacaaattccgaaggtttctgcagagttcatgagttgcactatcagatgaaggccagagcagatggtctccataagaacttcgggattttgcatataggaaggatacgaaggctcctgtgcatggatatcgtacaaaatggccgactgactggaccaacgagtggttttacatgaaagctgatagcaagggtagggagaaggttaagaatatagtgatgagccctatgaagttaagcttcggtataacaaggcctctgtgttttatgaaaataggctccccgtcccaaatggctggagtccatttcagagttgtcgctgaacacattagtactcgggacctggtacaagaatatcttgccaataggggttttccaacattgagtggataggggatgccgaagttcaagggcaaagcgaacaaatttgaacttgtaagattgccataccgattcaagttccaggacaccttcagcggt

SEQ ID NO: 94495 - DNA, 894 bp, Zea Mays
agaagtggggcaaggtggagtgctctgtgtgttacaagtgtgttcactacttttgctggctagctgcccatgttcttttgtcactaccttctgttccttttatagaccaaggaaagggatggcctaggtacatggatgcgtcgttcagaccattcgtatgaggcttccattttgtcgtattgccccttcgttccatggagtgtctattgtttggtggttgacatcgttgctccttactgtattcctattctagggtgtgtcttgtcttatcctagcacatacaactagttgtcctttgggttgtggcttagttggacattggttagctttcatactgacagtgacgcgtgtgtcttctctaaagtaatcattcaggctattcggtcgtcaaagcatgagtgtctagttcttaactctcagtttgttattcgagcgtcggtctggtacctttgtactgtctttgcgatgggccccaatatgattttccgattgcatgtggccctcgaggggtcgagcatagctcccgacttctaggttgagcgagatggtcctccctgggtatggcattgtgtcctaacccctaggttgggtgattcggtccccataggggtggcttcacatcccgacttcttagatgggcggggattggaggagtcaaagtcctatggtggtgggtcggctgaatcaagatcattcacaaggttcgggaaatagatttggatgttttcttagtgctctatgtcgtatttgggttattcatccctgacacttagattattctgttttgtatagtttcatcatttcatcgatttgtagaatcccacattcaaggccttcattatagatctgcagctgccactttaattgagttgtgtactatcaagttcttacttg

SEQ ID NO: 94496 - DNA, 385 bp, Zea Mays
ctcgccgtgaccagctcgattcaggttagctcgagtccctctgctgcttgttctagcatccttaggtaccccgcaaacccctcgacccctctaattaaaccgaaccgccagggatcaccaggaacgcgtaccattgtcctcatcgttcgcggttcacgtggacagagcatgatagcttaccaatcgtgaaattaagttaggggaatcgttcggggagggtttaatccggtgtacgccgctcgggagcatcggtcgttgcataaatccatcggcacaacctcaccagagttcatcctccgcgttgtcgtcgtcgtggaccttcccctgcgaagaaatagaaaccggagggcttttctgcaaactgtcagcgactcagtgcaacagt

SEQ ID NO: 94497 - DNA, 473 bp, Zea Mays
tctcgccagagtttagcatcttattcagctagttctcgctctcgctcctgagcctgtcggtggttgcggcggcgggagttgtttctttcttggtgtaatcgttcattgggagtttcccccacttccgaggcttcgccccgggacacaggttgtgccggatcccgttctccggcttcatgatggcaccgcacattttggcgtctgtttctttgtcgccaggcgtcacgctggtgatgttcctccccatgcatggtagctcatcgtcggagatgtgcgctgactccaacctcccctggatgaagaggacgtcagggtagaaaggagcgggtatggcggtgttcttcttcccatcctcttttgagggcagaggtatcgagaggatggctcagtgtgttctccttccctggtacaagatgcttacttccttcttccgagtgatccgcgtccactccttagtgggcaaggtggacaac

SEQ ID NO: 94498 - DNA, 534 bp, Zea Mays
atttgcgtttgctttactaggagacgagatagttgatacattcgagtgggtcttcaatatgttcaaaacattaggcatgggatgtgacggaccacgagtaatgttgacaagtatgttgtaataaatggctcgtattgattaagcacgtactatatgatatcataatgacttgcacaatgttatgtaaatgtttcgatttcagatcatgaccatgcgatgccaatcgcactaggcagagtattcccaaacacaatacatcgattgtgtttgtggcatgtgcaaaacaggtatatgccccacttgaatgaattgtatgcaagatttgaggaaatagatttcaagaaaaggttccaatctataatacatcatccattgaatgaaatggagttcgaggctgcctggcaaatgatgctaaatgatttccagctacacgaaaacaacacccttgtcagattgtatgaaatacgtaaagattgggtacctgcatatttcaaaagagatttgtcgggtaccgtaatcaggggtacccccaac

SEQ ID NO: 94499 - DNA, 672 bp, Zea Mays
caaaaatgtaacgtggggggaaatacaaaatagattgtgcaccaaaattaacacataaataaacagaaatatatacatagtcactgggattttctaggagtcttctgtttaggagagctttttttgtaatgatatttgacttgacatctatatcaaactttgaactgcttttcacactcggaacttatggggaagggacttttatcttctttgcactgtttttttctgaaggggaaggtgatgctgatctgaattggcgcttcaaagatggagtatccatgaaatcatcatcggacagtgtggatggagctgaaggaggatttctttttacacgacgagcttgtgcctttctgcgaaaacgatgaactggtgctggttgtggctcagtctgctgctggttatgtggattatcatcttgatgtgctgagctgctagatcaagttcgtctggatatgtcaacggaaaaaacctcctgacttgactcaatggttagtctttttggattagttggaggtcgatcaacagatctcatggttaaacactgaataaatcagttaaaaaaattgtttttaaatacaatgatttatgcatgaatatatgccaaaaaatctattttttactataactatctacaatgcatactacataatactaaatggagttacataactt

SEQ ID NO: 94500 - DNA, 359 bp, Zea Mays
aagttgttgtgatactgttctttgccagtagccttcgtctcatacaacagttcgtgcatattgcagaaacactttgcgctcggttccagcccttggcttcttacagcccaaacaaacattcccatcctaattatatactcgggagtaatttgatgaagaaagatctggaatatcttcaacacttcaaccacaaatttgctcaattggaaacgaaggcctgccttcaaaaagcttcggtaaacaacaacttccttttcttcaggagcaggggcggtgttgtctcctccaaccctcacaatagacatatcacgaaaataccttcccctcatggcgtcaacctgactttgtctaatggtcga

SEQ ID NO: 94501 - DNA, 542 bp, Zea Mays
aaggaggaggcagaggatgcttccattgtggagagcagggccattgggcgatgcattgttcgaagaaggtggctcaatagcagccggcccccaaagccctagcaagccataatgtacctcagcagggagcaggcaatcgtgtttagacgcgctacaaccatgggaggctaaaccatctggaggccgaagcagtccaggaaacaccaggcatgatagtaggtacattctcagtcgaatctcacccttcagaagtgttatttgatactgaagcaacacattcatttattgttgcatcatgggtagaagcgcataatctcccaataaccaccatgacaactccaattcaaattgattcagcgggtgggtaagcccgaacccgatagaatatgcttgaatttaagtgtggtaataagagggatagagttccccgctaacctgatagtgatgggtaatagatgttatcctagggataaattggctagataagtaccaagcagttatcaactatgataagaggattgtgaagttggtgtccccactag

SEQ ID NO: 94502 - DNA, 470 bp, Zea Mays
gtcttgtctcattgattaggagttagtgtatattatcgggctggggaatatggttaagatagatatggatgagatagactacatgatgtcgatcaaaaacttgtttgatgtttaggtggggatagatagattatgtaatctatcatgacactattggttgggttagctcttatgttcacggttgagttgcactaatttaggttttaagtgcatgaggggagaacaaggtttataggagtaggatcaagtttatttcactagtgttaacttgttaagtgattgtccttaggttagctcaacttgaggttagaatttgtttagattaacttattaggttggatcagatctagaataaattgatatgactattttagactagataagatccaattaatttgggttagatcatgatcatggtgggataaatcatgtggttttagtcacacaaatataacttagatctgatatca

SEQ ID NO: 94503 - DNA, 516 bp, Zea Mays
agttgatctcccttctgccaacgcaccctttggatcaagctggctgatgaggaaagtccttacaactttccttatctcaatttctatattaaaggcagttggtataaggtgagctaccggaggtttgctcacatcctgggattttctgatggagatatttcaggcgacaaagttatgattcatgactttcgtcctcccaccaaggatgatgccagggatcttcatatctctgagactggtaaatattgggagtctaccaatctgcacaagttctacaaatacataaattctctctgcagaatgactcttatccccaaagggggcaatcaaatgaatatcctgggagagagcaaagtcttgctctcatttatgaagccaaataattctaaaagcctcaatgtatttgatatgatttggcaagaaatcatccatgctacctgcttccctctcaagggatgtcttcacgcccccttcatcatgaagatgattgaagtggtgactcagtttcgctttgag

SEQ ID NO: 94504 - DNA, 1090 bp, Zea Mays
ctatagtagctctacaatttttttgtagtgactcatagcaaaatctccatggatcaagagatacatggactccaagtcagcccaatctcactgtttttcagagttaagccatatgggtgcctttgagactttttgtaatttactccaaattgttccacaaaacttggaaatctccaaatgtaaaagttgcttagtttttgttactctaccactttgatatatgcactttggtccaaaagtgtatagaaattgatctcatctcatagagcattaattagggtttccagagtcattattagggtttgagtgttctagggtttaagtggcaccctcaactttacaaatttagtctctcttgaacatctccactaatattttgagatcatactctaattattatgtcacacacacccatatacctctatccctttgtgaggtaccctatcctagggttaaggatcacttcaagtcatcacatcacaacttgttttgaagttttagcctagtggatgcactctaggtgtaacatacataatgaaatgtcaatgcatatgatgtcatgcccaagttttagttcttgtaacaccaggggtgttacaggcaaatactttcatgatgtatctacagtgagggctaggggagaggacaccattcctcttccagaaagcaatgaagtggtagtcgtctagagcttcatgaaagctgggcttcgcttcccgctccacaagatgttggtcgatgttttgaaaacatttgagatataccttcatcatattacccccgaagctcttattaaagtaggggtatttatctgggccatgaggagtcaaggacaggaactagatgcaaggtgcttttgtaatattcatgagctgtcttatcagacaaaggcaaccggaaaggaacaatatcacaacaattttggttattacagcttcatgtcttgatctgaggcgagttacccttagcccacgtttcagaagaggcggccaggtttttggatgaaggaatggttttacgtgaggaacgacctgagtcagagggaagatgtgaaaggaattatccaacgctctatatggtctcgtttcgg

SEQ ID NO: 94505 - DNA, 478 bp, Zea Mays
gacgaccgccgatggtgacagtgccggcgaggaagaaccccctgcttttcgggcggtgcctgcctgctcacttttgctaccgttttcaggcgcgtttacgttggccgtggccgtggctccacatcgaggcaacttagtcgccatgggatctaagattgttttggcaacagaccaggaagcgacaatgccaagtttgtgttttgcctccatggtttggaaaagactttgaagataatccctctgtcgcataagaaacgtcgttctggtatttaaaagttgtgccacaaagagtgtcgcaagcctactacgtcagccaagagctaggtcacatctaagagcatctccaacagatcccatcaataccagtctcaatccttaatttaggaaaaagtgataaaataactctccaacagttccgtattagctctccctataacttcgcacgcgaaaaatgaccctttcccagcgaaaatcttcg

SEQ ID NO: 94506 - DNA, 628 bp, Zea Mays
gtcaaggggtgaaatccaatgtagttctgctacataaaccccatttatatgtccctccaggtttgacctttaccgttttggttacagtatatatcatactcgtcaaaggactatcccgagttaattcagcaactaggggtatttataattttgagagatgtatgcaacacaagcataaaggtcctggataggacgagcgaagtggttcgacaggaacacacaatggttttcacaccaatataatgcaaattttctcagaataacctctcagtatacttgcaactttgtgttgctagtggttacatatccttttatcgcatagtttgcttcatgtcattcagtgacaaagagagcaatatgctaacatctggttgagcaatgtatgactgagatttccggtcttaaatcatttggtaaggactttttgcttactaatagaatcccaatttgtgatgtcttatatgctaaaaaggcttttatgcattatatatcttcaggttacttcaggtaaaactttatgcatgagatgagagtagagaattaacttatctgtgttttattgtatttcaatttaatttctcggatttccaagcactatagagcttgatatagttgttatggccacttg

SEQ ID NO: 94507 - DNA, 440 bp, Zea Mays
ctaccatgtactcaaaagccaataatgttgattgtatctgacactagcttgataaaacctcgtgtgatcatcaattttggacgtgttgcctaacattattattggcaataagcaagcaagcagcgtgaatgccccaaattgactgtagcgcgcacgatctttcccttcccgcgattattcctttcctgagtggcccctgctaagttatggatctgtcttttctttggtcgtttgcgccacaagctttatttgaatctcttcccagttatactaatataaatgtaaactctgatgagggatcaggaaaggtatatcttgtaactacatgcttcatgccccgtcccattatttcgattcccttcataacttacaataaaactgctttttgtgctgacttttgccgtcagtatgtttaaaatttagcacatagggtaatgttc

SEQ ID NO: 94508 - DNA, 1581 bp, Zea Mays
gtcttagctgatagggagggggaccctcaaacttgtgctgacacatcaaacagttcttcttctggcaggaaccctgtctgaacccagcccgggcgtcacgaagtctcttgcttctcctcaggtcaaattccacaagcatgttttgggggggaggaggccgggtctgagggaacagaagcgttgtcagcagattcctcagagaggaccgaatcaaggaacttgccatcagggcacttcctggggatgacaaagggatgtgactcagcctctggctccatcagagcagaaggaatatctgaagacaagaaagattttgaccaactaaatgaatctttatgcagcaagttggataagaaaaagggcgcccacttcttgggaacctgcaccgagggcaccgaattaccaaccggggcaaaatagttagcccagatcctatagaactggtcattccttttcctttccaagtgactcagcaaaacagggtccggctgccagtcttgcgaaaacataaagttcaacaccacattgctggggccattaacgttaggctccaccggttgagcatcagggataacaatatcccctggcacatggagatctccctgaattggtgggccgtcaaactcctggagcccaatcataggggcatcacccaaggtagggggcgggggcattaaagtggggcaccggcccaacaaccaccagatcaacaggaatctgcccattctgaatctgcccattctgcaacggagcaccatgaatgtgactagaagaactatccgaggacaggtccgaatgcggattgctgacctgctgttcgtcaggtggcaggtccagttggggctgctgcacaggtggatcattaacaatccattggtcccaatctccttgaatgttgtctgctagctgggcttggacattgtcttctggcgggaaattaagatcccagcccgcagccggcacaggttgacccagaccaaaaaactcaagaggaagctattgaccatcctccgggaccactggcaccgtgtcctcatcttgaggctgacccccagcaaagtttgctggatgatctcgcactgcactgtccacgagtcaccaataaagccgtcagcttctgaaaaacaatgaactgtgggacctcctccagagacgtgacccgaaccctgagcaaagtcctgtaaacattgcgtctgtcctcttcccacaagatcaatctaccgaaagaaccaatagccgcctgcaagtattctgatgaacggtaatccagggggaatcccaacaacataagccagcattcccgattaaataaaagggctatatgattccaagcatcgttatgccgctgagcagtgaaggaggcatcgaggtattgttgcggaccgagcaggacgagattgtctctttcaagcacgctactaaactgaaccagaacctgacccaggtgcgaccgctggatatcgcgcaccccaagccgcctgtgctccacaaggtattctctgaccacatccctcaccgccaggaaagtaatctcatgatcaggtaaaggttgaatgttgataatagcccagtcctcatgca

SEQ ID NO: 94509 - DNA, 564 bp, Zea Mays
gtgctctgaatggcgttctgatggtacagtagactgaaaaagatcttcaggtgcatcacccctcgccgccggtgacccacacgctcggattcgcgctggcgccacgattcatgcccagtaacgcgcagataacggctcctggtgaaaagatattcgccggggatgaacttggggcactgtttcgctctatcacctcatccacttgccggcgacgtggccgagcagccgtcgtcgaggtgtacgtcgttcgccgtgatcatgccacaccatgaccctttcaccacgtcgttgccagccgtaatagctcaccagtcaccaccatagcttcttacccagtgaccgccacggtagatcgccgcgatgactcacccctctctctcggccgccagcgcaatttcttcaaattgggcgccaccgctgatggacactataaatcaatgccctagtgagttctgctaggtattcacgcacccagcacactagctctcaccgctgatcacccaccagagcctctcaatttcacgtttcccccaaattcgttttccgcgccaccgtgaacgcctc

SEQ ID NO: 94510 - DNA, 687 bp, Zea Mays
tgaggttgcatctttggggcaaagggcgcgtggactggtggagtctatgaatgtccctgctgccgaaaaggtagctgttgtatctggaggcggaggtattggtactgcattaggtataaaagtgaacagatttgctgagaaagcgacaacgtcgagggaagagataatcccaagaattttcttccaccttgtgattctgtacctctgcaaagctggattggagaatgcatccaagtgtgttatacagttcatgtcgttgcttccgattcttcttatttcagaagatgaccaaagcaaaaataagttgcactttttgatatggtacgtttgatattctgagctgtccctcttaaagtgtatgaaacattacccttatactttcttttatacaggtctctactaattgtaagatctcagtatgggcaacttgacgatagcgctcgtttccatgttttctcgcacttgattcttgaaactattatatatgggaagtccatgttggtcactaatatcttagagagagatgattcggtggacgtcaacaacaaggagactggattcatccttagctttatacagaagaatcgtgttcttgctgcggtttgtatctttgccccctccccctatctttgtctggaattattttgttgacgcgtacaaaatgagaagggtgtgtttgaagttttg

SEQ ID NO: 94511 - DNA, 497 bp, Zea Mays
ggaaattctccggctatggtggctaattgaaggcggtaatgggtgctctggcttcatgatagtatggtgcaacatgccaggccatcaatttataggagcgcaaggcggtggtattcaatttcgcgatgacgcgctggcggccggagagggagaaggctactggcgcagttgattcgtggagaataccgtggcggactcaccggcgatgatcggatggctaacgtgagtcacggcggtgcggttaaaggatggaggcgtggcgcaaccgcggtgagtatcgcggattctgatgacggccgtaaggccacgtcgccggcgcggggaaccgagggacagcatggccacagtaacttgaacccattcgcgacgagatctttttgctggcgaactcaatccacagcccagacgcatgaatcgcgacgagcagcactaatcccggcgaagggtcaccggcggccagctcactgaatctgcggattgtttttggttactgtacc

SEQ ID NO: 94512 - DNA, 624 bp, Zea Mays
cacgagtcgaggaatattattcttctgtgatggtaaagaagctagggaatactgcagtaacatgggggttcttaccttgcaatagacctttctgatgggctacaacgacgtatataatcgtgcaacatgatctgacttaagggtatgcccttaagactgtgtatgaccgaatgacgcgatattcctcaagggtatgcccttgaggtctttggaaccagttccttagagagaggtgcttgatggcgagttttcttgccgatggagatggagcctggtgaagcagtaatttctcgatgtagaatttcaatagcctactcacactcctcacgcgaggtgacctcacggcagcctcaaagcagtaacttttgcgatgtgtatgatggcacttttgcgttgagcagcaagcgcggcagcctgacagcgtcctttctttttgtccaatcccccgaactcagcgatgtggccttgtatttataggccgaaggagcttagtggtacgctagcgtcgcatcgcatgggagaaagaacgtgcgttcgtgcctggtgagtcagcgaaagtggaggacgtgcgtcgtgcgcgcatgggagcgagcgcgtgcttgcttctgttcgaatgagcgcgaa

SEQ ID NO: 94513 - DNA, 519 bp, Zea Mays
caatataaaacaaccttagtctatgcaattctagtgaaaggctcagttcaccaaccggctagctatcaagataaaagctcatacacatgctagtaaagagtcaccgctacacaaaagatggaatactaagcaaagagagagctacttatgatgatagtaagttctagcgcaagatattgcacgaaagtaatgcttgaatgatagagagatagacaagagacaatcggtgttttctcgtggtatcggtagtttggcacccacccctactccacattgtgatacccaccaagggtattgtcaccttccaagtcaccaagacgagagttctcactaagagtctccattcaccaactccgacgtggtggagctcaagtcacgtatatatttttctttgggcttccacaaaaccttagtaagctccaaaaggaacacacagatcaccaagatcgccttggtgctgccaatcaccaagagtaacaagttagagccttcgcttgagtaggaaccaatcaccaagaa

SEQ ID NO: 94514 - DNA, 391 bp, Zea Mays
cttgcaacctccacaatgtcgtcgtcgatggcggtatgcagcttcggcatggcaagcaacccttagccctagccaaggtaggtcagtcgagccgccccgtcctgttccgcggtccagacgttcgattccacttccaccgttccacgccacgttgaacataatgcccacatgttccattccattgcactcagccacccagtcgtggagccaccactctctctttcgctgaaagcatagtagcataccagtctcgccgagtgaccacaacgatccccgcacacggcgagcgagtgggaaacctccctgcctatatttacacagtgtgggctgggctctcgtgtcttgtcccggcatcgacatcggcgaggaaggagtgtggagcttctacttc

SEQ ID NO: 94515 - DNA, 722 bp, Zea Mays
aaaattgagccttttcgagcttttgctagttgtgttcagccatttgcatctttctagaggaactagctttgttttcagcttttgtgatgattttgtgctctaacttggctttgtctgctggctagtggtgttgagccctgcttttgcctcttcttgaggactagtcttttctacttggtcgtgttgagctgttgcccatttcttttaggaccaagctttactcgcgttggatgaactgttttggattttatctagcttttagtcgttcacgttgtttctcttcttcttcctcctcctttctagtatatatgttcatgtggtggtgccgacaacagtcagggataagatccttagtccctagagcccatcagtcagcaaggatgctaggaagaggtctcttgcaaccaaggaccatcgactatcaggaggagggaggaaatgtttacccttgaagcacccactccaaacgaaccctgaggcactgatccagggttcgggcatggcgaagctatacaaggggccaggcaaactaaagggaaaccactcgagtggatccctcactcggtccgagattcacccaccgtaagtgcctagtcgcattaactacgcctggcaccgagccacggtagaagcatcgggccaccacccacccatgacctacaagcccctcgagctacagagcactcatgaactacgaacccctcgaactgtggcacatttat

SEQ ID NO: 94516 - DNA, 747 bp, Zea Mays
tgaaaattttgttttgcgctagcgtagcctccccgtaatcctacacatttattatggaggggcaaccgaagtcaagatttctggtttcttcatgggactacaagatcagagccaaacctccctgcttcaaggtttatgctcgtaaaaaatcccggttcaactaacacagtctgaggagattggaacttctactcctctgcagaaatttaaagatggaattacaaaatagatcaatggaatcctgtcggcccctacccaaccagtcaaacgaaagagaaagctgattcctagcaatttcaacctaaggcgaagcaggagggtggccaagataccacctgaattaggctctccctctgctgcaaaggtgtgcaagcatctgagtttctgtgacgagagagagaatatctccttcacggatgcaagaaaatatgctaaactattcgattcacctctttctagagagcacattactgcgctggcagccctgttcggttgggaggtgcccccacctgggcagttttgagctgtgtgtttggtggagctggctgaattttgtttttcatggattcaaatggtattctgatttggaatgtgaggggcctcaacaattgtgctaagagagactctattaaatctttggttcttgcacaatgccttctattgtgtgtctgcaagaaaccaagctgtcatccatctctgattttgatattattacaattcttgggtcagtatatggtaactttattt

SEQ ID NO: 94517 - DNA, 643 bp, Zea Mays
tatttcttcagatatttaccattgaggccttgggtaatctccttccttgcaagtcctcaacgaaatatgcattcccatgcacaatacctacaaccttgaatggtccttcccaattcggcgaccatttgtcgaatttattatttttgactcccacgggtaaaatcgttttccataccaactctccaatctgaaatgatttctccttcacctttttattataagctctcgccactctcagcttttctttctctatttcacttaaggctgttaatcgactttcattattcccatcaattctgtctagcattagctcaccatataccttagccgataacggattttgacaagctactctacaagcctgtaaattcacctcaataggaagcaccgcctcttgtcaataaaccaattcaaatggtgtcactttagttgctccatgccgagatactcgatgagcccataacgcctctgacaacacttcatgccacctcttcggctgttctacaatcttcttctttatcaacctgatcaacaccttgttgctagattcaacctgcccattagctgctctcgctgtccagcagacgacgacttaaataggccaccacactctctttcccaccatgttcttgtattaaaacag

SEQ ID NO: 94518 - DNA, 614 bp, Zea Mays
gaaaatgctaaagtgaagttcatctcttctgaagaagtggcattattgagtagagagaggccaccatctgttacatcaagatttactttgtcgcagccaagcaaggcatcatctcctccaactacaaaacacttgtccaatatgaattgtgtatccccaagcaggagtgataaaaatgtgcaagccctgaaacgatgtgctgatgcaagtcatagtcaagcagaacttgaggataggtcatattctgctatgcagcaaaggcgggttcatcctgcatctccttcaagcatgaagcagccatccaatatgaaatcaacatcccctggtaggagagacatgcaagtgcaaaaccagaaacgatatgctcctatgcgggaaagtcaacctcatgtgaaacagttgtcaaataggactgccacgcaagtgcatgccaccaaacgatctgctacttcaagtcatgatcaggcaaatattgatgacataaacatggattgtgaagcaagatctggtggttccgtgcctatgatgcatgaatgtagaacaagtgaatcagtaaaagtaaaaatggactctctgattgaacacaaagctagagaaaagaagatagtgaatgc

SEQ ID NO: 94519 - DNA, 401 bp, Zea Mays
caagactctaaactgatcactaacactgaaattcagtctctgccagatactatttcgagtctgaaaattcagactacactaactgcgctgaacttcttcagttcgactgcagagccaaattcatctttcttttgctcccattttttatagggacggagctacctccctacatcaaacttgcacactaatatatgttcttcaactcttcttataaagatatggcttaatactccaaggatcaagcactagagagctccaaagttgagccaaacacacaatgtctgtgtgctgaaacaagactaagtctgaatttcagatttagcacattgaatctttgaactactgttactttgaatatcaaatatgccattaagttcttttcatcatcaaatatgccatta

SEQ ID NO: 94520 - DNA, 497 bp, Zea Mays
ttctttggctcgcgagtttgtaacctcatcctttgttgtgcttttgcttcttattgcctttacccttctcatctctcaaccttaccttggtgattacgctatgttcgttatctaaaacctccaatctcccaccttagttcaagtgtggtctcttacttatctcacccgtggttatatcctatactttacctcttgcaagacttatcttattcctattcttgattgtacctagattcctggtttttttaatgcacatttacctcttcctttatatccttgcctattatcacctttaacccttgacctctctccatatttaccatgatgtttacctatttcttagcctcacttcttttatttcaatccgagagtgttattttccctatcctgctcttgtttgtttcctttccctttgtcgctttgcaagtcttgtcttaccttaacttcatcctttgttgagcttttgtttgatatcatccttacctttgtaatctgta

SEQ ID NO: 94521 - DNA, 350 bp, Zea Mays
ctctttgatagagtactgataaccttcgcaccggtttgatcccgtatgcagcctaacccttcatcatcaatgccaccaaagagaagcgcccccggccggtacccgcaagatatagcatactcttttagttcctctttttcagcttccgtcagctcttggccaactaagttttggaagtcaaaagtttcatcctccgaagtatcttcggtcatttcttctttctcgggttttgcgaccgtggtctcttcggtggctgcaccagcttctttcgtggccatgtttaacagcattttgtctatatcggcagctatgctttctaaattaatatcttcggatttagcatcttcggc

SEQ ID NO: 94522 - DNA, 789 bp, Zea Mays
cgatgagctacttagagcataatccaagtccgaagataatgcactatccgcggccttcaggagtcgaaaaaataaaagattaaatagggtttttgatgctattggatttgtgtaccctgactatcgctaccagccacaggggcagaaaagaaagggtgcaacttctggaaaggttgctgcttcggctgcttcaagcgagcctgcaccaaagaggaaaaagttgaaggtccttacccaccgattgtgctacattgaactggccatagtgcctgagtttggcggggaaacctcttcggttactgaagcgaaagaacctgctcctcccacgcagaagattgaagagccggctgtaatgccgaaggcaccctcggccaaattagctgagccgaagattgataatattgaggagacaagagtcgaagggacaaaaacattagaagttttaagcccttcggcagaagtgacaatgccgaaggcacaaaaaggtcttgcggctaccccaagagaaaaaggatggccagtgtgctagatgtgctggagacggtaaaggcttcaagttctattccttcagggaaaattgccgaggcttcaaaaaatacaagtcgaagctgaaacaagaccgaccgaagttgaaggtgcagtgagccaagctagtgccgaagccgggccttcagagcctattgataaacaaccttcggaaattgagaaaaaggcagcagaggaagaggctacagagcagagtttgcctgagaaaactgtcactcctactcccgaagttttaaaggaaaa

SEQ ID NO: 94523 - DNA, 783 bp, Zea Mays
aaatcttctacaacgacggattatgttgttttgataacacaattacgcaaaattcgtatacagtttacaacactttccatttcaggcagtactacattattacttatactttgtgaatatcaactagtatcagatttacaaattcgtccataagtgtaataacaaatatgttactacattacaattgtcctaaaatgcttttcatctgctccccactagacgaatcattgtctgtgatacccccgcgatgttttttgaagtgcatgtctcatcccaacttggagcatcagatgaacccttgttcctagaacctaggggccaccctctcttccgaccagtaaggctggccaaccgaagcctattaacctccacagatagataagtgcgactgttgtgaccatcagcaatgccacacctttggcactttctgttctttttcttgactccttttgcgtccaacttaataactcttttttctatatcactgattgttctgccctttggcttcgcgttatctggtcttctcaaacttactccactcacattaaaatctagcttctacatttttcaaataaaaaattctcagtgttgaaatattagtagataaatccatctctttgtacgtaaacttcaaaaaatacccatgcacatgtgtttttaataataccattacctttttaatcgctagttctgttgcgcactcatcactcagtggtatgccagtggtcaactgtcatgcaccgtgctgcccacacataccattgatgttaacatcataatcag

SEQ ID NO: 94524 - DNA, 334 bp, Zea Mays
ggcggcgccgccgtcagcgtgggcggggtgaaggtgatgggttcgtggccgttgatcggcgcatggatggctatgatttgttgtgccttaccggttcggccaccaccgttttggaccgtccgatcgagatctggcgttcggaactcaaacttgggcatattaaatccgatccgttggttctggatcggagtgctcagattacataccggttcagtggggtctggatttaatctcgtgcgtccaactctaatccagcggcaagaaaagcttcgtaccccttcggctgtgtcattttgtaaaagacaccctgtgatattccagaattaacccgcca

SEQ ID NO: 94525 - DNA, 550 bp, Zea Mays
gccttgggcagtgcgcagatgataagtaaatgggcataaatcgcatttatatatgtgtgggcgagctatagacgtcatgtaacctgaaggaacaataaagttttcatcagacagacaactctcgatccatccatcagcggccagcagcatcagtagtacgtgcctggtgaccagctaatgcgatatgtcccatatgcgtgacatatgatgaatgaaagaggccggtagctactggtgcatatgcaaagtatatggcctgccggccaatgagaccatgttgttgcaggcatgcagcaatgcatgtacctactcatgtgtgcacaaacagtggcagacacagacaggtttttagacacggtagcactggccggcactgaatcgattcaattctccaattgtcgtcgcggtaaaaactagctagctccactgggttctgctacctacctaacagcacgtactgcttcttctctggagcacccactaagcatgaatgcattgtctgtttggaactagtagctagctagctgcaaactgaatccatgtaaatgcc

SEQ ID NO: 94526 - DNA, 966 bp, Zea Mays
atttggtccctgatggtgcagtaatgatagctacaattgcggcccccacatgacaccatgcgtcatcgtagtgaattgtccaggttatttgcgctgtggggagttcttgagtggtcggtcctatccaatcggtgatgacctatgacttgattgcatttcttgacttgaatcttatgttgtatttggatagcaatgtggaccatttccctatccgtgcagaggcttctgggttgttgaagaggtcgcttaggcttcgctctctgagtactctgaccacatgtgtctcgaagtagtgttgtagtttccccgacgccgcaaggacaacatacactatcttctccatttctgtcatgttgcatttggaatccgtaagcactttagagacgtagtagactaggtgttgttgtagcttgccgctaagttgttctcttgaaatagtgctgcgctgactgcgtcgaaggatgttgtgacataaagcaaaagtggcacagttgggtctaggccttgtcggagttattagttttgctaggtattttttgagagattcgaaagatgtggcatgctctggtccccaaacaaagtcctttgctccatgaagggttcggagaaaagggagattgcgttctgcggatcttgaaatgaatctgttgagggctgtgagccagcctattaacctctagatgccttttgatgactttggggttacatgtttattattgcttgtatcttgtctgggttggctttaatccctccgagtgacacaaagtaccctaattttttgcctgaactccaaagacacatttctctaggtttaggcgaagcgtgactcctctcatttttgcaaatgttccggcgaggtttgccagatggtcttccttgtttttgctgggaatgactatgttgtcgacataagtgaagactttacactatatctatccttctagtatggccttcattagtctataa

SEQ ID NO: 94527 - DNA, 525 bp, Zea Mays
gtttccataataaggtacacacaacaatagctaataaagtagtgacgtgtacccataccagcatacttcaagtctgcccaaaaaagacccactctaagataagggcaccacctaacatacatggccccgaccagggcggccctaacctggtccccctaactaggttgagccccgaccagagttcctctaacatggtcaacccgataaggttggatccaatcaaagcaatcctgatctggtcacctcgatcaaagcaatcttgatctggtcacctcgatcaggttgaactctttaagcagtcccaatatagtcacctcgataggaagttttcgacctcagttgctctaagctaggttactctaggtcgtacactcccaataagacttcacaagctataggtatcgtaaacctctgggaaaggataacacatttatgattctctgaccgttcgacatttgctcctaactgaggcatgcgttagatgaagataggtacagtactaaggagttcaaaaacatccatctc

SEQ ID NO: 94528 - DNA, 283 bp, Zea Mays
ctagctcctacttatccaggactcaacgagtctttaggaagcacgtcgcaccctctacatgcgcgtgattcgtttcatgcgccttcgtgcccatgcaatcgccttcctcgtctacttctggtcgtgctcggctaactggattgtaaagcttaggcgcacgaccaatcgaggcctttatgatggcccacggatcgtaaccgggtcatggccacctaggggtatttatcccccacacttgccattaaggtgaagggaccacaagtttggaaaatgatcgccaagc

SEQ ID NO: 94529 - DNA, 878 bp, Zea Mays
agagcctaaggttgtcataacatcatcatgtacaaaaggaacatactacaaagagcatagtcacattttggcggatatacaaatgaagctcaatatgctacatgatgagaagcaatgcaggtatgttatagatataaaaaactacaaagaagaattaaaaaatagaagatgcaaacaagaacaaaacgaggtccctcagctaaaaaaggaaacacacacccaacttccctcgtaaatgtgcaaaagtggactgagcaaggggttttgtgaggatatctgtaagttgtttgtgggtatcaacatggaaatggtcaatgcccctttctcataatgacctctgagaaaatgaaagcggacatcgatgtgcctggtcttaaaatgtagcacatgatttttggcaacactgatggcactagtgctatcacaaagctaaggcatatgccaaaactccaagccaaaatctcgcgaagtggccatcatccaaagcaaccgcgagtattagctagcaacaacaaaatacttagcctatggagtggattgggctacactatactatttgcaagaagaccaagaaaccaatgaagatcccaaaaactatcaagtcctagaagtggacttgtgatccaagcgacaaccagcaaaatcagcatcagagtaaccacgcaaggacaaaacagaaaaagaggaataccataatctagactcaggtgtgaaatgaaggtacctcatgatctatttgactgcctgcctatgggaagtgtgtggagaagcctataaccaagtgcaaagacacatagtgaagtgtatgtcaggcgtcatcgccgtcaactataggagggagccgatcatgctcctatactccttctagtccacgagct

SEQ ID NO: 94530 - DNA, 527 bp, Zea Mays
tggaatccgattgaatttaaaagatcttcgggtttttctcaccgcgctggcgagcccgtgagcgggtaagggccacggcgagcgcccaggtgaatgcttcggtcgaacgctgacacctcatggttacatgtgccacgtctcggaagatttttacccgcgcacgcgagcccgagtagtgaacgtggcagtggtggcattcttatccacagcgaagtgcactgaactcggatccctacctcaccagccaggctgagttcagatgaactttactcctttatttgtgcagcgatttgcaaatcggttctaatcaaaatggtacactaatcaacgctcttccactttggtatatcagccatgccgaaattcttcacgaattaagcacacgacggcgccaaagtttgcttaatgacattgaatctcggattcagtataaccaaatgcagtaaccatgctttctccccgctccccatcagaccgactgacagagccacttcgaggcactttcacttctatttccacataacaac

SEQ ID NO: 94531 - DNA, 504 bp, Zea Mays
caagatttcaactgggcagatacagagttgaaatcattctgcaagctcaaaagttagcaagagaaccccatttgtcaatgtaaataataaaaggcaaagatcagctcacctgaagattagaaagaaataaaggaagtcctagagctggaagcatcgatgcactgtctatcgttggatcatggatatggacaatgttaagagcgtcactcggggagacctcagctccaacagcaggcggcggattcccagcatccgagtcactggcctcaaaggtgaccggaccgacgagagcagtaggcaaattcgtcaccacgggttcctcagattgaatcggtggcgatctgacatgaacatccatggaggcagccgaagaggaaccaagcttggcacccttgggggctgggtcatcctcggcaccacccttagggactaggccaccctcagcaccaccctcgagggctggattatccttagcggcacccttagaagctgaagcaccctcgg

SEQ ID NO: 94532 - DNA, 408 bp, Zea Mays
tcttcatcttcctttgctagactgatctgatgatatccggagtagcaatctaggaaggagagcatagaacagccagcagtcgagtcaactacctgatctattctagggagtccgaagggatccttcgggcagtgcttattgagatcggtataattgacgcacatgcaccaattaattttattctttttgagtacaagaacagggtttgccaaccattctagatgcagtacttctctaatgaatcctaccgacactaggcgagctaattctgcatgaatggcttctctcttgttaggcgtgaaatggcgtagcttctgtcggattggtcttgcctgaggatacactttgagtttgtgctcgactagctctctcgtgactcccggcatgtccgcaggttgccatgcgaac

SEQ ID NO: 94533 - DNA, 548 bp, Zea Mays
tcaagaacacatagccttcagggtatggctgtttgtcgacagctgggaaatgccgaaggagaccaccaccgactctagcgaaagtggactgatccggctgaagtataccttcagattcagggagaagtttgatgagcccaacgacgactggctgaagtgcatcgaagctacaagtgatgaactgcttggagcatattccaaggcggaagataatgctctgtccgcagccttcagaggtcggggaaggaagagactgaacagagtttttgacgccatcggcttcgtctaccctgattacagctacccgctgcggggacaagggaaaaagaggaaatatgctgctttggccaccccagttgaacctgtgccgaaggggaaaaaggtgaaggttcttacccaccagccgcgttacattgaaccggtcgtggtgcctgagtttggcgcagggtcctcttcagcggccaaaacaatacaaactgcttcgactgcacatggcgctgaagaaccagctgtgatgccaaagatgcatatagctgagccaactgaag

SEQ ID NO: 94534 - DNA, 1309 bp, Zea Mays
ccgatctcgtcgtcttccctaaatccatcactaccggtggatatcgcgttgccaggagctagagattgaaccaccatccagatcgagggtggaggcaacacgcggtgggcgtctgtcgaggacccggagcttgtggcactcatggctctggtatccgccagcaacaccagcaccccccccaaaggtgccccccaccatgatgctagagatccacctcgatgagaaccgattgttcgtccatctcaaggacaagggcggtggcgggagcatgcattggatcctcgacactagcgcggaaaaccacatgacaagggagcgcatggccttctttaagcttgacaccggtgtccgcaagaccatttggttcggtgatggctccatggtcaccatcgaggggcgcgacactatcctctttaggtgcaagagccacgagcaccaggtgctggttggcgtccacttcatccccgactgacaacaaacatcgtcagcatgggtcaccttgacgaggatgatcgcaaggtcctaatcgagaacagtgttctcaggatctaggaccaaagctaacatttgttggtcaaagtgcggcattcagtgagccgcctctacatcttcggcatcgctcagcctgtgtgtttagctgcccggggctcaaaggtggcctggcaatggcataccaggtccagacatctcaggttctaggggctcagggaattattgaagggtggcctggcgtgtagactgccgccaatcgaccatgttgactaggtccgcgagagttgcttggccgagaagcaacgacgatgctcgtttcctacatccagcaagtattgtgcgcctcatttactcgacctggtgcatgcggacgtttggtccgatcaccttgaaaacgcctagcgggaagttgttcctcctcctcgtcaacaacaagagtcacttcatgtggctcgtactgctagcatcaaaggaccaggctacagtgaccatcatccaactcagggcatgagtcgaggagaagactgggtgaaagatgggcactctccgcaccgacgatggtagtgagttcacaacacacgttcggcgactaatgtgccgagcacgtcatccattgtcacctcaccatgttgtacacgtcccaacaaaacggtgtggtagagaggcgcaatcagacgatggttggcatggccaaaagcatgttgatggacaaggggatgtcaggctagttgtggccttgtggggataggcagttgccacaatcgtcttcaaacacaatcggtcactgacgaggagtgttgaagggaaggcattatac

SEQ ID NO: 94535 - DNA, 274 bp, Zea Mays
agaggaaggcagtggaggaggagctcgatcgctcccttgtcctgcttgacctctgcaacgccatgcaagagaactttgcagagctcagggtcagcgtccaggagatgcagctggctctcaagagaggagacgacgtgtctcttcaggccaaggttcagtcttacgctcgcttggccaagaaggcacagaagcagttcaagaagatcagcagcaaggctgcctctgacattgaaggatgcaagatagtcaggctgttggctgaagcaagggagat

SEQ ID NO: 94536 - DNA, 892 bp, Zea Mays
gccaaaactggcttgtaaagattggatcacgatctgaaatgattgctgatggaagtccatgtaagcgatatacctcagtcatgaagcattgagccaccgtcagtgctgtataggggtgggacaaaggaataaagtggccatactttgtgaatttgtccacaacaacgagaatacaatcagcagtactagacctcggcaagccttcaataaagtctaatgagatagtatcccaagctacttctggaactggtaatggttgtaattttccagggtatgctgttcggtccggtttagcctgaagacagatttggcactgctgaatgaaagtatgaatgaattgtttcatatttttccaagcgaacagttgtttgatgcggctgtaagtaaccgggatacctgaatgtccacccaccgccgaacagtgaagagcagttacaatacgagtatgaagctgtgcatcatcaccaatccacacacgtcctttgtaacgcaagagtccattgtccaaaacaaaatgagggactgcattagggtccacagacagcttagtgagcatagactgtgttgcagaatcactggcatagctggattgcacatcctgcaaccattggggaaccacaactgatatagcctggatagaagattgagcacatctggatagtgcatcagccactcgattttcagaaccggatctgtaatggattttatattgtagccccaagagtttcgtaaagaccttatgctgccagggtgtatgaaggcgttgttcgttaagttgggagagacttttgtgatcagtgacaataatgaattcagcgtgttgaagataagctctccaatgttgaaccgctacaatgagtgccatgtactctttttcataagtggataaacc

SEQ ID NO: 94537 - DNA, 535 bp, Zea Mays
ggtttttagggttgcttatgggtctaggagtcaaaagcccactagatacctatatattgaggggtggggcacagttagggttaacctaatctgcgactagcaaactagcagtcacgcctctcttgcccttgccaagccaccgtcatgatcctagcagtttggtacatggcgcttcctccctgtacgtctagatacctcagagatgctacatctagagcactaaccgcgtgaggacgtgaaggacgacgacgattgcacaacattgctcgacgcctacgtctacattgagatggcttccgccgccctacgcgtctagtggtaattccatgacatataacactaggagttcttggattatggggtcgaaaattttgttttgcgctagtgtagacaccccataatcctacaaaaaagtatataggtcaagtattttggtgcattgcatgtggatgtatgagttttgtttgtttattttcctattttcaaatcctttttaaaactcaaaccaaataatcaaatccttaaaaagaaatag

SEQ ID NO: 94538 - DNA, 641 bp, Zea Mays
caaccatgcctccacacaaggtaacatccaagataatgatcaagccatacttcgcgctaagaaaagtaagtagtgtagtgaatgctttgaaaagcggcacttgattagatcatgtccctatattaaagaaaatggcttgattattaacaaggatgataaactttgtttcaaatactctaagaagggacatttagttaattcttgtccccatgtgaaacaaaaaggcatagaaaagaaatagttactaaccatgtagcaagcaagaaacaagggaagaagaaatcttcaagacatgaagatcgcctttgctacatatgccgaaagaaaggacatcaatgtaaggattgtcccattggtaactatccccccctaacttgtcaattgattcatatataactaggcaacccaaaattgcaacttgtgctagaaaggtaataagtttaccaagcgctagcacaaaggacatttgggttcctagatctttgttgactaaccttgatggacccatcaagagatggggaccaaaatatgcttgacaagctttgcaggggaaaggagatgatatgaagctttggaggtgcttgagcgggttaattcaattcttattaactcaagctatcaatcttacaatgttatatata

SEQ ID NO: 94539 - DNA, 567 bp, Zea Mays
ctagaggaagtggatatagatgagaagcgccaagagcatttcttggaaggactgattggacctctgaactatcagctgcggagtcataccttccctaacttccagacagtgttgaacaaggcaattggccttgaaagtaaaagaagggaactgtctgaccacaaaaggaagttccaaggtcagtccagtaggaacacccgcccgaacaacgctcaaggtttgcagttccgctctggaaatcagggtggaaataactattagatgcaacgctctggacaacaaggccagaggaacaatcaaagtcagaaccagcaaaggaacaactctcagaccaactagaggtctggtaggagttcacagaatcgtcaaggtggcgccgtgaacacgcaggccagaagcaacaacgcaccagtccaacccaatggttgtttcaagtgcggtgagcttggccattatgctaacaactaccctaggcgcaaccagtagacacctcaaaagggcaacaatcagaggaatgaccagaacacccctgctcgtggatctactcagaacaaagctccacagaac

SEQ ID NO: 94540 - DNA, 1012 bp, Zea Mays
cttcggcatctcccactcgttaacaaggggccataccttgaaggctatgtgttcttgaaccagatctctggtgctaatgtaattgcacatagcgttgaaagccaccaggcaggcttgagctttttcggtgtttacaatagctagcctcttaatgccaaagcgagagtggaagggccactaaatcacatctttgatatcctctctcttatccaagtcattcctaacatagaaccactgctttgtccataaccccggccatttttgtcggtaagttgggacagggtgcctagcgctagatcgatatacgaaggaataacaaccaaacttattatgatattgttcctttctagtagccttcgtctaatacaagagctcatgaatattacaaaaacaatcagcatctaactctagtccttggctcctcactacccagatgaagatcccaactttaactagggcttcgggagtaagctaatggaggtatatctcgaacctctttaggacctcaaccaacattttatgaaggggaaagcatggtccggccttccaaaagcttcagaagacaatcactttgtccttttcggggagaggaactgtgttttctcccccaggtctcactatgaatatatcgtggaaatacttatcattcatggcctcaatatgcccctttttatagtagatttctcgaagttaacatgactctgcctccacggccgatctttggtatcgtcaacaccattgtcaaagtcaaaaccttcattgtcaaagtcaacaacccgcctagaatctcatcaactatcttcgcagcactactcttttccatggcttcgtaaaaaccagctagtgcaagatcttcacttttcttaccctcggccatctcagttcaagaaaaaaacaaccgaagctaaaaacaaatgcaatccaatggctaaaaagcagcaagacagctcaacagcacgacaaatatattacgatgaccttcatatttatatgcaaaataccattagaaaat

SEQ ID NO: 94541 - DNA, 962 bp, Zea Mays
accgggtctccgaccacggacggcggagtggctgctccggcgagcttgtaccggccgtaatacccaataatccatgctcgactttggtctacgcctaattctacccttggcgctccactagggatcactaattgagcccgaacgccgccctagagcttggtctacgggcacccgcggatttgaagctttcccgacccattcccaacgacattgtgcagtaacatacaaattgggagcacggtaagctttagcaacttaccaggactcaagaatggcagctaggaaggggtgtggagggataggatggtgggtcgatggaggggttgttcgcggcggcgcggagaactgatttgggggaaaatccgaattcgggcgctacggtggatgatcagaggcgagaatcggtgtgctgggcgcgtaacaagtaggcggaacagggggtgcctccaatttatatactccggctgagcttatcacgaattttggattgggatcgaggtcaacgcggcctggatatttttacggtggcccgctcaccgtggcgcatgagagggaattggttcagggatgataaccggttgcttgccatgatctttatgacatggaggatagatcgctgtgtgtcacggtcgacgaaacggtgagctccagtgatgccaacactactaaccgcggcgggtaaggggaatacacgatggccggaccgaccagtgattgggttcacccctccccggatcttttcaccccttcccgacgttatctacttctcacacggcatgaatctcctaggcgagcatgaattgcggcgagagaccaccggcgtcaggttcacgacactggagatctttccatctactttaccatggtgatcttcttcagtccatctaaccgagcaacttgtagagcctcattctcaaatttttgtgtgacaacccactgacctgcatgtatcaaagttgttg

SEQ ID NO: 94542 - DNA, 920 bp, Zea Mays
gccgagagcagttcttagaaggtttgattggacctttaaactatcagccagaaagccacagtttcccgaatttccagactctgcttaacaaggccattggcctagaaagcaaaagaagggaattgtcagaccataagtggaaatttcagggacaatctagcaggaacacttgtccgcataacaactctcaaggttctcagtttcgctctagaaatcagagtggaaataacaattatcaaatgcaacactctagacaacaaggacagagaagcaaccaatactagaaccaatagaggaacaactctcagaccggtcaaaggtctagttgttatcagcagaatcattaaggaagcgacgggaacacaccagccaaaaataacaatatacaactactctagtacaacctagtggatgctttaagtgtggagaaattggtcattatgccaacaattgcccaaagcgcaacccatagacaccccagaggaacaatagtcaaagagttgattagagtacacctgctcatggtactgcacagaacaagactccatagaaccagtgtaaggggagaatcaatcatgtgacaacagaaatagttctagagtatgctgacgtggtgtatggtatgttccttattaactccatacctgcatcagttttatttgattctggagcgtctcactcttccgtaacaaagtcgtttgtggaaaagcataatatatcaaactatcctttgaagaggaaactattaattagatcaccaggaggtgaacttagagccactcactcatgccctcagactaagcttgagattaaaggaatgagctttctagtagagctaataatcttggaatcaagtggaatcgatgtgatacttggaatagactacttaaccaagtatgatggagtaatatcttgttcta

SEQ ID NO: 94543 - DNA, 444 bp, Zea Mays
tctgatcagggacccaatataacttgtagggagtttgctgtatttccgcatatctctttgatataaagcataagaacaaaaagaagagctgcaaatttctatcagaagagtaacattagggaacctaaggaaagatctcaaactgttatatatagtattgaactattgataatccacttgcatggtttaaatttgaaaacaaaacactttcctctagacctctaccttagcatactgaccataatattagtcttgaatattgcttgttgattggcaattttgattgatgatggtgcaaacaaccttgtgcttcaccattttctcacttattcctgccccttattgattattgattggtgcacgttaggaaaattgcagaagagtacactaaaacaagtgtggttgttgtttttatggatttgaaaaatagttggatatatgtag

SEQ ID NO: 94544 - DNA, 584 bp, Zea Mays
ttgatctgttgccttagcctgacgttgtgcccctggtgttgtgctatttgtaggggcgtgcatagccgtacccctggtatggtgcatcgtctcgctcattcgtcatacgggtccctgtagtgagtctgctgccgatatcctcatagtagtgtgcgatgggtcccgtgggtcagtcccacacacgacagtgtgtagcgtagcttcgcctgtcgtcacatgcctacgtcacttgtcgtcgtgcgtaggcatacacccggaatggtgtatccgttacatctatccaaatattctggtcactgtagagaaactggtatccgttacatcgggtagtctgatagaggtctggtgcaccaccggaccatcactattcaaggttcggtgcacccagaatctgtgcagtttttgccaacttattccaacggctatttgggtggttggggctataaatatccccaactagcacattgaagatacaagagctactccaaccaatcatacaccaattgcaactactcttacgtattcaaagtcacacaagcgcgcatccgatcaatttgagtgaagggagacttagtgcttgtgtt

SEQ ID NO: 94545 - DNA, 835 bp, Zea Mays
tgggtcttaaccaactagtaaatgtgtcgcgtgaccgactctagatggtgtgcgagaagacacaagtagttatcctggttcgggcaacacaaggtcctacttccaacagagggggatgaagcttatattactcacaccgtggtgcctgtagtaggggtttataagcacaacgggagaggggaagtccccaagcccctaaagatgattgaggcaaatgccaatatctaagacaatgtggaggagtgagtgttcattggcgtgtgtgtcgatgtccctccctagagggatcactgcctatttatacacgaaggggagtgtccgtagtgatgtcgagtgctgtattcgaaggagggacgccctgacgtatacaagccgacgtgacgacgaactgtgttgttgattcgcgcctgttgatttctcgtagagagccgaggcaaagaccgaggggttgcccgtacgcccaagcccccgagggagaggccgcccatgccgttgttgtaacagcgccaggatatcagccaaaggctgcttacggggtgcatcattgtcctggcgcgtgatgacctcgagattctctgaatgcgtttgttagggggttaattcgggtgtccctaattattgctcccgacacatatgcttcttccattcttgtataaatatgtacatagatcaatacaaagatacacttcttccattctctactttcactttacatttcagttctcaacgcttgtgtcatgtctcactttccaactacacagaatttggcgggggagatgtcacacaaagtgaacaaatagacttctctcattactttttatataatattcactcc

SEQ ID NO: 94546 - DNA, 604 bp, Zea Mays
taagatagtatacctttgttgtatctataggtttcatactattatgatcaaatggtcaaactagagtcttacagtgatggttgtgttcctcccataagacacaatagatcgtgattaattagagtatgaaggggttgtgtcagatcccctgggctagcaattaacatagaaaattatttctgctctatataaataggaggactaataggtgaactaatttttttagtcaatccttcagctgacttttaggtctacctaataattagctttagccgatttaaacagactctaaacaccagaggtgtctcacaatccaaaatgattgaaagtcaatatctacatactctttacaactaatttaatcttcttagtattatgtcaacaagtttccatttaactgtgctacactcgtagcagtatctccagcattgacatcatatactaattaatatctacatacaagcattcaaaatttgtactcaaatataagtgatttataggagacagaaatgagaacaatttagattaaataataacataagtttggtaggtactatatgctacttactccctctgtcctaattaaattatgttttagaaaatt

SEQ ID NO: 94547 - DNA, 601 bp, Zea Mays
gcgatttccccctcgccgacgatctccaccggcggccatcttctccggccgtgctccggtgaccttgggctctcctcctcttccccctcggtgagcagcttctcctctccccttctctgctgttctctgcctgacagacagtggagctcccccctttctcacccttttgcaaatctttcaaatttctgtgaaatcccatgaatccagttggtaaaatgctttgcattatctctattgtgtatccctgcttgcttttagctccttcgggagggcattcccacctcaaatggccattttcctaaaaccctaactccccgcacaccacgtgctcggtgaaatgcccaaaccagccaaacttgctccaattgaacccaaatttttcaggcacgttcacaacacttccagtaacctacttgccaaatttcacgccaatccgagaccccaggcttaaatttcaccaaaattcccgttttgagcgatcgttttcgagccgagtgccctaattcctttttcttcgcctaaattcaaaccaagcacacacttcacttatattcacctatataaacctattcgtgaagtatcggctcaatttcatatcatt

SEQ ID NO: 94548 - DNA, 1131 bp, Zea Mays
cttaattttgaagtgtcggtgaggcggctacttgacacagcttgttaatctatagagacaaatcgattttgaagtttcggatgtcgcagagcggggatgggggaacgtgggctgcgatgagaagtttctcaacggttactcaaactgatggctctgtggtgtgggtgatgtcggtactcggtagaccaaactaagcccaggttggcccatcgatttggactcccgccaaattacgggtgcgcgtcgaacacgggctgggcctccctcggctcgaatgccgccgtgtccaatcctaaaaaaaacagctaaagcatttgtgtcaactattaacggaaaccgactttgctgcagtataatgcacacacagtaagtcccatctccagggggcctctagcgggcgtgcaaagtactgttttgtactataaagtaaagttcaaaatagagagtctgctgcccatagtctaaagcaccatgttctacggttttccacatcatcatgctcgaccacatttaaatggtaaaaaatctaaaactatgcacaaatgaagacttgaatcatagttatgggctccacgaccctagaaagaagatactctctggctgcagcatcgaacctccgagatggcttcgggtccagtatatgccatgcagacctcaagccaagtagggtctgatgacgccacgtgtccggactggtgcggctggggcccggcccccctcaggcacagtttgggtccctggtcaggaggtcctaggaatgtcgtgtccccacatattcctgtgcttgccctagtccaagacagaggttcagtgccaacgtgtggccaaggcgcgcctggcttaagccaccagacggtgcctgatgtatgcctctgacatggggcccgccaacattaggtgcagatgggatgcatacttatccgcgccagcagcgggtagcgtatcccctgcattaaatacgtgaatcatgccaggtctgcaatgtgcagattttattgtcacccacatgttactaaggcaaaactattaacccaacacatcgcttaggtgcccttctttttgactttcactgttccttgtgcgttaccgaggcataaagagacaagtggagaagatggaacgacactgtcc

SEQ ID NO: 94549 - DNA, 870 bp, Zea Mays
gctaaacgtacttgcctggtcggggaatttactcgacctaatgcagccagcagtccatatatttgcagccattacgtgttaggcttggaatctagcgatggatttgtgggttcatttgaatttcacacctcataggaatggaggtactctgcttgtgatccttggctatagtagccattttcctacaatgctacagtttcagcttgtggattatgtgaattaacttagttttcaattagcacaacacctacactttgctgcagatttgcatgggtgatgcagtatttataatttctataggttgtcataggaacatgttgtttttgcttttataagcatattcaacagttccctgcaatctaatttgaaatctaggtcctatgtgtaaaagtagagtacattgaccagaaaactaagagcgttacagttttccatggtcagaaatatattgtccattcacatttgttatcatactttttgcctagatgacattaatttagcttcataacaactttagataatatcttgcttatgtctagttgacatgaatttggcatcaatagtttttgctcgaatcatttggtatcataaagtagtaaacaatgtgtacagttctgttacatgcttggatgcttcattatttttgtatgtaatgacatatgcgtgaggaaagaggaattgtcagttatcacttgatctaaaagtctgttacattggattctattgcaactttactttgttttttattcttgtcttgttgctggttgctacaatggcctctctcaagactagtaatttttataatattttcattggaaagcatgctgctagatgcctatgctctaggctgtcttggcattttggcacttt

SEQ ID NO: 94550 - DNA, 704 bp, Zea Mays
acacttgctctagcaactccgaccatgagccatgccataggaggcataggaaaatcatgcagtccccataattatggcctccaccaggtggatttgccttagtgggctcgcacaacatggctcacatagcccatcctttgcttgcacccccactagggtacataatgccctaggagtgctatgttgcatgccccatggccctagaggagcataattgttatacatgtctcactcctctagcctcgcatcacgactagggaggcgacattacaaggatgagagattctccatgcattgatcagcttggtaggtttgttggtgccttgactttagtgccaatgatgtcattggccctctcgacaccatggaggctctcctctataatccattggcaacagatgccaatgaagctactacaaataatggagacaagtcattgtcaggtttatagccactactagggtaaaccctagcccatctctccctacataacatgacccaaagaaggctacatcgggtaggggtgagacttttgcacgatcttgggctccaaccatggtctctctagctctagacattgggatgtacctcaaccctcagaaccatgctcaagagccattccttgacgttaacatgaagtgtcgtgctagttgctagaacaacaccatgaatcatagagcataccatggacctgcacaatgaag

SEQ ID NO: 94551 - DNA, 1126 bp, Zea Mays
taagccgattgctccgttagtagggtatagtggtcaccctaagttaagtaagcgtgagcatgttgcaccgtcttaagtcgtcgtcgacttaagtcgattgctctgttagtagggtattgtggtcaccctaagttaagtaagcgtgagcatgttgcaccgtcttaagtcgccgccgacttaagccgattgctccgttagtagggtatagtggtcaccctaagttaagtaagcgtgagcatgttgcaccgtcttaagtcactgtcgacttaagccgattgctccattagtagggtataatggtcaccctaagtcaagtaagtatgcagattgataataaatagttcgagtgcctttgagaatgaagtctttttattgatgatgtattttccgattacagaatacgatgctgccccgataacctttgaaatctggctaggggtaaaacttcctgagatgctctatattccatgaattccctatttctgtgccatccatttgagtaagtcgatatgatcctgaccgaggtgacttctgctaccatgaatggcccttcccatagtggtgataatttgtgtcgtccttcccccgttagaattcggtgaaggaccaagtctcccactgcgaaggatcgatgtcgtatggccttatcatgatatcgcctcagggtttgctggtacctagctgactgaattattgtattcaatcgttcttcctccagtatatcaatatcctctagtctagtagcttctgcctcagctatgttttcaaagatcagccttggtgccccaaacctgagatcagcaggtagtactgcctccgaaccatagaccatgaagaagggagcgcttccatgcaaagctcggctaggttgagttcttaagctccaaaccacatacgacaactctctgatccacttccctgcgaacttttcattcttgtcgaaggctttcttcctgagtgcttccaatatcatttcattagccctttctacctgaccgttggctcttgggtgtgctattgatgcatttgatctggatgcttctttgttcgcagaaatcaaagaattccgaactagtgaaattggatcccaggtcagttataatgctattcggtattccgaacctga

SEQ ID NO: 94552 - DNA, 710 bp, Zea Mays
caagccaaaacactagaccagattggaacccagcctagaccctactaaaacagcaggaagatcaatgctaggtaactgcttagccccagccctatcccagcaacttaactcattcagaaacaaacttttaacagagctcaaggaagggtttactccatcgaagacagctttgtttcgactttgaacgtttgtccagctttctgctctaaattggagccaccagactcctgtggagcgcaagcaaagattgaatttcgcttctccacaaagaggcctccacctcacaacaaactccgtttgttggtactcagctcaggggcattattggcggaaccccggactccaatcttggcctcttgcctgtcgtcggggctaggattgattgaatcaattagaccaaaagaaacatcggtgcaggtggtgtcgtggtgagatgacaaaagcccaagctcgtttagtcttacctcagagatggattgtgaagaggaacttccatgccatccacatctaatctgttcagaccttccagcctcaccgctgagtaaggacccgcatgccacatctgatcagcgaacactcagtccacccgctgtgcctggataggcgggggaggccaactgaggcaagcgagaaatagcggcgtgaggaagacaatgctgctcccaaatcccaatcgtgttgctgatgctctgatgggttagagaactgcc

SEQ ID NO: 94553 - DNA, 484 bp, Zea Mays
gtgtggcgtcgtagcttttgtaattctgaaattaaaatccttcctagaataggatatctgagcctttgttaaattgtatagcctcaaaatgtttttttcctcaaaaaatgaaaaatagtccagattctttatttcgagaattcgaggagtattttttcatgtattttcttagcacatccaaatccccttaataaagtgtatgctcgaaaaaataggtttatttgaaatgttttatttcagtttaatttaacacaatccaaacaatgttcaaagttttcatgcatggatgctaaagataataggggcctgtgtcgaggaaattttgagtttgtttcttatgccttgagatttagtttcaaaataaaattatctttagcaccaccagaatataggagcacaaagataatcggcaatggattcacatcacaggcaatggacaaatccacacacacgcacaaaaacaataagaaagcaaaatagcaaa

SEQ ID NO: 94554 - DNA, 334 bp, Zea Mays
gtgaactaggatctcatgacatcgaatttcgacctcgcactgccatcaaaactcaagcgttggttgacttcgtatcagaatggactgaacaacaagtgccagataacccagaaaccgcagaagtatggcgaatgtattttgatggctcgttgaaactgcagggagcaggcgcgggaattctctttaccacacctggaggcgagcacctcaaatatgccctccacttgctatttccagcctccaacaacgcagccgaatatgaagctctgattcatggactgaacattgctatatcactaggcatcaagagactgatggtatacggagattcttt

SEQ ID NO: 94555 - DNA, 408 bp, Zea Mays
aaattatcctcatccttccttacgtaaaaacagtgtcgtcaattaattttattcagtcaagaatatcatgcacctcggtgttgttctgtacaagctccaataccgaacaggatgggctcaaataagaaccgaccaacaaaacttgcagcagttgagacaacagcaacatgggccatggaattcctcatcagatacagcatttgcaggcaccagcatgacatggcatgctctgtcatcactggatcatcagattggtgaagtaggcgacaaaataatttatgaaatcaaatggggaaaacgagaaagaaaaaaaagaatatgtacatcaccccagatggcaatagggggtgcaaaaccagttgccgtttcgcaaaactggtgtagcacgactcacgacacaacaggcgg

SEQ ID NO: 94556 - DNA, 461 bp, Zea Mays
ggggcattgagctataaaatgaccagacttaccacatttgaagcaggagtgttttccccttgacttgtttttgcactacaacacaaacccccctatagcaacgcacctgcaacaacacatggttttatgcgttgtaagaaattagtgggcaacgcttaatatgcgttacaagcatcatccattaagttattagagtagcgacatcgctaatatgtgttgctagcaccatcagttatttaaataggatgtggcagcacttaatatgtgttgctagcagaatatattgattaactaggatgtggcaacagttaatatgtgttgctacttgctagtaatatttaatattagaaaacagaacaactaggtacggataactcacagatctaatctatctctctttttattaaaccggggagaattcttagcttcttccgctgccaggatatcgtcacctccttgac

SEQ ID NO: 94557 - DNA, 532 bp, Zea Mays
ccgagttttggacccctagaacctaggtgtgacactcacttagcagcaggctcacctggcagtagagcaggcccatcaggtagctatccagcagcagttgtccgagcggatgttctccatgttttagaccattcaggaccgccaggacacccttcagcagcagatgttagcagacatggcagagcaccgagcattcatgactcacatccttcagcacaccagtgttcctatccctccaatgtagtctactacacatcctgctcttcaggctgcagtcgtgccagccattcagtcaggaccccagctacattcctttggtccttccatctctccgctcaggctggtcaccctggacttctcggcccaggtcgtcggaccagtcagcactcagccaccagtgcctccatcgtctactgtcaccactactgttgtggctatttctgtgactgctccagctctagcagatcctgcaccccagccagcgtcagagtcagcaccagctccagcctctaccacagatactagatccgag

SEQ ID NO: 94558 - DNA, 500 bp, Zea Mays
cgcaccgtcgtcttcttcggctaaaccgtttcccgtaatctgtgatatcgagcaaactaaagcaatggtatgtcccctgcaatttcaatgtccactagtgcggggcaattctacccggcaaccttagagaggactgaggagtttgactcgacggaggaggcgaccaagaacagaagagcaattgcgatgacattgggtcaccatgatgcgtgagcgtgatctgtgttggatgagggccgagagcgggcggcaggcatgacatgaggttgccgccgcaatagtcagcatatgaatcttttgattttgaatttatatctacacgtaaaactccccacatgctcatggaatcatggagatagctctggacctctcgttgccggccagctaaaacggggcgcgtaacgtgcctgcctgatgtctcagctcccgcgcaaaccggctttctctctctagccaccaccacctcaccgcctctcttgctctgcactgcacgcgtcctc

SEQ ID NO: 94559 - DNA, 404 bp, Zea Mays
agtcctaaagaagaagagttgtcaagtgtaacttatgggcaaaagagaaatgtgaatagtcaagaaaataagtcgaccgatcgaccctgcaagaatgcggtgctaagacccgtacgaatacagatagaacatctatattcataccaaagtacagaagctgactgcaaggtgtacttacttccataatccataattctatatgaagttgtatctgctaacagtgctcatgcagactaatgggggcactaaaataaagttggggctgatttcatcagtcaactggtacaatttattcccttatctatgggcagattttatcctcattcttgaccatataagttgataattatgtatggtatgttccaccttgttgggttaatctattttctcattgcaaaagaaaa

SEQ ID NO: 94560 - DNA, 660 bp, Zea Mays
ctctgagtcttccgcttgggcgccatctcaatcttgctggcgagcggagcagaagcaatatcgcaagagagcagagaagatctggatgcataaaagcaaactagggctcagaatgcagaggcatgcgacagtgcagtacatatggggttttcccgggccatacgccatttctaaaaagtgtccagtcatcacccagctgttatttctaaaacgctggcgtgccatgttatcactcggccgttatttccaaaatggccgacgcggcccaatataactcaactgctatttctaaaaacgctgacgttaccagacttcactcggccactgtttccaaagcggccgacatggtccgttgtcactcggctgttacttctaaaacaccgacatcgccagtactgttattgctaaagtggagacgtggctccaaaggactcggctgttacttctaatatgccgacatcgctagtaaccgcttggtcgttatttctaaaacaccgacgtggcccgttatcactcggctgttacttctaaaaacaccgatgtcgctggtaatcactcggctgttattcctaaagcggcaacgtggctccaaaggaatcggccgctaccactaaagcgccgacatcgcgaagaaggcaatctgaaacgcgactcgacgat

SEQ ID NO: 94561 - DNA, 865 bp, Zea Mays
cgcgtgcgggtctatcctctacaaccccgggaagtcgtcgtcggggatctccatcgtcgcttcgtcgtgagcgtgggtctctgcaccaccatcaggggtaataacccatccattctcttcgtatcacattgtgcttcgtgtagcgtgtctccaattcgagattagctcacttggcgacgatcggggcgctggaggaaggtctccgccgtggggattttgcgctgctgcccggggtttggtcggaggttgaaggcgcgccgtcgaccgtctgatttggtgggcggtcaggatttgataaagggctgggtctgtgtgcgtcgttgattttggagtgagcggtagagattagaaattggcataccctttcggcgctttatcatccgaccgtcgaagttgaatcggatggttgcgcgaggttgtagacgtggccgaactctggccctggatctttgatccggtggcggctactgcccagggctccaggtgctgctttgggcctaatctggaccactggtgctcgatccaacgaccgagggatcacggtaccctttcgtcgtgcccattttgcataagcgcccctctgttttagcgaagttaacccgcagtccgcagcagtgtcagcctgagtcttaggacatctttcgtggaagcccctggtttttctgaaaattgatgcccagtccagaacctgtttaaaatgaataaatgaattagtgaatgtatttttaatgcaaaaacaattgctagaacttggaaaattcatatctagtttattttaaatccaaattgagccattccaatttctaaaattttgtaataagattctctatcatttagtgtctctgttttgacatgaaaacagtaa

SEQ ID NO: 94562 - DNA, 295 bp, Zea Mays
atcctattcgagtcttggatcaaaaggacaggattacccgaaggaaaactctcaagttttacaagatacaatggaaccaacacacggaagatgaagctacttgggaaactcaagactttttagataagaattcccaggatttttagcttcatgtaaattgtgagatatgtacacttgttgtaatagaggaatgagccccataccacccctgccttgtaccaaaaataaggaaataaagtcatgacgcgtttccttttccattacttgccctaggacttttaatctcgggacgaga

SEQ ID NO: 94563 - DNA, 488 bp, Zea Mays
gagacaatcaagggaacagcgtgttcctacgatccacgacggtctaattcaattgggcgggtcggtgagcatcaagagcatgcaagggtgctgaaacactaacacagagggcgagatcggacctgagttggacctgagcagattgggggaaatccaaaattaaagctccctggtgatcgactgaggaaaatacttggtggctgggtgcgtgatgatcctacggagctcacggtggcttcaatttataataggcaagagcagtggccgggaattcgagcgacgacgagcggcggtcggaggagtggaaagttactggcacagtggattggtgtcctattaccgtggcaatcactctggcgatcaacagagagttatgacgggtaacggcaatgcggtggaggtgcccaggcatgtggcacaaggccgggaggcggcagtcaccggtgaggttatccgaagtgaccggggcaagctcggtacggtggccg

SEQ ID NO: 94564 - DNA, 713 bp, Zea Mays
attacttcttactaacatggtcacaatagtgtcatttttctctgggagagatctaaggaacttatgagtgaaatccacatctggtacattaaaaccaagtccattgagctcattcactatctcatttaaccggttaaacatgtcggacacactttcatcctccttcatgagaaattgctcaaactttcctttgcatacatacaacttagcactcttcacaattgtagttccttcatgaatttccattagctttgcccaaatctcatgagcggttgtaaaaatttttatgcagttgaactcatttttgtctaacgcatcatagaaaacattcatagcttgatatttggttagaacattttcattatcactcggtgactgttcatcttcctttaatacaacaagtccatctctaacaataggccaaatctttcctcccatagctttaagatgcattgacattcctattttccaatagtcataattgttcccatcaaaatgtggtggcttcccaatgtgcacattgttgttactagccattttgtccaactccgggatgattaaattcacaaaaaatggagtccttgatttgataccacttgtaggatctaggacactagctagagggggtgaatagacggtttaactaaaacaaaaaaacactagagaaatttaatcaaatcaataagagatataaatttactagccttgatagg

SEQ ID NO: 94565 - DNA, 409 bp, Zea Mays
ctggacaagtttgtggtggtcttcattgatgacattctggtgtattccaagaatgaatccgagcacactaagcatttgcataccgtacttcagagactgtgtgaccatcagttgtatgctaaattgtccaaatgtgaattctggctgaaggagataaaatttctgggtcacaccatttctcaggatggggtatcagttgatcctgaaaaagtacaagaagtgatgaattggaaacctcctacaacagtacgacagatccgtagttttctgggattggcagggtattatcgacaatttattccggatttctccagaattgccaagccaatgactgaattgttgaagaaaggagtcaagtatgaatggagccagaagtgtgaggatgcctttcacacactccggcagcatt

SEQ ID NO: 94566 - DNA, 290 bp, Zea Mays
atgtctaattttcatatggatatgcttagtgaggaggatcgtattcggctcactgctccttttactattgatgaaattaaatcggtggtgtttagtttaaaacacaatagtgctccgggccctgatggtattcctgctgaattcttccaagatttttgggagatcatccataatgatttgtggaacttattcaaagatttttatgatggggctcttgacatcaaacgacttaactttggtcttgttactttgattcctaaaattgataatcctacggatatgaggaattt

SEQ ID NO: 94567 - DNA, 694 bp, Zea Mays
cgcgagcatgttgcaccgtcttaagtcgttgccgacttaagccaatttctctgttagcagggcatagtggtcaccccgagttaagtaagcgtgagcatgttgcaccgtcttaagtcgttgccgacttaagccgattgctccgttagcagggcatagtggtcaccccgagttaagtaagcacgagcatgttgcaccgtcttaagtcgttgccgacttaagccgattgctccgttagcagggcatagtggtcgccccgagttaagtaagcgcgagcatgtcgcaccgtcttaagtcgttgccgacttaagccgattgctccgttagcagggcatagtggtcaccccgagttaagtaagaatgcaggtcgatcatgaacaatctgagtattcttgaagcctttttattgatgatatatttcccagtttacagagtacattgtcgtcccgatagcttttgaaatacagctaagggtaaaatttcctgaggtgttctatattccatgagttcccaatttccgtgccgtccatctgagtgagacgatatgatcccagccgagtgacttctgctactatgaatggtccttcccatagaggtgacaacttgtgccgtccctcccccgttagaattcggcggaggacgagatctcccactgcaaaggatcgacgtcgcatggccttatcgtgatagcgtctca

SEQ ID NO: 94568 - DNA, 406 bp, Zea Mays
gagaactggccacacacaaattgaaggtgtatcctcaagcaaggctaattcgacagaagttgcgttgtttcacgtctaataaaagggaagctattcgcgccgatttagcttgcttagtgttggcaggattcattagagaagtactgcatcctgagtggctagcaaatcctattcttgtacttaaaaagaataaagttgattggcgcatgtgcatcgactatactgatctcaacaaatattgtccgaagggtcccttcgggctccctagaatagatcaggtagttgactgagccgctggctgctctaggctctccttcctagactgctactccggatatcatcagatcagcctggcaaaagaagatgaggagaagactactttcatcaccccatttggagctttctg

SEQ ID NO: 94569 - DNA, 538 bp, Zea Mays
gagaaatctgacgctatagtgtgtgtagaaagatcttcagattcatccccctcgccgctggtgaccctcacatcgtgatccgcgccgccgccacgattcgtgccctctggcatggcgataatcacggcggagtaaagatcttggcaccggataggtttggacgcggtcgctggtaaactcgctgtacccacttggactacggctggccaggatgatcttcaccgctgttagcctcttaacgatcatgctccacgcgtcttggaagcttagcacgttgcagtgatcctgtgtagcaagctcgtccatcgctagaggacttgccacggggagagccacgatatcacctgcgccagtgaccttccctctctttggctgccagcgcttctcttcaaaattcggagccaccgccctcggacactataaattgagcgtgccgctagctcatttgggtcatcatgaagccagagcacccgcccttgcctccgattagccaccataactctctaattcctctcttcccccaaatcgggtttccgtg

SEQ ID NO: 94570 - DNA, 503 bp, Zea Mays
ctgggatccaacttcacaagttcagagttcttcgatttctgcgagcaaaagaacattcagatcaagtacgcttcggtggcacacccaagagccaacgggcaggttgaacgagctaacaggatgatattagaggcactcaggaaaaaggtcttcgataaaaatgaaaagttcgcaggaaaatggataagggagttgccctacgtcgtttggagcctaagaactcaacctagtcgagctttgcacggaaacactcctttcttcatggtctatgggtcagaggcagtattacccgctgatctcaagtttggggcgccaaggttggtttttgaaagcatagcagaagccgaagctactaggctggaggatattgatgtactcaaagaagaacggctgaacgcagtaattcaatcagcgcgataccagcaaactctgagacgctatcacgacaaggccgtgcgacgacgatcctttgcagtgggagatctcgtcctccgtcgaattct

SEQ ID NO: 94571 - DNA, 586 bp, Zea Mays
tttcagctcctcttcgcaatgcaccgatcggatttcgctattgggcgcttgggaccgaaattgctgttccccggccatggcaccaccgtcagctcgggcagcgtcgccgttctgctcgggtttatgggaagggatggtcgtggccgttgatgataagatgggcgggtctgattgaagggcggtagcatttggttatgggccgtcgatcatcgcacgggcggacgagatcagtgcccacgtagtgttttaggctgatgcgtcgggtgtcgttcaattttgatcgaacggtcgaagattatttaaatctggtgcgtcgatctgaaacggacggctccggtcgcgtatgggttcataaagatggagatctaatcctggcggtctgatcatgatcggatggctcagtggtgtcgataccccttcggatagccggttttgcaaaagaaaccccactatttttatgcataaacccgccatccctcgcaactgtactctgagtcttgggattgttacgcagtggcccctgcgtttctatctaatacgcgtgcagtccagagaccatttaaattgaataaatgatttagaaaac

SEQ ID NO: 94572 - DNA, 379 bp, Zea Mays
gccagggatgcctacaccattggtagatacccctccattaaggatggacttattttccaaaaggggaccaagaacttaacaagccaaaggacctccaatctcaacaagaagaaagggaaggctcctatggatagtagctctcattcttctcagggtagaaagaatcatgcttatatgtatgcccatattaagaatgcctctaacattgctctggttgttatagtcatgttgttttacctgtacgtcatgatgttgtttttgattctcatgccatgtttgcatcatctagctcttcgtatgctcatagtaggaatagatccaggcaccatgttcacaatgttgtttctcatgcgcctagaaatgcatcaagtagtccaac

SEQ ID NO: 94573 - DNA, 333 bp, Zea Mays
catatacaatgagtgcgtctgagaagacgttattttgtgaggcactgaaaggagtaaaatttccagatggatatgcatcagatataagaaaccatgtggatatgaaggagaagaagcttgttgggctaaagagccatgataaccatgttttgatacagtatttactcccacttgctgtgagaaggattttaccagaaatagttagtgctgcactgattcgtgtgagcaattttttcaagcaaatatattcgccagttattcgtataagcgatatgcataagctagagtcagaaatagctgagactctaagcattcttgagactatattcttgc

SEQ ID NO: 94574 - DNA, 582 bp, Zea Mays
cagtgttaagaggccccgccagtacttggtgggcaaacttttccgccatccaacctgtgggacatcaaatcacttgggaataattcaaattggcatttagggaacattatgttctggagggggtgctacaaatgaagctagaagagttcatccgactgaagcaagggggagattcggtgatgtagtatctcaataaattcaatcatctctcccagtacgccattgaccaagtggatacagacctgaaaaagaagaattgtattatgagggtactaaatgacagactccagcgtaagatggcaacgtgtctagacctcacatacagcagggttgtcagtacagcactggcagttgaagccaaaaatgcggggcatggaaagtcaaagggatatgcgggtgaaagatcgactcgaggaccagaaaagagaacaaggttggtaatccgacctttcaatccaaaccgttcttcgtgtcgcccaccttcatatccattcaaacaacctgtatttattcgtcccacccctgcccccgctctgaccaatcagccgagtgccccaggtactcgtttccttgcccttccca

SEQ ID NO: 94575 - DNA, 572 bp, Zea Mays
agagttcacctaaagtttatttataattactgttttgcattatgtagacagtaatgtttgaaaagtagagataaactactagagataatctaacactatctacgtcattattctttaaatctttccctataccgcattatgtagtcgtgtcatccagattttatcatctatttttttctttttcagagtggtttcctctaaattcttcctaaattctctctatacggcccacctaactataaaatattatttttcaaatctattcatcgtccaatactaattttttcgctactgacaagtcattgtatgcacaagccgcgaagaggacgtcgtagtgtgtagcgttggcatgctcgtacctgccacagccgcgaagaggacgtcgtagtgtgtagcgttgcagcgctggatggacattaaacttctacattggtaggagagggcggctggcagaaggcgttgtagacagcttagactatttgtaacgttatcttctaaagttttctctataccgcactatgcagccacgtcatccaaattctatcttctaattttcttccgctcgcgacagt

SEQ ID NO: 94576 - DNA, 444 bp, Zea Mays
attgagccaaccttacaagagcagataatcatggcacagattggtgacaagggtgttcaagtcattaaggaaatgctcaatcaaaaggtggataagtataaattcttgcgtcgggacagcaagggtattttatggttcgaagactgactggtagttcccaagaatccagaactcaggaaaatttttttggatgaagctcatctctccaaattttccatgcaccccagaagtaacaagatgtatcatgacctcagatccttatattggtggaccaggatgaagagagagattgctaagtacatatctgagtgcgacacttgccaaagaatcaaaactagtcatttaaaggtagcgggtaccttacaacctctccccataccatcttggaaatgggaggacatttgcatggactttattgtgggattgcccaacacctcccggcac

SEQ ID NO: 94577 - DNA, 632 bp, Zea Mays
atgccatttgccagatatattaaatagcggaatagtgtttattcaacacacatgtgggatgggtctcctacaagaccacttgaaccatcgcattcaccacactttatttcaatagtgcccataaatgtccgaacttaaagctcgtgactttcattttgcgattattggttcggtctcgaatgcatttatcaatgacccgataagagagcttcaagcactcatgcctaggactttgttttggatacctttgcaatctatagaggcaagataggtgtcgacatatttgtctcccacatttaataatgatcttcgtcatttcccaaaaacgaaagattcattgttccgtattcccagcacagtgatattgcacgcattgctaggaacttcatcatcaagatgaacctctcagtgaggcaaatcaccatcggggtgaattaatcggaggagagttatcacataccacgtgaatctgcaatgtgattgtaatatcccaaaaaattattgaccaaaagttgatcttcggtgcgtggatgagggaaagagttgtgggccattggatgcaaagtcaggagacatctgatgcatcatttctttctcccacaaaaccctagtggtcgccccccttttttccc

SEQ ID NO: 94578 - DNA, 730 bp, Zea Mays
ttaaagggtgccccaaccattagcgtgcacggattcaacatctatcacaaaaaccgccttatcttggtgagcttcctgaccccttccttgcgttgattcactttgttttaagggtgcattgcatagtgcatacacatagagacaagattgacatggttatctctgtctaaaatgtactgcagccattccatagagtgctgagtaccgcgagcagcaaaggcagaagcgtctctggagtgttggaggtagacttcatcaagcccacccatgacaaacaggactttgagaagtcgcagctgtttcagcggctgatgaaccgcctcaaggagatgactaacgagtactggtaagttccaggttcttgatgatattatctatctaattcctcccgatttcccgaacctagcaccgatgcttacttcgcctcaaatgtcaccacgcaaatgtctcggtccttccacagggatctttacagtaacaagatcggatacgtgaaagtgccacgcgtgagagcagctcccactcctgctcctccagtgatgctggcaatagagaatggccccgccgaaccatcagaaaggagcgcgcctgctccgacgcaacccttgagatggcagcacggcaactccagctgcgtgaacgcagttccaatcgccatggcgccccctgcttttcacccagctcctgtcaaaacagagactgatgcaccaggagcgcctacgggctacgc

SEQ ID NO: 94579 - DNA, 505 bp, Zea Mays
cgaaggtagcggaagaagaagcgatggaggcgcagacacagctagtgctgccgcaacaggattacatgaatgaggaggctggggcctaggccggtaggccctggggcattgcggcgctatgcaatgggggtgacagagtgtcaaggcgagggcgtgaggcactgcggctctaggtttcatagatagctagtaggttgggctgccaatcatgtttattgggccataaaatgaacttttggtttgtttaataatattatgtcgggtcttagaaatccatgggttaaagggtatgggtactaggatctcatacccgtacctgtgtacccgctgggtttagcttatcgcccattaaggaacttgtgggtttacccgttgcctaatagggtcattgccatctccagttccagcgttcctgattatttgctcaaattcttgtgttcctgattatttttcagttcccacaatagatatagtcgtctctcatctgcagttgatgtacacaaac

SEQ ID NO: 94580 - DNA, 383 bp, Zea Mays
cttatgcatgtgatatatgtgctaatctactgaacatgacatagttccatatgtctaggtggagaagatcaaggtgaggtttggctatgacggaccgagtgccaaagtgaagggcaatctatatgtttcagtgtgatggactattgaggtgatgaagcatgagctaagggtctagcgactattaactgagagaatggtgaagagcaagcaatgcaataatcgttggactaataaggccatgtaaagatatgaagtggatcatataattcatggtgatcaagccaattgttgatgattaagtgggttgatggaggaatacgaatggacttcatgatatgtgcaatggtcaaggtaacattgttggatacatatatggatgacca

SEQ ID NO: 94581 - DNA, 326 bp, Zea Mays
gacacatgcagctccatgcctatacaagacgttgccaatgaccgtgtagttggcaaaatgtctaccaaggcgctcggtagctgccttgtcgtctagctcttcttcattcctaatgtatttgatgattagtattctctaggcaatcgggtcttgttatgtaaggagtgccttttgttctatcgccttgcactcttctcttgagtccggtgagatattggtatgttgtatttcttgcacaaaaacatcttggggcggctgagctcaagttgatccaagtttgtacaatgcaacaactgctacattacgatccctttctatatgatgga

SEQ ID NO: 94582 - DNA, 469 bp, Zea Mays
aagtattcatagcatgtagagaaggaaaaaatgatcaaaatgcccacgctgattggagcaccaaaacacaaaaaactggacataagaagaaaaggagcaaacaactcagaagattgaaccaccaagaacctaggaggtatgggcctccattcccacaaacttcaatggttatagagtcagattacatagatgaatgatttttgtagtgtctaaatcatttgtcactatggaacaaagggtcatcagtaccagttgagaaccggctataataatggattcccaaccaatactgagcatccgggactaaatgtcccagttgcatggcacggtactaaaaagaagcctttagtatcgtttcttggctcgaattaatactaaaaggtcccactttattactagttcataccaagaactgatactaaagagggccttttagtatcggttctagccaagaataggtactaaaaag

SEQ ID NO: 94583 - DNA, 371 bp, Zea Mays
ggtttggtgttgtcaggttgagctagcactggggctgttgtcaaatgctgcctcaaggtatggaaggcatcttcacacttttggctccactcaaatttgactcccttcttcaacagttcagtcattggcttggcaattctggagaaatccggaataaatcgtcgataataccctgccagtcccagaaaactccgaatctgctttactgtagtcgggggtttccaatccatcacctcctgcaccttctcaggatcaactgataccccatcttgagaaattgtatgacccaagaatttgatttccttcagccagaactcacacttactcagcttagcatacaactgatgatcacgcagtctctgaagtacagt

SEQ ID NO: 94584 - DNA, 973 bp, Zea Mays
gttattcaatattacaatgtatccaatttgtagaatccttattagattttgtaaagagagaaaagaggtccttgtgagatgataatggctattactgcaccaggttttgttagatggtatgcactggaccaagtttgacaccatcattccttggttcataattagtctttggccattccatgctacaatggttgcatggtgtgattgcaaactgtcagatgtctcttgactctctgttctgaaattcttgtaccaatggagggcggtcgctttttcctggttctcataccaacaggtcaaatttcatataggtgtatcttctggctccacaaacagggtttatctataagtggataaacatgagataaatatcatggtctaaagatgaagcctgcaaagttcatcttatgtccatcatctcgccatgtcatgatctgccccttgtcaagtctggtcattgaattgccagtgctttgggctcttagatttggattttgcctatttagcagtaacattaccttcatcaatgctgccattggccagcaagctcagacctgtaagacccaccagctaactccaaaagaatgataaaaagtttccccaaaaaaatgattattggaggcattctaaaaaaattaagagtaaattatagtgtgtactccaacagtttccttaaacaactaaaaaactgaaaactggctttgctcctgggtatgggcgggtatatgggcctttatgctgatccagcatgatgatcctacgacgccacatgctgcaggaaagctgtaccaactcattgatggtctgcacggccacagatgagcgcgcggcaaaataaaaaacacaggagcctgcatgcacgcagacgccgaacagattggggagaaagggatcacgcgaaaatatgcgggaggggaggaggcggatgtgggatgcaatttttttgggggcgatgagggagctattggagcaa

SEQ ID NO: 94585 - DNA, 656 bp, Zea Mays
gtgaggcgctctgaagaaaggtttcaatggtacagtactgaaaaagatcagcagatgcaccgcacctcaccgccggtgacctccgcgcccagattcgcgtcggcgctacgatttgtgctctctggggtgcggattacgaccgacagtgaaaagatcttaccgcggatgaggtcatgttctagccgtcgtacccacttgctctgcggccagctaaaatgaacctcgtcggagttggtcacttgccgcccatgcgccatgtaatcagtggtgttaccacgtcacagtagaccgctataggtagcctatccatcgcctgtgacagtgccccggtgaatgccatgatagataactccggtgactccttccctttctcactgcctgcccttccccgcctaaattcgtcgtattcacgatcgctctctatatattgagcgctcagcgtgctccgttaggttgttacgtgcccagtacaccagccctcgcctccgattagccaccgtagcgcttcaatttggaatttcccccaaattcggttctccgcgccgccgtgagccaccgcgccgtggaccgccgtctccaggtccgttctcgctctcctcacccttgttttagcactcaggcacgcttggcatgcttgtcggcctgatcaattgagc

SEQ ID NO: 94586 - DNA, 358 bp, Zea Mays
cattttcagttcagggaagttgatcatttcatcaagtttttcttgagaagggaactgcataagatacccagcgtgacacttggtcgctttccaagtcttgccccaggggaagtgaaacccaaagtccttctcaagatcttctgcagaaatcaaaccttccataacagtgattaatcctatgaaactccttttcggttttctggacagaggtttcgcaaaatgggaagagtaaaaccctaaaccatcagccgccatacccataataggcatacaaggtttgttttgcttcggcaacacacatcgggccgtcatgtgggtttctttgtgacaaatatcacaccacagagaccggaagcag

SEQ ID NO: 94587 - DNA, 608 bp, Zea Mays
gctcatctgcactcgattttgttccacattcacatacatattgtgcctgtcctatagctccacatactatatcttctgatcaatacagattttgaccttgcaatcgtggtttcactacctcttggtaagtatcacgaaccagcctccgattgtaccatcctttgcttgtatttcgtcagacacttgtaagagcttggtaagatacattagtgtgttcctgtgttccacctgagaggagcgtgtagtgaaattattagggataaccgtcaccgttagtttcctatttttgtgtttcgatggcaggcgacgaagaagaagcaaggatccctacagacttcgatgaatgtgttagctgccaaggtcttgaggcaaacaacaagctcctgaaggagcaaatggagaagacggtccacaagtcagtgcaagataccttcattgacatgaaccttggcaagacttacgagaggctggatcgacgattgtcccagatcgtcgatagacttgctgtgttggagacgcaacaacaagcaccaccaccaccacctcctcgtccacgtcttcccgatgatgtagtgtttgatgaataaggtaattatgatgaagcggcc

SEQ ID NO: 94588 - DNA, 636 bp, Zea Mays
ctcaggccatgtctatgtgcacgtgaacctttagggtcacaaacttaaggggaaggaatcctaatttggatttgattcgaattagactaggtatagggttgctgatgggcctcgaagtcaaaagcccaccagaacacctatgtaatacgaggcgggggcacggttagggttaacctaattcaccacctacaaactagcagtcgcacccctctcgccctcgcctagccgccgtcgcggacctagcagtttggtacgcgacgcttcctccctatacatgtggatacctcggaggtgctgcatcttgagcactaggacgaactacgtgaggacgtgaaggacactggtgactgcacgacacttctcgacacattcgtctacatcgagatggctttcactgccctgtacatcttgtggtaattccaggacctataacaacagtttttcttggtttatgtgatgaggacatcaaccccaacaaaggaatgactactccaactgaactagcatggacgccatcaggaccagtcactcgagctcgtgcacgtgaattaaacttcgtgatgattatgaagaatgaaggaccaaaagtttcctaaagtgcatgcgccatctatgctcatgatgaatctgcccaga

SEQ ID NO: 94589 - DNA, 374 bp, Zea Mays
gttcctctggggtgtctgtgggttgcgctttgggcagttgttgtcataatgaccaatttctccacacctaaaacatccactaggctgtactggggtaattgtattgttatttttggccggtgtgttcgcgacgtttccttgacgattctactgctaaccactagatctttgactggtcagagtacagttcctctattggttctggtattggttgcttctctatccttgatatctagagtgttgcatttgataattattatttccactctgatttctagagcaaaactgagaaccttgagagttgttatgtggacgagtgttcctgttagactgtccctggaatttcctcttgtgatccgacaattcccttcttt

SEQ ID NO: 94590 - DNA, 957 bp, Zea Mays
gggaggatgtgtcaaagaaatttgtcatgccaagggaggaaacccataccctcaatgtgaagaaggtcgctttgaaatctatgagtaaggattgacttctcaagattgtttagttcctgtttgcatcatttttttgggatttatgatttattttcattttattcgtacaggccatgcatggaaggatttcaagtggaaactaaatataaattatgtcaagaaggacaaaactccatttgaggactatccagaactcaagaaagagtggtggccaaactttgtggagtgggttacctctgatgactatattgctcttggagaaaagggcaagaaaagccaaagcatgaatccgtcaaaaactaggtcgccaaagctatactgtacaaaagagaaaatgggcaaaggaagatgcacaagcattaactgagggtaaatctattccatttcaagacatgccagatggccatcataaggattgggcaagtgcgaggaatccttctggcgacgtgaagataacagagtcgcatccaatcataaagaaaattgtaatgttcctctccacacataacatgtccatttaattttcttaccctatttgattcacacataaaactgtttttcaggtagatctaaatgaaaagtcagtagctggtacctttacaccattggataatatggacatacttgcaacaacaatagggagtaatcatccaggaaggacaacaggggtgagtgcttatgtgggtttagggatgggtcttgctcaaggtgatggccctcgtaagaagaaacgtagaacaacgtaagaatatgtcaagaggattgtggatgagtatgagaccaagtttgagaaactgacagccctgtgtcagagtatggagcgtcgattaaacaattctgagagttgctcattatcgaaatttgttgatacaccagaccatgtaacacatcatttag

SEQ ID NO: 94591 - DNA, 453 bp, Zea Mays
acaagaagtaaagactagtggaactaacttctacaatctaacaagaaatgcagaagccagactccaccaatctccgacctaacaacaccacagtttttaagccatgcttatttacaatggacaaaggccaaaaggagcaaaccagctaacaagtctcagttttaacaaacccactaacacagtttttccaaaagtacttgggctgcactaatcaccaaaagaagtagcacgagccaaaacggagacttcagccagaaatacgacgatccctcggacaccacccgaaagccctgctcatcgcttcacttattatctttcggataagttggcttccttggaccaccatccttttttccttctctttctgtcgaatggcccaagaatccaaccaaaagcaacaaagaaatattatgttagcagggtcaatcaaaaatttttcaccaaaaaaccaat

SEQ ID NO: 94592 - DNA, 723 bp, Zea Mays
caataaaacagcaacaaacagcctgatgccctcaaatgaatataacagccatatgaactggcattgtcaactatgcactgtcaccacaaacatccatatgccctaagctatttttcacaaaaaagaccaagtgtagtatacagttcaatattttcaaagaaaacatcatagggcaaagcaactatatcacctcatatgtatcacaagcctcaaaacagcactcaggttattataattccatcacaaggctgctacaaaccacatggcgcagatatctcaagcattggctcagtaaaagtttcagaatacaaacctgatagtatttggccaatgtctcctgagcacaaacgacggctgcactcgcctgttgataagaacacatagcacttttttccgcctccacagcggattcaagaacatcaagcgtagaatccacatggttacctactgatgctgtggcgcagagatcaccagcaaccacacaggtggcagcagaagcactcaatgtgtcacgggctgcatcaacggtcgcggagaacttctgggcacatagctcagcggcagattccatgccggaatccatatctgcaaacatggttttaaagtcgtccgactaatcgcgattagtcgcaattagtcggacttatcgctgctgcaaggccgattagggccaccgacgcgattagggcgactagaaacctagtcgtccgactaatcgcgatt

SEQ ID NO: 94593 - DNA, 1235 bp, Zea Mays
agtatgtttttcaatgggataatgcttcaatcatatcagtatatgaactgttcttgatgaattgagacggtctcagtagcattgaccaatggaaagtaagctactcacaaaattgagcaggactgcccatgacaaattggagacgaggacataacagttcttgtgtttcagctgagattatacatgtctgaggaaacaagtgccagtcaactgtgcaatgagaagtgacatgtccacaagcctaaatattacacgaacttcaactgatgtgtatgggaaactactttggaatggtaaaaacaacaaggcagggccacagaacagtcagggacgttgagctccgtgggacccactgaccttacaatttttaagctaaacatgtaaatatttctagcccaaaagaatttcaaccaataattctttggtaaagcattttttcttgaacacacaagagagttgtgcaccatttcaatagagaaaagaggaacagtacaaagaagggagaagagcccccttccgatgggaatactagaaactttggtaaagcacaaaatgtaaatacaacagaatatagcaggaggacaaattacatcatagaaaaactcacagattcagtaatttcgaaggagcagcacgtagaagaactaatgcctccttccaactccattgccgctcagacagaggtggaagacgttttagaacagatagacgccaatccaggtcttcaatagaatgtttggcatgtttgagcctccattctaacgcttgtctaccagcaggcgacagaccagtacttgaaaggtgatccgtatcagagccttttgattcgagattatgacgaagtatatcaagtaaaagcccaacaaaatataccaccacgttctttccctcagattcgatatttatatcatggcattcatgactaacatagcactcagaagggacagattgagacaatttggcacaatcatccatgtgtaacaaggataaaataatgctaaccatgaaaatctgcaaagtaacatagaaaaatgaagcttaatagcatacgtaaggaaccccgttgaattcttatctgtacaatacttttgaacagtgaacgtgatatcatacaggaataacttgcattaacaatttaaaatcaattgtaacactaccaaaaaaagcttcaaaaagtttaatcttgcattaataaaatccatttaatagttttatatttatgatctgtgtagggt

SEQ ID NO: 94594 - DNA, 420 bp, Zea Mays
gaaagtctgggactggttgcagattactccgtggggattcaatgagtctgtctacctcgagtccctggatgggctcgagtccggtgccatgtgtcctccttgactacttagaccaagggaagcacgtacaactgggtcgcgacaagatagcccaggaatacaataatatgaagcgcggagcatcagatggagctggtgggccaacgtcttctcctgcggtggccatggatcttctcttggtcgtcgtgcttgctccttcgaccagactcaccgtcgcctcgtcttgtcagcgtgtgggtgaaggttctgtcataggttgtggtgtaggctggcttgtcgacttgcataggagagtaggtgggtggtgttgtcctgtcccctccacctgctgctgtggtgggaacaacaagggtcatgatg

SEQ ID NO: 94595 - DNA, 1049 bp, Zea Mays
tgaaaatagaaaaaaggaagataaaactgaaacagaaaaaaagaaaagaacaagagcttgcctgagctgaattctgcgtagttggcccaataccctcaacactgcaccccgctcaaactcaccacgacactcatcctgagacagacggaagtgcggccgcatcgcgtggtctcattgacgggtgggcccgctcagccagcaagccgaccgtctatgctgttgtctcctactgacaagagggaccatcgggccaaccatagggatcactcacacacgcccaatcgttgtcaagtggacccacctagtcaaagctttcccctacccatgctcagctttctgttacaggcgcaacaaaccttcccatgatggacgggggttgtttagacgattccaccaccttagcttcgaatccccacctctatataaccagccgcaatcgcgtctctttaccatcaactcggtgcctctaagtcttcaccgtcagcacatgcaataagtgccgagagtcgatcagagagagagagagagagagaaactgagctaccacggcaaaacttcgagaccctgttgtcaaagcttcgatagaagtgcagggagcttcgtcagcacacgttgtagcaagtggtgccctcatcgggcacgtctgatggtcggtgcaattgtaattcctcgtcggagcgtggtcaggtgtactagatccgtgcaacgccgtgggtagggtcttccatgctacaatccccggtgagaccctctaccctcgtttcatttttgcctaagcatcacgtagcaccgatttgtatggggtttgggacgtttgggcagagttaggctaactccggtgccctgcgccactgtgggcgcgtccggaggaaggagaaaatgctccaaccgtcggttcgagggtggatggctgagaagagacctcatctacttgaaagttggggccatgggttggagattctgtcaccgtcgttttgtaccgcttcgtaatccattatgagctaatgatataaaatcgaacggtctcagacacgctcgggttataacca

SEQ ID NO: 94596 - DNA, 324 bp, Zea Mays
cataccctactaacggagcaattggcttaagtcaggagcgacttaaaacggtgcaacatgcacacgcttactcgacttagggtgaccactatattctactaacagagcaatcgacttaagtcaggagtgacttaagacggtgcaacatgctcacgcttactcaacttagggtgaccactataccctactaacggagcaatcggcctaagtcgggagtgacttaagatggtgcaacatgctcacgcttactcgacttagggtgaccactataccctgctaatgaagcaattggcttaagtagggagtgacttaagacggtgcaac

SEQ ID NO: 94597 - DNA, 578 bp, Zea Mays
aggtctcgtttctactggccgacagcaaaaaatgatgcagccgagttagtccagaggtgtgaagcttgtcaattcctatcaaagcagcagcatttaccagcacagcaactgcaaaccataccattgacatggccatttgcgtgctggggactggacatgatcggacccttcaagaaagctcagggaggctacactcacgtgttagtcgccattgacaaattcactaaatggatagaatacaaacccattgcttctctaacttcagccaaggcagtggaattcatacaagatataatattcaggtttgggataccaaatatcatcataaccaacctgggatctaatttcactagctctgaattctttgatttctgcgaacaacggagcatctagatcaaatgtgcatcagtagcacatccaaaagccaacgatcaggtagaaagggccaatggaatgatactggaagcactcaggaagaaaatctttgacaagaatgaaaagttcacgggaaagtggatcagagagttgtcgtatgtggtttggagcctaagaactcaacctagccgagctctgcatgg

SEQ ID NO: 94598 - DNA, 621 bp, Zea Mays
gtaagttacaaccttgcattttgctttgtactttaatattcttttgcatgttgaatcaggatcagtcatctactttgctggatagtaatgcatgtgtatagttaggacaatcatcaagctctattccttctagcatcatctttgctgaaagttggataggacaatgccttgctgtttgaaattgaaatattgtgtttcatgtgcttttgattcattaatttttgctttaatcagtccgatatcttatccatacaaagcaagaggttaccatactgtgcctatagcgctgctgttgtcctagctttcccactctgttgacatgcatatttgttttgtcataagcatcttatgcaaacagcctatacaaggaagaacatccactaattttcagatgggctcatgctaatcacatacatcaatatcggtttctgtttacagaacatggtttcatatgttttggaattttaggccctggtagttattaaatgcatgagtaacttatcagcaaatcaaggatcagtatgatagctggaacatataaatttactgctgtcttttgaaatttatttgaaattggacttctgcagtagcagttcctccacactcttatcttaattcaac

SEQ ID NO: 94599 - DNA, 338 bp, Zea Mays
acgtcggtccgcccacccgcagtcatccttctgctctcacatggcgccgggattcttgctcacggttctagggaatgtgtggggggaaaggtgctcggcgcccggttttatagccagagaacccagaggcgctccggttggcggaatcccaacagaaccagcgagattttcgccatgaatttctgttgaggaccgagcgccactagtttaaaaaatgattcgttctttttatttctttcttcttcattcccgtataactcgtcttcccatcgcttcctcatccgccggcgcctcatctcctcccactccaacccagccatctccctctccgccccgcg

SEQ ID NO: 94600 - DNA, 782 bp, Zea Mays
gtgtttgggctccctattcaggtttctcataatgctcgagctttgtttgatgcggctgtggtttccatagttggcgatgggggctcaattcttttctggtcagatatgtggctgaatggtaaggggatccaaaagttagcaccaaaccttcataaattaattctttccaaactagaatggttgcccaagctttgtttgacaagacatgggtgcatgatatcaggggaagcctatctgttcaggtgttggttgaatatatcctaatctaggattaggtggacaatgtggaattgctgcaaaatgtccctgatattctcaggtggtagctaatgcaatctggcacttatgcccttccatttcttcatatggatggcaatcaacaacatatgctagaccacggaccgacttgccaagcgaggtttaccacactcggatgtttgtactctctgtgaccaagatgaggaatctattttgcacattctaatctcttgtgtcttcacttagcagatttggcatataatcctgcaacacttaggcttggcagctcttgcacctttagttacaagctatgatgcacggatacttcacaaaattcacgtacccgtgtcagataatgtatcatataccgatacttcgtggatactcccggatacgtatcaccgtattagggtaacataggttacaagctccaggttcaatgcatgatggaaggtggctatcagtaatgtatagaaggagctgcagtctcatatcctcttagcctgggaggtgtgaaaacatag

SEQ ID NO: 94601 - DNA, 664 bp, Zea Mays
gtgaggcctgggctaatcagtgttgtgagcttagacaagtactcctttagtgactcgaaagctgtaacttgctctcggccccaggcgaagtcttttgccccgacgcaacgttttaaggatggggaggctccgctctgctgaatgggagatgaatctgttcaaggtggtgagccttcctcttagtttttgcacgtctcgggcagactgcggtggtgtcatgtccagtgtatcttgtatcttggctgggcttgcctctatgcctttgtttgatatcaagcaacccaaaattgtgccttgccagatcccaaatatacatttctctgagtttaggcgaagtttggcttcgcacatattggcaaacgtttctgcaaggtcagagaggtgatcatctttgtttctgcttgcgacaactatgttgttgacatatgtgaaaatgttgcgacccatctggctctttagaatggttttggttagccttgaaaatgtggagccgacattttccatgccttcgggcatacgcacgaagcagtatgtgccgaagggtgtgataaagcttgtttttgccttgtcatcttccttcatgtatatctaatggtaccctaagaagcaatccagtagagaaaatacttcacaccctattgccgagtcaacaatcttgtctatt

SEQ ID NO: 94602 - DNA, 363 bp, Zea Mays
agtttctcaagagatgtcaaattcatgagcagagcttcctgaggcagagtttccatataagaaaggaagagtttcctcaggtagggtgggagagggttgatgatgctctgagtctgagttgctcgtcctccgatggaccatcgagagaataacctgtcacatttgtgtatggtcactgactcgagcgacgagaggccacagaatccagctccttcctccatgggtaggatcagattcttacaccctgtgaagttgacatctctcagcgagctagagggtggaaaatgcagtaccacttcctcgttgtcctcatctgatggtgatgccatcacatgcaaagaagaaagtgctggaaaacatttg

SEQ ID NO: 94603 - DNA, 1188 bp, Zea Mays
gttcatatgtttgctatttttcctgaagccaatttcgtttgatgtttgtgcaggcaatcgttgtttactcagtccccagtagttctaccctcaaggtaccttgatgtttcttacaattctgcttctcggaccggaaattcaagctattcttcagaggctaggcacaattacactgagactcccaaagagattcaaacacaacatcataccataaacccaagcccatcgtacagttttgtacaggatcgatgtgaaagagggatcgccaattgtgaatcatcgactaagctggattgcagaaagagaaggctaagcttccagcaacctctggcgatccctgttataaaccttgaaccagaaccagcaccagaaccatctccacacgtcgccagcagagtcgctgatcacctatattttgatgatggtttctttgagaaccttgatcttgatgcaattgaagctcaagcaaccgaacagtggagacagaagaccacacaatcgacgcagaaaccagtggaaattaagaatgcatcagacatgagttttgcacctccgtcattcgatttaggtctctgatagtggtggtaaagttagcatccattcatgatgtcatctagctgcagtacctagccatctcagagcatgctgagaactgcacaagcaatgaggttttctgcagaaggcccgaacctgcatcacatgacaatgccgcaggatctggcatgtctgccgctgtgatatttatcggcgccctggagctggaagatgcgctggcggcagattttgtagagtatttatctcagtacaggctcaatacaccatgtatattctcctgtaaatactgttcgatgtataagggtcttattgtatgcagacatttcagagacttgatgtgttaaacccagtggcaaaggtgacgtcagtgtcggtttttgttgcgcaggattatcctcgctctcgatgctgaaccgactggttttgcatagacgaggcatccgtgcagcatgatggcaacgtggagtttggtcaataggacgagtggttggtacatgatgcctggttgctttccgaaaacaggcaatgttttgtgcagtcttgtcgatttctgtacatctcaattaacgtacgcgttttcgtacattggcgcgacaatgtgagcacagagattctgaggacagtgcattaaat

SEQ ID NO: 94604 - DNA, 379 bp, Zea Mays
ccctgagtgtttcccctaacctaattgcacaagtggtgagctgtcaagctctgtccgcgtgaaccgaataggtggcggacagatgaatgcattcccggtgatctagagctatcccgtcccaattggcggttcggtcagcatcactaagtgacaagagtgctcgaacaaaggagaaggagggatgaactgacctagaatgggttggccgtggtgagcttgattctacggtggcggaaacccgatttggggcgaacacgaaattcccgagctccggcgaacgattgtggctaattggcggtgggtggttagctgataaccctacagagctggtcataggctcaatttataggagggcaaggcggtggccagtgaattttgg

SEQ ID NO: 94605 - DNA, 350 bp, Zea Mays
tgatgctttatttagtgtcttagtcttagtcagtctaagtaagcattagtttgcttatcaaatgttttgatgcttgtcgtgatgaactcgtaatgaagttggatctttgtaatgattgtcaccaaggtgtgggcgtccgctggaacttggtgtagttattaataaagtcagttatttagttgggcaacccctttatttcactttccttattatctgagaagctgtgttggccgtgttgagagtcagtgaagatggtcaattgttcaagtattgtgaagatttccatatatcttttcttatgctgaaagactatagagttagacttgatatgtgtgtgctttctacagatg

SEQ ID NO: 94606 - DNA, 406 bp, Zea Mays
atgaaatcgatctatcaaaatattatttgagattgtagctagaaaggttggctcgacaaagcaaatgatgcaatcattcataaaattgttaccaatacgattacgaagtattgtcttcacaattttcattgctgaaaaacacctctccgcggatgcagtggcaactggtagaacaagaactaactttaaaagtcgatagaccaaaccgaaagcaaggtgcttctttgtatcaaccatcagcttagcaagttcggttaaggtgttcaggttggaaaatctgtcatcagcttgtacattatcaatgtagatctcaagatcatgagcaggatcctttagttcttctgaagtaaagtcatctggataaagcttagctaattccactaggctctccaacttaaaatcacca

SEQ ID NO: 94607 - DNA, 911 bp, Zea Mays
acgatgactagcttgatgccatcgaagcaacgagtgatgaactgttaggggcctacaccaaagctgaagaaaaagctatgaattctgcctttggtgcccgaggaaagaggagactaaacaggttttttgatgctattggttttatttaccctgattattacttccctgctcggaagagggggctaaaaatgaaaagtgcagtaaaagcttcttctaatgcaccgaagcagaagaaactgaaggtgcttacacaccagtcaaaaacatattattcagagagagcagcatagttgtctgccttgctggttgctgagaccgtgagtgacttaccttcaaaggtaacaattttttaactttcactttatattgtcctaccaacactcttaaatcctttgaatttttgaataggagcagaagaaatcaagaaagcctttattgatctatctattacagagccaaagatggcaaatctactgaagatgctagatctaccaaagatacaagaacaaacagaaacaatgcttgtccaagcgggaactcctaaaaaggggaaaagaatggcaaacgtgctagacgctgttctcaggccctcgaaagtggcgacacctactccttcaaaggtttctaaagacaaggctgaggagttggaaaaggctattggcgaaagtgtttctcctgattgtgctaaggctggaccttcagaatccagacccaaagaacaagaaagcaaaagcctaccagagaaaatatcattgccaatacccgaagcgacgtctcttggcgatcttggatacattgtttgccatgctttagggaaacaatttacgaaagaacaaattgatgaagtgcaatattatgcaaaacacttgaagtaccctcgaagctctatggtttatggaggaaatgacgaa

SEQ ID NO: 94608 - DNA, 413 bp, Zea Mays
gagaaactggctctgatactaagatagaatgaaaaaccttaacttagggttgagagttgtattaatagacttagattgttgggtctggcccattacacagggatataactgtgattaaggggctaactccaaaaccctaagcgggtaccctaagactgtctccagtggttcgcgtaaaatagggggacgcggaactgtatatgacactgtttgcatagtaaagtttaaaatagtgaatgccattggggattgaatatgagatttgatggagatagcctaacaccacctgtcttttattttttagtgacacaacgtcatcatacctcttcgctttggtgttggacaggtgagaggattttttaatcatagtctgaaactcgagtgttgctcagaccatcaaaccaactcaacta

SEQ ID NO: 94609 - DNA, 457 bp, Zea Mays
tgcttctgcaatattcatgaattatccgaccagacgaaggcaattgggaaggagcagtatcacaacaacttcgggtgctacagcttcgtgcatcgctctgatgtgaggtgtcctatgccaacgttccgaaagaaatggtcgggctcttggatgaaacaatggttttatgtaaaaaatgatttgaacaagagggaagatgtgaggggtataatccagcgccccatacgatcacgcttcggcatcaggaggccgtcaattgcaagtgggaacgaaatgcaagcgtgtttgatggcttccaacacggtgtgtacttacatcgatactagagatttggtttaggagcatatttcttataaggtgtggccactcgttaatgactgggagatgccgaaggagtctgctgctggttctagcgaaggtggtctggtttacccgagatacacctatcgcttcaaaa

SEQ ID NO: 94610 - DNA, 815 bp, Zea Mays
gacaaaggctcccgccacaactcccaagagaaggagaatggccagcatgctagatgctgtcatagaaaccacaaaagcattaactccttgctcccacgaagagagttgccgaagctgctacggcccaggctgaagccgaagttgtaccttcagtgtctgttgaggcgaataccgctgcaactgaggaaggggctgaacaagaatctccaggttttggcataactatggagaaagagatagatgaagaagctaaattttctggtcccgaagctatttccgagaatcttgattttattgttcgtcgggaaagaggttatctgaaggagagattgcagaggccaatcattatgcccgaaaactgaaatacccaaaaggggccttggtgttcaatggtacagatgaagatgatttcttatactgtctccttgacaacaaagagatatctgtctaccgagagatggctaaaagtatgggatttccaaagctcgaggttggcctttccgccatgtcgaaggatgaccacgcggacaaccttgcatacaacagcctgaaggtaaagaatttgtaaacttaaagtttaagaatttgggaataaagtttttattctcatgttaaacctttatccttctttttcgcagggcttaattctgagcaatgtcctgagagctcaaaagaatgcggaggatgaaagctgcacgatagctcttggcaaccttcgatcagaggtaattcagttgagaaacgaagccctggagaaggacaaaattctaatttcattggtgagtaaagtgaaggaagatgaggcgaaatacaac

SEQ ID NO: 94611 - DNA, 338 bp, Zea Mays
ggagaaataggtggctaattaagtaggccccgtgggccagtacttagacttttaaggatgccctaagagcaccctattattcggaaaggagaagttacttccagcatgcatgcattataaacacaaaagggaattaaaacttgagctaacccacttcctttaaaaaccatccgggctcttttattttttccttccaccataatctttacctttgatgcccttccgcagatgaattcacccacccccgccagtggaggagacactcgtttcagctctgacttcctttctcacgatggctttccttccatcttgtgggaagtgcttaactccgccggtta

SEQ ID NO: 94612 - DNA, 516 bp, Zea Mays
gaacgggccctaaggggagatttttagtccaggaagtgttccagcatatgggatttaatgaaactacaccacatatctgctgcatttaatctgtgatgaatacacatggaaatatgaattattaacacagatgctcgtgaaatcgacagaaaagttcagcacataactgagaaaaccagcagaggaagggaacattggtagaatacttcagaccatttcccctttcctgttctactttttttccccattaccttgcaactgcatcagtggcaatcaataatatgcagtatttgaacacagaaccagccagactgacttttatattttcccccaccatcaattgtagttaataagatgctgcatttgggtgcccaattagccatacaaagctcttgcttgatccagaggtctgtgatgtcttcattttcgctatggttacctacagttggtcaagcactcacatctgcccttagcctgaaaaaatgttgtgacgatctggttttaggcacatgatct

SEQ ID NO: 94613 - DNA, 703 bp, Zea Mays
cgtcaagatcgactccggggaaacatgcaatcggggcagagtgaggtctgggtgtgggagattgacaccgccgcggtcgaatcaagcctatggtgacgagggtgtccacggaatcgggcctatatgcctcgccatgtcgtgcacgatacattcagagcatcgcttgggtggattcgtgcttggatggtgggggattgctcatcgatgttcaaaatttgtcgtcgaccgcccccactgtggccttatggttctgtgtcgccgcagtggaagtaaggtacgtacatggaattgttgtcttccccaaagtatttacagcctattagtttaagatttggggcatcggggtagctcgagcggaccactccggtgttgcgccatgggcggcgccaccgcgggattgttgtaatgctgtgtccggtcagctggagggaagaagatcccctgaccgtcgatttagtgtcgaacagatcggattggatgtaacataacgattcggtcgggtgtagcttgagccgtccgattcggatcaatcgggcgagatttggtcttagggtttttaaatctggaacgtcgattttggatcgatcggcttgtatcgcgtactgattgggtggggcaccgatataatctgggacgtcagcttgggatcggatggctgtagtttcaagatacctcttcgctatggcagattaacataagagac

SEQ ID NO: 94614 - DNA, 745 bp, Zea Mays
ttctctaagaaagtgctgatgttggtcgattcaggaagctcctcatctttcatcagtcaaccgttggcagccttgggtcctccattaattcctctgcctgaggctgttcaggtcaaagtggctagtggacaattgctggcatgtacccattatataccccattgcaaagtgagtttgccaggtcacgtattctctattaaccttaaggttcttccattacagtgctatgatatcatattatgcatggactggttatcttcccatagtccgatggagattcattggcaagatcagtggttagcttttactcatgatcaacaaagagtggttcttcatggtcagttggcagatcattccacacccgagcaaatttctgtttgccagctgtatcacttggacagattgaatgaactttggcgcacgattgaattgcagcacatagctgaaactcaggccaacaccagtctgcctcaagagattcaggatcttataaaagattttgcctccttgtttgaccaacccactggtttgccacccccgagatcacattgtcattcaattccgttgattccaggagcaacccctttcagattgagaccttatagatacaatccagcacagaaagatgagatagagcgccaaatagcaaaattgcttcaaaaagggatgattcaaccaagttgcagcccgtttgcttcaccaattatcctagcacgaaaaaagactggtgattggaggctcgtcg

SEQ ID NO: 94615 - DNA, 1181 bp, Zea Mays
atttatgttcctgtgactattgcagtggtcaatggtagagcttggacttaacaactaagcactttagtttggaaataaagcttattgtaaacatatatattttagcattgtaggttagcctgcagatatattgttatgatatttacaagttagggttttagctgtgcaatagaagtgaagaggctactgaatgcagtataaaatatagtaaaatgcaccctaagtggatctgagatattcttggactggtgggaagaggcttctgatgttgtaacagggctgatcaagaaggggggtgtactccctaatcattctgggggcttgggtaatatggaaacatcgtaacagatgtgtttttgatcatttgcctccaagcctgaacctgcttcttcggcttgctgatgatgaaacaaggaagtgggttgtggttggggccaagggattgtctcaccttgctgctcctctgctagtattctaagtggtggtttagttttttaccttatggattgtttcttgaatgcttgtttttggcctccctaaggggcactttgtgtagttttttgggcggtcttttggccatgtaacacttctgcttaatgataatgatgcgcagttctcctgcgctttcgagagaaaaaatgcaccctaagtccaacttttaatggattctcagttgggtgcttgagctaaaaaaatgactatcttggtcctcaatatactgctaattctcacttgggttctcgaactaaaaagtgaccatatgggtcctcaatctacaatggagctcgactaaaggtccaagctaccaacagctgcctacgtggctgtgtcgattaaagttgcaaaaaaaaaactctctatctctctccccttgtaaccccctctctcttgtagttcatctctctttgtatgttatatggccgctgagtgtgtgcctctagagtgcagatgtagctacatggttggcagaccgtgtaggcaagtcatgcaggcgaagccacgaggcaggtgtgggaatagggatggcgacgggtcgggtggagcaaaaacccgctcgcgatcgcatccgtgaagtctacctaaacccacctacgatcacactcgcgggtgcaattccaaacacccgaacacgtcaagttttgggtggccatccacatgtttttacttagtgtacaattttt

SEQ ID NO: 94616 - DNA, 779 bp, Zea Mays
agccataggactggccgtagatcgtagccccgaccttaaaagtttgccttaaaagaaaagacctcttaccctcttaatcttctttccccgatattaaccaacccttcttctcttgctaccagatggaaggctcctttgtcattaggacatcctactgctcagaggaggaaggattccctcatcttttacggagttgcgcgcttcgcatggggatccgtaagaaaccggagtacgtttggaaggaataccacgagaatggaattgagaaatgctctatggcagtctacctgggagaaagccgaaactacccaaatcaccctcccttccaagtcaccaccactagacatcgcttcccagacacttgccaaaatattgcccaaaaagcccttcgccagctatgccaaaattacagaagggaagtctccgagacaccccttcgttactttccaccgagcaacaaaaatacccctacctggaggaaaagacttcaggccctgtcagggagagatcctaatgaggatgaccccaccatagtctacatggccggatatctccacactcttgacaaccactatgacgaccttttctcccactgcacccacctaaattcccgggtggaaagcctagaacaacaaatcaaggaattaaagaagaaaatggcatccctccaagagagtctcgaaatagcagaaggtgaagaggccaacactcgtgaggcctaccgaactctgaagatggactacgataagaagttaaagaagctcgcccccactaagaag

SEQ ID NO: 94617 - DNA, 356 bp, Zea Mays
caatacacatccttctggtgccatctttcttctccatgaataggacaggggcggcccaaggcgaggtgcttggccggatgtaatctttctctgatagctcatcaatctgcttcttaatctaaaccaactctggtccagatactatgtaagctctcttaaagatgggggcggtgccaggaagaagttctatggcaaactcaacttttctctcaggtggcatacctggtaagttctttggaaacacatctgggaactcagacacagccttgataattctagtggatctgcttcgctgctatcaacagccatctgataacaacttcccttcttcggctcaggcgggactaactcggtca

SEQ ID NO: 94618 - DNA, 294 bp, Zea Mays
ctctggccaccgagctggtcatctacaccgatgttgactgggcatgttgtcccgacactcgtcttccaccatgggctacactgtgttcctgggtgtcaacctggtctcctagtcctcgaagtggcaacccgtcatctcccgctccagcactgactctgggtaccacgctatggccaacggtgtggctgaggcgtctcacaactctcttgctcgcaccgccctcgtctactgccaccaatctcgtgcagcatcaacacacgaagcacatggagatcgacctccactttgtctgca

SEQ ID NO: 94619 - DNA, 368 bp, Zea Mays
ggcgaccaatgaagagctactgggggcttatataaaggcagaggatgaagccatgaacactaccttcggcgctcgaggcaaaaggagactgaacatagtttttgatgtgattggatttatttatcctgactatcgttttcctactcgaaaacaagggtcaaaaaggaaaatggcaactatgtcctcttctgtcgcgtcaaagatgaagagagctaaggttttgactcgtaggccgaagctgcactctttagagaagaccggtgccacgcttgccgcagagaagatagaaattgctgaacatgccgaagccacccccttggcttcatgagataattcttgctgtgatcgtcgaagctagtgtggtccgg

SEQ ID NO: 94620 - DNA, 573 bp, Zea Mays
cagtacttcattttcataaagcagatactacccacagtagttcaattgaatggttctgtgagcaacaggggacatgagggagtctagagcatcccacagaagacgatgagctaacctgtagacatctggccacggcgagctcactcacgacggagttttgactgatttgggggaacttcaaaattggagcgctctggtggacaatctgaggcacgggttggtgcgttgggtgtgtgattacttagcggagctcactagggcagcaatttataggttccatcggtggtatcggctaattttgagaagtcgcgcggcggccgaaaaagagagtgagtcatcgtagcggtctgccgtggtggtcactgggcaatgagctatggcggttactaagcagtcactacggctcacgacgacgtggtaaatagcctaaggcgtggcgcaaccacggtgaatggtgcatattccggtgacggtcactcagccacgtcgccgccgcaagtgggcacggcaacagggcggaacaatggcccgagttcatccttaacgcgatatttcttaccccgagcagttatc

SEQ ID NO: 94621 - DNA, 696 bp, Zea Mays
atcaaaacttgacgatgatgaatcagaaatctctgccattgctgctccaacatccatagaaaaacacgaacagctacttcccaacggttcaaatatgctagttgacaatccgaggatcaatattctggtataaaaaaaagcaaatcagaccaaaaaatgatgcacaaaaacaaaaaaactccataccaccatcagcactgcacgcaccacccgcgaaaaaaggaaaaaactagaaaaacaaaataataagagcgcccaaaaaaacaacacaaaattgaatcacaaaaaacctgaagaaacatgttgcgaactagagacttgtcttcagtgttcttctcactaaaaatagagatcgttggccaaggtgattcgaatttgagggatgtcctcagtgcggaacttgagcatcatatcaacagatataacccaatattccatgtattgtagtgtgaaaataccgcaatcatgcctatgataattaaagaaggcaaaattactacaagaaataatttattgtgggtgtttttaaaccatataaaatatatagaaaaaattaagatagcaactgaatttggattctaataaaaagaaatgatagaaatgaaacttatgtattttcctactttggtactgccggatataaaattttgaatgatgatacataagcatgaccaactaaactaggctaaaaaaatg

SEQ ID NO: 94622 - DNA, 449 bp, Zea Mays
catcaatgtataacagccgtttcagattttatctttctcgaccatgaccgtttgatcactgaatcaaaaggaatagaatggaggtgccccccccagtatggatagacaaagggactatacatgtaccatggattcatcatcgtaccattccatgtttgaacatgataatatactgacgatgagtaaacgggtggaaagtaccctggtctcataggatgaataggcgatgcttgttgtgtcgcctttcgggccgttttgtttacccgtttcgttttagtaggtgaccgaggtttcttcgttgaccgatcacgtagaacggtcttcttgctagtattcttggagagcaactgatcaacagtagagtcagctttgatcagccgaccatttgtgcttcgccgttgtgtctccttcccttttaaggttttgtgtggaggctgacacctttgggc

SEQ ID NO: 94623 - DNA, 525 bp, Zea Mays
gtggagtttggcctcctgcttattagcctcacatcccctatggtctcatttgttgggtcatgcttctaggccttgtagcccttttggagtcgtctgctgaggcgtgcaccgccgtacccctggtatagcatcgcgtcctgttcacctttctatagctactccaatttagatgtggtggtgcttggcaggttctatttagtcacctcaaggagtcatctaggaatgtctttagtacaacttcatcttccgtcatcccccagcgtcatctttcatcatgcgtagatgcatgcctggcatgacatattgccccatcccatccagtgtatgggtcattgtagagacccgatgttgagatttctacggctagagttgtccggtcccacgtgtcaacagggatacatatccgtcgttgtatttgagagagaccctcggtgctgcttccacagtctgagcatggcccagtgatgtcccgttctgtcgacgtggcttgatagttgtcggggaccataattaggggtaccccca

SEQ ID NO: 94624 - DNA, 419 bp, Zea Mays
gttacctcggtctcagagggggagcgattccatttttgttgttgttgatcgcttctctaagatgacacattttattccatgtcacaagaacgacgatgcctcacatgttgctgaattattttttagggagattgttcgtttacatggcgtgccaaagactattgtttcagatcaggatgccaaatttcttagctacttttggaagacattttggggtaaacttggcaccaaattgttattttctaccacttgtcatccacaaaccggtggtcaaactgaggttgtcaaccgtactctctcgactatgttgcgagttgtgctgaaaaagaatctgaagatgtgggaacaatgccttccacatgtcgagtttgcttataacagggcagtacattcaacaactaatttttgtccatttgaaa

SEQ ID NO: 94625 - DNA, 425 bp, Zea Mays
gtagttgtagcaggtcggagcgaagccaaatcagtcacgcgctatctgaccaccttgtgattcctgtccaccttgaagttggctagtaatttcgtctttgctttcttgatcagctgctccttatgttcctcgaactcctactgaacttcagccgacagattctccatagtcggctcgatgatgttgttgggagagacgttggaaccatcttttgaacatgccaatgaggaccgatctgatagatcctcacgcaaagtccccagtggagttgtcaaaaagcgtgttagcactgatctggatgctaatcattagtgtgttgggttcgattgttggtgtttgcaatcggtcgcacacttcatatatataggaggaggtctgtacccgttcctagacgtttaccaacaacagccacaagtttggagtac

SEQ ID NO: 94626 - DNA, 456 bp, Zea Mays
aattttgtggtctctggtgagtaattggaggcaagtgctggtgctttggatgggtgattaccctatggagctcattgcgtgctcaatttataggtcccctgagcggtggctagtgaatttgaaggagacgcgcggcggccggagagatggaggggcactggtgctgtgattcatggcaattgcgggataagaagccacgacggtcactgggtaacaatcacaactcatggcacaatcgtggtgaagggcgcaaactccggtgacggccacaaggctacgtcgccgatgcaagtggtcgaggaacaacgaggccacagtagcccgaactcatccgtgacttgatcttttcacggccgagcttaatctacttccctacggcacgaatcacagtgaccgacgtgaatccaggcgcacaattcaccggcgccgaagttatctgatcctgggatattttca

SEQ ID NO: 94627 - DNA, 635 bp, Zea Mays
aacaaaacacctttaggcacataattgcttaaattcgttatggaattgcccatgctaaaattggcgtattgtttaaattcgttatgaaattgctcgtgacaaaattttcatataacgagtagaattttcagactggcccagtgatccgatcggctagaagatgatgttatcttgtcacacaccaaatggcgccctttcactgtcactccaaagtgaggttgttcgtttactctggaactgttcaaagtgagcttgttcgtttactctggaactgttccggctagaatgataattttattagtactgatattgattgtctagaatagtttatggtctcaatccgacctaactgggcagggcctaagccactgagtccgagggtggacctacacatgggttcatgtcccctgctagggatgaaaacgggacgaatacagccggatagagggctatcccgtatcctaccctaatgcatttttttcggatacgggaccggatacggatagttaagattcgggacggatacaggacgggaccgggtaataatccgggcgggtaagaaacggataacggatactacgcgggtaggtaccggatagttgtcggatagttcgtaccgatgacattaattgccc

SEQ ID NO: 94628 - DNA, 438 bp, Zea Mays
tcacatatctgatttgttccaaaataaagtactcatcattgctgtttattctaggatttggcgcatataaatcccgcgtaacataatactggcagaaaaatcgtcttattgatcggtggtgttgttttgctttgtggatgcagtgaccgctcacgttgagcatggatctgttgagagtggatctggtttaggggcagactgaagagtgaaatgtggcagtgatagtgcaaggtgggatgccattagtgctttgtctggggttcggtctattcctcggttgtagatctggaaggtacttatctaccatgtgctattcttttttctttcttgccttctttttttcgtcgagtcgcaactttccatcttcttcttgctgctactgatctttatggctaatttgtatgcacagaggaacttcttgatcttaatcgtgattat

SEQ ID NO: 94629 - DNA, 358 bp, Zea Mays
acaatttgttgccagattttgggagcaattgcaagagtctctgggaaccaagctaatcaggagttcagcttaccacccacagactgatggtcagacggaaagggtaaaccagattctggaagatatgctgagagcttgtgcgatcgataatggcaagaactgggataagcacctctccttggcagagtttgcttataacaatagttatcaatccagcctaaagatggcacctttcgaagctctctatggaagaaggtgcaggacaccactcaattggtctcagcctggtgaaagggaagtttttggacctgatttagtgactgaagccgaaaggaaggtcaagctaatcaggaagaac

SEQ ID NO: 94630 - DNA, 658 bp, Zea Mays
tacccattaggcgttcattaaatttcacgtcgcacatagtgtatggttgtattagtgacaaggaggtgtaggttttactcaattagaagtttggttgatatggctaggaaatttgtttcggcttgggtaatgaagtggtgacgtgaccaagtagttccccccgttatgagtcgggtctagatgtgttatgccttcgccgtgatacccatcgcatatgctaatttgatgtatatgaaaaatgaaatagacacattatatgatttagtggtgctggtattgtgatctaagtatattatatatgtgtgataaatgttgggcttgaggattgtctttcgggcaaggaaggtgtaatagacttatatgtgtagaatgattaagctagtaatacaaaatgacatggataaaaattagtgagtctacttgttagtcctcatttgattattttaactctaacaaatggtaaagtgttagaataattcaagtctctagatcaaggcaattcttgaattatatagaagctgaaatttattgattgtagttttcgactgcacgcactgttttagttgtgctatatgtttgatgaactaaattgtattttctgtagatatgtgctatagaaaagtggtagataactttattatcttgctggtgttaaaat

SEQ ID NO: 94631 - DNA, 303 bp, Zea Mays
gtttaaggagggtgatcacgtgtatttgaaggtgtcaccgatatggggtatgaggaggtttaaagttaaagggaagttgtcccctcgctttattggacccttcatgatcctcaagcaagtggggttggtttcctaccaactggaactacccgaccatcttgcagatgtacatgatgtcttccatgtatcccagttgaagaaatgcctcacggtaccagaagagcaacttcctatggaggatcttattgttcaagatgatctgacttatactgagtaccctatcaaggtccttgatactttgac

SEQ ID NO: 94632 - DNA, 421 bp, Zea Mays
ttgtcgctctagatccgctgctagctttaggagggcgatcatccatgatgttcatagaaggaggggctccaaagatgtctagctccccatagggtcctccttcacctgctcctactacgctagcttccacctctgtaacttcaggtggcttgtttgggtgtagctggtcatacaacacatgcacctcctcgtgttggacattgttgtacgcttgcaggttttccaaggccaagctcagctcttccacccaagcttgggcagtcacctcacaatcccaggctatggatcgcgaatttatagcccagtcaatagctcaatcacgttctacaatctcacgctgcaagcgctctacttcttcttatagctcagcgatgcggctactagcacgcatacactcactgcctccatgccgcaactccac

SEQ ID NO: 94633 - DNA, 900 bp, Zea Mays
gggaaaaatgtttttgtcacatcagaaatccatgagatggatgtaaagactaattaaagagagcgcgatggatcactataagaagcatgaatggacagcttcgctaatctgctccatgtacgctagctttacaggttgacgagggattaaacatggaaacagacacgtgtgagcaaacttttgctttgtcgtgtttcgctctcaccgtatattgacccgccccatatcagccgcactacagctactttttacagacatatttataggaatataaatatcgaatacaggcctgggccgtacctcgcccgggatcacaggaaaagattacagatacacagaaaggagatgattttaggatgtgacgaccggcaaccagcgaggatgaatcgaaagagcagcgcgtgcacgcacaacaggtggcggatagtactcacgattcgacagcgactcaggactagagcagatgtagtcttggggaagaagaagaagagaaagaaaagatgaatcagaattctatcgtcttcgataatgtagaccatttgacgaggatttgagtaattgtagcattcactagcttagtgagatgacgctctccaagatttatgcgtaaccatggacatatcgagagaagggatgaccgccagagatcaaatagacaaatactgaatagcgggtgcacttgactcccagccgacaatccaagcttatcaggagctaccccaaccgtagcaacaatggtgtagggtgtagggaccaaaaaaaacattgctcctgatgtcctaaaatagtagtcgttttaaagaactagtggggttcatataattcttgatgcatgtactttatatatgtgtctacctagattcatccttcatcatcatctttttaatatagacattaaaa

SEQ ID NO: 94634 - DNA, 436 bp, Zea Mays
ctttcttgccctagtgatcggctaagcaagtttgaatagctctctggtaggttgctcccgcgttcttgaggccgaacgacatggaggtatagcagaaagctccaaacggggtgatgaatgcagtcttttcttcatcctcttttgccaaactgatctgatggtatccagaataccagtctaggaaggacaacatagaacatccaacagttgaatcaaccacctgatctattctaggaagcctgaagggatccttcggacagtgtttgttgagatcggtatagtcgacgcacatgcgccaatccactttattctttttgagtacaagaacatgattcgctagccactcaggatgcaacacctctctaatgaaccctgccaccactaagcgagctagctcggcgcgaatagcttccctcttgttaggcgtgaaacgacg

SEQ ID NO: 94635 - DNA, 564 bp, Zea Mays
tggaggaaataatccgtgatctcccataatcttgatttgaggtctgtttgtttctacaacgtgtatggtcattgggtcccttggaccccggttggtcctaggctctttcacggtccaaggggcactattcgtgggactttttcccattcaccatacccatacgaggcgagcccccgagcctctgctcgatgcatagatccgtctagggggtcgtcccgtcgttttgttttactctccttcgtgcatcccttccgcatcgatgataggaggtgagccaaaccacactttcctcgatggtcgagtaatggcgcttagtgagctgcaaataggtaatctgaatgaggccctaggtcctttcgcaggatccaagcgcggggttcactaggggaccgtcctcatacccccaggcaccgactcatatacttaccgactccgttcgaccggactaaacggctcgtggcctctctccgtgataaaccatgagtcagacattcacaggacccaaacacaagctagtgacgccctttgcgctccacacattagggtcttggccgctagtgtgcc

SEQ ID NO: 94636 - DNA, 288 bp, Zea Mays
ttggagtgcaatcacatgtggcaagagatgacacaaaatttatcctcgaggtttggttgctttccgacaacatatgtcctaattacagtgaatccaagctaggtgattcatgtgctaattagtattacaagccaaacctacaataagggcactatacaaatcactctaaagaggcactccaacaagccattgttcaactatagttgctcttcgcaaatctcccatggagaatgagcacaagatccccttagaagaatgatcaaagtcagtgacaatcttcaatagtca

SEQ ID NO: 94637 - DNA, 445 bp, Zea Mays
gattgaaactgttgctcaaaagttcattaacaaacaacagactgcctttatgaaagggagaagtatcatgtgcggggtgatgacccttcatgaaatcttgcatgagacaaaaaacaaaaagaggttgggatcattcttaagcttgatactgaaaaagcttatgacaaagtttgctgggaatttctattctactaactttataaaagagggttttgtgccaaatggattaattggatgaacagtgtgattgaaggagggattgttagagtaaaagttaataaccatttgggcaaatatatcagaagctataagggggtcagacaaggtgacccctgtctcctatcctctttaacttcgtagcagattgcctagctagaatgattcataaagctcaggagaatgatttgaatactagtctgtgtgatcacataatcccctctagtgt

SEQ ID NO: 94638 - DNA, 441 bp, Zea Mays
ggttggtgatggaaaagaatttcttttagaaatatttgatcctagaatatgggaaaatatggataataaaaaagcgacatcttaattgaaaagggaccaaaatgagctaagaaacttgatgctccaaaaaatgttgaagttagggtgcatgtttggaattgctctgatccactaaatccacggtatatgtataggacgtgactggttggtgctctctcgagcgctgggatcacgtcggcctgggccaccagggaacctccctcctaggcttgtccacgtatgcaggcgggtcagaggaaaaaacgcttgagttgcacacacgtgtgcgggctcgcttcgtcccatacagccaaccaatcatacttgcgtttcaagtcaacgtatctaccgaggctgaacgcggctggcgcgcgtaccaatcatgcccatggagaaggaaac

SEQ ID NO: 94639 - DNA, 518 bp, Zea Mays
gataggttcaaccatctatctcactatgcccttgaagaagtggacaacgatgagaaacaccaagagcgattcttggagggattaattggacctcttaactatcaaatgcaaagccacaactttccaaatttcaacactctgctcaacaaggcaataggtttggatagtaagaggaaggagctaactgatcataagaggaagacctagtctcatggtcagtccaacagaaatgttcgctatcaacaaaacacctagagctctcatactcgcttcgtaggacaaaacagaagttaccagaatcaggcacaacgttagggacaatagacctagaggtacaaccagcaagggcaaaggtccgatggaagttaatagaatcacccgataaatgtcgtaaacaccctagctaagaccaataccccagttgcctcagtgcacccgaatggacatttcaagtgtggagaggttgggcattatgctaatgcctgccctaagaggaactttcatatgccacatgctaa

SEQ ID NO: 94640 - DNA, 753 bp, Zea Mays
aggactttgaggtcgaattggagtaggatctagtgatcgattggggatggttactatagtcgaattgtagctggattatggattaacatctttgttatagaaggattagctagttgctatatagaaattagagatcaaagctctgcaaagtgctatgacagaggttctgaatggggtttcccatggtacagtgcactgaaaaagatcttcaggtgcagtccccctcgccgtcggtgacctttgcgcaaggattcgcgctgatcgcggtgattcgtgctggactcaggcaggatagtgccgggagggtgaaaggatcagaagaggagcggattgggtcgcggggtgaagtttatcaaccgcgtctgtagctgtgcgacgtggctggaccgccggtgtcatcgtggagactctggcgacctcggttatgccacgtcgtggcttgttactgtgcgatagtaaccgtggcacacttaggattgcaatctttgaaccgttgcaccggtgaatgccacgactaagccaccagtgctctcccctctctccggccgccagcgcgcgattccaaattcacgagccaccgcccttgggtcctataaattgagcgtgccatcagctccgctaggtagtcacgcatccagcgcacccactcgtacctcagattgtccacctgagagctctaatttgggatttcccccaaatctgtcaagaacaccgcgtgtgtgagctcgtcgtggccagctctccacaggtccg

SEQ ID NO: 94641 - DNA, 319 bp, Zea Mays
gcgcattgcaacattttgtattggtagctagacaggataaccgtagtagcaggagactaaaaatggctgctaatcaagacttgcctaaatggtaatgtggtagctaaaggatgccaataaatacactacatttttgttccaaaaacaacaaatattcgactaatcattggcaaatagatatgcattgaattttcttttgccacacccacacaaaattttgtttgaaggctttctagtggtcattggcaattgggcccatcttgatcgcacaaaagaatgacctgctgctcagtgacttgtggcaagaagttatcagaat

SEQ ID NO: 94642 - DNA, 487 bp, Zea Mays
gaggccagcaaaaatgctacataggctccgccttcagaataagacccacctcccggaaattaaacaacatcatccttaactcttcgccctcaaacagattccgcatgtccccctccccaatacacgtttcggacgtcgaggatagtagaccgcgttgacaaccccaatctagtcgaagacgagaccgctccatacccatccgacgacgtctcccacttcgtgacgtcccgccaatgctctgtttcgacaccacacttcgcctacgcgagtcttcggccatcgccctagccagggtggtagacacttcgtgcgcattaggttgtggcggagactccaatgcggccaaattcaacgtagtaaagtagtttaaatcctcctcagaagactcctcaatccatgaaaaagggctcccaaaatcatccccgtccgaggtccacgacctaggttcagaaacctcagacacttttccattaaaaggtgttgcatt

SEQ ID NO: 94643 - DNA, 276 bp, Zea Mays
gccgcctttcgtccaaatctgggtaacgaatctgttacccaaactttgggcttcactaggaatattatcatggtcagtcggggaaatgttgaaggtaggtttattaacagttttcaagtgactgcatccggctttagcgaaaattgtagcagttcatcgggtagccactagagcgcaaaagtcgttgtgccccacaataacttcgctgaaatcattgatctctttctcaacatattcaagcgtttttggaatgttgttggcagaatgatacgcatc

SEQ ID NO: 94644 - DNA, 505 bp, Zea Mays
cagcagccaagtatttatatgagcttatcagacagactcttctgccgaggatgggatacagggaggctaccacacatatccagctctggctccttggtgccctggtctctcactctgagtttgacgtcgtggactttcttatttgtgagatcgaggacaccgttttggatgggattcgtgctcgtcgacagttgccttatgctcactacttgtgccacatctttgcgcagctgatccagcctcctcggtttcaaggcacccttgaggcctctcgcctcgtttttggattctaccgtcctgcgcctgagattcttgtgccagcttctgctcctgtttttgactctcaggccgaggatgctgctctttgtcagttcgacactcaggatacagcagctgatgatgatgatgatgattttggggttcctcctccgcctccgcctcctatgcctccacgctcacatgatcatgaggctgggagttctagtgctgcccctcctgctatgga

SEQ ID NO: 94645 - DNA, 605 bp, Zea Mays
gctcagagacctcaccgccggtgaccatgcgcgcggattcgtgctatcgccgtgattcacgccgaattaaacgtgaataacgatcacagggtgaaagatcttgccgcgagtgaactgggatgtactgtgtgcttgatggttcatcagtgcacaccggcgacgtggccgagcggctatcaccggtgtgttcgccattcaccgtgagggcgccacgccttatgaagtttaacgcgtcggtatgagccatagtgaccatcctgtgatcgtcgtagttcagtcgctctgcagttgccacggtagatcgccgccgtgactcattcccctctcggccgccagcgcaattcgtccaaattaaacgccaccgctcaagcacactataaattgagcacaccgaatggtccgtagggtaatcaagcactgatccaccaagccgtgcccccaattactcaccaacaagccccaatttcggtttccccccaaatcaatcccgagcaccgctcaaagtgatctcaccgtggtcagcgtgctccaggtctattcgtgctccctgctctcttgtttcagcatccttaggttctcctgatgcttcttgaccagttcgattg

SEQ ID NO: 94646 - DNA, 319 bp, Zea Mays
taggatttagagatctgtacgcttttcaacattgctatgctggctaggcaagggtggcggctcataactcaaataacctctttgtgcatgggtactaagactgtccgcaaccgttccccctaaatttttccccctaaatgttactatgcagccacgtcagcaagattccatcccctatattcactcgtcccgcaaccgttccccctatagtttcccctatatatccctctactcattaaaaaaacatttctatataactaacttaaccaacttcaattatgatttcattttatttatttgcacacgtccgacatgttgc

SEQ ID NO: 94647 - DNA, 321 bp, Zea Mays
cttgtcacctctatatcttaccttgatgcttatgttatacctgttctttaaaaccttctctcttccatctcaattttatagttgtattttacctattttcccttggtcgtatcctcttccttgtcgcttgcgagtttttaaccccatcctttgttgtgctccggttgggtactacctttacctttctcatctctcaatcctaccttggtgattacactatgtctgttctctaaaatctccaatctcctatccaatttgagagccgtgttttacttatcctacccttggcaatatcctcttctttatcacgtgaaagcctag

SEQ ID NO: 94648 - DNA, 737 bp, Zea Mays
tgaattccggtggtctagaataacacgttgcaacatctcaatatcactctttgtgagttcaccaactggacggtcatcatttgaatcaacgaccataacaaaggcataagacgcctcttaattcctaaattcaggactattggaggcaataaatccatctccgaatcaaccatgtgccacggtcgtagaatgaaccacaagagcaggggtctctcctgcaacatgcaccgatgtacaagaataaattcatggcaatgaaatgagcaaagtgctcatgctccaaaatgaacatgtgatcccaatgaaacttactgcaagtggtctgttccaaagggatacccacaggagaagttgtctgcaggtcatgagtcccacaatcatctcctggctgacttaatgggatcaaattggggccagattgagcatcagacacacttggcacgtcatgcataacacgatcatagtctttaggggtacggtctactacaacccaccgcaccacaacctccataacttgcaagtgggtcttcatagccgaaataacataattctcccactacagttgagaatcaattgggatgacatgtcttatgacgttagtggatgaccaatgttaagcactccatcaaccacgatgtcgtcatcttcatggtaacctagcttttgtttagcctttgtaaacaactcactcaagaagggtctaccaacgaataccacgggcacgtgtcgcatgtcaa

SEQ ID NO: 94649 - DNA, 791 bp, Zea Mays
gcggccgtccagaggcagaggaagcccctcacacggatggagcggaagcggttagccgagctccacatcaagaagagggtcaaggagcagtacctcaacggcaagttctaccgcctcatggataaggtcgtggcgaatgctgagacgctggaggatgcatacgacatcgtgcgtctgaattcaaacgttgatctagcgtcttcaaaggatgatgtatgctttgccacgctggcagaggagctgaggaacggggcgtttgatgtccgagctaatgctttctcagtggtcgcgaagagaaaacggggacaccttgttcttcctaggctgaacttgaaagtggttcaggaagcgataagagtggtgcttgaggttgtctacaggcctcaattctcaaagatatcacatggttgtcgcagtgggcgaggatatcactcagttttcagatttatatctgatgaaatcgggattccagattggttctttactgtcccgttgcacaaggcggttgatagcaatgtgacctctaagcttatgtcgctaatacaggagaagatcgatgacgcccagttagttgcattcatgcaaaatatgtttgatgccaaggtgatcaatttggtatttggtgggtaccccaagggtcatgggctgcctcaagaaggagtacttgcaccaatcctgatgaacatatatcttgacagttttgaccacgagatattcaggatttgcttgaaacatgaaggccttggttcagaggcaacagatgtttcagaagaccgtgggtcaaatttgcg

SEQ ID NO: 94650 - DNA, 632 bp, Zea Mays
aaaacttttttgtcccttcggcactgttacttctgccgaagggcttaaaatttctaacatttttgttccttcaatttttggctcttcggccttatctttatcagtcttcgactcagctagctcggctaagggtaccttcggcattatagccggatcttcaaccttctgcgtaggaggaatgggctcttttggttcagcaactgaagaagtctccccgctaaactcaggcgctacggccggttcaatataacgtggccggtgggtaagaactttcaattttttgctcttcggcacaggctcatctggagtggccggagcagcagtcttggtcgaagcagcaatttttctcttctttccccgtccccgcagcgggtagcagtagtcggggtaaacaaaaccaattgcatcaaaaactatgttcaatctcttttttcctcgacccccaaaggatgtggataatgcattatcttctgctttggaatatggcccaagcagttcatcacttgtagcttcgatacatttcagccaatcgtcatttggttcatcaaatttatctccatatctgaaggtgtatttcagtcgaaccagctcaccttcgctagactcggtgacagtctccttcgtcatttccc

SEQ ID NO: 94651 - DNA, 787 bp, Zea Mays
tagacccatgttaaatcattagcaatcctccaatttttaggaaaggagttcataagaacataacatggactagtgtcacatgaattatgaacataatatcaagaaatgtctaacctggaagataagtttcttgcttgacagaagctcatttaacttagaaatttcctctgacatggttttagcttcatccacaaatttcttccgctgcaaaaagcagaggtccgttcagctccttcaggtaggagataggaatcgagtttaatcaaatagctgtcaacacaagaattcaaatgttgaaacctcaagggaagtaagcttctttagtgtgatatccaacagcgcttcagcttgtttctcagatagatcaaattctgcacatgaacaggttaaacatttggaacaaatctgttttacaataatctttttataatctcccttccatcaaatttgtgtttttgtttaggaaatcaagatctaatgtccaaggcacattgtatggcaaaccacacagctttagattgtccatagttacaggaaatcattgcatgagtccatcatggaatatcgaggatctagaaatctttaaacaatttgcttcattggagcaaagtcataagtaccatagcactcagtcgctcaaatgccaagtcaatgtgttttgggaggagatgaaccagaagtgcaggactagggtaagaagcataggaaattaggcctcctttggattaaaggatattttcctgaatcctgtgtttttcctgtatttttaaactcattcttgtgaaat

SEQ ID NO: 94652 - DNA, 435 bp, Zea Mays
cttgtccgcattgtattggtgtcctgcatacgtagacaaggtcagtgtggggccaatgtagaatgtgatcgaggtttggttcggccttcgtcccaacaatattatccaattctaaggttatctaattcatggttattaaaaaggcgcttaagtgccttttaagtgctaaagcgctactcagaacgtaaagcatggtaacgtttcatgaaataacgtatagcgcccattttaagcgctaaagcgccactttttagcgttaaaacgctctggaccgtaaaaggccactttttgtcacttttctagacttccagcctagcccagttcccctaacctaaaacaaacatccttcttttgtcacgcccgcaacctcgttcaaccttgagctagccgtcatggactcgcggtgccttcgtccattcgtcgccttcggcatcc

SEQ ID NO: 94653 - DNA, 927 bp, Zea Mays
aaccattggaggaactgggaagggcaggaaaacgagcaccaggggcactcggctgattggtctgggcgggggcaggagtgggacaaataaatacgggttgtctaaatggatatgtaggtgggtgaggagaagaactgtttggattaaaaggtcggattaccaacattgtcctcttttcaggtccctgagttgatctttcacccgcatttccttttgactttccttgacctgcatttttggcttcaactgacaatgttgtactgacagccctgctgtatgtgaggtccagacacattaccatcttacgctggagtctataatttagtcccctcatgaagcaattcttctttttcaagtctgtgtccacttgatcaatggcgtattgggagaggtgattgaatttattgagatactgcatcacagaatctcccccttgcttcagtcggatgaactcttctagtttcatttgtagcactccttctggaacataatgtttcctaaatgctagtttaaactcttcccaagtgacttgatgtcccacaggttggatggcagaaaagtttgcccaccaagtgccggcggggcctcttaactgttgagcggtaaataggggcttctgtatctcggtgcatcgtattagcccgaatttttgttccatcacccgcacccattcatcagcttctagggattcctctgccttgacaaagagcggtggacgggtttcggagaactccagataggtggtgtcgcgtggtccttatggttgacctcttcctccgtgttgttgaaataggtttctcgccatttcgcatagaaagcgtgtgttgtcagtggtggcattgaccaaggcaatgatagcctcggccatggtaggaggtacaggtggcagattgggagtgtcctccccgcccgtgggatgtacctgcc

SEQ ID NO: 94654 - DNA, 432 bp, Zea Mays
gagccacttgcgcttctgagttggcctcgaaatatgctaaggttcgattcattgtcgccatcattgtaacgagggggtggattatgcacgctcggcagtttgtcaccataataagttgttgtgaagtttgacacctcctctagaatgtatgcctttgcaatggaagcctcgattttgcatttatttctacatttctttcgaatagtctttagacatctctcgattggatagcaccaacgtccctgcatgggccccccattcgtgcctcataggggagatgaagaatcaaatgctgcattggattgaagatgctgggtggaaatatattctcaagcttacacagtaacatgggtgccaatctttccaagtctgcaaccacggtccgagataactcttttgcacaaagctgacagaagaaatagctcaactctg

SEQ ID NO: 94655 - DNA, 1144 bp, Zea Mays
ccacctgtaactatcaatcattctgaaattttggctcccaggaataatggcttatgctagtatcaagtaatgtcagcatggatatataaacagaaacggcaaacctcagctgcgactgcgaatgcctggaaaatggcagacgctagtgcagttgaagacagaaacataattggtttcttcaaagaagctggcactagaggttgctgccagctctgaacaaaaactagatgaaaatgttaagcgagcagcgatcgttttccagagaactgcccaaagcactgcactctggtagaaaccaaactgaattttattgagtcgttcaaaagtaaaacgtgtcaagtgacctgcaacgacagaaacaatacgcaggtcagagcgatattagaatggctaccgcttcacttgaaatatacagcccgtagaagacagtatggagaaataaatttcaattggctttgtataaaactaccttgttttaaacggcaacctcttaaaagctagggaaacaaatttattttcttggtgatagtttgaaggctttctcggcctatctaaagcttgaaataactttattcattaacggagagatataggggctgaaacaaggcgcctgactaactccaacggagcggccaaacggccagccaaagccaatatgactgccgtggtgctactgtagcgccacggcagccatattggctttggctggccgtttggctgctccgttggagttagtcttgggatgaaagcaaggtctcataattatgaagataaattctatcacgaaagagctattcgcttcatgccctttgtaagaaaaatggacctcatccccatttgattatgtgattttggtgtttgatgattaacgtaactacttagactaatgtgtttgatagtgtttatgtttatagttcaaacaatgtagcgtacacttgaacgaaggtaacgaggtgatcaactcctcgaagaaaacattagaagactcattgaagacttatcaagattatacaagagtccaaggcacaagataaatgaataagaaaatttcggcagtacctcctttgtaaatataagaaacacgaaagccaactagatatagttccatgatagaagcatacattagcaacaataactccttatc

SEQ ID NO: 94656 - DNA, 566 bp, Zea Mays
gttcaagttgtcatttcaagagcattatgttccatagggagtactccagatgaagctagaagagtttatccgattgaggcaaggaggagatacggtgatgcagtacctcaacaaatccaaccatctctctcagtatgccattgaccagatggatatcgatttgaagaagaattgttttatgagggggctcagtgacaggcttcagcggaaaatggcaacatgcttggacctcacctacagtaaggctgtcagtacaacactagcagtggaagccaaaaatgcaggacatggaaaatcaaaggggtttggaggtgaaaggtcaaatcaaggacctgggatgagaaccaggttggtgattcgacctttgaatcaaaatcattctttgcctctcccactttcatatccattcaagcagcccgtctttattcgtcccactactacccccgctcctaccaatcagtcgattgcccccgatactcatttccccgctcttcccagttcctccagtggttgcttcaactgtgggaagtccggacatttcatcaaggactacccatacccgaagc

SEQ ID NO: 94657 - DNA, 303 bp, Zea Mays
tcgctagcgaattgggtagacgagggtgtccatggcgtcgccgcggttcggctggcgtgcttgcggccaatgccgacgttggggcagatgaccgcgggactgtcaaattggcgatgtatgacccagatcgaattaagtccttgaaccgcgcacccttggtctgtctagctcgtagccgttaacctgtagatgaacgctccagattagggcacatgtaccccccatcggtggaatcgttctgatcccttggatcgtgatcctgcgcttgggattcggcctcaggtatctttgatcgtgaccgtt

SEQ ID NO: 94658 - DNA, 372 bp, Zea Mays
agcagcttcggtagctgtagcaacttcggtagtaggtgttatctttgacgcctaggctggcggtggtgtttcttcaatagcttcaataacaataatattcctctgcctttttggcccagcagacttcttggctacccaaggctcctttttcttctgtaaaagcttcgtcagatgcggccccagtggacttagcttgataggtaaggattcggtcattacctttagaatatcttctacgtcagcaacagcaggtgttgaaggagtctctccctctatctcagttgtttttggcttcggagccgcagctttcctcttcttcgtagcagccaccttcggctcaggactggattttctcttttttataatttcttc

SEQ ID NO: 94659 - DNA, 370 bp, Zea Mays
cattcatctgccagattcatggaaggaggggctccaaaaaggtcaattcccccatcagatcctccatttgtggttccagatggtccagctcccattgctgccaaattaggtggcacgttcggatgcagtcgattatacagtacatgcacttcttcatgcaaggtgttacagtacgcctgcaagttttcgagggatgcgctacgttctgctacacaagctagagctttggcttcacagtcccaagcaaaagagcgcgaattgatggcccaatcaatggccgtatcgcgttccaaaatttcatactgcaggcgactaacttcggctgacagctccgctatacgatggctatcccgctcacgcgccctattcc

SEQ ID NO: 94660 - DNA, 536 bp, Zea Mays
attcagtatcccaaatctgaatattatatcttgtatgaactccactgccttggctgaagtcagagaagcaatgggtttgtattctatccatttggtgaatttgtcaatggcgaccagcacgtgagtgtatcctacctgagctttcttgaagggtcctatcatgtccagtccctagcacgcaaatggccatgttacgggtatggtctgcagttgctgtgctggtaaatactgctgctttgataagaattggcaagcttcacacctctggactaactcgactgcatcactctttgccgtcggcatagaaaccagccctgaagaccttcccaactagggtcctggatgctgcgtgtatcccgcactattcggtgtggatctcatttaacagttgcttcctagtaaccgaaggaacacacttcatgaggactcctgttacgccacttctgtacagtgcatccccaatgagggtgtagtgggctgactgccttgcgatgcgttctgctgcggctttgtcatccggttcctcttcattcttt

SEQ ID NO: 94661 - DNA, 639 bp, Zea Mays
aggacctaggtccatattctgccagtgttttgtcctattagtcctttacgatggtgctagtttctagttgtaaaaggatctttttcttttgaaaatttaactaactaagcctgcacattaggttttccatatgactaaaaaaatatttatcaatgttttatgctttctttcatatcccatgcaatagtggttgagtgaataactcgtgcagaaacctgaataaaagtccccttttctaagaaagatcccatgcattagtgtggatgtggttttgcatagctaaaggcattatatgcacactatgtatgctcctttctttatctgaggtcagaatactgataaacaaaatctttatgcaaatatatttatgaccaaggaatgtacttcaatcgatgcttaacttttgtatctgaaagtttgaagataactcttccaactttcctctaaaagtcactctaatatgcacactcagattaagagatttttacttagcttctttcattgttttcaaagtgatgcatgagatgactaaactattgaggggtttaagttactaaatggtatgtgtcatgacttgcaagcattatgtttgtgctatatgatcgtttgttactaaatggtatgtgtcgcaaacattat

SEQ ID NO: 94662 - DNA, 492 bp, Zea Mays
gtgataacccgaaaacttacatgcaggtaatctacaggggaacctactggtgtcgttcctgggcgctgtttcaaaggcatgaagaggaaaaggagaagctagtccatgcttgcagacatctggagaaagtggtgatgaaggtgtttgcggacaatggatggtgtttctccaatcgtattactctttagtttttgatatgtcatcggagccctgcgtggtttccccttgttaccgagtcctgtttgtttggctttgtggttgttctcttggatgttgtctgtgtggatgttggctcggaccttctacggaggggaaggccggaactcttctttccattatctaaaaaaacaccctgaattttggtgtatagtaaattatttgctctatacacaaaattcgggtgttccttgcttttctttttttcttaagtaatggagaattattttatataaatatgtgttaagcttagtaatataaaaccctagaggagtt

SEQ ID NO: 94663 - DNA, 607 bp, Zea Mays
gtctgttagcgcataattcacgggttgtcgcacgtgtcgtcatgcgtcattcgcgtgttgtccgtacgcgtcgtcgttcgcgtaaatcgcggtttgcacgctttagtaaaatcattccgctatatcattcacgttaaataattaattacttgtttagctgtgtattattaaaatagcaattcaatcaaacctaatcaatgattttaatgatgcgtttgtagatacctattagtgtgtgtacgccaacttaaatgtcttgtttaacgcgtagttagcatgaatacgacataatttagcagtacccgtgtatcgcgttgtttataagttcattatatgtttaaatgtattaagtctcatgcgtcgtaactcgttcggtcacgtcaactctagcagcgtcaatttcatattaggaacgttgtttggtcgcgacacatgtttatttaattaatgaattaattatttatctgctagttattaaagtcactaatttatcattttaacttacgctttaaaatatatgatagtgtaaataatgactacacaaatgctttaaagttaatttctgtctagtatagaggcgacaactatgtagtagttctcgtttgcg

SEQ ID NO: 94664 - DNA, 829 bp, Zea Mays
tattacaacataattgaagaatctaaagcagcctggtgatggatcctggttctccatagcggatcctcttgcagggaggggataacgccatggcagggacttgaacttcaggggattccttccatcaagctgagcttccagggctgcgatccttgcgtgtgcatcctccagctccatgtgtaccctagacaggtctagggtagcactatccaggttggtgttaagacctgccaccacatcagctagggtgttgaggcgatcttctccagctccacctgtaacaatgctggtctggctttctcaaggaatacatagaggaagatgcatgtacttcgtgttttgcagcagctgccagtaggtgtggctgagggaccacagagttcgcttagcagcattgctgaccaaagcaacgtcggtggatagcggcgtcagagactcatgagctgacagagtcctgaaccctctatcacctgcatccatcaccctgacatgaatgcgagtgatgtagtagcaatcccgaggaggctcgtacactcgccttgtctcatacaggggtcggacgtaggttcccaacgcaagcagaacatcctgcagcaggttagggaaatgccctgcctcgaacattgaggtataatgttcagtgacaggccataaccccacgtagtggtcctgctgttcttcgttggcctcctcgttgatgttttcctcatcttcttcttcttcgtcatcttcattatcgtcaccagagtcgtccgggtggtcgcctctgggacctggggcttggactgctggtgctggcggtgctgaagctgacgatccagctgcgaag

SEQ ID NO: 94665 - DNA, 699 bp, Zea Mays
tcacgaggtcgtgtgaagcctgccagaagttttctccccattcgggcaaccctttgcaattcacaaagctgattgcccacacatggccacttcaacgctgggggctggatattgtcgggccactacccacggctcaagggaacctcaagttcaccttcgtcgccgtcgagtattttaccaagtggatcgaggcaagggtagtatccacagtaacgtcgaagactgaccagaaattcttctggcaaaacattgtttgccggttcggagtcccatccaagctcacagtcgacaatggcaaacagtttgacagacaggacttcagggacttctgcttctccatcggcaccaagcttgccttcgcctcagtatatcacccgcaatctaacggtgtcgttgagcgcgccaacggcaagattttcactgctatcaagaaaaggctactcgacgacagcaagggtaaatgggccgaccatctacctgaagcagtctgggcgctaaacacaaccgaatgccgagcgactagattcactccttttcgtctactgtatggatcggaggccatggccccgcaggaaataaagcacgggtcacatcgaacaagtgcatcagccatccccgacatagacgagccaacgttcaaagacctcatcgacggagaccacgtcttcgccctacaggccctcaacaaataccaagctc

SEQ ID NO: 94666 - DNA, 367 bp, Zea Mays
taggggtttggaacatgtgatgtaaggcctgctacgtggtggcttctgacctatgtgtgacaaacactcttttgacctagcatgtgtatgctagcaaaacctttggcttgcatgcacattttatcttacaaagtatgtgatggaaatgttgtgcatgcatggaatgtgatttttgcctttgtgattatcacatgaaatcttcttctatgaaatctcatgtggcatagtttcattcttccacttaaattacaacatgtctcaacgcatacccatgataaaatatgcagatggtgagcacacatcttatcaacacgagagtgggtggagcttctggtagtggcaaccaggagggtaatgaagatgtacc

SEQ ID NO: 94667 - DNA, 469 bp, Zea Mays
caactgaagaagttcctgatggtacagtgaccagaaagatctgttggtttagtgaaccggccgccggcgaccccgcgcgtggattcacgccggtgaggtgattcgtgctcacttaggcctggataacgcctcggggtagaaagatcttcacctctattgagccatgggcactgttccgtccggccgccgtgttcgcttagccctggtcgcttcaaatctaccctcgccggagttagacacctcgcggtcttgtgacacgtgcctcgacactttaacaaagctgtcgtgactcatattaacctatcctatgatcgccggtgaggttgccacggttatggccaccaatcgtgtgcgccagtgcacctcctcctctccggccgccgcgcgtccccatcaaattcactagccaccgctcaaacacacaataaattgagcacaccctcggctccgttatgtaatgcagcatcca

SEQ ID NO: 94668 - DNA, 875 bp, Zea Mays
tgtcccatcagcccaaaacatgtgcttcacttttttatcttctccaatgacaatactatagaagaaattgggatcttccttatgtttttcctggaaaaactgcagtgcttgtgtcatatcatttcctgttacttccttgtttaatttagttctgtagttacttacatctttttttttgtacggcaatgcggtcgtacctcctctcagataagacaatatagcaatcatctttcgagtaggtatgttgttgtggttcaatgttcgtataactcctttttccatttcagtcatgtatttatgtccgctaaacatgttgttgctgtcggctggtctgagatcatgattgtgttccaagtctaacctatcgatcacccacttctgttgatgttcttttataaccatgactactctgcagtctgttttaacctagacatttgtattcctttttggccctttctcgcacccctgatgttctatgcaattatcttgttcctgctgatcagcttttttgtttttccatgcttgttacatttcagctccacctttgtaacctcattgtttctttttttgttggaagttctgaaagtgtgggtgattgctggtttaaaaccagccaaaaacccatagaagaataagaagtgctctgcatctcccctggtcttaaattccatcccaacttgaggtgtatatttgctgtctattggtgcattgtttccttctaatgcagctatctgctcactcataatgaaggcatcgatctgatcctctgttaactcttcttcacttccatctgtttttttaaattctgcggcatcaaagttttcacgagcacttgatgtttcaactgcccttccatctacatttggtgcacaatc

SEQ ID NO: 94669 - DNA, 348 bp, Zea Mays
aaaaatcaaaaaggattttttattcatatgctgattttcgaatctgatcgttagaactgtcttccttgagttctaacaggattttgttccttgtacgaacactttcggtgttttgtcccgacgacgcactacgtggtaacccacgtagagcttttgggaggaccacgatgtcgatcgctgctcgatgatacgtgcagggacacgttggaacatgaggtatttatacaggttcggttacgcaagtgcgtaataccctacgtcatgtgtagtgctgagtattggattgctctgagttcgcagattacatgtgattgtgggaggtggaagatgaagttgcctatcaatcta

SEQ ID NO: 94670 - DNA, 327 bp, Zea Mays
cgtcacttaaggggtgacggcccggcccttgctcatttaacaccatacccgggttccgatatggcgcgtcgctaagagggttacaccccaacgattttctttgtggtttcatctccataagatttggctggtttttacgttggtttgccggacctaacacaaccctcctcctttaccgggcttgggaccggctatgttgaaacgactcaaggaagtcttccaatcaacataggcggagtttaattgggacggtactaattaacacaatacaatttggaaacatatattgtataatcaatcatattagtgcaaccgtataaatcaagc

SEQ ID NO: 94671 - DNA, 651 bp, Zea Mays
gcaagggacaaagaagatgatacacccaaaagaaaaataggtaaaacatacaactctcagattgagatgggagaggggagaccttgaagggtaggtataagatgaacatcaatgcaagatatagaagtgtcaagggtaaaggtgataataacaaagagcatagaaaaggatggagttaaggaaagactcacgaaatggcgaaatggggaaaatcacggtaaggtaggtaaggttccaatagaatggttgaagtaaaagaaattattaccgagagaagttatatggaaacgatgagatcattaaggatgtgaggattggaatgatcgctcatggatcatgaagaaacaaaggtggtcaagagtatgtaaactgaaatgttttaaacagacattggggtgcaaaggtaagcatttatatacaaagtaaaagtatgcaagattacgaaggtgcgagcataccaagaccaagggagtacgaattgccgaaagatagcgacttaacaacagaataggaaagtgtctcaaaagacaggatgatcatgaacatataaactgaaatgtttaagtaggcagtagaaattcagaggtaagtacttgaaacaagagtattaaagggatacaagcatgtcaataccaaaggactagagttcgc

SEQ ID NO: 94672 - DNA, 599 bp, Zea Mays
cgcgtagggaggtcaccgtcgacgagcaagccgtgctggcaacctgatccactttggtctactgtaccatggcgagacctcattcagacagcctgtcagtccctattgaaggcaatttttctcttaatttcatatggtaacacaagtccaactctgcagcaaacttgtagagcattataccaactacaactttgctatatggtgttgtcagcagatcatgcatgaacttggtcttgaagttgatgtcagtcctctgttagtctgaaaattcagacaataacagcctgacagtcagattttgagcatgattatctccaaatttctcacaagaacatggcttgcactcttaagcaaacttgttatccattaataggtctataagtttgatgtggtgccccagggcaaaaccctatattttaaaagttgcaaggctccaaagttgagctcatcaatctgaaattcagacttagcatgaaatcacaactaggggcctttttgcaattgaatccaaagcttagggtttggcttccaaattcacaccttagtgaatcaagtgacttaagatactttattaacttggtttttgcactttagtccaa

SEQ ID NO: 94673 - DNA, 672 bp, Zea Mays
ctttggagttgtgcgcttcgcatgaggatcctcaagaagccagagtatgtctggaaggaataccgcgagaatggagtcgagaagtgctctatggcagtctacctggtaaaagccgaagctacccaaatcaccctccctttcagatcaccgctactggccaccgcttcctagacacctgccagaatgctacccaaaaagccctttgcaaactatgccaaaactacagcaaggaagtctccaagacacccctccgctactttccacccagcaacaaaaataaccctgtgtggaggagaagactccaggccctgtcagggagagagcataatgaagatgaccctaccataatctacatggtcggatatctccacacccttgacaaccactttgatgacctttactcccactgcacccacctaaactctcgagtggaaagcctagagcagcaaatcaaggaattgaaggaagaaaatgcagctcttcaagatagtctcgagatggcagaaggcgaggaagccaacactcgtgaggcataccggaccctgaagatggactatgctaggaggctgaaggggctcacccccgtcaagaagatccggaagcgtttcaaaagccaaggatgccagactgacccgaaggaagaagccccgccagcactgccttccctaggga

SEQ ID NO: 94674 - DNA, 413 bp, Zea Mays
tggacctagtgccatgcaaattgtggagtagaatgcatctaaactccctctgacagactgttttgggctgtttcagttaagctgaaactgtatttttcagtgcttttgggctccagtttggtgcccataacttgtgttatgtgtagttgcagccttcgggtgttgtacaaagatgatagagctatagttggggaatgttttagttaagaaagtaaggcctcttgccatgtgaacttgtgagataacagtgactaaacagggaggggtagagtggagcagtagtgctgttgcaatctatttcagtgtcgggacagatttctgaagaagatcacccctactgctctcacctgtgtacttggatagggatgaagttagaatgcctcactaaagatctagagacaacttaatcatcc

SEQ ID NO: 94675 - DNA, 465 bp, Zea Mays
ttggagacctggaagtccgggtggagcaacttcggtcagaactacgccacaggaatagggcgcatgagcgggatagccatcgtattgcggagctgtcagccgaagttagtcgcctgcagtatgaaattttggaacgcaatacgaccattgattgggatgtcaactcgcgctctttcgcttgggattgcgaagtgaaagctctagctcgcgtggcagaactgagtgcatccctcgaaaacctggaagtgtactgcaacaccttacatgaagaagtgcatgtattgtatgattggctgcacccgaacataccaccaaacgttgctgcaatgggagccggaccatcgagaacggctaatgaaggacctgatggggagctggacctttttaggccccctccttccatgaaccttgctcacgaacagtctcctaaagcaagcagtggagcaactaaggatgaaacaatta

SEQ ID NO: 94676 - DNA, 570 bp, Zea Mays
gccaccggtgacctcggcacaaggattcgcgctgatcgtggtgattcgtgtaggactcgagcaggatagtaccggggggtgacaagatcggaaggggaatggatttggtcgcggggtgaagcttatcaaccgcgcctgtagccgtgcgacgtggccagactgtcggtgccgtcgtggaactccggcaacctcagttacgccacgccgtagttctttaccacatagtagtaatcgtggcgcgcctggacttgccatttcaagagccgttacacaggcaagcgccacgactgaatcgcctgtgatcttccttctctccggccgtcagcgcgccatctcaaaattagccgccaccaccgatgaaacctataaattgccggcctagtgaactccgctaggtaattgagcatccaacgcacgagcccttgcctcagattatccactagagcctcccaatttcccacttcccccaatcagtcagagcaccgtcgcatgacatctcgctgtggccagaagtctataggttagatcatgctcttctgtgcgatgttttagcctccctcatgttccatg

SEQ ID NO: 94677 - DNA, 493 bp, Zea Mays
aagagatctaggggtcccttttatatccccaagtttgtgtcccttttatagccctaaggagcctacgagccattggttcttcatttgggaagcaatcaacctttcctatctgcgtgtgcaccaggctatccggtcgccgggtaccataattagaggtacctagatcacaaccctatagtgcctagacgcttgagtaagaaggggtcataagcaaacacgctcccaatcttactaaggcacgagggacctaagtcacgactcaccggaggtgaataccaaatgttggggacctgccaaaagctcctccaagaaattaaccaacacaattaaagtgaagttgtcctcctttcaccttcttcgaagggttcggaggtttcaaggacacgggagaaaaatagaaaaataagcgtgaaagttatagcgtatgagttggaatagcatacacgaagtgtgtatctggtttgtcgggatcagttcatcttcttcattttta

SEQ ID NO: 94678 - DNA, 386 bp, Zea Mays
catcacaatgacttttctttattgagtatccgacataaagtattcggtaaagaggcattgccgataaacaattcaccaagctctatttgtcgagtgctactctcggtaaagccttgtcgagtgttatagaggctttactaagtgtctgcagcactcggcaaagaactttgtttcggtaatgaattgcatagttagctaagggtatgatcaaattcgtccttcattttacgtggatacaatggtttcctaaaaactatggcatacaaataggtccttggaccatcatcatgtatcccaagctgaaaattctctttctagtgacaaggatctttgtggttgagccagccttcgcctggtcttcgtgcggaaacgcgcatcaatctttt

SEQ ID NO: 94679 - DNA, 642 bp, Zea Mays
taagatttcatcagtgtctacacgatcagtttgttccaaatgcctctgcgattatgattctttgaggttgttaatcactagggatgctagtcaccgtatcacttttacatgtataccttctctcttaacattacaatggtagaggataaccataattggagtacatatttggatatggatacaaggtttactgcctttcttggatgtttaggagacaaaattgatgcaaaaataaaattcaattagtactcacaggactactagctgctttgggaattttctggaatatataaaaagaagtgaactcaaaaccattcaactttttatcttagtttcagttgcgcattgctgaatttaacatatgtgcaattaagggttggcaatcataatactcatggatagaagtagaatttgtgaaggttctaagaatttattttctggtcctccttgatgactcgacgatgatcagagcatagggaggcatacttttatcttcgaacaaacctttggtggatatacaagtatttgttgactgaagaatccgatgcagcagaaaatgtctttgaaaaagtttggattgttttaccctgttgcttaatacaccactagcaataatgacatcctttactgaacatgattttc

SEQ ID NO: 94680 - DNA, 855 bp, Zea Mays
acacatatgtacaacagcctggtaaggtccgcccttataaacccggtctgttggtttacgctcatgaagttatgaagagaaaattcaccccacctcagatttgctttatggaggtcttatcctgtttaatcttgcaaccattatttttatctaacccacccacacggattccctccattgctagtatatgccatccggattgagtagcaaggtcgtgtagcctgggggccagtccaagagaacggataactacccatggggacgtccggagccgtgcgaccgcttagcttggtccaggaccctaagcccgcacgctccaccaccccgtcgcgggtgtcctagtatccgaaactatagtcctgtaggtctggaaacccgaggtccggctctaaagaaagggcacacgtctcagggggaggtctggagctgcgtgactgcttagcccggtcccgtaccgtaagcctacgcactccaccaccatgcgacaagtaccctagtaattagaagccatgacccagggggtccagacacacgggtcggccccccagtccagatcctacaggtcatattgcgtaagtcaaaggatgaaggataccagttaatgggtccgatgggtgcactactgaaactccctagctaaggctgtgtgcaggtccgggtcccagtcgaaataccctcctgggggccaggtcaccaactccttcttaagtatactggcattcagcctcgacaagtcgagaccgcatcccagaggggccaagtaccagggaggaagttgacaacaacacacatagcaaagggaaagtagcatgcagataagttgtaatgttgcttgacaagtaatacttaaatgta

SEQ ID NO: 94681 - DNA, 328 bp, Zea Mays
cttgggagaaaaaggaaaaaggaaaagaatgaatagtgttcggccgaaaccagcccaaaccggcccacgaccaggcaaacacgcccatgctggcgactttgcgtagaggaccccgactattcgaataactggtaaagaatccctacgcactattcatctgtctcactggcgttcacacttaagcccccgcacttctatctctttacaacgccaggtccccgacggtgagcgcggcctccggtaaacttgtaccgatcgggatgcgcagcgaccggtgccctaacttggttaacacctaagcccacccctggcaaccctaatccctcca

SEQ ID NO: 94682 - DNA, 651 bp, Zea Mays
tgcggtctttttcgacatgttgtgtcttagtttttgcgggggatttttgcgtgtatattacatggctccgcctcattaaaaacctcaccccccgggaggaaaagagtgcgggccgaaatgataatgtttggtgaattaccagggcgcattagccctgaggattcaaacaaaaaatttgcggagattatcgatattccaggaatgctctaggtcctcgccggatggcgttgttagcctgtacgcgctgaggggacgccttcgtcttgacgatgaagggaccctcccactttggctccagcttgccccgtgactctgtccgagttgtccggatgagtacgaggtccccttcgttgagttctcttgggacgactgtgtggtcgcgccatgcctttgtttgagcttggtatttgttgagggcctgcagggcgaagacacggtcttcatcgatgaggtccttggaagttggttcgtctacgtcggggacggctgaagtgcttgtccacggtgacccatgttttatttcttgtggggtcatggcctctgatccatatagcaggcggaaaggagtgaatccggtcgcccggcactcggtcgtgttcagcgcccagactgcttcaggtagcaggtcggcccatttacccttcttgtcgt

SEQ ID NO: 94683 - DNA, 794 bp, Zea Mays
gaaggcttgatatcaaggaccagagttttaactgaatccctcttggtacgatcatttaggcccctcacattccaaataagaaaacaactattctccattggaaacaaatcagatcgcccccacctgaggaaccttccaaccaaacagagctaccaaagcagcaatatgtgcactcgaaagcccggaatcaaataattttgcataattgttggcatcttcgagagaaatattctccatgtcatcacaaaaacccagacgcctacacacttgcgcagccacattggaactcaactccggaggaaatttggccaccctcctacttctccttggtcgaaaatcacttagcatggcctttttccttcttttggtccttcggtggggaggggtggtaacaagccatcagaaggcttagtgaccacaaacttgaacgcatccaaaggtggaatcatttccaccacggattgtagaaaaaggtcttcttggacaatctgagcctgagataatcttcttctggaataaactttaaacacggtggcttagatttccatctatcagcactggaagactgacaagacccaagcctccgcaccctggaagagacaatagcagaagaaccattgaccaccaaatgagagaacccggaaccatgctgcccaacagtgacaacctcctccaagtcggtcacatggaccacctccaaaggaacgtccgagcaaggcctaaccgacaagagaacatcctgtgacgaacaatccacctgacaactgacccccaaatcctctgtgagatccaat

SEQ ID NO: 94684 - DNA, 414 bp, Zea Mays
attatttttagttgatggttttgtagtgttacaaacctaccccccttaaaagaatcttgtcctcgagattaaggaacttctgggaataaatgggggaattctgctctgagttcatcttctctttcccaagtggcctcatcttccgaatgatgactccactgaactttacacatattgataactttactccatgtaattctgcgagatgtttccaaaattttgataggatactccgaataagtcaaatcctccataacattgagttcttccataggtaattgttctttcggtactcttaagcatttcttaagttgtgacacatgaaatacgtcatgcacatccgacaaactatcgggtagctctaactggtacgctacttcaacttttctttccaatattttgaatgggccaatg

SEQ ID NO: 94685 - DNA, 843 bp, Zea Mays
gaaatgccataaacaagtgataaacaaaccaataaaaccaaatcaatttaagtcttttctctttaaactcaaactaaaatgggataagcaccattgtacttccatagtgatgcaaaaatgggatagatatgcaaagatatgattcatattgcaatgtgtagatttaaaaaataagataatgttggcacaaatctggaaccaaacactagaataaaccatctaatagtgctctttgcgggggcacggacggtctgtggccttgggccggatagtccacgacctcgctgcagaagcgactcatttcacgaattctttcggacggtccacgcctaaggctcggatggtccacgatagcacagggtattcttcaccacataaaattgaatctcgcctcctaggagggaccctgtcggggaggagagatccaagggttgtcttggggtcggtaggccacccaagacgcctctagataatgttgagccgaggagaggtgaactaatagatcaaggaagactaatactagggctaaactaagtttagattactcctactcctaatgaatggaaagaacaatgtgaataaggtaaatttgataaataaaattgattggatcgattgtggaggttcaatctgtcgtaccacttcacctatataaacgggaaggtttagacctattacaagtcggttcccaaacaaaaaccatggaatttgctaacaaacctaaggaatcaggaaccctaactgattctgttcacgcgcaaaccgttcgcaccaccaccacggacggtctagacaacagaccatccaacctatggggctagacaatccgatggctaatttgat

SEQ ID NO: 94686 - DNA, 279 bp, Zea Mays
ctccgttttatgtttggtaagcaggatggagatgctccattctagatttgaagagtagaagtgctccgttttatgtttggtaagcaggatggagctgctccattttttgtttggttggagagtgtattagagcggagccattcagttttttgtttggttgtggaatgtaccagagcagaaccgcaacaacatcactcaagtgcccgattggcctttctgctgaatggagctgcttttgttcaacatcactccactcgccaacaacgtgtgtgcaggaac

SEQ ID NO: 94687 - DNA, 383 bp, Zea Mays
gtagtgggatagaaattatagaagagcataggaaacttgtcctagacgagagtgggaaaaggtatcaaggttttggtgaggagcataactagactcacatatgtggcttgtgggagattccatatgctaagtcattgattttgatgcacaacatcgacgtcatgcatcaagagagtaacttttgccaagcgctcataaatacatgcatggatttccgtgataaaacgaaagacaatgacaaggcacgcatggacttagccgtgatttgtgatcgtccaacccaagtccttagagaaaacggaggcaaaccaaaagctaactattgtctgaaacctaagcaacataaagaagtgatgaagtggatgaaggatattaaattcccc

SEQ ID NO: 94688 - DNA, 510 bp, Zea Mays
caaaaatccagagataaagagggaagaaggtagtcggttcagacaagaactgaagatcaagcactgacaaatatctgatgaacgcgataagatcagcggcactgtggaattggatgagctcggatgaatcgatggggaattaatccgggatggataacttcaaacgtggtgcgattccatgaatccagtcgagcgtggccggagttagtcaccggcgtccaccgtgactcagttgattttcggtgcagtgtcatccatgcctcgatctccctcactatgtctctttcctatgtggtaagcatgcgctaacgaagttatccgtggccggagatcgctagccggactatcttggctataaatagcactatgaactacggcgagggatgcacacctccactcagtgagatgatccaagcccaaattcgcagcctctgccccctcctcccaaattgattgcgcacggtgaaactacagtctcttacggccatatagccccaatctccaccccca

SEQ ID NO: 94689 - DNA, 734 bp, Zea Mays
gtggaataattaagaacagggccattcaatttctcactaaaatatgcaacgggtttacctccttgcatcaaaatagcaccaatgccaactccaattgcatcacattcgagttcaaaagtcttaccaaagtcacgaagttggagtagtggcgcgtgagtaagcttctcttttaaaagagcaaaaggatcctcttgtgactgcccccaattaaatgaaacacccttcttggtcaactcatgtaatggggctgcgatggtgctgaaatccttcacgaaacgacgataaaatcctgcaagtccaagaaaactccgcacttgtgtcaccgtcgatggcgttggccaactctgaatagcatgcaccttagcctcatcaacctcaataccctatggagtgacaacatagccaagaaacgatactcgttcggtgcaaaaggtgcatttctcaaggttagcaaataagcgcgcggcgagcagagcatcaaaaacagcacgtagacggtcaatatgttcagataaacaagtgttgtagatcaagatatcatcaaaataaaccaccacaatttttccaataaatgggcgcaaaacctcgttcatcaaacgcataaaagtactaggggtattagttaatccaaaaggcatcactaaccactcatacaagccgaacttggttttaaaagtagttttccattcatcgcctaatttcattctattttggtggtacccactgtgcaaatc

SEQ ID NO: 94690 - DNA, 426 bp, Zea Mays
ccaacgtcaaggtcgacgctttcctccgcagctagctcctagcgagctacctctacctcctgatggagcaggagactcaagacctgctgcttgctgatctgacaccaccagcagcaagcaacacacagcacagtgctctgctgctgctctggctgctgttgcaatgttgcatgccctgccatctaccgagttgtactagaatcagatgctttcaatgtgtcacacactgctgccgcatagctgctgaagggcagcaagtacgagcagtgctgaatttggggcggtgaaacaagcagatggctaggcagctgactgcgcttctgagcagagagaagtcccttcttcaccttcctcttctgtagcctgtaactaggagaactgaattcggtgcttgcattgcactgcatgaattggattggatccctg

SEQ ID NO: 94691 - DNA, 661 bp, Zea Mays
ttatccgcggccttcgggagccgaaaaaaagaaaatactaaatagggtttttgacgctattggatttgtgtaccctgactatcggtacccaccgcgggggcaaaaaagaaagggtgcaacttctgggaaggatgttgcttcagctgctccaagcgagcccgcgccaaagaggaaaaaggtgaaggttcttactcaccgaccgcgctatattgaaccggacacagtgcctaagtttggcggtgacacctcttcggctactgaagccaaaggacctgttcttatgcagaggattgaagagccggctgcaatgccaaaggctgacaaaattgaagaaccgataaccgaagagacgaaaatatcagaagttctaagcacttcggtaggagtggaggcgccgaagacacaaaaagatctggcagcaacccccaagagaaaaaggatggctagtgtattagatgtgttggagacgataaaaacttcaagctctactccaggaaaaattgccaaggcttcgaaaacacagattgaaactgagacaaagccgatcgaagccaaagctttaatgagccgggccaatgccgaagctgggccttcagagcccaccaaggagaaatcctcggaaattggagaaaaggcagtggaggaagaagctatagaacag

SEQ ID NO: 94692 - DNA, 550 bp, Zea Mays
tacactactctacttctattacaccattattcctgctttccattactcttggcggcctcatcgtcaggtgtgggagtccagacatcaaccaacctcaaagaaggagggggctcaaaaaggtctaactcccaacccagcgcgcgtcccgcaacatgagagggtccggcttccgcctcagcagggtgtgtaggcacactagggtgtaattgtgagtatagcatatggacttcctcatgcaacgtattgcagtagacctgcaggttgtcgacagttgagctaagttctttaattcgggcctgagcccttgcttccttagcacacactagcaaacgagactgtacggcccagtcaagtgctaagtctcgatcagcaagctgatcctgcaggtgacggatgtcccttcttagttcattgattctatctccgtcggcgacccaagcatcagtcctgtgttgcagcgctgcttgaagtcgactcactcgagcttcaagatctccgatggggtcattacttccactgctgctgctttcatgtcggggggccagttgat

SEQ ID NO: 94693 - DNA, 542 bp, Zea Mays
gtctgaccttgctgcacaaaaaagatgaagtatatgttaatcataatatgtaaacatgaaatgcaagatatgaagacagaaaacatatataagtcaagcttaaatactaacagtatttggtgtaacagattcatcggcccgaagaacctcatcaatcaaatctccaaatgtagcagctagattggactgctttgtaccaatagtattcaaacattgcttgatagaggcaaatattttgccaacctctaagtcataatcaatcaatgtagcttggaacttctggcgttgatgcacaggaagcatctgaatcttatttgccatcaggtcttgcataagagggagttggatgattatatttggaagtcgaccatgttgatttgggtcttcatcaaaagtttctggcctcattggaaactgaagtaaaaaagataataatgatatgataagtatggtaaagcaacagacaaacaaagatcatagtgggtatatgacctaacctcaatctgacaagtagatggcgattttgagacataacatgtctc

SEQ ID NO: 94694 - DNA, 358 bp, Zea Mays
tatattaaagcaccagtttcaacggtcgtcacatgtcatctttttataaaaaactccttgtatttcttcaaaatcaacccgcgataccagatcatattccatatctatcctatttattcacacagcagcgttctcgcagttgtcgctctagcaacaaaccttgtccattttgcaacaacctttgcccgcttcttccgtcgttgcaccgccaccggcgaggaggattagggcgctcgcctccggataaggatgctcactaggtgataaaagttgcatcgagtccagccaactctgaacctcctcgtcgccataagggaccaggagcccgtctcctagctcactcgtcttccgctccgac

SEQ ID NO: 94695 - DNA, 295 bp, Zea Mays
ggcttaaataggttagttttagggtttgagaattttgctcattttggggtgcatgatgtggttagggtatgattctttggatgaaaagacttgatttagtttctagctcttcaagtgtggtgtcttttactcaatttaaatcacatgtgataaaggtcacaatgtgattattgagggagaaccctgagtaacacctggggtgttacaggtcgggcgtggcggaaccgaacaggggggtgggcgtgccgaagagaaaccactcaagtggatcccgtgcctaacccatgatcgaccc

SEQ ID NO: 94696 - DNA, 298 bp, Zea Mays
ataggtaatcaatgttctactatctctcagcttaatccttgcatctcagtgtaatttcaagcaaagcaatcagaatattcttttaatagaccgatcatttcatctctaggatcggcctcgagagtcctgtttacgaaagtcggtccaagacttttaccatctcctatgtcgatctcctccacaggatcggccgatgtaaacccctgttctagcttgtcgaggtctctaaattcctttattatgcctccttcagaagaattaggcgccctctgctcggctgcggaccgttcgatctcta

SEQ ID NO: 94697 - DNA, 645 bp, Zea Mays
gccatgtactctactagctatcacacccgcttgcatcccaaacctcccaccagagagcttgaatttggaatcccccccaaatccgatccccgccaccgtgaaaccaagtccaccgtggccagccgattctggtaacgctctgtccggttcaaaccttgtttaagtcttctcatagctcagtgatgctcgccaagacatcaatttgaatgtagatacctccaatcgtcgggaacacgctcatccgtccgcaatgctctcggtcaccgtggccagagctctgtagtcggtcgttcgtgcaattaggttaggggaaatactccttaggggtttaatcctgtgtatgtcgctcgggagcgccggtcactgccccaatcggccggtttgctagctcgccggagcgcggcggtgcgcgagcgccgtcggggacttgaaacacagaatagatagaaaccagagggtctttttgtgaagtgtcagtgacttagaaaaacagtaaccgaacctatctccagttagccaaaacgccgagggcctctgcgcaaactcgcctcgcggacgcggacgcgcgcgcgatttcgcgcggatctgggccgcctgggctgaatccggcccagttctatttaattcttttcctttttctttttc

SEQ ID NO: 94698 - DNA, 809 bp, Zea Mays
gtgaatcgatcattcttgtacaacgcctttagtatggaatagagtgtgtcgctgattgttctcaggttgggcaacctgtgtactaagaacacgctgtgcaacaagactctcatacctctcggcatcgccaggagcgacatgtacctcctcattatctgcttggtcagtggcaagcatagcatgtcgagtttctttggaatcactagcgaaagaatactcaccattgtcacgtatgagtaaggtacgcttgctggggcagtcccaaattacgtgccaaatcctttgcaatgatggcactgaatatctcgtgtatgtcctgtggaaggaatagcgcctgtaattgggggcgttgcaggtttggccgtcctctcgcgtggtgtagtgctaatggtggatggcacgggaagagcaggagctaagctggatgtcgggctccgtcctgcaaaagagttagtatgtgtcttggatcggcgcccctgcacttcacgttcagctttgcaagcatattcaaacaacgtggtcatatcaaaatattccttataatcaagtatatcctgaatttctcagtgcaaaccaccgcgaaaacgtgccatagcagcgtcatcctattcaaacaaaccacaacgaatcatacccttttgtagttcctggtaatattcctcaacagattgttgaccttgttgaaaatgctgcattttattaagcaaatcttgggcataataggaaggcacaaatctgtgtggcataacaacttttaattgagttcaagtggtgggagtggcagtgggatgtttttgtttatattcacg

SEQ ID NO: 94699 - DNA, 1041 bp, Zea Mays
gggagctacacctgagttcagcttaggatagtgcttaggagcgtatctcattccaagaatggctcaggagtagtgcttaggagttgtaccctcgggatcctagctttgttgtactcattccatcaaattatgtagccgaatttttccaggcacggttaatggatctgacccttaattttgaacgagaggtaggcctttcaggtacctggtccgaaaagtactaagtcagctattctggggcagtggaaggtgtaggcttatggcatgggaccacactaagtggtacccgtctctagaccactcgcgagattgtggacttttcctttagactaggtactagtcaacatgtgcccttattcagtatcaagtgggaatataaattgagcagtagagttggttacatatttcaaaattcatgataacaacgaagctatagtcccgagtgggggcaggaagagaaaaacgtaccttggccgaggatatgataatggatcctgtgtacttggagctggattgggagaaaaacctttcctcttttttaggatgcatgaaaccttggatagagatctcgaggaggttcgggtttgcaagatcaactcctactaggctgggccacagagggcgccagagactggttttacacaagcgaccttactgaactatgaatcgtttgtgatcagtccggatttacggggctagtcccaaccagcttgttcctgatgtgtacacctcctactatggttgtccaatttttctctccttttcccttcctcctaaagttttggcaactttggaggttcgaggccttcacaaggccaggggccatccaggacgtggtccgggtccaacgacattcccttaatgcctttgcttttattgtattcaatcctctaaaccatgtaacttaactttttccatcctagtttgaaaccagtccctagaatatgaatgtagtccgaacacccaagtacttgatccagaagatactaattcagctattcttaggtgatggaaggtgtgagcttacgatatgggacctag

SEQ ID NO: 94700 - DNA, 562 bp, Zea Mays
attccattggtattgacatgctgtatcttttggattcttccatacccttatccattaattcaaatacttaaccctaaaaactctattgcctacttaaacatttgagtttatatgtccatgaccttctcgtcttttgagaccctttactattctattgttaagtcgctatcttttggcaatttgtactctcttcgtcttggtatgctcgtaccattggaatcttgcatactcttatttttatatgtgcttacctttatatctcaatatctgtttaagacattttagttaacgtgcccttgaccacccttgtttcttaatgatccatgagcggtcattttatttgcatatccttggtaatctcgttgtcttcttgtaactccacttggtaattaattttctttacttcaaccattttgttggaaccttatctatcttacccttgcttgttttctccactttgtcagtcttgcctgaactctgtccatggttatgcttttcatcatgaccacctttacccttatcacctttatatcttaccttgatgtttatcttataccggctg

SEQ ID NO: 94701 - DNA, 330 bp, Zea Mays
tagtcttcatttcgcttcatgcttcaatgcttctgttgattagacttgtacttcagtagctatatttggctttcctccgatctccatcgatatctttcttttgtcttgatacattcattgcatatactgtatggatgtgactgcttgggaaaatctattgaaaattcctggacgtcccctcccctataggtgtaaccaagggacggcttggtacgctgagcgtttagcaaactgcccttgagtagtaacttgatgtgaccgcggggtgtaatcatatcgtccaagcagttgacctcagtccaaatggtgtcgtgttacgtgaaacggcgt

SEQ ID NO: 94702 - DNA, 378 bp, Zea Mays
atttttaatgcaggggttgatgctaagtaaggctttgagaatgcaacaagagaaagaggaaaaagagctttccgctctttaggacgaagttgctgaacttcgtaaatctttggaggaaaaatatgcaaagatagcatttttgaaggaaaaggtagaaaaagctgaaaagcagaatgacggagcaacgaagacacataatgctgacatttcaaagacaaagaaccaagatgaatttatcaaggagcttgaggccaacctcgaagctacaaaaggagctctgccgataaagatatggagaataaaaaattgttggaaattttaaagcagctttgagaaaactccattgctgctacttcctggtgctgtgatatcctcaag

SEQ ID NO: 94703 - DNA, 440 bp, Zea Mays
cgaccaccagatccaaaccttcttttccttcagttctttccaaatcctgtgcaaaggtcgcgtctttcacaggaatcgtcctgtccttccctgcaaaaattgcatcttccccatgaatagtgggtgctaaattctccaaattggcggcatagcatcgtaggtggttggtttgcgtgcgtgtcgtgcaattaggtaaaggcgaggttgatgctttcgtttttccccaaaccacatgttcggtcaaatttggcgctttgaccaccagctagtgacaactgtactgttgtgatggggtttcagattgcttttgtgaattaccatgcttggacttgagtaaccttatcgtgtcgtgttcatggaccatggtggctacttaatcttaaatcaagatacgtatctgcttaacgaaccgcacatgagactaatcaaatctatttcac

SEQ ID NO: 94704 - DNA, 648 bp, Zea Mays
gggctagctaagttaagctagctcctgcaaccgcaagcgacgacggcgatggctaaccgctagctaggtctcgatcgatcacaccacctcgctctacaactacgacgttcgttacacttgagacgccgcagcagtacgcgcgctagccgccggtgctggtgatgtgtgtttcgttgtctggtacgttatctaatataaaacctgaagaatcaaaattatttaataataatattgactgatgaagcattcatggatatatgcatgcatgcagtaaaaaacaaagaaagctgctgggtagccggccccacaagtaagtacgtagcacgtactcgtgtcaagtttgcgcagctgatgcctgatgagggcaccacacctaagctagctgctagctagcttcttccttagctgcgtacctttctgactctcaggctttgtgtactgatcttatatttataaatatatatgcgccaagggcaagcgaccccagtagtcgtcctcctcctcgctcccagcccagctagctagctgctgcatatgccttctagctagctagctttcatccccggccccctttcgatccatccatcctgtgttccaagttcatcattcactcgtcactaatagctttctatctgatcgattcatcat

SEQ ID NO: 94705 - DNA, 520 bp, Zea Mays
ctttatgtatatgatacatcacatgaggtaaacaatcgaatacggtctttatcaagtgacgatgctcctgattctcctatacagccacagattgttaatgaactattacaaatgttggacacccataatccttttgctaaaaaattcagaattgctaaggaaaggcttactgaacacgcagatgaggaatttatcatcagaataattggagccaaagaaggagatcccgtacaatatgacatgccaacaactgatgatttagccatgcttgttatcggtgatttctccctcgaaacctttaaacgggacattatcatagaaaccagaaattctgaattgaaacgtatttcatcgttacatccggcttatatggcccttcaatatccactcctatttccttatggagagcgaggtttccaagttggtgtcatgtatagcgggatacaaaataaacagccaaattcaagaatccatatgacaatgcaagactactattgctatcaatttcattataagcctg

SEQ ID NO: 94706 - DNA, 484 bp, Zea Mays
acactcctgctccccgcctaggcggagacccgatgctgccacgtgggctactgcacgtggcgtaagccaacaagcggaacctggcatgaagcctctgggctacacgcgtctttgcattcattacggataagacgtgcgcctgtccattccagtgacaggcgacgtgcccagtccacgctgcgtgggccgtgctgttactcacacgttaccatagcaaggacaatgactcaccattactcgcgcgtttccatgaaaagggtcactgcctatcaatgctgcatggactgcagccatcatgactcccgctgattactcatgcgttactaaggcggagggaatctgaacggctcccttgtttaaggtttagtcagcattaattattcacataatgtattccttccattatgctcctgggcccacatgtcgaagctcagcatccttgtatgtacctcccttaaactataaaagggaggggacacaacat

SEQ ID NO: 94707 - DNA, 595 bp, Zea Mays
ctccggcgacctcgacccagtgctcctctcctgccctcgcttggtgagcagccccttctccctctgtcttctctctctctctatttctctaggcagtgcaccccttatttccaccctttgtgcccaattcaaaatcatgtgaattccagtgaatccatgtggtgcaatgtgttcctatgtggccattgagtatccttgcaggttcctagctccttcgggaaggttttcccaccccaaatagtcttttcaccgaaaccctagaaccccgcacgtcacgtgctcggtgaaatgcccaaaccagccaaaaatgctccaattgaacccagatttttcaggcaccttcacaacatctccagtaacatattcgcaaaatttcacgcccatccgatattccaggctttaatttcatcaaattccccgtttcgagcgatcgtttccgagccgagtgcccaaatctctttttcttcgcctaaattcaaaccaagcacacacttcactcatattcacccatataaacctatttgtgaagtatcggctcaattccacgtcatttcgtgcctcaattcgaattccaaacctcctatggcacttttta

SEQ ID NO: 94708 - DNA, 836 bp, Zea Mays
gaagaaaatgagcattggaaggacaatgatgaggcggaaaatgagcctgctgtttctgatgacgaggagggcacggccgaagctgatggcgcaacagaagccgaagaggatgaggaggaggcagggcagtccgaaccttctgaagataatgatgaggtagacgatgacgcggacctgcccgatcctactgctgtcgagcagctgctaaccaaagctgtcgaggagatcaaagcggaggaggagaggagtgcggcggacacagttggggagaacgtctccagcaaagagccagacgaggggaaacccattgcaccttcgagaccgagagacgaggacggcggtatggctgggttttcttcttctgttttggcatgaactcatgcatggcagttgatctgctctgggccaaagcaacaagtagccgccttctggctgctggctgctgccatccttaacccattcgtcccgtgtgcaggggaaccggatgggaaagaacccatggatttggaggaggaggaggccagaaccaccgaggagaagacaccggatgatcacccaggcatcccagctgagaagaagagcggcagtgatgacaaggattccgctctacctgtaagcgcgtcgtcgtcttcttgagcccagagaataattaaggagaacacgaacaccgatggaaaggcaggctgctgccggtggccgctccagtagtagtagcctctagtgcatctttgttttttttttgaacatgtatggcgtacgcgtcgttgtcatgtccaacacgccctggttcttcaacatcggtacgtactgaccatgtggtttcgaagtagttggca

SEQ ID NO: 94709 - DNA, 559 bp, Zea Mays
ggcagaagagttacgcagacaacagaagaagagaactcagtttcgaggaaggagatttcgtctacctcaaggtctccccaatgcgcggggtcaaaagattccaagtgaaagggaagctagcttcgcaattcgtcggcccctatcctatcattagcagaatagggcccgcagcctaccgccttcaattgccagaatccatgtcagatatctacaatgtgtttcatgtatctcagctccgcaaatgcctgaaagtgccagaaagtcacatcgaagaagagacaatttagattcagaaggatctacagtaccgagaaaagccactgaagattcttaattcagccatccgaaagacccaaaactcagaagtgaaactctgtaaagttcagtggagcagagaaggagaagaggaggctacctgggagtgtgagaactctttgaggagggaatacccttaccttttctcaaactcagtctgaatctcgagggcgagattcttttaagtggggtaggtttgtaacatcccaattttgatcccaaggttagaaactctaaactccaa

SEQ ID NO: 94710 - DNA, 316 bp, Zea Mays
cagagaagtaggcacctaactttgcaaagctattcttcaaatttttcacgcaatccaaggattttccgaagcatctttccttggattaacgaagctcctcaatattcttctctagcctggccttccaccattcacttatttcttggctggcctttgcgacttcacaattttctttggcttcggcaagctgtttccgaaggttttcaatctcggctttttgggccacagcctgagcattgtatttagcttcgtcttctttcattttactcaccaatgaaattaaaatcttgtctttctccaaaccttcatttctcag

SEQ ID NO: 94711 - DNA, 539 bp, Zea Mays
tttcatttcacaaggaaaagactctgaccgataatcaaactatcagtattagcatttatgtgatgaaaaaccatataatcataaatacttgacattaagcttttacttggaaacttaatgcattagtaaaaaaatattgattagtaacttcaaacaacatttacaagtcttagttatttcaaacggggagtggaaaattgctagtggcagtgttctgtccagaagagatcaaagaaacatccagccctatccacataattgattttagcatttgtcctgttccatcttcaatgattagattctggtggaaggagactggacactggagttagcgattctcaacctctttgattttacaaaccagtgaaataagcgaaacactactgaactttgtacacatgaacagctctaaaacatccgagataaaaaagctgttgaatggctctacccaaccacaattaaactagtgcataagcgggctcgacgaagaacgaatcaatgtagtcgaagtccacgcggcccacgccaccgctgtccgg

SEQ ID NO: 94712 - DNA, 300 bp, Zea Mays
ccttcactacatgtcccaaattcggataacaacttcaagaacgaagattgaagatgatcgacctcatcaaatcaaggaaggataagattcaagccagatcttcaaaggaatcaagatccaccatcttggatggaatatttgcttaccctattctttcttgcccaaacctatctatgtttaaaggcatcttctatcctacgtaataaagtggacatacatatatacacccatgctttcctaaccaccagcttcaccaagctacataaatatatcaatatatattattactatttgtaagac

SEQ ID NO: 94713 - DNA, 805 bp, Zea Mays
ttggaaatcagtctgcaggccaaaatcccagggggggtcttggagtcatcaacattgagtggcagaataaagcgctccttatgaaatgccttcataaattctttaacagagtcaacatcccatgggtgaacatcatctgggatacccattacagtaactctctgccctcatctaaattagttggctcgttttggtggaaagacattctcaaaatccaagattcttttaaggaattcgcccaaatggagattggaaatggtaaatctacgctcctgtggcatgatcgatggaatgagcaacgtttatctgaaaagttcctggagctttggtcttttgcatctgtaaaggagctcaacatttatcaagctcggttggcttccccggatgaaatattccatacccctctttctactgaagcgttcgagcaacttctctctctgcaggacacccttgataatatacagctgcttgatcacgatgatatttggcgatgtagtgcctcttccaaccggttttcttctcagaaggtctattctcacttgactggtacccatcaaacgccccctatctttgtttggctatggaaatctaaatgtcaacccaagcacaaagtgttcttctggctagtgctcaaaaatagattgaatactcggtccctcctcaggtgtcgttctatgccattggattccttcacctgcgacaattgtattctccagattgaagaaacgcctattcatctgttcttcaggtgcaattttgctaagcgatgttggcttcttttgggcttcctcccgccttgttctac

SEQ ID NO: 94714 - DNA, 663 bp, Zea Mays
cattaccatcctggtaaagccaatgttgtggcagatgctttgagcagaaaggcccagtgcaattgtatgagcatggatgcaaaagtcaccaccctgtgtgatgagttgtgcaagttgaacctagaagttgtttcttcaggtgccttgaattatatctcggtggaacccacattacaagagcaaatagtcagggcacagattgaagacaagggtgttcaggttattaaggaaatgatcaagcagaaagcagaaaaatacaaatgcttccgtcaggacagcaaagggattctatggtttggagatcgattggttgttcccaaggaccctgagctcagaaagaagatattggacgaagctcacctttcaaaattctccatgcaccgcggtagtaacaagatgtatcacgatctcagatccttatactggtggaccagaatgaagagggaaattgccaagtacatatctaaatgtgacacctgccagagaatcaaagccagtcatttgaaggcagcaggccctttgcaaccccttcctataccatcttggaaatgggaggacatctgcatggactttatcatgggattgcacaatacctcccagcaccatgactccatttgggtcattgtggacagattgaccaagaccgctcatttcttaccagtg

SEQ ID NO: 94715 - DNA, 452 bp, Zea Mays
ggaatttggtgcagcttgaaaatgcatactactccatgaggtcctctctggacacctatgaaactaatgtaatcaaacggccagatatctcatgtagaagtggcagttcttgaagtcttgcctctttcttccctagatcttcaagtcttgttgcaatcagtccttgctgttatatcatgaatatcacaatcttttcgatccgataagaaaaattacatgagatcatctgatgggcgtgtaatatattcatttattaactgaaatgactatatggaattgttggtgggaggattgtggaatatacctcgtcatcaagaaggcttgagaacttgaaaacatgttggtcgtcgccttctcgggtctgctccgagtattcctttactcttcgaataaagcatgaaatgaagtatacaagagcaattcagtttcagtgaactgaagtgtatggagcc

SEQ ID NO: 94716 - DNA, 504 bp, Zea Mays
gtggctcagcccctccaccgcatcgccgtgaacccttgtgcctcttcgtggctcgtcggagtaactgccacggtagatgccacgaattcacgtgcgccagtatcttctccacctccggccgccgcgcgtccatcgtaaaattcctggccaccgcttgcgacgcctataaattgagccctcccttagctgcgttagattatcgcgaacccagacacgaagaatcgttagctatcatcccccagtgagccccaatttccaatttcccccaattcaagcttccgccaccgtgaaacgagcttcaccgtcgccagccctttcccggttagcccccgtcccctgcttcctcgtttaagctttctcacatacctacgatgcttgctaacccaccaatttgaactgcgagctcaccaatcactgggaacacgatcaactgtccgccacccattcggttcacgtggacagagcttgatagatcactatttgcgcaattaagttaggggaaat

SEQ ID NO: 94717 - DNA, 389 bp, Zea Mays
ggagaggtgggctggaggtcggccatggggagaagcaacgccgtagaggaggcgcggtggggtggaggacaggaattaggacctaggcggctgataccatgtgagtgagttggaagcatgtgtttgtattgatgatgatagacagtacatgtacaagtatatataggggaggaaggtgagaggtaaaaggaagccttctacacctaaggaaagatctagactacaatcagatcctcaatcagagggattgagactagaatcagatcctcaatcagagggattgagttcctcccctaatcctctctatctatatcagagacagcacttccatacagggcggccggcatatctgccaggagacagccgtgatacactttctaacagagcgg

SEQ ID NO: 94718 - DNA, 439 bp, Zea Mays
caagccatcaatcaaagactcatctcatccatagcctcgcagcagccactgctcgccggtgggcctgccaccgcggataggatatcgcagccccgttccagcgtaaacaagatcgtgcgagggagaaacaaccctgtccatcgatccgttgatgagcgctcgcgattgaatctcaaataccccatcgtgatcgaaaacagtagtcgttgatctcagatctgttggccgagatcagatcgcgagatcctttaatctcgggcgttgattttagatcggaccgctgtgatagaatacctgttcaggtgagataagtctctgatccctgtcgtcagatttggatcccacgactagcaatccaccgtaccccttcgccatgtccatctttataaagagaccatctagtttcccaaaactaacccgtagtccactcatgcacaaa

SEQ ID NO: 94719 - DNA, 967 bp, Zea Mays
cccccccccccccgccgcccactctagcaaatagggaaccagggacatagcggcactgatctccggcgtgctctaaccaccaccagcacttgtcctcgatcaacaccatccggtcacaagagcacaacaacccacgccaagcctcgaacatcattggccatgacactagtgggacattaggctcgacacattcgatctcgagaccaccatggagtagagttccaaccaaaggcgtggagagcatcactcaccctccaggattatggtgctcgcacgaagttgcttctgcgaaagcgcaggtggataggtcggcatagagactgcacatggcgccagtccgcggcgtcgcgaccacgttccaggcaactagcaacggtagagctcaagaactaagcatcatgagcttcactaaccttaaaaaagtatggaacaaatagtatacgagtgaggaatcccttgagcatacctgaccacggcgaggtgggcaaactgatggcgtggtcactacagaggagttggcgtgtgataaactggacagaataagcatggtggctggggagtgggtttacaccgacttgaactcaagagctatgtccttcttgtgatgaacacaagccaaactcaagggcagggagaaaagcttcattgatttaagccctaagacaaccgaatgaggaggcaggtgtccctacacttgtcaaaaactcagtgaagatatattcccagggcaccaacagcacatggacaaacctacgtggcttccatgctcaagtaccacgctagttcaaacacaaagcaaggacactgatcctggtctggaccacaacacatgatcttggtctggaccacagcacaacacaaatattcaattgcctagggataagggtaggagaaatagcagctaggtctcccactgcggacgagtaccaatgtccaaggcttgatattctaaaggggtgaaaccatt

SEQ ID NO: 94720 - DNA, 418 bp, Zea Mays
ttcctttataacttctctcgataatgaattattacttcaaccattctattgcaccctcacctatcttacccttgattgttttctccacttcgccacttcgcgagtcttgccttaactctatcctttgtcatgtcttttgttcttatcaccttcaccttagacacctctatatcttacttgatgtttatcttatacctaccctttaaaatctcctctccatctcaatctgagagttgtaacttacctactttcccttggtcgtatcctcttcggtgtcgcttgcgagttttttttaactctatcctttgttgtgcttttgctcttcattgcctttacctctctcttttctcgaccttaccttggtgatgacattatgtctattatttaaaatctacaatctcctatccccatattgaga

SEQ ID NO: 94721 - DNA, 587 bp, Zea Mays
gacagccctgctgtatgtgaggtccagacatgttgccattttacgctggagcctgtcattcagtccactcataaagcaattcttctttttcatatttgtatccacctggtcaatagcgtactgggagaggtggttgaatttattgagatactgcatcacggtatcttccccttgcttcagtcggatgaactcttctagtttcatttgtaccactcccttcggaacataatgttcccgaaatgccagcttgaactcttcccaagtaacatgtccaacaggctggatcacggaaaaattagcccaccaggtactggcaggctttcttaactgctgagcggcaaacatgggcttttgcgtctccatgcatcggattaacccaaacttctattccattactcgcacccattcgtcagcttctaaaggttcctctgccttgacgaagagcggtggtcgagtttcaaagaactccaggtaggtagtatctcgtggtccttgagggggagctcttcctccatgttgttgaaattggttgcccgccatttcgcgcagaaagcgcgtattgtcggcggtggcattgaccaaggcag

SEQ ID NO: 94722 - DNA, 370 bp, Zea Mays
cattcctctggcttccaaacaaccctgaaattccccttgaataacaagagggcctccaatccccttgcttctaatccctaagcggctgccatgaattgatgcggctgtgaggctctgtctgctgctacaagtcgtggcgtggggtttctatgctgaatttgaaaatgtaacagagcaaaagaagaaatatgaatgggggttcgatgaattcgaaaatggtataataatatatcgaaaggaatatgaaagacgctcgcatatggcaagacgaaaccagcgatggtataataatatatcgaaaggaatatgaaagacgctcgcatatggcaagacgaaaccagcgatatggcaaaaccggcaatcaatttgt

SEQ ID NO: 94723 - DNA, 353 bp, Zea Mays
agggttgtgcttagtgcatattaccccttcataaaagagtgttgtttgaagacattgatgttgatgtatagctgcatccaaattcgatggtgtgaaatcgtagtgttgattgcatctatgatttgctttgagcttcattgcatgttgtttcatgctggatatcaggttgtgtagtttccttagacaattagtccgaggtagaagttcttgtgttaattaagaccaataatggacccatgttttgaatggtggtgctatatggggtaccctggatgctttgcttggagtggtcgaattcgaggacgaattctttttaagggggatagagtgtgatatcccaattttctgaaaag

SEQ ID NO: 94724 - DNA, 467 bp, Zea Mays
gcaaggggcctgctgccttcaaatgactggctttgattctctggcaagtgtcacactcggatatgtactttgcaatttccctcttcattttggtccaccagtataaggatctgagatcatggtacattttgttgctaccagggtgcatggagaatttggaaaggtgagcttcatccaatatcttctttctgagctcagggtccttgggaacaaccaatcgacctccaaaccataaaattcccttgctgtcctgacggaagcacttgtatttttctgctttttgcttggtcatttccttgatcacctgaacacccttatcttcaatctgtgccctgactatttgctcttgcaacatgggttctaccgagatataacttaaggcacctgaaggaacaacttccagattcaacttgcacaactcatcacacatggtggtaactcttgcatccatgttcatacaattgcac

SEQ ID NO: 94725 - DNA, 579 bp, Zea Mays
ggagaacaacagactgcctcagagtcagtgctttatgatcggttaggattgctagcagaagatgaacgtgaaactactgaaaggcaagatgcttttactagtagatcgtttggtgtccgcggaagcgatgaaattgatgatgaaactgttgctttgccctgcaatgattgcataccacaagaaagggtatttgtttgcaacagatcaaatccaataatgaagattggtagtttgtacaaggatatgaaagaattcaggctggctatgaggcagtatgcgatcagtaatgagttcgagttaggaattgagtcaagctcacctttcagatatagagcttattgcaaaggaggtgattgtccatggagaatcaatgcaaggctacagaatgccgggtctcccacagtagtggtgagtaatgttttagcacacatttattgtactctcgatagtggatgaaattagggaagctcacaatgattcctttctgtgtgcaggttacagtaatcgtggatcagcacacatgcacttcaagtccacatcgacgtcgaccactaggcgtttcttccccctcgacggagc

SEQ ID NO: 94726 - DNA, 339 bp, Zea Mays
ccagacccgacaacgaggtacccgatgctcctcatacaactgcaccgtgtacaaaggggcgtagggtaaccggcggagttaagcacttcccacaagatggaaggaaagccatcgcgagaaaggaagtcagaactgaaacgagagtctcctccactggcgagggtgggtgaattcatctgcggaagggaatcaaagataaagattatggtggaaggaaaaagaaaaagagagcccagatggttccaaagaaagggggttagctcaaatttttaattcttcttggtgttttataatgcatgcatgcgggaagaaacattacctctcaagagaaagttaggg

SEQ ID NO: 94727 - DNA, 665 bp, Zea Mays
caactttgttacaggtggattaacaagttgttatatagaaatcagagatccaagcctagcaaaacgctcggtcaggcactctgaataagaatcccatggtacagtacgcataaagatcttaggttcagcccccctcgccgccggtgatctcgcacccggattcgcttcggcgtcatgattcacgcccagttaaacccagataatgatcctcgggtgaaaaatctagcgctggggatgaacttgggacactgtttcgccctggtcgccgtacccactcgacttacggccggtctagataacctcaccggagttggctgcctgccgctcaggtgccacctgcctaggtgctctaccacgtcgcagtgaatcaccttagcatgttcgttcatcgccggtgctcatgccacggtgaaagccatgaatcacttgagccagtgacctctcttctctccggccgccagctcgccattccaaaattgggtgccaccacccttggacactataaattggtggcccagcctgctccgctaagaaattgtgcaccaagtgaaccaacccgcacctccaatcgtcccccacagctccccaatttgggattttccccaattatgttctctgcaccgccgtaagtgagctcgccgtggtcagctttctgcaggtccgtt

SEQ ID NO: 94728 - DNA, 465 bp, Zea Mays
gcataacaaagatgtctcccagcttggcctttagcttgaaggccttaaaaaagttattgaacataaagagcaagaggatgagaaattagtaaattttctgaaggagcttcgggaaagttgctttggcctggcctcctgatgctgcaaacgattgagggaaatattttcttcttttggcgtagtgtggagcgaagctagttatgccattggagacgtggctagaggtcttgaatggatttaagaagtaatgagcacccaaggtgactactacagaatgatcggatcttggggcacaacttccgttctagagaaggccgagtgttctcatatcaaggcagttagcaggcccaattttggcttaaatgtagaagacataaagaagccaacagctaaagctttcaatgttgtgaaatgattttcacccaaatctagaataagggtggaaaagagctagcgacataaaag

SEQ ID NO: 94729 - DNA, 286 bp, Zea Mays
gtctaccatatgctgagttctcatataataatagttatcagtccggtctgaagatgtcagcattcgaggctttgtatggcaggaagtgcaggactcctttatattgggatcataatggagaaagacagttcttcgggcctgaacttattcaagaggcagaagaacaagtccgtataatcagggagaacttgagggtagctcagaccaggcaaaagagctatgctgataatagaagaccactggaatttgaggaaggagatcatgtgtacctcaaggtgtcaccact

SEQ ID NO: 94730 - DNA, 319 bp, Zea Mays
gaaaacgagagatatggcgatcgagaggtcaaacgacgcgaaaacggcgtttgaacgagaaatagtgccataggaggtttagaattcgaattgaggcatgaaatgatgtggaattgagccgagacttcacgaataggtttatatgggtaaatatgagtgaagtgtgtgcttgttttgaatttaggtaaagcaaatggaatttgggcactcggctcggaaacgatcgctcgaaacagggaaatgtgtgaaattgaagcctcgtatatcagattggcgtgaaatttggcgaacaggttactggagatattgtgaaggtgcc

SEQ ID NO: 94731 - DNA, 367 bp, Zea Mays
ccacgttcgtggggtccagtaatcccctcgatgcagatgactggcttcacacgatcaagaggaagctggaagccatcagatgccccaaaaatcagtgtgtccaactggcagctcatcagctttcaggaatggctttagcatggtgggacacctttagtgaggccgtcggagatgctacctgggcagaatttgaaacaacattccgtgagcaccatgtaccctaggggatagttcaactcaaggaggatgaattccgggagctaactcaaggcgggagaacagtcagtgagtatgtgcacaagttcacagagttggcccgttacgcgcctgacgatgtcagcaccgagtccaggaagatggcccgttt

SEQ ID NO: 94732 - DNA, 385 bp, Zea Mays
tctgtgtaaaaaaactagataaataaataagtagtaaaacattgaattttcaaatgtacctttaatcagaccatacatttaaaagagtattatcttaaattgaatcttattgaaaggtatgcattaagttccttcaaactaaatggttgatggatattcatttttgaagaaactcacaattttatcacacactcaaaatactatttcctataaagaataatatatagatcatacttgaagcatggcctaataaattaataaagtaattaataaatacatttaaaacattagcatctcatgctgagatttatttttgtatttttaattctgtttgaaatttgaatttgatttgaatgattgaaatttgaaatagaaaagaaatagg

SEQ ID NO: 94733 - DNA, 359 bp, Zea Mays
gctactacctgggaggactttgatgtgctcaagaatcattttcctgaggtgcttgattgggggcaatcaacttctggcaggggaagatgtcagcatggtggcgcgtgcgtgaaggcaggaaggcgttgtgcgtggcgcgggaagtgaagaatagattttcagttcggatatgctgggccgtatgggccgtatggttgtaaagggtggccatgtgggcctgtgtgagcgaagtctttaaagggttgtagtcagcagacttgagaatcatgaaagaaataatacagaaacacctacccaaactacttaccttgcgtcttcccagttctcaccggcgatctctgtgactactcacgtcggcg

SEQ ID NO: 94734 - DNA, 417 bp, Zea Mays
gcgccatctcccaagcccagccggagtcttcaccggcggccaccgtgacaagtaaatttggccgtggtgtcacccatgcctcaatctccctcactgtatctcttttcgacctggtatgcatgcgcttgcgatgctatccgtggctggagatcgtctgtcgggtcgccgtggctataaatagcacggtggtccacggcgaggtgtttacctcttcaccagtgagctgatcgcaatccaaaatttgcgctgtctctgcccccttctcccaaattgagtctgcacagtgaagctatagtttcttacggccgtgtagcctcaatctccaccctcaatttcacccagagccgccgcaacaccagttttcccctttcctctatcaccggcaagcctaagtcctccgcgctccgtggccagtcc

SEQ ID NO: 94735 - DNA, 408 bp, Zea Mays
gtcctataatatctatgatctatccatttacttatgcattttttgttcgcttacttatatgtctatgaagtcacctcgcctcgtgccttaggcgcttaaaaggtaaaaaggtcctagattattgtaggttgccttaccgccgtaacaaccatgctcaagtattctacaacctaagtcgtgcgtcagtatgctaagtcaaaaacgcatggtcatccatcgtgcatttaatgaatcgtacccaaaacttatccattaagctatcgctgagggataatcttcagtgccttagatgtggggttccataatatgaggtcagactattcccggcgggcccgtcactccttctgcctcgagataggtaaagacttagctagcctagctcattgactcctccgagggacccccagg

SEQ ID NO: 94736 - DNA, 374 bp, Zea Mays
ttagacgtagattaatgtagtggcatgagtactacatatttatcctttatcgtgaaggattagtctcaacttccagcaagacacgcaacaacaagttgcttcatggttacaattctgcaaacttattatttttattaccaaatacaagtcaatcattaagatttagactgatatgcgcaacactatgttatccagaagagtccttcaggggctcatgcataccattcatcgtttggagctagtagttgacttcagaccaacaagtaaaatgatcatcagggtctagcgctcacaaagcacataggagaatttgcgcatatataatggtggtaaagtgcacggcatcaggccaatgctgccaagcagagattttt

SEQ ID NO: 94737 - DNA, 479 bp, Zea Mays
cgccggtggtagaattcgagccgatagcatttgtttgaatgtatgtgtggaaataagggggatagcgtttcccgctaacctcatagtaatgggtactcagggaatagacgtcatcctagggacgaattggctagataaatatcaggcagttatcagttgtgataagaggacaatcaagttgatgtccccactagtagaggaagtggtgaccgagttagtcccgcttgaggcgaagaaaggaagttgttatcagatggctgttgatagcagtgaagcagacccaattgagattatcaaggttgtgtccgagtttacagatgtgttcccaaaggacttaccaggtatgccaccagagcggaaagttgagtttgccatagagcttcttcctggaaccgcccccatctttaagagagcttacagaatatccgaaccagagttggttgaactcaaaaagcagattgatgagctgtcagagaaag

SEQ ID NO: 94738 - DNA, 416 bp, Zea Mays
ccactcgtattttgcttggattcgccgtcttgcggccgagatccaaccctactagaggtataccatcttgtaccccgtcaaatgaaaacttcattcaggatatatgtacattcgcactggttttgttcaaaattcgtagtttttgttgccaagcccataggagtttagcagatccacacttgtcgttcgaggtatgaacttgttacgttgttcatcctccgatttaggcgcctggtgtaccaaactttgtctgttccacgtgatggaaatacacgaacaacagtaagcctaacattagccatggcagcaattctatttccccagtgttgttcattggactgttcttgatgtttttaaactgaagacaatgtatttctggcatttatgtggaatgttaccctttcgtactatatgag

SEQ ID NO: 94739 - DNA, 532 bp, Zea Mays
gaggggacaatagatttgagttcggtggcgatgcaagcgtggactcactctgaatactggatcatgaggatctgagctgggaactgagacaccaaggttatacaggttcaggacgaggccctagtctagtgtagtgttgatccttgtattgctcaggagcgtgttacagcaagtgtgcttgtgtgtagaaggaagaatgttccgcccttttattgctcaagggaggaatttacagttgggactcgtattctaatcaggggtcctttagcttgttgcccctgggccgctctagtccccctggcattgtctatggggcgtgcgctgtcgtactcccaatctggcgttttgtcatgtccgctctccatacgggccattgtagcttgttcggtgtcaatgttgcggtacctagcgggtcccgcaatgtgggcttacgacgaggttctaggttgtgtctagaacaacttgatcttccatcataccccttgcgttaccttccagcatgtgtaggtttacacatggtcatatatgtgtc

SEQ ID NO: 94740 - DNA, 290 bp, Zea Mays
cttctataggattttaatgcagcaagtttattttcttctgccttatgtccattagctgttgtcttacgatgttccccatatggtgtaaacccacgacttacagggactgctactgaatttactcccacagaattaggttttcctggtggctttgaatacccactcatctccacccttctattttccctctttccagtgtgcatcaacacatcctcttgcaacacggctagagaacaggcagtgtccaaatcaactggacgttgaatcgccacaactgacttaatttcatc

SEQ ID NO: 94741 - DNA, 628 bp, Zea Mays
ttacgaagcaaagtcaataaacgagccatcgtgcacacagtatttaatgtttttttttggtttaatgctgctgggatcaagcacctggttttgccggcattgtcggagatcgaagccgatcgcttttttatgagcttttcacgagttgctttgtgataatctgcgggcggtcatggatggtggccggcagttagtactaactggtagttgggcgtcgacgcgtgcgctcatcgtcatgctgctattgctgcgtgcgtgtccgcactctgccatcatttcatctgccgtcctgtccagccgacaccccgctgcgtgctgtgtgctgctcagaagaagaagaaaaaaaaaggacgaattccatgaacatgagcatggcaaaattgggtagcacttggggtcacgaagggcgtgtcatgaaccttgttcttcccggattgtgcctctcgtgtttttcttgcaaaaagaagtcatagaaattccattaaagaggatttggagagatgcgtgagaagatcgggcgagagatggtattattgaacttacacttgcgatgatggatcaacccgaggtcttaatcttccgtcgtccatgcatgcacggatgaaacgatgcaaatctaaccgaaaat

SEQ ID NO: 94742 - DNA, 726 bp, Zea Mays
ctgcaacatgcacttcatctcttggcctcttctcccagcacttgtctgactgctggtttccctccttcttttgcgtctggggtgcaggctttgtgtggccaatgaggtcctaagcctactcgtcagcagtgatgtagatgtctgcctctcggaaaagttgttctgaggtggctagagctttctggaggatggctcggacgaaagccgagtcattagacccacgatagaagtcctccatcacggctgcctccgtgacattggggatgtgattcctcatagtttggaaacgcttcatgaacgagcggagggactcgttgctttggcgtttgatagatttgaggtcctagggttgcgtcagcttgtcggaaagggataggaaattcacgacaaagtggtggcagaagtcggcctagtcgtcaacagcaaaacaagggaaggcctcaaattcaaatggagacatcatactcggtcggggccagccttcgcctcccgggcagcgcacatagaaccagctcttggtccaaccaccccacttattcttggcatagggggctagctcaaaaactttctccttcgttttccctgtctttggggtaaacgtgcaattcccaaactagtcaatcctcccacctgttgtcctttttctgccaatgcaagcaataatgtttggcaaagacctccatagacgggtctccgccaaatgtagtcgtcgcccaaacaaacttg

SEQ ID NO: 94743 - DNA, 927 bp, Zea Mays
gggttgaatatattagagagcagggactcttatgcaaataggacacgacaaatggtttaatctaaccacatccgcccgatcttacttgggtggcccagattaggttgcatgtttatgtgaatcgttatgaactatcgtccattggatcatcaatccaccgccaagaccctactcatgcctcacaccgtgcgattgtcgatcaacagacgacatccaaccgagcgaaccgttaagcgcggatctaatctcatccctccatataggatctgatgaccatcgtcctttcctctcctcgacgaccacctaggcggtggcacggcatgacacatgacagaggctcaccggcgcgcatccaacctagcacagtagtggtcaaacgccaacgtaggaacatgatacatgaagtggaaagggtactgaatataggggtgggtatctcaccacaattccccgagtagaacgccctgcactcgacgcggtgtgggtccacgacggagggagagcttcaacgataaatttcgggcatgtcaaggattctcactttcaattgacgcggccgaataatcccacacgtgatgggtacccaccatgccccatcccgatcgcctagcagtggtgaagacatgcgtctacggtggcggcttgacctccatctctctgcttgcttaggttatggtggctcagggatgtggcttgggttccaaggaggtcgtagggcttatgttttatagcacatcagtggagtctgaaccggttgcgagagaccgaagcgggtacgatttggtcgttgttagatcccagcaaacgcggtgagttcacacggaattctgttacgatctgacaaaagggagatgggacctctgcgtgctggggaccacatgggagtgacgacgacgtaagcgtgaaacgggggagacaggtgcgtgg

SEQ ID NO: 94744 - DNA, 746 bp, Zea Mays
cgaagcgtagggtgagtgaggttgagggtggtcgtcttcgtgtggacagggctagcaagcgggaattgttggcctcgccggctggggtgagcgtaggtgagggggagttgcgaaatctttttgagggtgaagagctgaggataatgctgtttaactatagggagatgggtatcatcccgaaagttgaaccaatgtaatgtgtggtgccctcgatgcacgtatgtaactgtaatttgtatgatgagtctgtgtgccttcgctgatccagccgtgcctgtgggggacttgtgcatttgatctagcgcgtttattatgccggtccggctgcacctgtaatcggtctttgcgcggatagtttttcgacgaagattttcgcacggatgtgccttcgattttgcgcacttgttgtgctagtccggctgcacccttgggtgacttttgcacggatagtcttttgaagaagacttcgattttgcgcacttgttgtgctagtccggctgcacccttaggcgactttagcacggatagtcttttgatgaagacttcaattttgcgcacttgttgtgctagtccggctgcacccttaggcgacttttgcacggatagtcttttgaagaagacttcgattttgcgcacttgttgtgctagtccggctgcacctttaggcgacttttgcgcggagtgtcgcacgcgagggtagccagcgctgcccctcgcggtgactttgtattggtcgaatgccgaag

SEQ ID NO: 94745 - DNA, 1297 bp, Zea Mays
attaccttgaactcagtacactaaaatcatgtttacaaagtcatacgagattctaacagaacaattaaattgacatgtacaccattgaactgaacctagacaaacgagattcaaatagactaaggcttgtgaagttgtccaagaacagtttcaaaatatggaccggtcatctataattaataatactaaaccaggtgcttccttgctagtgtcatcatgcctagcttttatggcaagctgtgtttattttgtttggcatcacagctaccacaaaaattgtcttaatagtaatcaaacaaaaataccctctgtccaatcacatattattgtctagtgatgcaaacctattattatcttattctctgctaacaagaacataatgacattattggagtgagttgaaccattggcaaggaagaagactgatctaatctttatggagctcatggcctaaacattaactgggtcagatgtgcttttctattcaagcacagctctgtgctctatcagttaaaattagagccaaaattacgatgctttgatgcaaaatgtaagaactacaccctagctgaacaagaccctaactgataacaagaaccaaacatgtattcaaaataccagtgtttggtatatattgcctcgaactcagtacactgaaatcagaacaattaaattgacatgtacaccattgaactgaacccagacaaacgagattcgaacagattcacaatgaaatgaacaagattgtactgaaccattgagagaacagagacaacggaactaaacaagactaacacaaattagacgagaacttactgtaggacttttggacagatgagtagcaagcacagattacgtttcactgttgcttgtggatgcttcacggttgcctgtgcatgaggttggagtgggcgggtggcggccttgcctgtggaatttccacgggtgttacacaaggaggatttcttaaatagatggtgggcttgctgtaatctgtgcttgttgtagacctaaggtagatggcaagctctaatgcctcgaaggggatccaagcgtgaagatggtggatggaagggaggcgcgtaggtgttcttgtggaagggaggcggagatggctggccaatggaatgggatcgctgccgttggacggagggcaccaaggatggaagggccaatggcgtcaaggatggaaggggatccaagcgcgattcaaggcgggagcgatgatcgtggagattgcttccctctccccacggcaggcgtggattccatcatgtttccttgcatcgggagagcg

SEQ ID NO: 94746 - DNA, 368 bp, Zea Mays
cgatgataagatctctactagtgatagaactcaacatacacgctgtcagtaaagagtttatagcatcccagtcttttcattcaacacttaacttatccttgggctcaacatctcctttaacatagtccctcgagtctccttgcctttaataatcgcaatgctcttctagaccatgccaaataatttttcatcccttctaatttaatatcattttgcattagctctaacttcttaactggttctatatgagcaatattatctttacttgaagatggagccacatccctttttgttgacaacaattcgacccatttaccaagaacctgctcaattccttgatttcccccataatataatcgactattttc

SEQ ID NO: 94747 - DNA, 300 bp, Zea Mays
aggtttgtggttttgttgtggtagcggagggggtggcgactgtgctaatctctcttggtcatgtatccttggaaattgagcaggaatttgtcacagagggttttccatgagtcgaccgatagcggtggtagccttgtgtaccacgtgaggattgggccttcgagaccaatgatgaatgactttgccaaggtggaatcctctccccatgaagatgccatggcaacttggtagctcattatgtactgggttggatctgtattgttattgtactttgggtaggtgcctgctcaatagttttgc

SEQ ID NO: 94748 - DNA, 503 bp, Zea Mays
tgaagttttaggggagctttaaagaggaccattgtggacaatctaagtagttaactcatgctagaaggaaaggccaattgcccgtattatcagataaactactttctctgacttatggccacgtcgtcgtcaacgatcctccctcttcataccatgttgccaatgatgttggatgttgttgccaggagcaagtcaaagaggagctttaccttcaagtggtgggctcggggcaggtattatcgctacctcgcacatgatcaccaagtcaactcatgcaagaactccttctgttgcatccgttgttaccgctctggtcatcgagagcgacattgtcgcttttggtcttcctctcctactcctcgagttaactcctccgtacattgcaatcttcctcaacaatggaggacttgggccgaggtagtggccaatccttcaccaagtacgttgttagctaacgacgtcgccaagtctccatcgcaaggacatcacaatctttcgtcgac

SEQ ID NO: 94749 - DNA, 618 bp, Zea Mays
tgccacttttgacttctatagccaattgaaagaccattgcactaataatcaagccggatatgaagctctcttgtttggcttggtttaaattatatgggagtaacacatgtaaaagtatttggtgattcttagctagttgtccaacagattttgagggagtgtcaatgtttagatggtattttgaatgattaacttgagagatgttggaacataatttgatcttttgacgaatttaacatttgacatatatctagggatgataatcgcagagctaatggcttggcacatgaagcttcaggttatcagataacgcgacaacagaaacatcgccttagttgatttggctaataatggggtcgatgcagttgattggagaacacctttgattgcatacctacgtaatccaagtgttagggaaaacaagaacattcgatggatagctttcaagtatgttttaattgatgatgaactttatcgccaaaatcctagtgatgtcttgcttaagtgcttggccctgatgttgctatattagctatggtcgaagtacatgatggaatttgtggtactcatcaattgtctccaaatatgaagtggattttgaagagatttgggttctat

SEQ ID NO: 94750 - DNA, 353 bp, Zea Mays
ggttgtgtccgagttcccagatgtgtttccaaaggacttaccaggtatgccacctgagcgaaaagttgagttttccatagagcttcttcctggcaccactcccatctttaagagagcttacagagtatctggaccagagttggttgaacttaagaagcagatcgatgagctgtcagagaaaggttacatccggccaagcacctcgccttgggccacccctgtcctattcgtggagaagaaagatggcaccagaaggatgtgtatcgattatcgagctatgaatgaagtcacaatcaagaacaagtaccccttgcccagaatagaagatctgttcaaccagtggagaggagcca

SEQ ID NO: 94751 - DNA, 443 bp, Zea Mays
tctataaacaagagtaggtaaatgcattgcaataagaaaaaatgatgccacgataacgtgagtatgagcaagtgttgagccatctgggtctgccccactgtctcaatatttcatataaacgttgtagttttctacactgttgataaaaaatcagagaattgttgaactgcatattctgaaatgttgattgcacaaaaagcacaatatgcaataaacacaatgaattactacctccgttcttgagtatttatcgttcactttcattttttgaactaaaacacgagaaataaataacggagagcacgaattgcaacaggactaggtaagcgcatgtcttgcaacgagaaaaagatgccacaataacgtgtgtgaacgcgtgttgtactcctctcaaaaaagttacgtcgagagcgtgatgtttgcaacatcactattacatgact

SEQ ID NO: 94752 - DNA, 390 bp, Zea Mays
accaggactacccagaggtgctacatttggaacaacaaggattataagtcggccctcaccctcctaaacttccaaggtagtgacacctttaaacccaccaaccacaaccacacgtgtggtgtgtcaactttacaattattacatgctactagcgggctagggtgttacgttcaccccatttaagggtcagcgccctcagcaggtcactacatatgtcgcagatgaccagcaccacctctcggtatacctctccacgggcacttgtagcaagggttgatgctctaaataccatctataacaccttgcagccaaaatctgcttatatggcctagctcctcacgtggaaccagcctccatatgcatagcacctctattacacttccgtcctca

SEQ ID NO: 94753 - DNA, 602 bp, Zea Mays
gggaactttggataggttcaacctagttaggatgaccttgtcgaaagactaggtcaggtttgccatggttaggcccaacctagtcggggagttatgtcaggtctacaaaggttgggtccaacctggtcgtgctagctaggttggagctgatatacttggagcggtcttgggttatgtggggatcttatctctaagagaggtcttttgtgctattctatggtgccccatgtataggtacacgccaatcatccttacatgtgcaagcatgtgggatataaatgattgttttccaaaaaaacatagatctcatgatactattgagaagtacaaggcaaggcttgtagctatgttcttatcaatgtgtcaatccattaaacatttcataaggacatcactaagtgcttcaacagtatgtggagatggaacataaatgaacctacatataaaatacaacaaggtataactaaaggacatcaaggtataactaaaggacaacaatgtatatcaattaaggacaacaaggtatatcaattaatacctcaaaatacaacttcgaagctgccatccttggtcaataaaatgcccggtaacagtcatatagc

SEQ ID NO: 94754 - DNA, 428 bp, Zea Mays
aaggactcaggtctaggttatgtaggtctaggccatgtaggtcatgaatggggctcatgcctagggcccataggtcataagtggggataacgcctagacccaaagatcatgagtggagctcaggcctaggtcccgtaggtcatgaatgtggctcgggcctaggacccataggtcatgagtgtggctcaggcttaggacctgtcgggcatgagtgggagacagacttgccctttcccacgccgcgactcggtgccaaacacagttaatgtggcgtgtgtggtgttaatggcaagagttttcctagggccaaacgcggaatccactcgagtggctccatgtcggttcgtctgatctccttgctaggcttcgcctcgcacgaccctaggcacaacgctgggtcattcgggggcagattcacctgggcgggc

SEQ ID NO: 94755 - DNA, 488 bp, Zea Mays
atactcgctaaggacagcgagttcatttcaccaaagtacaggggttcttttacaagtttctcgtgactgaaggggtatccggttaccagggctaatggatcgtgcatccacgactaggattagatctcgaccatctccaagcggtacgctaggatagccctcagatcaagatttgaccaccaggatttatgagatctaaaccgcccacaaccctccaatcaacaatctacgattgagaagccccctgaccgaatcggtatacatgacacgatcacagtcgtcggcggctggatcaatgacccagattttaaacatcgccaatctgatctcatccctcaaacccgcgatccatgattcggatcaatctggccaaaccggtacgcggtgcttaagcacaaccatcagtttcagatcgacggcccctgctgccttccctccttcctcacgacgaaacacggcggcggtgccacttgcccgcggcggcgccc

SEQ ID NO: 94756 - DNA, 499 bp, Zea Mays
ggcgcttggaatggtttattgttgagaaccatggaaattctctccccccacggtcgggaagacagccggatgttcgcactccgagttggaccgagtctcccacggatcaggaggtagctgaggcaggggctttgctagctgaagttggactgctaaaagagaggggtctgactgccgaggccgtggttgccaatttcgttttcaagaatattcagccgttgaaggacagggcatacccggcttatctgtaccgaggtctagctgactcaactcgggttaccaacaggaaaattccctctgtagacttggtgaaccgtcttgagatgattcttagaggcaaggtatcaaatattggtgccccagtggcatactcagcatggaacctgcctcctcccaaggccttcactctttttgtgtcgaatccacctgtcgctgatggcggtttgggccttagagtgcgaccctctaccgaagaagttaacactttggttgcctcgct

SEQ ID NO: 94757 - DNA, 470 bp, Zea Mays
tgtgctcggtgaaatgcccaaaccagccaaacttgctccaattgaacccaaatttttcaggcaccttcacaacacttccagtaacctacttgccatatttcacgtcaatccgagatcccatgcttaaatttcaccaaaattcccgttttgagcgatcgtttccgagccgagtgcccaaatccctatttcttcgcctaaattcaaaccaagcacacacttcactcatattgacctatataaacctattcgtgaagtatcggctcaattccataacatttcgtgcctcatttcgaattccaaacctcctatgtcactatttatctgtcaaacgtcgcttttacgtcttttgacctcttgaacgtcccgtctcgtgccatatctctctgtgtatgtatttattctcacatttcatatgcttatgactatgtgactaatacgtgctcacctcttctgtcatttcagtgaccttg

SEQ ID NO: 94758 - DNA, 302 bp, Zea Mays
tgagaaacgtgcacaatatattggttttctaaaaactgaagggcttttctgagaaacgtgcacaacgaagaggtaccgtgatccctcagtcgtccgatcttaaatgaggcgccctgattagatccgccctcgcttgaaccaatacctgacgacacccgcccgatcaaagatggacgaaccagatttaatgctggcttaagtcatccgtatccctcagatccccaatcgacgctcaaatttacgcaagacgaaacagtatccaaacttctaatcctagtcgttcctgcccaatcccatgatgt

SEQ ID NO: 94759 - DNA, 429 bp, Zea Mays
gtgaaaggggagatgcacgcttctgtaggcgcctccaaccattccgggaacatgcacaaatgcacatgttgatgcacggaaccgaatgatggttgaaaatggcatgcctgccggtcgttttcctcatttaaggcgtgcaagatggatctcccacggcccctatggccctatatctaataaaagagttgccgcagccgcgggcccctcccgagtccccacacctgaaagtggaatcgatcgcctccttcaagctagtcatcccactccggctagagaacacagatgatcagagtcggaaaactgaagtcctggcggatccaagtaacgacattccatgcccttttctgatctgcagttaactgagacgaaactttagcaggcaacctgacaggcctgaggatagtattctgctcaccgagcaccacagag

SEQ ID NO: 94760 - DNA, 500 bp, Zea Mays
ttcaaacactcgagggacccatttcctcttagctagggcctagacccacttgtaaaccccttggaggggtggacttttagatgtgtttgggtgtgcgtactttgttgtgtgtaatgaccccgctgctggggaatattccaggaatgcagtaggtaaccgggggcataatggtacttgggaccacctactcgcccggttacctataaatatccccgttctgtacacgcataacaagatgctatagtttgctacctatcgtttgtagtgcacctgagccctatcaacttccgagtttttgggtccgcccgtccacgtgttggcaaatccaaaatttggcgcccaccgtttgtgctccgaaaaccaacacccacgatggctccaaaaaagtgactactagagctagctcctccatggacgaggccacgaaggcggccctcgtcgacaagaaaggcaaagcagtactcgcagatgacaccctatctgccacagttgaaaacaat

SEQ ID NO: 94761 - DNA, 397 bp, Zea Mays
ttttcttctagctcattgtatcgaggcttctttcgatgtggtgacttagcagcatcatatacatgctcaattgggtcagagtctacaactccctctatgcatgctctaagggcagcattggacctccatagtgtatctagctctactagggatgcatcaagatcagttttcagtgccctcacatacttcagcaagatcttcaagtgagtgttgttctccacccccatagatgtgatccaagtggtattactccctaatatatattgtgggtagtagcggtagatactattgctaggccagccttctacatttcataaaaagatgacatgatttgcctcactacatcactcattgtagcctcaaaggtggacaagctaactaggacatagtgcctaga

SEQ ID NO: 94762 - DNA, 467 bp, Zea Mays
ccaaggtcttcctagcaacatgtgacacacagacatgggtgcaacatcgcattccactgtgtcaacatactctccaatcttgaacggaactttcaccttataaccaatcttgatatctcccgattcattcaaccattggacatgatatggatgagggtgtcgctgcaacttcaaagcaagcttttcaaccatcttacgacttacaagattatggcagctccctccatcaatgatcacctttactactttttcttgcacttttgctcgcgtttgaaaaagattatgtcgctgtctaatttcagcttctttcatttgaacactcaagatttgtgtaaccacaagagcagtaccatgctcaaattcacatctagtatgttcctcaattttatgagtgtcatctacatttcctgcttcagcttcctcttcactagctgatgtatattctccatcatcattcacaaggatca

SEQ ID NO: 94763 - DNA, 341 bp, Zea Mays
gtcagtaaagtcttgcccctctagcttctccctcagatatgatgataaccctatgaaagctaaatgagccaaatattttcccctaaagttaagctataacatttgtctagtttctctaaaccttctaatgtattcagaaatagtttcattatatttgtgccagaccatggtaaggtgtgatagcctgagtttagtctcaccacaataaaaataatcatgatatttctgctctaaacatgcccacgtagtaaatgaatttggtgctaaagatgtaaatcaattgaaagcggtactagataatgataaaggaaacaatttcaccttgtgggcatttactatac

SEQ ID NO: 94764 - DNA, 505 bp, Zea Mays
ctaaggtagaagaccgatttatgctaattacattctctctttttttagagagagagaggtcgtgctactggtacaatgcatccatgtgacctgacccgtcggatgcagctactgtatagtagtacccaaaccaaatgatcaatattcatacgctgctgcgtcaggccatcgctttgaccagcgtacaatcctaaatatctcatgcccaactgcacgtcggcacccacacacatctagcaggctgcaggccccattggctggcacccgggcctatgctgctctgcgtccatgatcagacagcagataccagtgtcgcagcctattctctggtcaccactcaccactgctggatcaatcttacaggctgcagctcccaagggggcaatgcacacagtatgtatgtgcctgtctgcacgtcaatggcaatgggattctggccggtgacgcagaaaacttcagatgcagcgggcacaggacagcaggaggaggcagaagggagtttttg

SEQ ID NO: 94765 - DNA, 554 bp, Zea Mays
ccaactttacagctgttcaacctgaaggacatcttgtcacgtgggcagagttcaagcaagtgttcagggaacactacattccagatggtgttttacagatgaaacttgaagagtttgtgcgcttaaagcaaggaggagatttggtgatgcaatacctcgccaaattcaaccatctctccaagtgtgctatagagcaagttgacatggacatgaagaagaagaagaagaattgcttcatcataggtctaaatgatcgactacagcgaaagatggccacttgcctgtacctcacttacagcagggccgtgagcacaacactttcggtggaagccaagaattcaaggcagggaaaggcaaagagatatgggcgtgaagggggtgaaggatcctcttaaggattcgagaagcagtcgaggttggtgattcgtccttttaaccctagtcgctcttttcctcgtccacccgcctatcctttcaagcaaccagtttttatctgccacactcctgcccccgctcaaaacaatcagtcgagtgcccctagtactcgtttcccc

SEQ ID NO: 94766 - DNA, 409 bp, Zea Mays
gccggggtgatcctcactggtgttagccgcttaatgatcatgcgccacgcgtcttggaagcttagcacgtcgtagtgaacctgtgtagcaagcccgtccatcgctagaggccttgccacggtgaaagccacgaatcacttgcgccagtgacatcccctctctccggccgccagtgtgccttcgcaaaattggatgccaccgctgatggaacctataaattaccgccctagtgagcttcgctaggtaatcatgcatccagcgcacccgcccgtgtctcggactgtccaccagagctctaatttagagtttcccccaaatccattctccgcgccgctgtgaatcgccgactctaggtccgttcataccctccttgcccttgttccagcacccttggatgctatagatgctt

SEQ ID NO: 94767 - DNA, 360 bp, Zea Mays
gctgggtcacggttcgcgctgcccacttgagccggatcatctccggcagtaccctttggggctgggcagtggcttgcgcttcccacccgagccgagtcatccccggcaacatcctcggggggctgggcaagtgtcaacaccgtccttgagaaccaagttctccgcaatagccgcctctaaggctgatgaaccctcagttacttccatgggaccagggcgatccaagtcagtctcctgaccctcgagaccgcgctctaaggtcgatgaggcacgggatgacctcaatccagcgtcgagcacatcagcacaaacctccatcacaccatcatctgtcggctcgtataacagatcctctggaac

SEQ ID NO: 94768 - DNA, 898 bp, Zea Mays
gccgaccaaacatttcatcatttgcaaagggattctcatcagatccttcctcacgatcatggtcttcaaactcctcgtcttcaacttgtactcggcgtccgtgtgcacgacgccttccatgtggattattgaaatcaccgcggtgaccatcgccataacctctacggccatctccgaagggttcgaattcatggccgaaaccagaattctcatctccggattcttctcggtaaaattcttctagaccacgatgatgcagccttcgacctcctgtcgcgggcatacgttcattaaacatcctttccatggcccccatagtgagtcggccatgtgatgcaattcaacctgagaaacagggggctctccgtctccatggttttcaccgtgaacactcaaactggatcctaccatcttagatggaagcaagaaaaagtagaatatgaaagtatttgtagaacactcgatctcacctcttacttaaccaagctctttcatgatctctaggaccgtgatggtgccggcgtgagaacttccaaagaggtggtagagcgatcaaaaggatcacaagtcgaacatcctggttcaggtttttttgtggagctataggaggctgatcaaggtaggctatggtactgtcaaccaagtgtgttgatgtgctaaaaagatatgaaattgttgctacaaagattctcaccaaattaatgtaactaaaatttttagcaacactctgcaacataatcccctttcaatttttttcacttcctttttttacttctttctcttctttttctttctttctctttttataatagtaacgggggtgcagagatcaaatgcaatgacataatatgaatatgatgttggtaactagcaacttgaggaactcaaacgacaaaag

SEQ ID NO: 94769 - DNA, 498 bp, Zea Mays
tgataggcaatcacaataggtcttttcatgatgaatggtacgtaaataatccatggttggaatatagctttgctaagggtgtggccttttgtttttgttgctatctttttaaacaaccaagagctgaaatttatggtgttgatgccttcacggttgttgggtttcgtcgatggaaagatagatggaaagatagacgtgaaattattggagctcatggtaatggcatagatcacaataagtctagaaggtcctatgaggactacaaaaaatcagaggcaaaattgtgtctcatgtgatgaatcgagggggtaaaaagatggaagaggaatataaaggttgtttgcttgttatattgggagttgtaagattccttttattgcaagcacttgcttttcgtggacatgacgaatcctctacctcaagcaataagggaaactttttagagttgctaaagtggtacaaagacaaggataaaaatgtagcaaatttgcttcgtac

SEQ ID NO: 94770 - DNA, 943 bp, Zea Mays
ggcgaccggattatattaagtccaattgtatgtttcattcaaggcttttcacgagaggccactatacctggtcagattctgtctcacagagtcacagtatacaccattagccatcacttgtcagtaagagctctgagcaaccatggcggagatagtcaccggggcgatgggcactctcctgcccaagctggccaacctcatcaaggaggagtataacctacagaagaaagtgaggggtgagatcatgttcctggagactgagctcaagagcatggaggctgctctcatcaaggtctccgaggcacccatcgaccacccacctgacgtccaagtcaagctctggacaagggaggtgagagagctgtcctacgacctcgaggacagcatcgacagattcatggtgcgagttggcgatggcaagccacatagtttcaagggattcattgatagaagcctccacctgctgacaaggggcaggattcaacacagcatcggcatagacatcaaggagatcaggagccgcataaaggatgtgagtgaacggcgtgacaggtacaaggttgatctggttccttccaagcctgttggcagaagcattgacaacctgcggctgtcggctctttacagaaaggcgacagaacttgttggcgccgaagagaagagcagtgaccttgtgaaaaggctcatggagggcgacaaggaggcatccaagcagccagttgtactgtctattgttggctttggagggttaggcaagactactcttgctaatcttgtgtatgagaagattaaagggcaatttgtctgtggggcatttgtttatgtgtctcataatcctgatgtcgtcaaggttttcaaaaacatgctctaccagcttgatggagacaaatacagggacatcaatcaaggaacatggagtgaagaacaactaatctgggaactg

SEQ ID NO: 94771 - DNA, 536 bp, Zea Mays
aggaatttgggcgtgtccggggtatagtttggggaaaggaaggcaacaacactacgttgaagctacacactgtggttgacgatagaggtaaggatctctcctttactcctgcttcttcccctcggttactcttaaataggtagttaaaagatcaatgaatggctgacttcttaggattacagtaaggagaacttggggcatgtcagagagtgcatggatgtggagacgtggctcaatcctgaagacccatgccgattcctagagcacaacaaggcaaggtgaagtttatccctcgcatgggggggggtagggagataagatggcattgtagtagatatttcagacttggtgatatttcagtgatgacaaaagttctgaacatcccttccatctcctcatctctatcttcactctattccaaagtaagacacggcaagggaaaaagatcagggatagatatttctgcacttttgaatctacaacacttgactaatcttcccttcttcagtcatccttttctccttattctgattaag

SEQ ID NO: 94772 - DNA, 1123 bp, Zea Mays
tgctttagcaacagatgcggcagtgtatggatgaccgagggaaataaaatgagcaaatttagagaaccgatctaccactgttaggatcacagacttgcccccaaccttcggaaagccttcgacaaaatccatcgagatatcactccagatttcggagggaacaggtagcggctgcagtaacccagcggggtgtagatgttcagttttattcctctggcataccgaacagccttgtacaaactctcgcacccttcgggcagctaaagggttgtagaaagaagaccgccatctgtgcaatgtcttctgaataccttcatgtccactttcatgtgcttcagctagcaaggaagaccacacagaagaggaagcaggaacaaacactttcccattatacaataataacccatcagactcagtccaaccaggaggagccgtcccattctgcagccctgctcgcagttctataccttggaaatcattagccaagtctgcccgaagtgtgtcaaaaagctgaaaaatcggggccgagatgctgtgaagggctgcaacatcttcatcacggcgggataaagcgtctgctgccccgttaagtttcccagggcggtattccaccgtgaggtcatacccaaataatttactgacccatgtgtgttgcggaatggtagaaagacgctggtccaatataaacttgaggctatagtgatcagtccgtaccgtgaatggacgcccccacaagtacggacgccaatgtcggactgctttgacaagaccaattaactcccgctcgtaggccggcagcttctggtggtgaggcgccaccactcgactgaagaatgcaatggcgccatccccttggtgcagtacggcaccaaaacccgtgccggaagcgtcacagtcgacgatgaagcgctcggagaagtccggaagctggagtagtggcgccatgatcaaggcttgcttaaggcggttaaaggcagttgtcgcctcttctgtccaagtgaatgcctcgcgcttcaagagagacgtcaggggggcggccacagcaccgtatccagcgatgaacttacggtagtagcccgtaagaccaaggaagcctcggagtgcccgcagagaccgcggttgc

SEQ ID NO: 94773 - DNA, 488 bp, Zea Mays
caaattcaaaaaatggcctaagtggtggtaggtattaggcagaataggccaccggagcaccaacatttgagactctacccctcaggatcatgtccagtcggctcatcagatctttagcgggaatttttctattagtgacccgggtagaatcattgacaccactgtacaaataagcagggtaggccccatccttcaaaggctgaatgttcttgaaaacaaaatcagcgaccatagcttcaacagtcagacctttatccttcagcaagcagccctcggcaagcagtactttagcctctgttatctacgaaggggtcggagattctatctagctcagtgtgcgaacatctggctgcctccctgaccgaggggggactgacttgcagtggttctccacaatgaaccactcgagacgccaccctttaatgctgtccttaaggggaatgtcgaggtactctactttcctcccacgacgatgttccagacttgcg

SEQ ID NO: 94774 - DNA, 479 bp, Zea Mays
tccaaaatattacgaattttattctcggcggcagacttgtcccagatagctttggtattcttggtccaaagacgctcaaccttatcctccagtcatttcttcttagaacgtagctgtgtgggcccaaggtccacaagtgccccagacaccacctggtcaacaaaagaagaaacctgccacaaacagacttcataaaaaagagtgagggagagagaaccgcttacaatatgtagctacctcacagcaactgccacaacatcaccacatgcagacgcctcggcgacccccacctccatcaacaacaacgcagaaccacacccacgagtcagactatgcttcagtcgtagacctcgccagggtcactaccacctggcaagacctcgaccctgcaacaaaaccctagtacgggacgccttcgcatcgcgttaagggtccactagcctcagtagagcctttcttttcttcctagaagacttggc

SEQ ID NO: 94775 - DNA, 611 bp, Zea Mays
aggggcggcccaaggcgaggtgcttggccggatgtaacctttctctgacagttcatcaatctgcttcttaagctcaaccaactctggtccagatattctgtaagctctcttaaagatgggggcggttccaggaagaagctctatggcaaattcaactttccgctctggtggcatacctggtaagtcctttgggaacacatctggaaactcagacacaaccctgatactctcaattgggtttgcttcactgctatcgacagccatctgataacaacttcctttcttcggctcaggcgggactaactcggtcaccactttctctcctagtggggacaccaacttgattgtcctcttatcacaactgataactgcatgatacttatctagccaattcatccctaggatgacatctattccctgagtacccattactatgagattagcgggaaacgctatcccccttatttccacacttacattcaaacaaatgctatcggctcgaattctaccactggctgagtcaatttgaatgggggttgacatggtagttattggaagattatgtgcttttacccatgatgcaataatgaaagaatgcattgctccagtat

SEQ ID NO: 94776 - DNA, 497 bp, Zea Mays
accggccgtacacgttcgagcttaatttgttgacatccttgtcttttgagaacctcacctcacccctggtctttgcgtgtatcgagctactactttactactgtctctgacagcgcatctgctgggatgaggatgagccatgaacaaagcaacatgcatgcatgtcgatcgacacaatgatatttatgccagaaatctggccaaaaacctcggaacatgctaacgtgattgccaaagttcctggcttgctttttcatgcgcgctgttcatgtgtcatgcatgcatcgcatcgcatccatgtggctaccatgcacaggtgactgcacacaggagccagatgcaggctggtagttcatccgtgcccgtgcgtgatgctgcacgccgggtagggtaggtaggcattgctatttgctcagctcctgtctggctagctaccctactaaaacaagcttgcgttttaagagactgttgttcttgtaaacaaaaataataacaac

SEQ ID NO: 94777 - DNA, 463 bp, Zea Mays
tgactgaattttattcagttaactgaaacttaaacttcagtgtttggtacctagtttggggaactcttgcgaccaatccattaggttgtagattaagaagtacatagaaatgttggaggttgttataaggtgaacgatttttatataaagagttgggcttgttagtgggaagaaattagagaaaattctgttacacaactcaatggcagtttggtatgggctgtttcagtcaattgagattgagctgtcaacagttggtttttctctactttagggcatcatagtttttgttcaataagtttttagccctggagtgttataccaaagttatagggcttggtttggagaataattttggttaaggaagtctggtctgttgttaaggggaattgtgagatccaagggcttaaacagtgaggagtggaatggagctgcagtgcttttcacttaacctcagagtttg

SEQ ID NO: 94778 - DNA, 275 bp, Zea Mays
agggaacatcaacatcttaatccaccgaagtacttccttcctttggcccctgcttaggacgaaatcggccttaggccttctccatgtctttccaccacttggtggcttcatctcttggtttggtctatcacataacactgccagatccactcttgcctttacgttatcctttgacttatcaggaatgtccataattgttgcccaaagtgcatcggcaacattcttttcaatgtgcatcacgtcaatgttgtgtggaaggagcaggtcgtcataat

SEQ ID NO: 94779 - DNA, 398 bp, Zea Mays
cgaagccatccatcagcaagttgaaaaaccaaaagagaagatgcttcggctctctgaactatttcgcacgatactgagcgacaagagtatctctagaatcagaaagaccttcaacatgaaaaccaaaatcatgaagatatgtggtacgaagcctttaatcattacaatttcccttatgatgacgcttctcctttagctacagagttgcaggcaataccatgtttaccttcgtacaaaccaccacaattgcctatgtattacggtgactctgatccaaagcaattcttgatgagttatgaagcaaaaatatcatcaaacggaggcaacacatccgtcatggccaagtccttcgtcatggtagtaaggagtgtcactcaaacatggtattcttctctttg

SEQ ID NO: 94780 - DNA, 669 bp, Zea Mays
cagggacccatgtccgttagcgagtacagggacaaatttctgcagttgtctcattatgcacctgaagacgtcaacaccaacgcaaaaaggcagacaggttcatgagaggtctagttgatcccatgcgttactagctgatgaatcacactttccccaccttccaacatcttattgatagagcaatcatgactgaaataaagcataaggagatggaagaccgaaagcacacgatgagtggatcccagtccggaagcaatagtcacccccatttctgaggcagttcaccccaacaatacaagcatggccacccacaggaatatgagcagcagatccagcgtcagaactcgtagcagactcataggcagtatcagcagctatagcagtaccgttagaacaaccaatcaggaggaaattagtaccagaggcagagcaatcagtcaacttgccttcgtgccctagcagctaatcaaaacaactaggcagcccagtgcaaggaggatgcagagggtgcttctgttggtcacttgttctcaatttctatacacaatcgaaaacaaggcaacacaatcttaaaaagatattcaacctttgtcctcgagtaactatcctttcggaataactcctccaaagacgaaggttatgattataatcgaataaatcatgaaaaag

SEQ ID NO: 94781 - DNA, 451 bp, Zea Mays
cttcaggacaagatagtgcttggcaatgatgatgagttatcaatcagatgctttttctgattttattcaatcgacttctttttccatctgcttcatggggcattacgaacaatgaggtactaatgacttcaaacatggcccggatggctgatattgactggtgtcaactagtttatactgaattgtgtgatgctgatagtcgttggcacaaaaggaacaaaacaaacattacaacaacaatatatggatgttcactcattgttctagtaagtaattctttgtttaccaagcatatatatgatatgcaaatatttgttttgtactaattatatatttttttgcattcttttttgttcagatttactatcttgatcacttacatcaccctgcatcacctgataacaaatatggtactccccgcattaagttttttgataatgagaccataaga

SEQ ID NO: 94782 - DNA, 388 bp, Zea Mays
cctatgtcgtcgtcacggcttgcacatttttatgaccatatcggccagccaacatagcttctaccggtttataagccttccttcttcagagaaagcaatcgtggtcaaatgctcctgccagtatcaaattgaggcaaccttttgcgtgagcagacatgggtccggtgtgtgcacaactaagggtggctgtcacgtgggcgcccgtagtctgcaatgtgggcccaacgtccggagtgtgtgatggtttgcacgataggaatggctgaatgggaatgggggattttgtcacatgggaccggagtgccccaagtcaggagttgctcgacgtcccgcgtcacagaatgtgatggtttgctggacagcagcgacggaggagccattatggctt

SEQ ID NO: 94783 - DNA, 440 bp, Zea Mays
cacggagtgtggaggattttcgctcgctggtgactgaaaggggaaaaacggcgtcgcgacgggtcctggtggaattaggaggtgaggttggggctacacgatcgcaaaggactatggtttcaccgtgcactaccaattttgggagaggtggagaagattccacgaatttggggttcaaccgagctcactagcgaagatatgaatacctcgccgtgggtggcggggctatttaaaggcgtggtggtccggctagcgatccacgaccgcggattacatcattcgtgcatggttaccacgtaaagaagggacacagtgagggaggagcgaggcatgggtgacacggcggaaatgaccgagccacggtggccaccggtgaattatctctgactaggctcaggctaggtccgcgagatcgcgacacgtccaaagctacctccccg

SEQ ID NO: 94784 - DNA, 351 bp, Zea Mays
tgtagcgtttcatcaacaacaaattcttcagcaatcacctctctctaaggcataccttagagagaaactggttccaaagacctcaagggcatacccttgaggaagatcgcgtcgccggattatacacaatcttaagggcatacccttgagagagatcacactgcaagggcatatacgtcgttgtggcctatcggaaaggtctactacaaggtaaggagagcccccatgtcgctatatttttccttgtcttctttctcatcatagaagaattatgtcctttgactcgtgttattgatacgaaatcagtaacaagtgctaaagtcaatatcatgctaaaaataattatactcc

SEQ ID NO: 94785 - DNA, 482 bp, Zea Mays
ggcagaaaccttcgccgaacggttccactccttgactacgaagggcccaaatataaacacttaatctaacaatggcattaggggtcagctgatgaaggtaaaccccaaatttcttcaaaacatcagcaatcatcccattcaaaggaaatcttaatcctgctttaaaaaagcttttgaacaccactacctcattcttttccggcttcggagtagtttcctctctgccaaaacgaaccagctcctttttttgcttcgctgaagtagcccagcttcaccatttttggaaggttagcttcagagatggtggactttccaaagtccaaatgactaggtttagttggtaccccgcagctgaactcttcctcagaaccaacttcttcaatatcagcttgtgttgcttcggcagcaggtgtgtcctctgctgtaactaacccagagcgcttcatcgcttcagaaatcggaacagtgtcagcagcttcggc

SEQ ID NO: 94786 - DNA, 271 bp, Zea Mays
aagctattaggaagaatgaaaaagaatctcacgacgctcaagaagaagccaaaagagctgaagaagctgctgagcgtgcgaggcttatatgtagctttattgaggtttagctttgtaatccggttttagcttcggaactaacaaacatattttatgatgcagctgaactttctcccccgccggagccatacaaccctgaagccgacccagccttgaaggaagcgcttgagatgattaaaattgctaatgtagttgttgacgaagctatcaa

SEQ ID NO: 94787 - DNA, 311 bp, Zea Mays
cagatatcccccggatccactagaaggctagaaggcctcgcgaaagactctgggcccattacttcgcaaggtcatcccttcgtgggccaggggaggaatcactggcagaatggatcgacgtaagattggacagactcaagcccagacggctcattgggtttaaacattatccgcagcattgatctgattctcccatgcagcgccctcagacgtcggaactaaacgaggataagtcggcaggataataggaagataagttcagtcggttcactattacttaggagcacatagttatcatacccgcatgtaac

SEQ ID NO: 94788 - DNA, 488 bp, Zea Mays
ggtcagctggtgtcggtagatttcaaactttttcaaaacctcaccaatcatctcataaagggggaaccgaagtcctgccctaaagaagctcctgaagactacaacctcatcctccttcagctttggaatcgtctcctctccaacgaaacgaaccagttcatcatcgttttctccaaaatatcacagtttcttcattagaactaaatcgtcggatttaactgtggatctcccaaattcaatatggctgggcttagtcgaacatatgatactatcatcatcctaactttcattttcacttttatcttcagccacggtttgttcagcttcggcatcagtaataccttcggcaatagtttcttccgcacaaccaacctagaatgcctcatcatttctaagatgggagctgtctcagtcgtttcagtctcatctccctcgcgggtcaccctagcagttgatctaactctggtcatttcgttgttcagactcaa

SEQ ID NO: 94789 - DNA, 375 bp, Zea Mays
aaaatttcattattaataggaagttacataaacaatgagtcacccttagtaaattgtaaattaataagggagatctcaacttaaacctagagaggccaaacccttataaaattttcacttagcacctcttatttcagttattttcccttttgcttcacttacccttacacagatgacttcccacgtacccactgacagaggggacgcacctttcgacacggacggtctcgcacgagagggttttcccctcatcttgtgggaggtactgcagggggcaggatacactacacctccccagtacacggtgcagctgttcgaggaacatcgagtacctcgttgtagggtgaggatgactctggagcctcatcccctgca

SEQ ID NO: 94790 - DNA, 921 bp, Zea Mays
ccggccttgctgccgtctgtgttgacggtagcagggaggacatgttcaacattcctggggaaatcatgtgaatacatgtctaaatcggataatttcttaggctactaaatcatttttgtaaccctgaattgaacgaagcaagttaaaatagagtcggtcagcacaacagatcacatagcttccaaggtcaaactcgatcaactaattcccaactactgcataatgtgaagtataccccaaggttttttataacagtttccaactactgaaatatacagatattgtcagcaatacaatgctaatattttagcagtagctaaatattaaatttaaaaacatcataacaaaactatacatattctacaccatatacatattctggacctctacaatcataaaaatataatagacatattgagcttaaccaattcaaaagaattaggtgttagttttgtattcctttggtgattttaacaaggaaacaaaatgtgcaagttaaagtttttaggatttgaataaattaaatagtaagaacagccggaatagcctaccaccagttcctagtaagaatagacataatgtgttcattgtgctcagttatccagatagcgtcgcagaatacatgcatatgattacatgagtaactgcatatgcaatgaagcataagacaaatgataggaacataaatcaaaacatgactggacatataataaaaatgctacacataacttagcagaggatcaggtgtttgatctgtgaaagcaaaatacaagacgacaaaaaaaatcttcaataattaccagtgctagaggatcaggtgttcgattttgtggaagcacaatacaaaacaatagaaaagtctttgacagttaccaatagccttccacacctaagacataaaagtaaacgacaagtcacaga

SEQ ID NO: 94791 - DNA, 375 bp, Zea Mays
ctcagagtatgtcaagtccggttcaaggacaacatcggttatttcaacggttcgatcaggaacccgaagacacttcttcaattgtgacacgtggaacacattatgcacaacagacaatgtttcgggtagttggagtcggtatgccactggtccatatctttccagaataagaaaaggaccaatatatcgtggtgcaagcttccctttaaccccaaaacgcgatactcccttcattggtgagaccttcaagtagacgtagtctccttccaggaaatataagggcattcgccgtttgtctgcataactcttctgacgagcttgtgccttcttcatattataaataattttttgaatcttatcctcggcctctttcac

SEQ ID NO: 94792 - DNA, 554 bp, Zea Mays
attaaatcgaaatctatcccaagatcttcaaattcactgtagcatatagatgatcaactggatgatttgtattgatcgcatatgttgtacatttatagattacaatggcctttgctcatggccacatgcatgtgagtgaatgagcgcagcgtgggcagcgtgaagaccagacatggtgatgtgcgcggcacgcgctctctctcaggtccttggtgagtgcacgaggaacgaacgtagaacgtgagcaatgtaggagacccagaccggcttagccgttggtccactgacacccccacgtagtctcgacgagcgctgtggtgacagagaagttgtccctgaagtcattgaacaatgcctaaggaagtcctttggtgaacacgtctgcgagttgccgcgagctagaacatgcatgacatggagctcatcaatgacgacattctctcgaacaaaatgaatgtcaagctctatgtgtttggtgcgccggtggtgcactggattccgggccatgtaaatcgagacgcggaatgcgaccgtcacggaggggaccttgtaga

SEQ ID NO: 94793 - DNA, 589 bp, Zea Mays
caggaggaggagccatctgaataactgggccatcaacctcatgtggcccattaaaaggggcaacattaaaagcaagcccatcccctggcatcacaggtccatcttctaaaatgtggccattctgaaggggtgcatcctgaatgggaccaatggagctgtccgacgacaagcccgagtgttggttgctgagttattgttcatctggttgaatgggctatgggatctgctgattaggttgaatgttttctatccattgatcccaatccccctgaacattgtcctcttggtgggccggcaaatctcctcccaaaggatccggcgggaaattaaggtcaaggccagccggtggcataggttgacccagaccaaaaaaaaccaagggaagttgctaaccatcttccggagcatgcgaaattgggtcctcgtcttgagcctgcccaccaagcatgttttgttggattatttcacacgggactatccaagaatctccaatgaaaccatctgcctccgaaaaaacaatgaactgagggacttcttcaagggatgtgacacggacacgaagcaatgtcctggtcacattatgtcgatc

SEQ ID NO: 94794 - DNA, 347 bp, Zea Mays
atgatgatgcttcccccttggctgtagagctgcaggcgctaccttggtcattgtcgaaggggagatcctccagccgggtgatggagtgcacccgccccgatcttgagatgaggaaggagttcaagtatctacccaactaaatttgagaactcaagaacacaaggatttgagtggttcgggctaccaggcgtaataccctacatccactttgaattttattgctttgagagttcagtcgccgagcatatgttttagcctatgctttttgtatcgcatgtcctcccttttatagtctaaggcgaacatgtacaaggatggcagaccctaacaagtgggcccatcatgcc

SEQ ID NO: 94795 - DNA, 520 bp, Zea Mays
actatatagcagaccttccccgatgatttggttactagcatgggcaattagttgctctgcaattgcaaaataaggccttgatcgttttagtagtacatacttacggctgcattatcatctcctctccatactggcggtgatatgtttccggtggccttcaagtgaagctgtgggtagttccagaatactggttccctgtcattctgtgtaggtgagtagataaccttctatcattgttaaaaacatcttgattgtagctggattatgacatatatactatcttatcagctgatccagtacacgggctgttatactgtaaggtatgcccatagttagatttctgatagtttggatcggcaaagaagcttatagcttctcataaaaggagctgaaactgaaactggaagtcatatcgttgctaaacattactacttaagttccttgaaatgaagtcagactaaacatttgtctcttatgtttgcgcatcggatattctcacaacattagagctgtctgttca

SEQ ID NO: 94796 - DNA, 288 bp, Zea Mays
gagatgagcataccaataccaagagataagaaattgtcgaaagatagcgacttaacaacagaagaggaaagggtctcaaaagacagaaaggtcatgggcatataaactaaaatgtctaagtagacggtagaaatttataggcaggtatttgaaacaagagtattaaagggatacaagcatgtcaacaccaaaggactagagttcgcctgatggtagcaatttaacgacgaaagaggaaagaatccaaaaagacaagaaggttatggtcagggggcatctacaaggatg

SEQ ID NO: 94797 - DNA, 340 bp, Zea Mays
catttacttaagagacatttattttgaatctctaaattcaaaatgcctaacccgcctaactctttaggttggcaaattacatcccatcttgccaacctatattttttcttatggccatcaccttgccaaaaaacgtgatatgaaataatctatcttctctagcaccccttttggtacttcaaagaaagacatcataaaaatcggaagactggttagaacagaattaattaacactaaccgccctcccatggacataagctttcctttccaactacttagctttctctcgaatttggtttccactgttttccaatcaccattagccagcctgcgatggtgc

SEQ ID NO: 94798 - DNA, 1708 bp, Zea Mays
cggcaaactgggatgtcgtcggaacatgaagaactcggacatcaccaagagcaacacgttcgcggacaaagtgaaggtcaatctcaatgtgtttggtacgatggtgctggattggattagaagacatgtagatggcgctgatgttgtcgcaatacaccagggtggtcttgggcaggggggagtgcaactcattcaggaggtgacgtatctaggcagcctcagcaactgcattggcgacagcgcggtattcggcttctgcacttgagcgggaaacagtgttttgccgcttggaggaccaggagactagattgtcaccaagaaagacggcatatccagacgtagatctgcgagtatccggacagccagcctaatatgcatctgagtagaccaccagttcaatctgagaagaagggcgcacaagtaggcccaagtccaaagtcccgcgaatgtagctcagtatacgcttgagggcagcaaggtgaggttctcttggatcgtgcatatgaagacaaatctgttggctgcataagaaatatctgggcgagtgaatgttagatactgaagagctcctgcaagactgcgaaaatctgtagcgtctgaaactggatcaccatcggctgaaagcttggggtttatgtcaacaggagtagtgcacggtttgtagtcgcgcatactagctcgatcaagaatgtcaagcatgtattgccgttgggacaggtagagcccagagctggtgtgctgaacatgcattccgaggaagtgatgtaattgtccaaggtccttcaaggagaattcctgctgaagagcaccgatggtgcgccgaagaagtgccatggaggatgcagtgaggacaatatcatcaacatatagcaggagataagtcatgtcttcacctttgcgatatgcgaacaacgaagtgtcggatttggtttctgtaaaaccaagctgaaatagatgagaggcaaagcgactataccaggcacgcggggcttgcttcagaccatatagtgagcggttgagtcgacaaacataatctggatgaactgaatcctcgaaccctgaaggttgtgcacaataaactgtttctgacagagtgccctgaagaaatgcattgttgacatctagttgatgaatgggccaaccatgagatagagccagtgacaggactgtctggacaatagcaggtttaacaacaggattgaaagtctcaaagaaatcaatgcctggacgctgggtgaagccacgaagaacccaacgtgctttgtagcgttcaagagaaccgttagaagtgaatttgtgtttgaaaacccatttgccagtgacaatgttggagtgcgaaggacgagggacgaggtcccaggtcttgttatcaagcagtgcagagtattcctcttccatggctgtccaccaattgggatcggcaagagcagcacgataactccgaggcactggtgagagcacataagcttcaaatagagccgggaaccgcagaccgcgcttgccacgagtggtcatgccatgctgattggtgaccggtggaacgggtaccgcaccagcggggaccgatggtggaagcaaggtcccagaagccggaatgcaggaactgggtgtcggtgaagttggcgccgcggtgttggtctgccgtcgagagtagacctggccgaggaagcgaccaggaggccctgggttgacagaggggtgctgtcca

SEQ ID NO: 94799 - DNA, 653 bp, Zea Mays
gtatgatcccggccgggtgacttctgctactacaaatggcccttcccataatggtgacaatttgtgccgtccttcccctgttagaattcggcgaaggaccaagtctcccactatgaaagatcgatgcagaatagccttatcatgatagcgcctcagggtttgctggtacctggctgactgaattactgtattcaattgttcgtcttccagtacatcagtatcctccaacctggtagcctctgccttggctatgttttcgaagaccaatcttggtgctccaaacctgaggttggcaggtagcactgcttccgaaccatagaccacgaagaaaggagtgtttccatgcaaggctcggctaggttgagttcttaggctccaaaccacatatggcaactctctgatccattttcctatgaacttttcattcttatcgaagactttcttcctaagtgcttccaatatcattccattagccctttctacctgaccgttggctcttgggtgtgctactgatgcatatttgatctggatgcttctttgttcgcagaaatcaaagaattccgagctagtgaaattggatcccaagtcagttataatgttattcggtatcccaaacctgaatattatatcttgtatgaattccactgttttag

SEQ ID NO: 94800 - DNA, 368 bp, Zea Mays
cttgtgtggcctgttgggccacaataaacaagcatgtcaaaaaaatcggcagcacttcccctgtatggggaggttttcaaaacctgcaaatagatctaacagcacgatggctgacacgcacatatataaacgacacgatgaatgcaagtcacatctaagtggcatccatatccaccatcacacgcatttcactaaatccactaaacacatatactataaactcaataaatacatactaaactaattaaactcacgaaaatcactaaatccactaaacacatatactataaactcaataaatacatactaaactaattaaatttattatactcactaatgtacggtcgacgatggcggtggcacgacgg

SEQ ID NO: 94801 - DNA, 587 bp, Zea Mays
tttacgtagagtctatccactccaccgggggaaaatggaccaactcctaggttttttatctgacggccacgcactccacacaaagttgcttcgcctttgtgcaccattcactatgacgccacgtgtcgccactaattcccataggaatcaccaccgtcaatctttaagcccaaactcggtcaaaaacccaccgcccgtagtgctaggtgtctttttgaggttcaaccaccataccctcgtcagtatcgcactgtgtgcgtgccccccacatccaagactcatgtctcgctagtcctcgaccacaccggtaacaaggctcgctccgccacgttgtcgcgccggtgcgtgtcccaggtgtcagccaaaacggctagtcacccgatgactctggtgaatgattatggggaggctacactagcgcaaaacaaagtttttgaccccataaaaccaagaactactgcggttataggtcatggaattaccactagacgcccagggcagcagaagacgtctcgatgtagatgaaagcgtgaagcagcgtcgtgcagatgcagcacctctgaggtatccacacgtacagggagaaa

SEQ ID NO: 94802 - DNA, 577 bp, Zea Mays
aacacgcaggagagctgcgcgtcaatatattaagaagaaaaggggaaaaagaccccgaacagacagtacaacacacacacaaacacacacacacaccgaaccccacctagccagaaacaacatctggagcaggggcagggacaacgtttgtcagctgacagacaccccaacactaaaacagagaaaaactaaaccacccgactttgagctaggaggtaagaaaaacccttagccccagccaaagaccacaagaaagcttcctccctggtcagccgaacggccaccaccaagtttggatgggaaccattgaagacaacaccatttctatgcttccacaacatccaagcgcctaaagcgaccaaggagtcaaagcccttcttactcagtccacccaaccgagcactattgaaacaccaccgatgatcaaaatcatctatatcctgtcctggaaggaagtcctgcaaaccaaaaggcctgagcaactcaaaccagaaatgacgcgcaaaggagcagcccaccagcagatggttgatagtctcaacatgttgatcacagagcgggcaaagaagcgactgag

SEQ ID NO: 94803 - DNA, 646 bp, Zea Mays
tcagcgtataagggggcgcgggtttatgggccgtgcgatctaggaaaggaggtgggtcggaagcagggagtcgggcccaggcgagttttctttctttttctttttccttttctatttccatttctatttccaattgaattcacttttgaatcggagtttaaattttctatctcaaacaaaatgcacaatcagaatccagcatggtgcaatattcattatatatatatatatagggaagaggtaatggaagccctgggcttccgttagtgggcgaagccccagccaggaggtcgatcgggtcgcgttcggcccactggacgccagcttgcgtcagccatgcataggatagccacgtatcccgactgagacgcgacatgcgatatacgcacgcataaatatatgtacaaatgtgcataactcatgcataaatggaatcttttatgccacgaatcacgggaacgaatatttgcatgtgcttgccggttacgactgcataatgctgtgatacatgatagcgtaaaccatgcaaacgtttaaaatctcccaccggttttaagataaggaaagacgtgatcttcgtgcgcgtaaataaaggtgtaaggaaaaaaatacgcacgcataaatcatgcatagaagggatcttttg

SEQ ID NO: 94804 - DNA, 794 bp, Zea Mays
ggggaggagccaaatgacaagaatgcagtcgagcgcatcgcaagacagtcagctcactatacactcattggggaaacactatacagaaggggcgcatcaggagtcctcatgaaatgcattctcttaactactggaaagcaacttctagatgaggtccatgctgggcaatctggagtacacgcagcatccaggaccctggttgggaaggtcttcaggttaggtttttattggccaacaacaaagagtgatgcggccgagttagtccagaggtgcgaagcctgccagtacttgtcaaaacagcagcatctgccagcacagcagctgcagactatacccataacctggtcgttcgcatgctggggattggatatgattggacctttcaagaaagctcaaggaggatacactcatgtactggtggctatcgacaaattcactaaatggatagagttcaaacccattgcttctctaacttcagctaaggcagtggaattcatacaagatataatattcaggttcaggataccgaataacatcataactgacctaggatccaacttcaccagttcagaattcttcgatttctgcgagcaaaagagcattcagatcaaatatgcctcggtggcgcacccaagagccaacgggcaagtagaaagagacaacgagatgatattagaagcactcagaaagaaagtcttcgacaagaatgagaagttcgcaggaaagtggatcagagagttgccgtatatggtttggagcctgagaactcaacctagccgagctctgcatggaaa

SEQ ID NO: 94805 - DNA, 395 bp, Zea Mays
gttatttatgcatcttagtacattgcgtaaaaatatgtttattgtttcatgtgcacaaatttagtatgacacgaatgtgtgatgaaaggaaatgaattagcatgcatgaaaacaaaaaaattatttaaacgctttatttccaccataaatataggattgttcaacgataaggtagctagactcgttagaaccagtttatgatatatacttatgcaaattatgttatacgatgtagctattgatgcaatgtggtacactgcataaaaaccttcagttttaaacgtaaaatccacaattttgagcgcaaatgacctttatatcgacacctattttgttacgttgcgtaaatgtgtatgtcgtaaatatctaatacatatagtgtaaatggtatgaac

SEQ ID NO: 94806 - DNA, 738 bp, Zea Mays
ggaaaaataatatttacctgcccttcacgtcctcttgttactcagcaaattgaggcatgtcacaatacagtgggaataccacaggtaccacaataaatctgctattggtgattttcttatttttatttaggtagaagtctatttttggccatccaattattgcccgagtttgtttttggccatgcaactcaaaaactataaatccttgaccactgaactatcaatactggacaaatgtggtcagtttcaaagggcttttgtattttctgaaaatagtaaaagttggtttattttttaaatgataactaatttattttaaatcagaaaaacatgaaaacggcactgtttttttaaaaatataatgtgtctattggtgctgaaattggagttatttggattttatttttgccatggtgctctccaactatccacaacgctctccttcaatatgtggccccacggccatcaaaaacgacgccgccccactgcatccacgaacaccgggaaagacgatcaactcggaacctcctcaaggctccgtccctctacgccacgcgtggggtcccccactgtcacactaaccctcaccttcgacctcaaggaccatccgattttctagcaggtttatgcaggatttgtctccctcttgtactccgatttttcttttaatgtgattttatgacttatttggtggattttaattcttatattttggctgcaatttgggacgaatttctt

SEQ ID NO: 94807 - DNA, 346 bp, Zea Mays
ctcttaaaaggtaggagagaaccataagttaatcacaatgtcgttcgacattcacacccgtatcatatgctatggactttcagtgatgactcagtgatacacctctttctatgtgttttacccatgaggctgcatctaacttgttttggataacatctattcatttgtccattactcggtcaacaggctcacatgggaaatcatggtggtaccgttcatcacgaaacacaaccaggaactatggtaccagcgtgtgccaagtcatttatccacgcttgtgcatccacagggaaccctaggtatactcatccaatacccatgtggtaagaacaattaaggagaaaac

SEQ ID NO: 94808 - DNA, 353 bp, Zea Mays
cctgcccgtgctgcgtctgagtgcgacgtttatgctgcacctgcacagagttgactaactagtaggcacgataatgattggaagcagccgcagccgcaccggcaccacccgcctttgtcttgttttctttcctccccctagaggcgagcatcggtttcagtttacacgcggttggactgaaagacggatactttgggctttgaaggcgtgctagtttcattcataccggttggaatttgggtacttgttgtcgtcaggcttgctttggtatgggggtagacatcagacatgtggccatgtgatgtgctactgcttcagcctgtcgctgtgctggctagtgctgcgaattaggt

SEQ ID NO: 94809 - DNA, 580 bp, Zea Mays
gattggagttgtgcattttctgcagatcgagtccctgtatcccctaaatcctggctgttattatcggctgtagctagagtggctgaggcatccaacctatcgtcatgatcaccaccaggcaaggaagaaactagagttcgatccactcccacacgatgaggctccaagaaaccatccagatggccaggacgagtgctggccggatgagcagcgcccagcatcacgccagagcaatccactaggatactgtttaagctattgtgaaatgcaaaatcattcggtgaggcagctggggaactgactggtaattctgtgcccagattgagcaggttaacgctaggggaatgtatcagcacgctgtctaagcctttgtgaattgaggtgaaaacagcagcgagatcaacagtattgtttaccttgctcgtagttgtagcagggctgtgcaatgattccagtatatcagcgcccatcgaaccagacttgcctccatcaccctcagctagcccatgacattccacctgcggccaaacagcggtaacaatggggtctacgaaagagacaaacctgaccttcaccttgg

SEQ ID NO: 94810 - DNA, 936 bp, Zea Mays
gaggagtgaggagtaaaaaagattctagaaggaaatagcttattattaaagttaagtttgttttttaatgttctcatggccatcattccataagaccattgcactcaagaaaaaatccaaatcaaacattgcaaccaacaccatcacatggttgttattattataagcgtaaattataaaagagtgttcatcatctggcgcgaaaactattttattacaattataacttaaaacatttaaagcagcctggtgatggatcctggttccacttagcgaatcctcttgcagggaggggacaacgccatggcgaggacttgggcttcaggggatcccttccttcaagttgagattctagggctgcaatcctgacgtgggcatcttccagctccaaatgcaccctagagagatccagggtggcactatccaggtcggtgttaagacctgccactacaccagctagggtgttgaggcgatcttctctagctccacctggaacaatgctggtctggctccctccactcagacgcacaggaagatgcatgtacttcgtgtcatgcagctgctaccggttgatgtggctgagagaccacagagtccgcctagcaacatcgctgaccgaagcagcgtaggtggatagcggtgtcagggactcatgagctgatagagtcctgaaccccctatccccagcatctatcaccctgacatgaatgcgagtgatgtagtagcaagtccaaggaggctcgcacactcgccttgtctcatacaagggtcagacgtaggttcccaacgcatgcagaacgtcttgcaacaggttggggaagtgccctgtctcgaacattgatgtataatgttcggtgacaggctcaaaccccatgaagtaatcctactgaacaccgttggcttcttcgttgatgttctcctcgtcatcttcgtcgt

SEQ ID NO: 94811 - DNA, 387 bp, Zea Mays
ctctttagcgctctgcataatcgggacaatttcttttgcttcggcagctaaagaggtccctttgcaaaattctggtatcacgactagttcaatataacgcgaccggtgggtcagaaccttcaccttcttgcccttcggctcagctataatgacagaagcgacaatctttctcttctttccttgccctcccagagggtagtgataatcagggtatacgaagccaatagcatcaaataccatgttcggccttttcttgcctcggcccccgaaagctgcggacaaagcattatccttggccttggagtatgccccaagttgctcatcgctagtagcttcaatacacttctgccagtcatcgtttggctcttcaaacttctcccaaacctg

SEQ ID NO: 94812 - DNA, 549 bp, Zea Mays
cgaagattgaatttctgcttcttgaagcagtcataggcttccactctttgccatagcttctttaactcttcaatcagtggttgaagcatcacattgaggcatacgccaggatgctcaggcccaggtataacaagacataggaacataaactcatatttcatgcaaagagcaggtggaaggttgtacggtatggcaatgacaggccaacatgaatacaacgtagcggtcatattgaaagatgtgaaaccatcagttgccaagccgatacgaacgcttcttgcatcgctggcaaactctggatcaaagttgtcaagagccttccatgcatcaccatctgacgggtgcaccattaacccatcttgtctatccgtacaatatttatgccacctcatgtgcatagcggtcttcctcgagagaaacaaacgtttcactctaggagtgagaggcatgtaccgaagctgtttatgtgcaacctttgtgaccaccttctccccgtcttcatttacaagctccacgtacatcgacttcccacattttaagcatttctgc

SEQ ID NO: 94813 - DNA, 274 bp, Zea Mays
tatgaattttatctgaattaaacaagttctaggaattgtttttatattaaaaattcattttctaattcaatttatatgtttttcttattcactggactgtgcctcaattaagtagaaatgcaggggctaactcaaaagattctccagacacagtcgaccccaagttggacggcgtgttggcttttataaagcgtgggggttcttctgtaaaatgaccgggtcgaaggggtaagaagtattcctaatcgtcatattagaaatctacagccatgat

SEQ ID NO: 94814 - DNA, 797 bp, Zea Mays
cgcgaggaaaggcttgccgcaaagcagtagtatcctcccatgttgccagagatgccggcaaaccggaccactgaaccaacacttgagtttgaccatcagatgccaggcgacgtcgcaacacacgctggggtatctgaaaactgtccaaggaatcaggtaaccgagcaacagaagtagcatccggcaccgcgcgcttcagctgggacacgtgaaagacaggatgaatagtggaggacgccggcaattccaatttgtaggccacaaatcccactgttgacaacaccttgaagggcccaaagaaacggaaggccagcttctggttagcacgatgggcgagcgaagactgaacataaggttaaagccggacatagaccatatcaccaatttgaaaggaacgctcagacctcttcttatcagcctgcaccttcatgcgaagttgggcacgagccaaatgctgtttgactaaatccatcatgactttcttctcctctatccattcctgcagtgagggaatcggacagacagcagaagactctactccaaagtgacgaggagcgtaaccatacaagacctcaaagggagaaaaaccaaggctgagtgccaactggaattataccaaaactcagctaaatagagccaatccacccatttgctggggcaagcattcacaaagcacctcaaatatgtttccatgcactgattcacacgttcagtctgaccgtctgattgtggatgatacgcagaactcatgttgagagaaacccctgccaatgaaaagagtgtattccacaactgac

SEQ ID NO: 94815 - DNA, 415 bp, Zea Mays
cgaaaggcatggtggtatagcagaaggctccaaatggtgtgatgaaggcagtctaggaaggagagcatagagcagccagtggtcgaatcaactacctgatctatcctagggagttcgaagggattcttcgggcagtgcttattgagatcaatatagtcgacgcacatgagccaatcaactttattctttttgagtacaagaatggggtttgctagccactcagggtgcagtacttctctaatgaatcctgctgacactaggcgagctaactctgcacgaatagcctctctcttatcgggcgtgaaacgatgtagcttctgtcggatcggtctcgcctaaggatacactttaagtttgtgctcggccagttctctcgggactcccggcatgtccgcaggttgccatgcgaatacat

SEQ ID NO: 94816 - DNA, 543 bp, Zea Mays
cacaaagcatacaataatttagcaagggtcgaatgagaaatcaagttataagaacttactagtggggaaagattccaagcaaaataagctcgaggagcaccagcatttacaatggcgcccttcagcatcatctcggcctgactcaagatgttttcctttgaaatttgtttgtccatcaccctggaaggatctcttacccgatatacacatatgcagggtaactctatccttaggaggttggatattcttgaaggccaaatcaataaccacagcttcagcagctaggcctttgtccttcaaaccagcaatttcagctaacaagatttttgcctcggcaacttcagagtcggttggggcctctatccaactcggcacgtgcacatccggttgccttccagagcgagcaagcaaggacttattatgattctctatggtgaaccactcaaagtgtcatcctttaatgttgtcctttagagggatatctaggtattcagccttcctaccccaatgaagttcaaggctggccccaccaaccacttgatg

SEQ ID NO: 94817 - DNA, 325 bp, Zea Mays
gaacactacctctctagatggttcatttggttatatggtccatctctgtctctcttcccatcaatctgcaacgcaaaaaagtcccagggattgtaaaacctagaaaaccaaactcactattgaactacagtgcttgaaagctaaatattatccctcgttgagataagccttcagaagcctttgcactgcgccaatgtgggagccgttagcatcgggtttgtccttctgagataagcctccagcaactcacaactgggtgattgaaaagatgtacacgtcagatttcaatggttcgaaatttgctgtctcatatcacaatcatgcc

SEQ ID NO: 94818 - DNA, 499 bp, Zea Mays
agctcatccaagaattcatccataatgggaacagggaacttggtcttggccgtgattgcattgaggtgacaataatccacacaaaagcggtaagtgctatctttcttgcgaaccagaatcacaaaggaagcaaagtgactcttcttgtgctggataagacctgactccaacatttctgccacttgtttttcaatctctatcttaagcgcagggcatagcgatacagatgcatctgaactgggcgagcctctggaatcaggggaatgtggtgatcgtagtcacgtgtgggagggagtcccttgggcaaatcaaacaccgaagaatatttgtccagtaatgcttgcaactcagctagaagattgtggataagtgtttgttccttgtttgacaggtcactgatactgcataactgaacaaaagcaccctgccccatggacgctttaactccataaagtttgactgatgaagaacccactggaatggttaaccacttgccaga

SEQ ID NO: 94819 - DNA, 811 bp, Zea Mays
tggctttgtcctctgccttcgtataagcccccaacaattcatcactggtcgcctcaacggcttcaagccattaatcatctagcttgccgaactgagtcctataacgataggtgtatttcaaataaaccaggccaccttcactggaaccaacagcggtttccttcggcatctcccaatcgttaacaagaggccatagcttgaaagcaatgtgctcatggaccaaatctcgggtaccaatgtagctgcacacggtgttgaaagccatcaaacatgcttgagctttgttagcatccgcgatcgaaggtttcctgatgccgaaacgtgatcgtatggggcgctggattacgtccttcacatcctccctctcactcaaatcatttttaacataaaaccattgcttcatccatgaacccgaccacttttttccgaaatgttggcataggacacctcacgttagaccggtacacaaagttataacatccgaagttgttatgataacgctccttctcagtggtcttcgtttgataagacaactcatgaatgttgcaaaaacaatcaacgtccggttccaacccctggcttctcatcgccaaaataaaaatcccaactttaattaaagctcgggaataagttgatgaaggtatatttcaaatcgatttaacacttcaactagcattttatgtagaggaaaccgaaggccaaccttcataaaactcttgaaaacaaccacttcatcagcttcaggaagaggaataatgttctcttctccagcccccacaatagatatatcatgaaaatattttcccttcat

SEQ ID NO: 94820 - DNA, 305 bp, Zea Mays
caaaggctaaatgtgataagttaaaagatgaaaatgtatttttaactgccaaatatgacataattgtaaaagctagtgatgagatgaaagaagaaaacaaaactatgtcatccactataaatgagcttaaatccttcctaaaagatgctaaggataagtgtgacaaattaaataaagcaaatagggagttgaaagatagacttgtaaaaattaaggaagactatacaaagattaaaattgatcatgataatcttcttgttgcaaatgagcttttatcttgcaatacacatgaggctattaaccct

SEQ ID NO: 94821 - DNA, 285 bp, Zea Mays
tcattatttggacgtcccaataaggagttatgcacattttagtaactgctgccagaagctgaaaagacgcgcaaaccagccactaaatccactagagcatgcacatgcaaccatttaatcaaagctgaacgcccctatctctatatatatcttgtactaggcaatgaaaggacatatcttatgtttttgaattcagaatacacaaactcgtggagctttgtttatgcgtgagtcttgagaggcttgcaacatttgttctttcaattcctaagggagttgtagaac

SEQ ID NO: 94822 - DNA, 460 bp, Zea Mays
gagaagtgagtggagatgagcttttttcggcttagattttggttcgggtggagaggagctttgtgcggctaattctgagttaggaaaactaaatattaatttacaacaattgccaccggttgaaaacaaactttgcatgccattcatgtggcgttctcccatagccagaattgctagggctcggtgtccgaccactatccggtgcggcggtgcctccgatcaggtcatagggcaccagccaccgcgtacatccactcctccattcctcaacggaagtttctagaagaggtgacaacgaacctgctcttatgttgtcgtaaaggtcatcggcacccaactgcctacgacatcgttgttgctgctcctgcatgcacaagagtcgggccgatggcctctacctccgatctgtgccctctcctcttgccacaaagctaacgtatgtgaacatcctctcctcctt

SEQ ID NO: 94823 - DNA, 595 bp, Zea Mays
ttagttggtggaaggacccaaactaatagattttgccctagtgcaaatgttcaaataagggggatagagttccccgctgatttaatagttatgggtaaccaagatacaactatagatgtcatcctagggatgaattggttaaccaagtatcaggccagtcttagttgtgatgagagaacagtgaagttagtgtccccatcaggagaagaagtgttagtgcagttgatcttgtcaggacccagaaaagaatgttgacaccaagtcaccgctcacattgaggagattaaatcatcagaggctatcagtgtagtatcaaatttccccgatgtgtttcccaaagagttaccaggtatgccacctgaaaggaaggttgaattcgccatagagcttattctaggcaccgcccctatttccaagagagcctatcgagtgtctggaccagagttggtggaactcaaggagcaaattgatgagttgttagagaaaggctacatcagacctagtacttcgccttgggcagccctagtgttgtttgtggagaagaaggatggaacaaagaggatgtgcatcgactacagagctttgaataaagtca

SEQ ID NO: 94824 - DNA, 383 bp, Zea Mays
ccagtattagccctgcctgacttctttgtcacttttagcatttacactgatgcttgtctgactggtgtgggagcagtattggttcaaaaagggcacccgttggcgtacctcagcaaagcactgggacccagaaatcaaggtttatctacctatgagaaagaatacatggctattttgctagcagtagcacaatggagatcatatcttcagttcatctggttccatctccggagtgctaacactctttccagagggatgtcacctgtgcctttctttcactgagagggcaatggtgtggtttggtgtcctcgtctcttatttcaggtacagtctatacgtgaccatatacacaatttactggctatagttctgttagcgcatag

SEQ ID NO: 94825 - DNA, 423 bp, Zea Mays
gttgaagtaaaccttgaatggctgaagaaaccattgaactgtggaatatttgtttctgttgtacattgaagtaaacctttaatggctaaagcaaatcgagaatggttgaatgtttgttcctgttgtacgttgatgtaaattgatttactgaagtaaaccttgaatggctgaaactaaaccttgaatggccaaatatttggtgttgcactttgcgggtagcgagcggataggtctcgttaatcgcacacggctagtgcggttggtcaccaaattagattgtttccctcgtgcatatctcgttaatcatctacgactggtgctaacacgattaattggtttggctggacctttagtctatgtgatggaccatgaggttatcactgatggattaaaagggagaccatagggggtgaatgggagtaa

SEQ ID NO: 94826 - DNA, 602 bp, Zea Mays
gtgctgtcaaaatttataattagttatttagtagttagttataaggtggttagtattttagtgggttgtggttatatttatagttatgtagctagtaattagtgggttgtggttaggcaataaccatccacagtttatattgagtgtttaattcgtgtttgaaatagatggacaattttttgagcttatatcatggaggcaatgtggaacaagatccgtatggaagtgccaagttcattgacatgcgacacgtgccggtactattcgatggtagaccctcgttgagtgatgtgtttacaaaggctaaacaaaagctaggttaccatgaagatgatgacattgcggttgacggagtgcttaatattggtcatccaccaaatgtcataagacgagtcatcccaattgattgtcaactggattgggataattatgttacttcggctatgaagacccatttgcaactcatggaggttgtggtgcgtctggttgtagtagaccgtccccctgaagactttggtcgtgctatcgatgacgtgccaagtgttcctgatgctcaatctggccccaatttgatcccattaagtcagcgaggagatggtctg

SEQ ID NO: 94827 - DNA, 1028 bp, Zea Mays
gcaaatttggaggcattcttgattggaaagaggtaatgtctattctcctcatatattcttcgtatgcctcaatattgttgtctctctttttgatgttaactcacaaaattaacatgcctttccattccatttgtatcgtgtagagacgtaagaatgtccagaatgagcttgataaggcactggaagatgctcctaggtacaaaagaagagcggaagctgcggaagctgagaaaagcaaagttgtcatggaattgtgtaccactaggagaaccattgaagggttgaagctaaatctagaaaagacacaaattgaggcaatacaagcacaacaagactcggagcttgctgacatacggttcaaagagattcaacaaggaattgcatgtagagagagtgctgcagcaagagcagagattgagcttgcaaggtaccgctatgctagtgccttggcagaactacatttagtgaaggatgagctacaacaacttcagaaggagtacacgtccataaacactaaaagggacaatgctgaaacaaaagcatgtgaatctagtgttgcatctcaggaggttgagaaaactgtggatgaccttacccttgaaattatcagattaaaagagttgctcacctcttcacaagctactcatattatagcagaggaacaaaaactgaaagtggctttagcgtatcaacgagaaaaggaaaattgtcaaaatgaactgagccaagctgatggggatgttcaaagtctgcatgatgcggtttcaatcaacaaagatctcgaatctaagctaaaagatgcctctacactgctcgtgaagttgcaagatgaattttctagttatttgaaaggggaaagtgtagatggagatgcggagagaccaatggttattaccaagttgaaactagcaagtgctaggaaggagcttgaggacatgagggaggacataaaaaaggccaaggatgatgccaggatattttggaatgatgctgctacattacgagttgaaatagagagggaggaggca

SEQ ID NO: 94828 - DNA, 545 bp, Zea Mays
ggagttggatctttttgaagcccctccttccatgaacctcacagatgaacgttctcccgaagctggcagtggagcgggagcagccaaggatgaagataactagagtagtatagtagtaggtggtttccttatgtaaattaaataaggaaagttgagttgtaccagtgaatatgtataattagtaacagtgtggcataatgtaataaaggtggtgcacttgtggcatgtaataattaagtatgtttttcttcctcagatgccatcaagaactcgtgctcaagacggggcgagaacttcttgtggcggggaggaaactccgaacttgccacctatacatcccacattagctgagtctatcgctgccttagttaatgccaccactgacaacactcgtttcctgcgtgaaatggccgggaatcagtttcatcagcagggatgcagaggtcaaccccaaggcccccctgagacaccacatactaggagttttctgaaactcgtccaccactttttgttaaagatgaagaacctttggaagtggatgaatg

SEQ ID NO: 94829 - DNA, 413 bp, Zea Mays
cggaaagacaaagagatatgggcatgaagggggtgaaggatcctctcaaggatccgagaagcggtcgaggttggtgattcgtccttttaacccaaatcacccttttcctcgtccacccgcctatcctttcaagcaactagttttcatccgtcccactccttcccctgctcaaaacaatcagccgattgcccttgttactcgtttccccgccttacccagttcatctaacaactgctttaactgtgggaagtctggacacttcattaaggattgtccctatccaaagcaaattaaatctaatttccaacagacttctgaagcacatctcaaggcaagggaaatgtggcaagcacttagggaggtaaaaatacaaggaaaactggacatgtctactatactcaagtgtctaccac

SEQ ID NO: 94830 - DNA, 321 bp, Zea Mays
gcagggtttcccctaggagctgaaggagaagccgatggagaagggagtgagacctacctccccgcacctccggagctgctattagatttagcccaagttctagccaaccaaatccgactcattgaagtcctcactagaagtctggagagtcagcgcccgaatggtggaagaccacaggacaggatgggagatttttttgaggctcaagcctcccacattcgcttgatccagcaatcccctcgatgttgttgactgactgcgcatgatagaaaggaagttagaagccatcagatgccttgagaatcagcgtgttcaattggc

SEQ ID NO: 94831 - DNA, 754 bp, Zea Mays
gcaaaagtcgcctaagggtgcagccggactagcacaacaagtgcgcaaaaaccgaagtcttcctccaaagactatccgtgcaaaagtcgcctaagggtgcagccggactagcacaacaagtgcgcaaaaaccgaagtcttcctccaaagactatccgtgcaaaagtcgcctaggggtgcagccggactagcacaacaaagtgcgcaaaatcgaagtctccctcaaaagactatccgtgcggaagtcacctaagggtgcagccggactagcacaacaagcgcgcaaaatcgaagtctctctcaaaagactacccgtgcaacgaccgactacaagtgccgccggaccgacataataaacacgctagacctagtgcacaagtcccctacgggcacgaccggatcagcgaaggcacacagcctcttcatacaaatcatagttacatacgtacagcgagggcatcacacctaatattggttcaaccttcgggataatacccatctccctatagttaaacagcattatcctcagctcctcaccctcaaaaagacttcgcaattccccctcacctacactcgccccagctagcgaggacaacaattcccgcttgccagtcctgtccacacgaggatgaccaccctccacctcactcactctacgcttcaccaaagcccttcgacgcctacacccaacacttggacccggaacttcagcacccaccacacgcggagaagcctccgccgcagccacatccaac

SEQ ID NO: 94832 - DNA, 637 bp, Zea Mays
gagaggtggtgacatgccgaagtagtcatcgcttcctctatgtttataagtcgagtcaaaatgcggggtactagtggtacgctaggcaggcggtgtccaaataaataaatcggttgatgtggtagttgtcgtgcgtgatttattattagtgagtagttgaattacgagttatgtgaaaatcatgttagaaactagtgtgtggcgtgtaactgtgttcgtgtagtgaataataggtcagtaggtattgttggtgtcattggcaaatggggatgattcctattgtgtgataaattctaaaaggcaaagaacatgggtagtgtgtcgatcaagttaaccgataggttccgtaaacacgcttgtgatgcttttatgtgcatgataagatcgatgccttgtcgtcgtagtctcaggaaattttctgaaatgtgctagtgctctactgatggggttgaatgaacttgagatgtattacaatagctgtgtgtcgcgcaggttatccaaaaatggcgaaaggtggtgtatgttggtaattggaaaatagtcacgtcattagccaactcgtgttaagcaggagtcgattgcgttaagtgattgttatatacatgttgtgtctcagatttcgataataatagactag

SEQ ID NO: 94833 - DNA, 757 bp, Zea Mays
cctgccctgcctggccaggtttcttcctccctatcgtaactttgcccgacgtataagctgtccaataccacgggaatcacttctgccgacacattgttccgtgttcgtgatgagcccagaggcggcagcaaagagattgatgcaggatgctggccaagcactgtacatcacgtcgggagggcatgcatcaagaagagaaccaagtcatcaccataaaaaaatacgctcggtgcataatcagtcgagtttccaggaactggtgccaggcagcccagcgagatgaggtggttcaggacatccatctgcgatcacaaacagcactggcgacaggggattcgccgccttgacgcagacctgcacgggcgtgtgacaaaactctgttgccagcgctcccattgacaaggggtcttgttctgctcgctgtggacaggacagacagtaggatggaaatcctgttattcccacggcacggcgggggtagctccatctcccatgtcctgcaaaacttccaacagaaacgaccgatctactgaatcaaatgtcttggctatgtccacctccagcaggattgctaatagggggataatccttcagccttctgggaacattgttcctacgaagaagcacccaccgtcagagcatcgcttagaaggaagaaagccctgtgatccaacaacccaagtgcgttggggagcagctacggcgccagtcttgatcacctgccaacttgaggaaacaggacaacggtgaatcgcga

SEQ ID NO: 94834 - DNA, 666 bp, Zea Mays
cggacaaccaagtccctgtcgagctagtcggcgaggcagagcgcacgaccacgttctcaccgagtaagtttgtgaggcggagtggatgaccaagtcatggccgagcaagctagatgggcagaacaaccgaccaagcacccactaagtgagctcaagcgctgggccagagtcacaagcatagatcaaccacagtaggacacgacgacaagagtccacacgatagtcgtaggcacgactgtacaccccttccttataataagcataccacgctagctgatgggacaaggcaaccccgttcaaaggcaacctcaacacgagagcctccatagtagccgatatgttagaaatgacacggcgaggcgccatactaaatgggcaaatccatgcacacggaaggacaatgtagggcccacaacaggagaaagttgtgttgtatctatcgagccccgaggctgaaccatgggacccaccgctcatcatcacagggatgttagccatgcactcgccataggaatgggagtgacggacggtgccataccggaagcactactttgcacgaccaagggagggggcccgccacgacaaccgaaggactctttgtgatggaacctcccaagatattaggcccacctacacctatcctcatcctagggaccttagacagcc

SEQ ID NO: 94835 - DNA, 875 bp, Zea Mays
gcactcgaaaagactcatccggactccaaacaaggcaaactagtgattgatcggaatcatcttgatgagatctatacatctacagcctctaatcatccataggacacaacatatttggattataaatacggtttattttttagggcgttacaccttccctctcccgaccagcttgtactccctactgcaagcactataagtctcatcctccctctactggaagtagggctttctctagcccgaaccaggataaacgacatgtatcaccttacatcacccatctaggttagggcacacaacaacatttcactagtcggtgaggtcatcgggtcaaaacaccgacaccaacgtactcgagtcacctatcactcttagagttaagcgtcattcccaagaatgtgtgcaacaccaccaagtcattctagagagatccaatcacccatttgagttgagatattgatttagagagggtgtgctcttgtgatctgctttcttggtattgtgttgttgtgtttcttgctcttgtgtgagtgatattctattgtaaatgctatcaagagactctggacttttgtgtagtgcattgctaagactttgtctctatctagtggatctgaggactcaagttgatcggtggatcacttgggaaggtcgagagagacctagtccaatgagacacctcaatagggacgtaggttttttggagacgaacattggtaaataaatcacgtgcttcttgtgtttgtcactttttgttgtgatttgttcctctctctctccccttctaagttctcttgcctcgatttcattctaactcacttgtgttgctctctaatcttattttgcacttataggagcaacaagtgaaagcgaac

SEQ ID NO: 94836 - DNA, 344 bp, Zea Mays
atcttgaagaccggcgttccaaaggttattagcaggtcgatccaccaaacggggtcatgcaccccttgggcataatgccatgtaatggtccctcggttggccggaggcggtctcggccgaatcccatggcgttatacgtggcgaagtagaggatgttgagcccactacttccatctatgagcactttggacaatcgtatcatgccagcgatgggtttcatgataagcgggtatcagcctgtccggggaaggtgcttagggcggtcggaccggtcgaaagcaatggcatgttcagacattctgaggaaggttggggctattaatcaggcattgaatgcctcccat

SEQ ID NO: 94837 - DNA, 895 bp, Zea Mays
tttacgaacatacccatagtcatccctgactatgttctggggcgattgtgatatccttccgaggggcgaaccttcgaaccactgatcaataacgggcctagagcccatgtgttctagggcaatctcccgagccttaccgggggcttgaccttctaacccctaagcagtaggtgaggtctctcctcttctttctcgaggaaggaagcccgaggtggagacaccctcttctgctacctgcaaagtggaaaaggaggcacatgagagagtgggagaggggtgcatcttttgatgcgttatgtgaagcggtgctagctggctgacgtcaggaagagtgggtatttaatgcaacgggaagcttcggcccgtaggccgatcgttgcggcacgcgtgcacgtggatttcgaagcgacctagcccattcctggtttggactcaggatggctcagcccacgcctcggtgattctgctcgcccctataaattcacccgagaggggctcttcggttctttacttccctctcttgctttcctaccctagcctccttctgccttagccgcaaaaaactcatgcgctcttctcccatcttcttcgttagctacgatggctaagaagttgagcgttctccctccttgcgacccatggctcatttcctcagttaccgacgaggatctagaggcgttggtggatgtcgggctacttcgcccccgctcccatggcctgcagcccaagtggaatgcgccgggcgacatcgctttccacgagcgggggttctgggtgccagcgagtcgcttcatgtgggcgctcctacactactacggggtggagctccacaaattcaaccctagctccacctcttccacacagaggcgttctccctctcctccaacgtgaagaa

SEQ ID NO: 94838 - DNA, 423 bp, Zea Mays
gtcgtggagagcttcacgtgatctcgcgtggtcaattctagagggtggtggtgcgcgggagtcttcggaggggtgacaatttctcgacacgctccgtcgcggactcgcgtgacaccgtggccagcacctcaggccacttcaataccggtaagccattccttaacagttcgctcggattctgtagttcagatagcactcgtccacgtttggaatagcatgctggggcacagaatttggcgtgcttcaacggtgggcaccgccgtgaccggtaaccgctccgatcgttggtggaggggatgggagggtaaggggtgagagcgcgatggccgtggatcaaacaactgacggctgcgattaaaagctgagtaccggttcgggccaagggaatggtagccgtccgatttggatggagcgggtcgaggg

SEQ ID NO: 94839 - DNA, 304 bp, Zea Mays
gttttcagcaaagggctttcagaggtgcagatcacggccatggcagcgctatttgggtggtctaggcctttggagatgctgcaaggcggaccaatctgctgatatattgggtgtccctcactggtagtcgttcttccttcattccttatggatccctccaaaattctaatctggaatgtatgaggccttaatgggtctgctaggcaggatgctgtacgcactttggtggattcagctcgagttgatgtggtttgtcttcaagagactaaaatggtggatgtttctcggttccttttattgcgga

SEQ ID NO: 94840 - DNA, 529 bp, Zea Mays
gcactatcaggttaggggagccgatgtggtgcatgttgtatcctgccagtcgtatgtcccccaaggaccaaccctaggttgtcacatgtttcaaaaatcattctccagcgggaacactagcaagaagggaaaaaagacctcttccacaaaagatagaggctcctagaagttgaagtcaatgtactccatgtgaaagttattagcaatgccgaaggtgatgggtggcaacacctgtcccaacaagtagacacaacctggggagatagttgagaaggaacccccaagggttagcctatcatagaggatttgtagctcatcaaaggcatatgtggtgaggatgttgaggctggccccaccatcaatgtggaccctatgtaacttgactttggcaacgattggggagacaacaactgggaggactctaggcctagccatattgtcaggacaatcagaagttgaaggtgatgggggtggagacccacttgagtgggctagacccctgtggctttgggcgacgacggtgatgttg

SEQ ID NO: 94841 - DNA, 447 bp, Zea Mays
gtattggtggtatgggttgaaaagagatgtggctgcacacgtggttgtgtgtgatgtgtgtcaaagagtcaaacctgaacaccaaagaccagctagactactgcacccattaaacgtacccgaatggaaatgggaagaaattggtttggatttcattagcgggttgcctcgcacctcgaagggctacaattctatatgggtgatcgtggacagattgaccaaagtggctcacttcattccggtcaaggttacttataaaggttctcaattagcagagttatatatggctcggattgtgtgtttacatggtgtatcgaagaagatcatttctgatagaggatcacagtttacctcaagattttggaaaagctttcatgagaatatggatatgaagttgagcttcagttcggcctatcatcctcaaactgatggccagactgaaaggac

SEQ ID NO: 94842 - DNA, 600 bp, Zea Mays
aaagaagagggtattcgattgggtgaggtcggcgatggagactccaaaagcttgaagtgttcggggaaaggtgacattgatgctactgccaccaaccactaacaccttaacccagctctcccgaatcacatggtcgacaagtagtgggtacttgctggggtgatcgaagttaagccactgatcagcccaactgaaggatattgtgcgttccaaccatcggtatggggccagagcgctatttgtggccaccggaacctaccgatcagtgagtttctattgccttttgttctctttcaccccgtgtcctctgaatatgatgttaacttcttggtcaatgtgcgggaaagctccacctccacctcctccttgctgttgaggctggcctggctcggcggtctctcctcagggaggggaggcggcaacggctgaaatggtcggccatgcccgatagagttcttgaaatccctgtagttccgcagggtgtgtcgcatgtccttgtggtatgcgcactgagagttgaggatctcgtccagtgtccttactccaccatggggtgcaccgcgggcttgagtcgtcggtggcccagcgatgtgcacttcc

SEQ ID NO: 94843 - DNA, 664 bp, Zea Mays
gtttgcacaccgagctggatagaatctccgaccccttcagagataatagaggctaaagtactgcttgccgaggtctgcttgctgaaggatagaggtttgatctgaggctgtggtcgatgatttcgttttcaagaacatccagcctttaaacgacagggtgtaccctgcttatttgtacagtggtgtcaacgattctacccgggtcacgaacaggagaattcccactgaagatctgatgagccgactggacatgatcctgaggggtagagtttcaaatgctagtgctcctgtggcctattctgcttggaacctaccaccactcaggtcgttttctgagtttgtgtccaaccctcctgctcatgatggtagcctgggtcttagagtgcgaccctctcctgaggacattgaggctctgattgccccactttggggtcttccagaggatgagaagcagactcatatcgagatgccagctagcactgatgacgcggagatagatgttgttcttagtttgttggctggggaatcatctgactcgactcataccgagccaatggctatcacagctgggcaagaacttggtgaagaggtggatactcggaaacccgaaggtactcgcctaaaccgtacatgccgagtgagccgcctgactgcacctgttgag

SEQ ID NO: 94844 - DNA, 731 bp, Zea Mays
aatagatcatggcacacatatgctatgcacccggctttgcccttagaaacgggtgtgacagaagtggtatcggagcaatgtgaccgtagatcgctagattagttagaaatggaaagcccagtcagtcgttcaaaacttgacttgattgtctccataaaacttactttatatcaaaactcgtctcttttatcttcaacccttcttgtctgattctttgtctatcaaaaggttctaatgagaagcattgcaagatgatcaagctaggattgcggaacttgaagcgaagtttgccagaagaaacctttcgaagctatcgacgatgccctattctctgtcttatccccactccgcaagaagttttgctatggatcctttggatctattactagacttcttggttaggttgataggattgttctttagtattaagattttcgactagatcggtaatggcgatattatattatagtggttttataatccctaatattgctatataacccttgactccttatacttttgttttcttgccattgtattgccatccttgcgcaatatctacctggtatattaaacctttgcctctctacttttctccttgataatgctttctccttaactcactttatatccttggttgtatcatttatcctcactttaatagttcatggttatctcatttcactcttggccaccaacaaatatgtcttgtctaactccttgctatttct

SEQ ID NO: 94845 - DNA, 374 bp, Zea Mays
gggaaagataaggaaaactgccgcttcggccatccctgctttgccgaagggcaaaaagattaaggtcttaactcaccggccgagatacatttagacagccattgtgccgaagcttggtgaagggacatccttcgctgttgccgaagcagagcaacctgctcctaccatccctagggaaaacctaactaaggtgtcaaaggttcctgaagctggtccagccgaaacaacagaacatgatgtcgaagccaaagagaaggcggtcaaagagccagagccaaagctagcaaaaatcttgaacccgccagcagaggcggaattgccgaaagttgcaaaggctcccgcaacaactcccaagaggagaagaatggctagcg

SEQ ID NO: 94846 - DNA, 369 bp, Zea Mays
ttgtaactccactcggtaatgaatctttacttcaacccttctgttggaaccttacccatctgacccttaattgttttctccactttgtcgtttcgcgagtcttgtcttaactatatcctttgttatgctttttaattattatcatatgcacccttgacacctctatatcctacattgatgtttgtctcatacctgccctttaaaatcgcccctcttccgtctcatgccttctttctcttggtcgtatcctcttctttggctcgcgagtttttaacctcatcctttgttgtgcttttgcttcttattgcctttacccttctcatctctcaatcttaccttggtgattactctatgttcgttatctaaaac

SEQ ID NO: 94847 - DNA, 371 bp, Zea Mays
tatcagacaagaacataggataatgtcaagagacagcagtgtatgaagcagggaaaatgcaacacactaacatcactcccccttacatattaaacatatgcaataccaatatcggagggaaatcaaggtacaaatacttaatataagaaagtcaatacctccttttgtacctttaccatgtgatggtgtcctttccatctaggttggtggagttccctttgtcatcaatttaagattttcaccttgaaagctttatctctagggtgctccttcacacttgtgcctgatcctttatcctgacattttcttattactaagacaccaaacttaggacaagttatagcattgtggcacaagaggaaacttctatt

SEQ ID NO: 94848 - DNA, 569 bp, Zea Mays
gctcgatcaggatgtgagcctcaataaaattggcaaccacgtcctacgtcctctcctttatatatatttgtctttctctcggcgagcataatatccaaaatccgcaaaccattcctcacataccacatcacaatcgttgccgcaccatccacaacgcatttgtgtcgcccttcagacccatttgtcatatgcccacatcttctttaatctctactttcgtccaacatccaaacttcccttgactcacagcctcacgcacaaccctcaacttctcttcccgtatcactacctcctgcaactcccagtcctgtcctagccgatcaaaaccaccccatccgccatattctctttctctcccatccgcaaggcaagactcttacttccgtatctcctcgtggtgtcaaggaagggggttcacttgaagctgctggtggagacacgggtagaagtctggagctccgccatagacgtgcttcgctggaacactgtgcgcaacacatcgccgacgccaccccgactggtaaggtctcgcatccccttcttgctaagttgttgtgcatgcatgccgc

SEQ ID NO: 94849 - DNA, 312 bp, Zea Mays
agccgaaggtgccaaaaccgctccaatctctaaagtgatgcaacgatcagggctggtagtattggaggatgcacctgccgctgaagctgagcaggttgatgctgaggaaattgaatctgaagatgattacaacgccgtgccatctaaacccagccacctggagtttgggaaatccaccattaccgaaggtgatatgtctaagctgatgaagttaggctatttcagtgaagcaaagaaggagctggttcgttttggcagagaggaaattactccaaagccggaaaaggatgaggtggtagtcttcaaaagctt

SEQ ID NO: 94850 - DNA, 386 bp, Zea Mays
ggagcacaagcagcagctgatcaaggaggccaacgcgaagtacctgaccattttcaaggtggacaggaatcagaaagtcgtctagcaacaggagactaacctagcatctcaatgatctactgcgactacccccaatgtaagtaacacgaatgatgtccaagctcttcgatcttacctagatgaacatcgggaacaaatgcaacaaatattagggggtatgcaagatcattacagtaggctagtgcgtgcatttgataaatcagctgttactaattttccatcgcacgatgttgagactaaagaaaacacataagattcatcggtcataaatgggcacgcctaatataagccgctttatggtatgccgatgaactcctactataccg

SEQ ID NO: 94851 - DNA, 514 bp, Zea Mays
atcgtagtccttaaggcctagggccacctcccaactaccgatgacttggagttcctcaggatggtcgaaggcagcggagacctcaatttgatgccctttactcagacttgggtttgggccctggctccccaatgagcgacgagggcgaacctcccagcgataaggagaacgaagggcgcctgacccttgaaatctccatcctcgaaaagggtaggcatcattggtagcactagcaaaatggagtgccatatgattcaggagctcgatgaatcaccaagcatgatgtctccgccaagaatccccctgtagttcacagtaggaacagattcacattccacttgtaattccttgatgtttatcaataaaaaccggttccaaaattgttctcaatgttggacatggggaaaggggagtgaaccctgacctaggtccaactaggtgcctaccaacgcggatattcatgaaattgaaagaagtactaaaagaagttccatcccttgaccgttacaaaaat

SEQ ID NO: 94852 - DNA, 705 bp, Zea Mays
aattcaatgagccgaatgatgactggctagattgcattgaggcaactagcgatgagttgcttggtgcctacataagggccgaggatgatgccctgacagtggccttctgagggcgaggcaagaagagattgaacagggtctttgatgttattggttttgtgtacccagactattgatatcccttgctaaagaagggaaagaaaagaaaggctgctgtttcggctatctctaccacgctgaagggaaaaaaggttaaagttttgacgcaccagcccaggtatattgaaacggccaaagtgtcgaagcttgctgaagggccttcttctgctgttgagccaaactaccccgctcttgttgaagccaagggagaatcggctgaagtgccgaaagcaatgataatagcggaataggagaaaaccgagacgaccgaagtgctgaagcgtcctgcccgaagctaaggaaaaacggtcaaagaaccagaataaagaagtcagcatggcaaccaaaaaccctgagcccgccacaagagctggagctgccgaagatgtccaaaattcctgcaataactccaaagaggaggagaatggccaacgtactagacgatgttatggaatcttcaaaagtacaaacccctacttcggtgcctgatagaaagggtgaaatctcaaagaaacctagcgaagctggtatgacactagatcctgc

SEQ ID NO: 94853 - DNA, 526 bp, Zea Mays
aagagtagtcgttttaaaaatagtaagtaagatgccgggataagaactgtgtgattttagccttagaaaatatctgtcaaatgggtcaaatgtagaattagatgtgtaagcaaagctctgattcagaaaggaaaggtatgtgggtagacattgagttagagattgaatgaaggggcacactagataaaaccaaggacaagtagctagttgactaacgctttcgagcacgtacgctggtgctctttgatagagcattatctacaaccctgaagcgaactattcaaaatcaatctagcagtctcttccagcaatgaattgtagcagggcttggtctcgaaaggtatagataccaccagaagcttggaaagaagaaggaatgtcgacctaccgcgtagtgggcttttcaccttgcttttctgtcaaattcacagacgctatagctgtgtaaaaacagtactcgatttctcactagaaaaaacaactgtctttattgttgtgtgcatattagtcactgattatagctttg

SEQ ID NO: 94854 - DNA, 798 bp, Zea Mays
ggggaaggggctgggggtatggcgttggggcaaagcagccacatcagagagtcgatgtggcgagtcggcgagtctaccataaaaaggtgacgatgaagcgacgacaaatggcgagggggatggggtagcgaatgcaggtggtgataggcgacagtggcgatgcagcaaggtgatggtgccaagcggcaacgattgtcgcattgtgatggcatgaagggaccctagtgaggagcgagggaaggtgatgctactgacagacaggatcccatcgatagcctgactgtctgtcggtgcaaactctgaggtaaagtagcagtgttgcatgtgggatcctcacgagatgacgagcatgcaatgtggtgccgacagtgggcgggttaggtcacccactaacctatcagtcgatgatcaaaggagtgagcgaggcactagtgggtcttcgctaggggagggaatcaaatgactcaagtggggagtgagcttaatagtggagcaccgaaaaaagctagatcaaaacctagttttctttagatttgacctcactgtaagtgcaatcgacccctaattgagggttttggagatcaaatgacaaaacaaacaaagtttctaacaaagtttgctcctagtgtttcttcaattattgttaagacaggaggagtatcaactctaatgatgaaagaaaaaggaagtgcaaaggacaacatgcatacatcatatggcacctagatatgaatacatgcgacgattgcttaaaattttatactccttgaatcgtaggtttctgaaagtggcctagag

SEQ ID NO: 94855 - DNA, 343 bp, Zea Mays
atgagttctcctgccgatctggtggtgcgtggttgctatgagatggctaatcagctataaggtggtgctgggatgtgacgagatgagatgcgtttgcaggggtacctcctcgcccttatatagatgaccagaggcttatccctttacaagtcttgatcactatctaactctacatgaatcctcttttaacacgacatgcattattgcttaatcggagttcggtcgccgagtttctagcccttcaggtgtgcacaacctctccacgcgatacatcagtgctcctactacgtatatctcggtcgtccggacttcatctccctgggtcgagctcattcggcctagt

SEQ ID NO: 94856 - DNA, 377 bp, Zea Mays
tcggcaagtacgaagcatagtccccgtgcactacagtgcaggatctcaccgacagaagaccatttttatctttctatgtactcccacacgaaagatccttatatgaggctcttccttgagctatatatagaagcaaggaccggcctcagtgggaaagaaaacttttttagagagagaactcacacgtgaacaagtaagggatatagatggctttgactcaatctagaccaccatacacacacactagagactttggagcactttccctctcttgattgtttgtaactctctactacaagtaatttggtgcgagtagtgcaagctagtaaagattggagtagatattctactcgaacaaatataactcttgtatccac

SEQ ID NO: 94857 - DNA, 404 bp, Zea Mays
cccagatgtcagtaaagaatttcccaccaactaagcttgcttcggccgaggggtattttgtatcttcaatagataaggtagcttcggtttgggccaaagttttcacgtgatcacagcctaatttctccaaaatagccacgattccccctggcacctgagaaggcgcagacatccccgcgaccactcaaaacttcttcaaaggcttcaacttcgttgctgatccaatcaattgggccttcaggatcaccccttacgaagttgtcctcgctagagaatgcgccaacattggcgaagctagattttatcttttgcacacattctatggatttttcgtagcatttctctttcgaagaccgaagttctacaactgtcttctcccaataatttttctaatagttactgac

SEQ ID NO: 94858 - DNA, 543 bp, Zea Mays
tgatatcgcctcaacgctggccgcgacaagagaaccgacagagctttagaaggttatcccctagggtgccatggacactcccctcaggcgatcaactgaaggttggtcaaaaagtgacaagcaaaagaaagcgacccaaaagccatactcacctggtcgtaggggattaagtcccacgtcatcgatgcacgggcaatcgaaactgcctcgtcaaagctaccgagcatgcgcacgatggtctccaggctcccgtcgacctaggatgaagccgcctcgataagtcaccactccttcggctccatctcctgtccttcctagcctttgaggttgaagggggaaggtcctcacggcattctctaggagtaggtagtgcagacagcatagaccctagggaggaggaagggacatcgaccagtgatggctggacctagaactttgtggcctccataagcaacgacaccgcccagatggatcacccgccattgcaacgcccaaacatgaaggggccagcgtggcagcaacagatcaatgaccaccacattc

SEQ ID NO: 94859 - DNA, 1427 bp, Zea Mays
cggttttctcgtggccgactccttccctttttatgtctctccctctctcctcttcccttctcagactcattttccagccgccgccaccctcttgttctcctctctctcaccttcacactcctcgtcaaaaactttctcgagccctcactcttttggaagagtggttggagatccgttcttcccggcgtgtttccaccatcttcctccatctcattgggagatcttgaccaaatcttcggatcgaggtattgctctatattatttccttgtactcgatcctacgcgttcttgattatcatatgtatcattcattgggtacattttagtttaagtgattgcaacacttagattatcttcattttgtcacaaacattgttagggattagcgatttgatattgttcgttgtagttgaaccgctcatatgaacggttgaagtgcatgctcaatatcttatgcgtttcttctcaaacgtgtttgatccttgctcatcataggttctatttcttatttcttatttcttagaatggtgcgtcgaatgaacccgtcggtggtcgaatccgactcctcggatgaccaggaaatccacggagataccccacctcgctctcgatccaagcgagggcgcggaagcggcaatgtcatgccgggtgctgaggcctccgggtctcaaagtgctcgcggtcgaacatcccggaatccttccggacggtctcgacctgcgacgaatctgcaggcgtgggagcctacaagtgatgatgatggcgggaaggacgatgaagtcgatcttcccccggcccacgctcctgtgattcgcggcttggtcctccaccgggcagaggctcggcgtgctggcaatgagccagtcactgactttactgccagtggaggctctgctcttctccaggatcttcgtttccaaaatcctgtattgcgtattcgcgatgccaggatcgatggaaatcgcttttggactcttcaccacgtggatttctataattccgtcattctacccaagaagcatcaacccatcctgcatcaacgatatattaactgggaaggttgtgaagcgattggggacccagaaatgtcacaggcactgagggcctgtgaaaggaaacaaatgaagaatatcatgacattccaatatgattggaatgatgaagtgattgctcaattctactccactctctggataaagcttgctgacgaggagagtcattacaactacccctatctgaacttcttcattgaaggtagttggtacaaggtgagctatcgtcgatttgctcacattcttggcttttctgacgatgatatatctggagacaagatcaagattcatgatttccggcagcccacaagagatgaagccaaggatcttcatctgtctgagtctggaaagtattgggagtcgaccaacattcat

SEQ ID NO: 94860 - DNA, 457 bp, Zea Mays
gtacaatcatacaaaatgttgcatccttgaccccgttaaaaaaccttatctcctttataaggaaaaagggtgtcgaagctttgtcttagatgtaatatcttcgaagctcaccaacattacatgacctcgaaatgtcgtttcctaccatgtctttcaatctgtatgagcctggtctgttcgaagctgagaccaaggaggggccttcccacttcacttgcaattttcccactgtatttgggttagctacccttcagagcacgagatgacctggtgatatgctcttgactttcactttcctgtctctccatttaacggtttctgcttgatgcttccttatgtgctcgactgctttgagccttgattcttctattgtatccttcgaaactttttcattgtcctaatcctaagctgaagctataactcttgctgaacccaacttgatttcttcagtggtaac

SEQ ID NO: 94861 - DNA, 411 bp, Zea Mays
gtggtagaggggttagtttagctcgtttttgttaacgggagctaagggttttgagatagggattaaggtgaacgcgctcggtttggagttagaggctgaaattcataaattttgaatttaagatttctctagaaagcctccacttgaatggcttgtttggggtttttaacaaactattttggccaaacttttataacctttattgtagcttagttagtgtatttcaacttttataattggcctaagccatgattccatgtttttcatggtctttttacccatttcttcctctctacttcaacggtctaattagggttgttctagggtttcaacaattttcccttttttgaatgcatgatatgatttaggcatgatccttaagataaaagacttaactgagttttagctcct

SEQ ID NO: 94862 - DNA, 634 bp, Zea Mays
gtcaaattggagtaggatttagtgctcgattgaggatagttactatagtcgatttgtagctggttggttgagctacaactttgttaaagacggattagtaagtattcacatgaaaatttaagatctaggctctgcaaagtggtctgtcaggatgactgaatgaggaactgatggtacaatatcgaaatatctcaggttcagttcatctcgccaccgacgaccatgcgcctggattcgcgccaaacgctacgattcgtgctcaaggaagtaccgattgttgctcggggtagtaaatatcgccgtgtggatgaacttgagccattgttcactccggccgccatgtccgcctgattcacggccgattcggatgaactcaccggagttagccacctatcgaccatgcgccacgtgccttggtgtcttaccacgtcgcagtagcacgtattacacatgtctggtgttcgccggtgagctcgccacgatgaaagccaccaatctcttacgacagtgctctcctctctctctgaccaccaccgcgccatctcaaattcacgggccaccgcttggggatcctataaattgagcatgccgtcggttccgcaaggtagtcaagcaaccaatacatcaacttgtg

SEQ ID NO: 94863 - DNA, 519 bp, Zea Mays
cttttgcccgaagacggacatgatcacttgttttcaacattactgaaatctaaaacatatggattttatgaaaaatatagtctcaatcaaaaatacaagaaactaatttttggtaacaaaatatctatgagctaagtaataggagcctctcaccaaagattcatgggtatgcagccgattttttggccaaaaaaacagccatgaatgtccattttggcaatattgaaggttaacacttatggatttttcataaagaaatggtttccaccaaaaatacaagaaacttattcttttcatggaacaatgtatggggtaagtaataagagcctctcaccaaacatccatgggtatacgatcgatatttttggtcggaaacgaccatttcgaaaaaaaacctaaggctaacatctatggatttttttatgaagtaatagtcaccaccaaaagtccaagaaacttatttctggcacaaaaatatgtgagtggtaaggaataggagtctcttactgaagatcgggc

SEQ ID NO: 94864 - DNA, 321 bp, Zea Mays
tattgtttagaattcagcagtatctaaatttgtagaagtaaaatgcagcgtgatggtttcgagacttcttcatgggacatagaggccacccctggatgagtaactgtatgcgcgccgagtgtgctgcgccagtttaagctagtattaactcaaaccgatcgctcagttagtgtggtttagtggccacctcgagttaagcaagcgcgagcatgttgcaccgtcttaagtcatcgccgacttaagccgattgctccgttagcagggcatagtggtcaccccgagttaagtaagcgtgagcatgttgcaccgtcttaagtcgtc

SEQ ID NO: 94865 - DNA, 302 bp, Zea Mays
taaggattttaaaacaaaattccaatctattatacatcatcctttaactcctcgtgagtttgaatgtgccttggaaatgatgcttgaagaatacaatctgcatgaagatatgactctacgcaagttatatgaaataaggaaagaatggataccatcattttttaaaaatgacttctgtggggtaatggtgtctacacaacgcagtgagagcatgaacagattagtgaagaaatcacatgtagatgcgaacacccctctgcatgagtttgctaaacaaatgatgaaaatgttgcatatcagga

SEQ ID NO: 94866 - DNA, 558 bp, Zea Mays
cgataatcgatgcacatcctcctagtgccatctttcttctccacgaacaggacaggggcggcccaaggcgaggtgcttgtcctaatgtaacctttctctgacagttcctctatttgcttcttgagttcaaccaactctagtccagataccctgtaagctctttttgaaatgggggtggtgccaggaagaagctctatggcaaactcaactttccgctcaggtggcatacctggtaaatcttttgggaacacatctcgaaactctgacacaaccttgatagtctcgagtgaatctgcctccttgctatcaatagccatatgatgacaacctcctttccttggctcaggtgagactaacttagctaccacttcttctcctagtggtgacaccaacttaattgttctcttgtcagctgataattgcttggtacttatctagccaattcatccctaggatgacatctatttcctgagtacccattactatgagattagcgggaaactctatccccttatttccacacttacattcaagcaaacactatcagctcgaactcta

SEQ ID NO: 94867 - DNA, 452 bp, Zea Mays
ggcaacaacagcagcaacatgatggtgacgagcagcgaaacagagggtgaggccatcagcagctctagtatgtactagtgggtagggtagtggcgattgtgacgtggttgttcctatcgattgaggtggtggtccattttatagcccatgcaaacagtcgggcgctgctgcgtctgagtgggccatccccctctcgtttgatcggggacacagagtagagcaaagcaacgtagagcagagcagctagctagcgtctctctcatcactagtagtactatcgtacaaccagcccagcagcagcagactctcatcattattgtaccactaccagcccagcagcagcactgcctaccggctacgctgctgctgcattcccgcatgcttgagcaagttgtagctgtagggagggggaatcacatcacaggagagctaaggtggagcgccgagacgag

SEQ ID NO: 94868 - DNA, 497 bp, Zea Mays
tgatgctgagggtttccatagtaaatgtcagtgctcttagatcttactctgcctagaaccttcatccattggtaagttctgaccacttgattcctggctcgacgcttgctgagttattgtgtgctttgtgcttactatgctatttcattgttgtagagtccttttgctgagtttgtgtctaacccacctatccatggagaaagtagcagttctagccatagagtgtggctttccttggatgagatagaggtcataattgctgcgtaccgagctctgcctgaggaggataagcagacttacatcttgatacagcagcctgccagtgacttcaagattgaggttgttctcgacatgctggctggggagtcttctaagttggcgcgacttgagtcggggtgtggagcccccaagcagtcgagcgctggcaggaagagggcgaataatctcatgagtccatgatgcaaacaatcttgtcagtcaaatgccccagccaagtc

SEQ ID NO: 94869 - DNA, 546 bp, Zea Mays
gagacttcgagtcgctagatgcttgctccttagagggagcagtgacttagcatgtgacaactgcttggggatgacgaattagtagtaagtcaaccttctccatgcacttggttgaggcgttctatggtggtgttgttgctattattggccggatgaccatcctagagcagcatattgagtaggtcaatggctgatgtgggcttgaccataccaaagctaggtggatagcccaccatgccctacgtagatgcatcggcatccaaggtgtcattctgtgctacccatggtggtgtgacatgtgtatgtctctactcaaatgacaatagaggtgggtctgttaccaatcaaatagaatagaatggggtggcacactttgttagaaaaatcgctagagatattatcgtgttgggtaaacacctagaggtggcatgtgatggggtcccaacttttggagaagcagacattagttcttgggggtttattgttatggaaacagaagaaattgtgtgtcgtcttcataagagaacaaccaattgtaatcaccct

SEQ ID NO: 94870 - DNA, 412 bp, Zea Mays
acgatggtgaattttaggttgccttgcgctgtgggcaatggcccgatgatgtctagttcccaacgttgtagtggccaggtatgtgcaataagcttagtaagctgtgaaggggcgcccattcgaggcaagaatttctgacatgctttgcacgaacgggttacccggttggtcgtccacacaatcgtcggtcaatagaaaccttgacgaatgactttagcagcaagggcccttggtcccgaatgtgatccacatatacccttatggacttcacggaggagttctgtgccttcggcttcaattatgcatttcaacatcggttggcttatccccttcttatagagatgttcgttgactttggtgaagtctctgcttctatgttttagtcttttggcttcactttggtcagaggggt

SEQ ID NO: 94871 - DNA, 540 bp, Zea Mays
gcccagtgcaccagccctcgcctccgattagcgacagtagctcgcgaatttcaagtttcccccaaatcggtcgaaacgccgccgtgagacatctcatcgtggctagccctctacaggttagttccagcttctctgcttgatgttctagcctcccttaagtctcatgttgcttgtagacccgtttgattgagctagacctcactgaatcaccaagaacacctcggtttgtctccggttctcactgccgtcatgagcagacgaattctgggccagatttatgcaattaatggagggattagggtcgccaggggtaggaataggtgttgaccgagttagggtgtcagttgttgcgtatcccggctggtacaagttcgccggaggcgtgctcaccgtcgttcaccgtcgtggacctggcgcagtaaagaaacagaaacacaggggcctaagtcggaatgtccgagagacattgaatagtggctaggggttctttaccagttattcgaacaaccggggtgcctgtgcaaaaagccagagcgggcg

SEQ ID NO: 94872 - DNA, 893 bp, Zea Mays
gctgagagggaagaaagaaagggagatgacacgtcggtggtcgccaccgtcgctatggccacccctgcctacgtcgtcgatccgacctcgggtatcggcttggaaggtccattgcatccgtgtacacgcagggagaagaagcaagtcgccgggggactgagcgaggtcttcggtacgtgctcggaactctacggcaagatagcgtcgtgaccgggtctgttgcatcgatgaatcgctgactcgttcgaactcgaggtatgaacccttgaactagtggtagggcctctcggcgggcattactgtacgtacacggcaccagcgttgacgtgtccgatttttccttgctgctgggcgccgccgggcacagtatagccgccctcggccaccaaacttaactcgtcggttccctgttgtttggggctgcgctagctcggcgtcctttggcgttctgcggagaactctcttggagtactgccgtgttcgcaccgtggggtgggggtcgacgtcggggggaagaagggtccctggccggccgatccaaattggaaggtgtggtgcgttctctgattgggaggttgaagataagcgttggcggtccgatttggggtaagcgactgagatgtaggggctgccctgaccgttggattcgtagtggagggcttagatgagggtgcggttggcacttgttgtaccaaatctgggcccttcgactttgatccaatggtctccatagctcaccagtttatattagggcagatttaatcgtggccttagatttcagatcaaacgacctagattgctttatattagaacccgccgtcattttgcaaaagaaaccccaccctcctttagattagaacccgccgtccacaatgggggaatcatgagtcttg

SEQ ID NO: 94873 - DNA, 347 bp, Zea Mays
atttctgggagcagttgcaaaagtcacttcgaaccaccgtgataagaagctcaacgtatcatcctcaaactgacggccaaacggaaagagtgaatcagattcttgaggacatgttgatagcatgtgtgttacactatggtaaggattgggataagtccctttctctggcataattttcttacaataacagctaccaatccagcctaaggatggcacctttcgaggccttgtatgggagaaggtgtagaacaccgctaaattggtcacaagatggagaaagggaaatatttggacctgacctggtgcttgaagccgagggtaaagtcagagtcattaagaagaacttg

SEQ ID NO: 94874 - DNA, 318 bp, Zea Mays
acgatttctagttcgagctagagcagggagtttttgtgcgacaagaactgcatcaccggtaccagcaccccattgttaggacacttcgtcatccgcggggcggggccaccgatgccttctacttgggctaggaggatggttcgtctgagttagaggcaggaggacggttctaaatcatgacttcaaagggccatcatattttccttcatttcttgttgactcgatgttactaaagcaataagcaacctttgcatctctgattatgttgtttttatttcagactggtcttcgaaaaggttctaaatcttttgatgaagc

SEQ ID NO: 94875 - DNA, 724 bp, Zea Mays
aggtgggtgacggcgctgaatatgttgtggagcctcccttgaggaagtggcctccccctcaacagtagcttcaactcctccagtcttagcaggagctggctcgagcggaccccaagtggtggaaggagtggggtcgggtccgttagccgtagtagtggaagcaggctcgactggggcggccggtggagttggttcgagagcaacccaattggcgttgtcgtgctcctcctccataaagatggtctgtcccatctgatctggacctgcaagctcaaagacaggggatggacaaggtgcagtctcatcgaatgtaacctcacaagtctccataatgtggttagtctctaggttaatacacgataagcatgagaatgtaatgcataacccagaaaaactccatcagaagaccaggactcaaacttgtccaaattaccttgttttagcacaaagcatctgcaggcaaataccctgaaatgactgaccttgggtggccgtccaaatcgcaactcataagaagttttgttcagaaaagcccaaacaaagatgtgattggacacattgcaagcagtgttgatcgcttcggcccagaaacgcataggagtcctatgctcatcaagcatcgtcctggccatctcaacaagggtctgatttttgcgttcaacaataccattctgctggggcacatacggagaggaaaactgatgctcgagtcccaaagaagcac

SEQ ID NO: 94876 - DNA, 385 bp, Zea Mays
gttggatctttgtaatgattgtcaccaaggtgtgggcatcccctacaacttgatgcagttattaataaagtcagttgtttagctaggcaacctatttatttccactttcctaattatctgagaaactgtgttggctgtgttgagagccagtgaagatgatcattgttcaatgctatgaagatttccatatatcttttcttatgctgaaagactgtggagtcagatctgatatgtgtgtgctttctatagatgtctgaaaacaggcgcagaggtggaaggcgttctcagcatgagcagtaggcaccccaggaggaggcagctcagcagcatttgcctccgccaccaccgatgactattgagcagatgttcctgatgcaaacccatg

SEQ ID NO: 94877 - DNA, 620 bp, Zea Mays
tcggttgaaggggatattcaactcggttggagctgcttctgaagagattaacccttcgaccgaagacatccccggggcctttgatcatattgaaaatgaagttgaagcccttgatgaagttatcactgggcacaaggatttctgtgccctggtagcgtctcgcggcatagctgctgcattcatggaggctagatgcactcacgctaaggcgattaacaagccaactttcaatctttcagtcagatatagttgatatcccagtcgaagctcgaagcataggaaacagaattattacccaaatttgggctaagggcgggcgtgagctggctggggatgaagcttgaaaactgctcaattcagtatgaaacttttacctgtctttttaccttggttttcgtttattaaatttccgattaccttataccttcatctatctgaaggatggtggcatcgaaggttgttgagccgaagcttgttccgaagggctgaagactcttagaacttccttttgtacctatttgtagaaaacttaggatttcttgcaaaagattgtaaatgaacaaaatattgtacttatttgtgaataccttgtaatataatttcaccttttcgctcctgta

SEQ ID NO: 94878 - DNA, 1058 bp, Zea Mays
cgacgggaagcgggaactactgcttacttaatgcatgggccttcgttgcagccatgcatacctagttacctgccatgcaaacatcagtggtcctcaagatcacatgggatgcgttcaggtggccttgaagctcggccatcacaagcagcggaagggtctggggcctaggcccactaggctgcataggcccgacaggaagggaagaggttacaaccctcctgcacaagacaacacaacttgggtgacgcctaggatcgacctaccctacagttaggagaggacgaccaattaagatcagagcatcaggtacatcactctaaggagagggcccaggtcttctagcccgagggccagcccttaacttcccattcgagggacccgcaggaggaaaggatagggagataacttccccacgagtgctcaagccagtcatcttgcaaaaggagccattctgagagaataatgaaataagaagaggtcaggaagatttggaagttgcctacccttatcatggcgggcgaattttgagccagccttgatgagcgcactctacggggtggcacttgccacgatccatggtcggccgaacatctcgtagaggactcaggcagggcaacttttcgacaaagagtctctcttggagtgcaaaaaggcatatgccaaacccgaataaaagaagggcaaaagggcccctacttataatcatcggattgatggtgtgccccacgaatcttacccatcttttaaaaagtaaatactgagaagttcaaaacaggtgtcgcccgaacaaagaaaagcgaccaaggggagacattctcccctcaggggcttgggggctactattggagatcagatccctaggtccctagggtccacgagttagaaggagggtgaaggaagagtccatctcggaaagacctgccctcgcgtaaccttgagggtcgggcatggcagagctggaaggggtcggtcaggcgaaccgagaggaaccactcgagtggattctgcacccgacccaagtactacccccgtcataaatggctgaccgcattaaatat

SEQ ID NO: 94879 - DNA, 463 bp, Zea Mays
gtctggtgcactctataaatattgtctgtcaccttctaagttagtgtcaggcggtcgagtggtgcatcgaactgacactgtaggggtctggtgcaccacccatagtgcagttttcagcccacttcttacaatggctatttcagtggttaggggttataaataccccaaccagcacattgaacacatatgatctacaccaaccaaccatacattcaaagcaacatctcacatgcattcaaagttacacaagcgccacatccgatcgatttgagtttgagagacttagtgccttgtgcatttgagtgttgaaagttcttgtgctcttgttcttggttttctttctcattcccaaccttgtcctttcacttgtaaagctagcaagagatatctgagtgtatggtgattcttgagtgacttagtgtcctatagaaacaagaaaaaacttgatcggtctccatgactg

SEQ ID NO: 94880 - DNA, 284 bp, Zea Mays
cctcgatgtgcattttgtgatgaaaccacgtgtcgcctcgattcccaccggaactgtaccgtcggatttgaggcctgaacctggtgaaaccagcaaactgtaacgctgggtgattttgagactcaaccgctgaaacatccacgtagcgtactccatatgtatccccaaccaagacacgtgtcccgccgatccacaaccacatcggcaacaatggtccgctcctccacgtcctcgtgcccgtcagtgtccccatgtgtcagccaccatagatagtctctcagctt

SEQ ID NO: 94881 - DNA, 348 bp, Zea Mays
gttaagtagtgagcgccgctggctgtactatttgaattgcggccggtgtttcgattccatgcaggattccgttgctttcccctcgcgtgtccgtcgtgttgacgatgcgttccgtatctcgcgccaggttctgcaccacgggcctgcccagcgacgtcgtcttcgaggtgcacgacatgaccttccacctccacaaggtgagttcttgggctgctctagtcgtcgggggctgcgtcttgctcgatgaaattccgctgaggcgtttcccgcgcagttcccgctcatgtccaagagcctcaagatccaccgcatgctcagcgagcaggaggaccagcgtccgacgcgggg

SEQ ID NO: 94882 - DNA, 811 bp, Zea Mays
caaagcagccgccagaggcgaggccttgccctccgatgtgttctaccacgtcatcggcacgccaaccgtccaaagtccagagggtctacaaataaccaatgacactgagggccatcgcatagtcaacctcatcatgaccgaagattggcaagccccaatcatcctgttcctgcagggatattaccatccaagcgacatcaacgaggccaagcgcctcaagcaccaaagctgggacttcgcaatcattgagggccaactttacaagaagggggtcagtcaacccatgtttaaatgtgtcaccgaaaccgaaggcgtctagatcctgcgcgaagtccatagcggaacttgtggctctcactcggggcctagggccctcgctgccaaggtgatccaccaagggttctactggcccgctataatctgcgtcgcgaatcgagtcatgaggtcgtgcgaagcctgccagaagttttctccccgatcaagcaacccttcgcaatacacaaagctgattgcccacacatggccacttcaacgctgggggctagatattgttgggccactgcccatggcccaagggaacctcaagttcaccttcgtcaccatcgagtattttaccaagtggatcgaggcaagggtagtatccacaataacatcgaagactgcccagaagttcttctggcaaaccattgtttgccgattcggagtcccgtccgagctcacagttgacaatggcaaacagtttgacagccaggatttcagggacttctgcttctccatcggcaccaagcttgccttcgcctcagtatatcac

SEQ ID NO: 94883 - DNA, 522 bp, Zea Mays
gcccttcgacccatattgtttatgttaatcttgcgcacaactttgaacaacttattactacggcaatccagtaatcctttcaaccgtaagaaatttcatccgaaaagaaacgatgaatccccagttcacaaatttccgcggatctggtctgccttttagggttacacaattgtaaggtagtcacccgctgaatgtccttcatacttggtcgaactaaatttggttgtgcttagtattagggccagaggttcttcaccttccattattttgtaatccctacactacggactagcttccatactgccttcaagtgtagtcttctggaattaattttggatgaacactgtccacaacaacagctcattttagcaaatgtactagagtgattcatcgtagtgtgccccacaatgtgttacttcatccaactcagtgtaatgttcattgtttattatactttttaaaattctcatcgacataatcagatggggcattacctgtcaagttagtatgcctcatgttcat

SEQ ID NO: 94884 - DNA, 395 bp, Zea Mays
ggcgttcgtcgttgaccaccatgtgctccgccatggtgtgctcggttggggaataagagattagagccatcgatcggctagcaaccggttaggatcagtgctgggagtgggggttcttcgggccgttgatggacgatgcagtggccactatcacataccgatttgttttaagtgaagacagatcctggcgcttgttttctgatcggacggattagatttaaaatttacttcgacagattgtgaccatagatcttggatccaagagacgcgagagggtaccagttcgggataaattgatctaatctagaccgtccggggatgatcggatggataggagcagccaataccctttcatttagacattttataaaagagcctatgtattttcactgaat

SEQ ID NO: 94885 - DNA, 408 bp, Zea Mays
tggccaacccagtcatcgtgccaaaggcaaacgggaagcttcggatgtgcatcgactacaccagcctgaataaggcatgtcccaaggacccgtatccactgccacgtatagatcagatcgtggactctacctcggggtgcgaccttttgtccttcttggatgcctactccggtttccatcaaatcaggatgtctagggaggataggaagcataccgcttttgtgacggtggatgggctgtactgttatgttgtaatgccctacagtctaaaaaatgccttgccaacatttgttcgggcgatgagtaagacctttggggacctgattcgggacaaggtggaaatctacgtcgatgacatcgcggtcaagactagagaggggtcgactatagtggaagacctgaccctag

SEQ ID NO: 94886 - DNA, 672 bp, Zea Mays
tctttgcatccctaatgtaaggaattttttttcgctccttttggtccaaccccggcatctgtggatgacccaaacgcctccacgtcacccgtggaaagattccgtaacgtccaagagctggctgtctgatcatgtggctgcaaaagttatctcaaagtcagcaaatccatgcctgcattccatggcctgcgtggccaaccaacgagctggatgataaagcatcagttcgtatagtagcataggggagaacaacaaaaaagtcaaatccctttttccaaggaaattggagatggtgagatccttatatccccccttagttccattggtgtttacacgcttttacctgtcatcacagaatcggtatctcgccaatttgaaacgctttcaccatcaacgcctgcctcacaacacaacataagttgcatacacatttggaaaatcaaattagattgggacaacatgacgtgttttggactaattgcatcatcacacctccataaacacaaaaacaactcaacctacgaggccttgtaaatcaggtcgagaaaatttttgaactcctacctcagcgtacatattggtatcggaccaaacctaaaatcttaaagtgtgctacctatcctatgaatacatagttgtacattactccctccgttcttttctatttgacgc

SEQ ID NO: 94887 - DNA, 601 bp, Zea Mays
ctaagaaaacattttactagatcatgaatgctcttggaaaaactactttcacctcccactaagatttccccatggttctcttcagtttactaaaaatctgttagccagtttgaaaaatcggttcaaccggactaaaaactggctcaactggtttttgcactgttaactttctgacctaccagtctgccagccagtcctgtcagaaaaagtcgtgtgtagacttttggaaaatcggttggaccgatttttgggccggttcaaccggatttggaaccgctccactctccggctgagtcagccagtggaccgagaaccctctggtggaaaccggttcaactggtttcagaaccgggttcaacctgttttcagtctagtttccccaacgtccaccagcttttgggggctcctttatatacccctcacactctctctcttcattcacttctgtcctctccacgaattcttgactgaccaactctcaaacaagagcattcaatccaccactcttacccaaaatcgcatctccttcaattgattgaaggacccttggtgtgaggtgaagtcggtctaactcgttgttgatttcatctccattctccct

SEQ ID NO: 94888 - DNA, 632 bp, Zea Mays
ctctaaaattgatttgaactctgattaccatcagttgaggattcatgaggaggatattgagaagacaactttttgcaccaggtatgggcattttgagttcatagtcatgtcttttggcttaattaatccccctgctgcttttatggaagcaatgaataggatgttgcatgagttcatggatgactttgtggtcgtgtttctggatgatattctgatttattcaaaaacggaggaagagcagagcagcatctccgtctcgttttgggtgctcttaggaagaatcagttctatggcaaattgaataagtgtgctttttggctatctgaagttgctttcctaggtcatgtgattaatcagcatggcattgcggttgaccccaagaatgtcgctgttgtggtggagtggaagagaccttctagtgtctcagaaatccaaagtttcttggggcttgccgggtattatcggcgttttgtgccaaatttttccagcattgctaagcctttggctagactctttgagaagggtgttctttttgtctggtccaacgattgcgaggtcagatatcaggcactgaagaacaagttggtgaacgcccctatcttagccttgcctgagaatggtaagcgtttcat

SEQ ID NO: 94889 - DNA, 598 bp, Zea Mays
ccactagacacatccgccgtcgacgacctgcctcctcgaccaggtacctcaccgccgcccccttacctctcatcgcgttgatgagctgcgtcgtcgtcgacttcactcgccgcatcccgctctatctcattgccatccgcatttctctcgccccttccacctaacacgccccatccacatttctcttgccaacccctaaaccctaaccatcgttggatttgggtcatcgccgacgaccttgatggtgaacacaaggaggcaaaacagtcagaaaggtccacaataagaagaaggtatcttttggttcactcagcctaattcttagttgctaactattaccaagctggatctaaccaaacctagtgatgctagatacatcattcattcatcgacacgcatgtgagtgcatcaccgtgtttataaaaatggcatggaaaggccaatgatgtagcattccacacactaggaaagctggtccccatccataactattgtgagagacacgattaatctaacatgcacgcgaaagaaatcctcaacatagggtgtgtaattgattgattgcttccattggcttttgcttgtattagaccttatg

SEQ ID NO: 94890 - DNA, 346 bp, Zea Mays
ccttgagtaggccccaagcagctcatcacttgttgcttctatggcatccaaccaatcattattcggctcgtcaaaccgatccctaaaccgaaatgtgtacttcagatagattagaccactttggccggagccagcggcagcctcctttgacatttcccatccactcgcaaggggccatactctgtaagcaatatgcgcttgaatcaaatcccttgtgtcgatgtaggtgcatacggtattgaaagccgtctggcacgcttgcacatcatttccaagtgcgactgaaggtcttctgatgccgaagcgtgaccatataggacgttgaatgatgccccttatatcctct

SEQ ID NO: 94891 - DNA, 282 bp, Zea Mays
caggattccaccgccgtcgatattccacctgtcgtcgtggatcgtcgtcccctctgcgtgcattgtggtaagagacccaagatccgttatgctttgtttctatctgcgcatagcacattctggggaaggaatttatcaaccgtagggccggttctgggttcgccggtagagggagcatcgcgcggcagacccttgccgtcgactgacctgggcggcagaggaagaaagggcctggaccgttgatacttccttgggcggccgagattagaagatagaccccca

SEQ ID NO: 94892 - DNA, 735 bp, Zea Mays
gcacaacctgctgaggcggaagccggaccatctcacgttgcgggacgtgcgctgggtggggagttagacctttttgagccccctccttctttgaggttggttgatgactggactcccacacctgacgatgaggccgccaagactaatggaaagcaggaataatggtgtaatagaagtaaaagtagagtagtgtattgtagggtgtactgttgtataataggttgaactcttgtataatgggtaatgtatcctgttatgtaatatcgagtctgtatcattactttttatagtaatgtaaaatggaaggtttctttggcgcattatgtttacttcaaatattctttgccacagatgccgaccaggactcgaggacaggacgcagccggaacttctgggggaagggatgttaccccaaacccacctccggttcctcccacgttagccgaggcgattgccgccttggtgaatgccaccgcagacaatacctgcttccttagggaaatggcgggtcagcagcaattccagcaacaggcaggaagaggttatccgcaaggcccccgtgaaaccacctatctggatttctcggaaacccgtccacccctattcgtcaaagctgaagatcccctagaagctgatgagtgaattcgggttattgagcaaaagtttggtcttctccgttgctcagagaccagaagccgttatttgcagcacaacaactccgtggtcctgccagta

SEQ ID NO: 94893 - DNA, 349 bp, Zea Mays
cgttgggtcttcgcttcgattgccaagaggccttggatagtggctcaggacatgactgtgcgtagcaacgaatgggccatgccctctcaggggtctgctcagattagacatatctcgatcatcaacgatgtcttcagaccttcgttgttgggtggggcctgcaagcctcatcatacgctggagtagcccccactattctttgatgtttgcaccatctatgggtgtcaccttagtggtcccctaggcccgaggacgcccttcgatcccagcacttgcagacatgttcttacttgtggttagcagatgctaacgattaagagcgatcaaggtctagtttggccctcgtccc

SEQ ID NO: 94894 - DNA, 762 bp, Zea Mays
ccagcacctgacttggtatggctctttcctctgctatccctctatggctttatctctctgatttgtgtctttgtgcatgcttcagtagttcagtgcttgattgcttctataggtggacattgcaagtgatgagcaatagtcaatgaacacaactgaaacaggttcttctcaggcatctgaatatgatcccatgacagatccaaaacgaaggccaaaaggtgatgatccttgttggaagtacgggtattaggatgtgattggcactcgaaattggatgtggtgctcgttatgtaagaaaaggatatctggtgggagtaagagatacaaggaacatcttgcaggaggatatggtgatgtggtacagtgtaacagaaccaaagtcatcatgaaggagatggatgctgctttgaagaaaaataataggggccagcctattctagtggaggaggatgaagcaacaaatgatgtgagtgtggaggggggtcagaggagcgagagcaagcctgtggaaagttcaggggcagcagctaaaagaaggcaaagtgccttgtctttcaacgttccagctcattgatcaattagtatcaagatccatatgacaccacatgaggtcgtagagcaaatacactcaaagggaccttatcaaacaagcatgcaatcttatatgagaaagacagaagaaagagcagctgtaaatcttgtgatagccaagttgttttatgagtgtggaattctcttcaatgttgcaaactcacgacaatt

SEQ ID NO: 94895 - DNA, 428 bp, Zea Mays
gcaagaaatgagcggtcttggtcaacctatccacaataacccaaatagaatcatggtgccgggaggtattgggcaatcccacgatgaaatccatgcaaatgtcctcccatttccaagatggtatgggaaggggttgcaaagggcctgttaccttcaaatgactggccttaattctctagcaagtgtcacattcggatatatacttggcaattaccctcttcattctggtccaccagtataaggatctgagatcatgatacatcttttgctgcccgagtgcatggagaattttgaaaggtgagcctcatccaatatcttctttctgagctcagggtccttgggaacaaccaatcgatctccaaaccataggattcctttgttgtcctgccggaagcatttgtatttttctgctctctgcttgatcattt

SEQ ID NO: 94896 - DNA, 431 bp, Zea Mays
cttatgtatgtgtatatgttggattgatataaaacagggaaaactctgccaaaattttgtgaaaactgtgaatatgtcatctagccttttcagaactattacatagccttttcagaagcatcaatatcttatattatgagtatggcatctagccttttcagatccatttcgtagccttttcaggagtaataatatcctacaatgtcgctgttacatatagccttttcagagcctttacatagcctttttagaagcatcaatatcctatattatgagtatcacatgtagccttttcagatccatttcgtagccttctcagcagcaataatatcgtttgttgtcgttgttatatctagccttttcagaacctgtacatagcctttttagagtgtgacttgtagcctattcatagcctgtacataacctttttc

SEQ ID NO: 94897 - DNA, 553 bp, Zea Mays
aacagtgaactcatacaacccatacttgctaatgaatgtcgtcttcggaatgtctgaaggtcgaatcctaagctaatgataacctgacctcagatctatctttgagaacacgctggctcttctcaactagtcgaacagatcttctattctgggcaaggggtacttgttcttgattgtgacctcatttagagctcgataatcgatgcacatcctcctagtgccatctttcttctccacaaacaggacaggggcgacccgaggcgaggtgcttggccttatataacctttctctgacagctcatcgatctgcttcttaagttcaaccaactctggtccagataccctataagatcttctagaaatgggggcggtgccaggcagaagctctatggcaaactcaactttccgctcaggtggcatacctggtaaatccttcaggaacacatccggaaactctgacacaactttgatagtctcgatggatctgcctccttgctatcaatagccatctaatgacaacctcctttccttggctcaggtgagactaacttag

SEQ ID NO: 94898 - DNA, 544 bp, Zea Mays
gttttgtttagtagttcctaatagtgtgagttcctcatcactagttggtgctctagttttagcgtgacattagagtagtatcatatagtgcaagttggtgcttatactatagggtaccttggattgtggctagctctttagatagttagtggtatgtggtgacaaccctgtccattctttgtattccaccatgttggatctagttattaaatcataggtctcatggcactttatcctaatcaacctttttttgggtgaagttcgggccagtccgccccaaagcactattatggattatttggctatatcttgacaagcttgtatgaccattggtttagctcatgttgtgctagattagaagtaacataggattcatatactcactccatgtcccactagctacaacacttatttacttatctatactttatcatctctctccctttttactatatcagtattacccatgtttaagttggtgattgttcatagtcagccacaaactctatttacaaactaccttcgtcttatactttccctaggc

SEQ ID NO: 94899 - DNA, 445 bp, Zea Mays
aacttcgcgtatcgcaaggatacgaaggctccggtccttagttatcgcaccaagtggccaactggctggaaaagtgagtggttttatatcaaggccgatgagaaggagagagagaagctgaagacactggtcatgagcccactgagtttaagtttcgggatgactagacccttgtgcaacatgaagccagggttaccatgtcagctggctgtagcagaatttagagtggtggctgaacatattagcaccagggatctagtgcaagaatacatggtgaacagggtatctccaacattgagtgaatggagtatgccgaagctgaaaggaacaaagaagaagggtgaacttgttcgattgccctatcgcttcaagtttgagaaacaattcaaagagccctgccaagaatggctagagatgattgagactatgtgcaacgaaatttttg

SEQ ID NO: 94900 - DNA, 493 bp, Zea Mays
agttagttttgtctcagctcgcgtttctagagcttcgacaatttttcctagagtagagcttgaactctttatcgtctccagtacatctaatacattgaccatccttttcctttttggggtcgctataagatctttttgtgccttcggcactgttacttctgccgaaggacttagaactaatattttgtcttcgactctaggttcttcaattttgttaaccttcggcattgtagccggttcttcattcctctgtgtgagggcagattcttcggctttagtagccgaagaggtctcgccgccaaattcgggcactacggtcggttcaatatatcgcggccggtgagtaaggaccttcacctttttcctcttcggtgcgggctcgcttggagcagctggagcagcatccttcccggaagttgcactctttctcttctgcccccgcgacgtatagcggtaatcagggtacataaacctaatagcatcgaaaactcta

SEQ ID NO: 94901 - DNA, 641 bp, Zea Mays
gatccagctacaaatcgaatgtggcaactaccctcaatcgagcaataaatcttattctgatttggctccaaagttcatcctatgtcactgaatatcaaagttcaggtttcaggctgactgacagcacgactttgagcttgtttttctccaaactttgtatgaaatcaaagctcagttacttaagcaaagttgttctcctatgatggctctacaaatttgctatattgtccctaggcaaattctttgaatttctagagctacagagctctaaagtcaaccctgtccaactgttttcagacttagtcttataagaggaattgaatggctttttgcaaataagcccaattcacatcttttggcttgtaaatcttcaaacatgtgaaccatttgacatgaggtaccctatttccatgatttttgcacttaggtccaaaaatgtgaaaattttacatataacccccctagggtttcattccagggttctatttagtgtttctggctcttctagggtttggatgccacttaagtctattaatggtgacattttatgatcattactaataagttttgaagctttctcttgtttaggctttgtttattcttttaggcctagtttagggttaagtaccttactctagggt

SEQ ID NO: 94902 - DNA, 337 bp, Zea Mays
caacctgttcgcttggctctaatccgtactggtttctactgcttttataatgtttgtcttctatggattactccaaacggctggctttaatccaaagctaatatgttgttagtattgtcgaatgcttggacttgaaagtgaaggagagtaaggctccaaatctctctactattttacttaaagacataggctatacttctcacttgtggaaacattgcaaatgaataaattactcatcgaacatagtatcgttgcttctcatgtcgagctgccatccattgtgcccaatcttgaaactcctaaggttccttcccctgatatctttgttagagaaccc

SEQ ID NO: 94903 - DNA, 696 bp, Zea Mays
aggcgatatgatcccggtcgagtgacttctgctactatgaatggtccttcccatagaggtgacaatttatgccgtccctcccccgttagaattcggcggaggacgagatctcccactgcgaaggatcgacgccgtatggccttatcatgatagcgcctcagagtttgctggtatcgcgctgattgaatcaccatattcagtcgctcttcttcgagtacgtcaacatcttctagcctagtagcttcagcttcagcttctgctatgtcatcaaagattaaccttggtgccccgaacttgagatcggcaggtagcactgcctccgaaccataaaccataaagaagggggtatttccatgcagagctcggctaggttgagttctcaggctctagactacgtatggcagttctctgatccactttcctacgaatttctcattcttgtcgaagactttctttctgagtgcttctaatatcatcccgttagctctttctacttgcccgttggcccttggatgtgccaccgaggcatatttgatctgaatgctcttttgctcgcagaaatcgaagaattccgaactggtgaagttggatcctaggtcggttatgatgctattcggtatcccgaacctaaatattatatcttgtatgaattccactgccttagctgaagttagagaagcaatgggtttgaactct

SEQ ID NO: 94904 - DNA, 382 bp, Zea Mays
ggaaataggggcggtgcctgggataagctctatggcaaattcaactttcctttcaggtggcagtcctggtaactcctcagggaatacatcaaggaattctgacacaatcctaattgtctcaatcggattggactccttgtcatctactgataagtggtgacaggctccttcttctagttcaggtaagtacagcttggttaccacttcctttctggatggggacaccaacttggttgtcctcttgtcacaactaacagtggcttgatttctgtgtagccaattcatccctaggatgacatctaacccttgagttcccataactactaggctagcggggaagtctatcccccttatttcaatccttagattcggacaaatccaa

SEQ ID NO: 94905 - DNA, 318 bp, Zea Mays
ccctcggggtttcttacggctagtgtgctgactatatgaaaaaatacatcggatggcaagggtttgcctgtcgctgctgctttggctagtgtgtcggcttcttcgatcttgttccactcaatatgttgtcatgtgaaacctttgaattgtttttctaggcttcgaatagaagcaagatactgcgttagtaatggctctttggtggagtagtctttttcgatctggccagtgacgaccttggagccagttttgataatgcaggtgctcactctgagggctcgcagtttgcgaagtcctaagatgactgcttcgtattca

SEQ ID NO: 94906 - DNA, 471 bp, Zea Mays
taagggcagacctataccagggcttggtggatagcatgttagatggagatatcagagcagaaaaggttgggaagcgaactgtgctgtctacatcatttattggcggtccttgtgacatgaaacatcggtatatggatgctatggctctggtgcggaagtttggtaaaccgaacatctttcttaccatgacatgtaaccccaactgggatgagataaggagggagcttctccctaggcaaacaccgcaagattgtcccgatcttgtagtgcgtgtctttcatgcgaagctacaggagttaaagcataggctgactaaacaggatattctcggtaaggtccgggcctacgtctatgtcgtggagtttcaaaagcggggtttgccacatgcccattttctactcatcatgcagaggaagtacaagctaacgtgccctgagcagtatgaccttttgatctcagccaagatcccac

SEQ ID NO: 94907 - DNA, 406 bp, Zea Mays
cgaatcatacacaacttgaaagaggcacaagcttggcaaaagaattatggataagagacgacaacctctggcctttcaagttaatgatcatgtatacctgaaagtgtcaccaatgaagggtgtgaaccgttttggggtaaaagggaaactggcacctcggtatattggcccatttcttattcttgaacgatacggactcgtggcttaccgactccaactgctagaaacactgtctgcagtgcacaatgtgttccatgtatatcaattaaagaagtgcctttgggttcctgatcgaaccattgatgtggtagatattaccttggaaccaaacttaacatattcagaacatcctattcgagtcttggatcagaaagataggatcacccgaaaaagaactctaaaattc

SEQ ID NO: 94908 - DNA, 654 bp, Zea Mays
aagcccttgtcatatggtgcacgaaccatgactggaggaagcaaatcaatctcaaggtttactactgcatcctcagcgataaaaggttcaactggaggcttgcaatccaatattcaaggaaattctagtggaaagaacggtgttgccccaaacacgagttataaaccagcagcatccacttcaacatcagtgggttcaacagccaagagtagtggtattcagtgcttcaagtgtggaggtcatggtcatgtcataaaggagtgtccaaataatcgtgtgatccttgtgactaatgatggagaatatacatcagctagtgaagaggaagttgaagcaggaaatgaagatgacattgataaatctgaagaacatacaggatgtgaatttgagcatggtactactcttgtggttacacaaatcttgagtgttcaaatgaaagaagctgaaattggacagcgacataatctttttcaaacacgagcaaaagtgcaagacaaagtagtaaaggtgatcattgatggagggagctgccataatcttgcaagtcgtgagatggttgaaaagcttggtttgaagttacagcgacaccctcatccatatcatgtccaatggctgaatgaatcgggagatatcaagattggttataaagtgaaa

SEQ ID NO: 94909 - DNA, 284 bp, Zea Mays
tcagggcaaacaccacatctttgatctcttccaaggaaaaaggactggtaagaaggtttctatcaccctcctcaagttgtttcatatccaaatcagtcaaagaaatattcgaaccttgggaagggccgaagagatctctgtagaaagaagtcgccagctgattaatgccgtgatcatcatgggccacgatatcaccatgagaaagagttaaaattttaagtttcctctttttgtgtttggccagcaaatgaaaatacttagaattctcatcaccctctaataag

SEQ ID NO: 94910 - DNA, 386 bp, Zea Mays
gctaggaggccatctcctttcccccgaccgatggagcggtggcgcggtttgccagcgaaacccatttctggcccagatgccccgaactcgaatcagaccggtgctacatgaaatagattcaatggtgaatcgatgggtgaagttcttactgggaatcggatgctggtgtgtgccgtccacgacgcggggtggacgggtgatgcttgttgaactttggcgagcaattcgcatcttcaccgccaccatccgagcgtgcctccgccacaaagatgctcggttcgatcctacgatgctcctaagccacatgtccctgcagaatcgatggtgcacttggatttcgccgcggcgccgaccatttccatctcggtctctctcttcgctcttct

SEQ ID NO: 94911 - DNA, 928 bp, Zea Mays
ttatgagctggcatgggacaaccatcgaaggaatcaacagagtgattagtgggaaccccaatgataaaccagctacgttattcttcctttccaaaactttaaattttgagttttaatattttaatttaaaagggtgttcatcaaaacatgtcgccgcaccattcctctctcccgtggtacccacaacggaaagggagcctaggacaacgtaacccgaggcccctgaggagacaggtgagcacggtgaccctgcttacgtctccatgaaaacagacctaagggatggacaacgcaaacaaaaggtccccttgaggaaactggttggactgctaagcttacgcctcgaaggctacagcgacggtcaccagtggaatcgggagtcctaggaagttgtgcacgcccgttccaataggacgatcgctaacgaggatgaaacaagacatggagcgcgaaaccctaacaacatttattaatttattctcattcttacaaatctttagggaaaattgaccctcgttatttcttgttaggaaacacaaaatatgtataactgtctgccaggatccggtatcaaatacgtaagggtttatataagaatcagtgagaaaaatttgtgtaatgtgaatagcaagtgtacttgttgtggatgtatccttaacgctgcaatccttaatagaggccaagtaccgattgcaattcctcttctagtgaccaagttctttgcggtaaaagcactcggcatctgcagttggtctagccttaggcttttggtttggcttggatactgtatcttttgccttgcccttcttcttttgagagttacccttctcaaagttgttttgttttcgaccgccatcacatgttcgctgctgcaagcgcttctctttatgttaccctatgttgtttttagcatgccacgtagttcatt

SEQ ID NO: 94912 - DNA, 715 bp, Zea Mays
tggggatggaaagttgtactcatacggagtttgctaccggtcatcttaaagagttccctccataaatgagtagtaaaaaaccgagtcttgatcgctgacaatggaggaaggtatcccatggaggcttacaactgcttcaaagaaagctctagcaattgttgctgctgtgtaggggtgactgagggcaatgaaatgggtgtatttcgagaacctgtccactattgtcaggatcacagatttgccatgaactcatggcaagccttccacgaagtccatggggatatcagcccaaatctgagaagggacatcaagtggttgtaatagtccagtaggatggaggttttctgttttgttgcgctgacatgttgcacatgcacgtatgaagtccttaactctggctttgtcctgtggaatgtagaacttcggccctcaatttggtcaatgttttctggatgccttcatgccccgcattatgtatagcccacaagagctctcgtagacattctgaagatgggggcacatatatgcgacgaccactgcaggatgaggccgtcgtgaactcgccacgaggctgctagtgtgccagcaacaatttggtcatgcagagagctgcattctgggtcctgtgtggtggcctggcggagttcctcataaaaggcaaatgttgttcctgaaattgctgcaatagctgaatcatctgtattgcgacgggaga

SEQ ID NO: 94913 - DNA, 863 bp, Zea Mays
cccgctcaaggatagtatcaagggatggcgcttggagtggtttattgttgagaaccacggaaattctctccccctcggtcagggaggcagccggatgttcgcactccgagttggaccgagtcccccacggatcaggaggtggctgaggcaggggctttgctggctgaagttggactgctgaaggagaggggtctgactgcagaggctgtggttgctgattttgtcttcaagaacattcaaccgttgaaggacagggcatacccgacttatctgtaccgaggtctagctgactcaacccgggtcactaacagaagaattcctgctgtagacttagtgaaccagcttgaaatgattcttagaggcaaggtatcaaatgttggtgccccagtggcatactcggcctggaacctgcctccttccaaggcctttactcattttgtgtcgaatccacctgtcgctgatggcggtttgggccttagagtgcgaccctctgccgaagaagttagcgctttggttgcttcgctcggagaaattcctgatgatgaacggcaggtccactttgaggtgcctttggatcctagtgatgcagagataagtgctatgcttgatatgctggctgaggattcttctgatgctgctcctgctgggacattggtggtggcgcctctcccggaagctggtacaaccttggatattcagagatctgtaagtgttcgcccgaaacgcccttgccgagccaatcaacttgattctactgctgatgagcagaaaaagaaaaagagacgtcttcggcgagtatctagtttggatcgagacgttggtccttcagttcctgctgctgaggaagtacctgtgcctgaatt

SEQ ID NO: 94914 - DNA, 397 bp, Zea Mays
ggacattgatctcagatcctaaggctctagatgcgtaccccttcttcacctaatcaggactcttgatctttgattgagcggccagggcgcatccgagttacaccaccttgacatttttccaatggagccccttgtcttttgcgtaatcaacccgccatccaccgtagttcgattaatattgcagagtgacctttttctttacaaataggaccctgcgttcttagaaaatgatggctgcagtcaagaaaattcataaaatgaatatagaaaatattttatgtatgaaaataattctctaaacttcgaaaaatcatatctcctttgttttagctctgaatcgatccgttcaagttgtgttagcttcataaaaaatattctctgctcagtaacaacatta

SEQ ID NO: 94915 - DNA, 811 bp, Zea Mays
gattcatcatcatcaatataaacataaaaatcaagaactaaaacaaatactattttgaaacggatagagtattcgataagtaattgagacagtttaagaatataaacgagactagtcgataactcgataatgcatcgctttttacgtatttgtgtctataatagataggtttaatataaaaatgctatcgtccagtggcgaaggggccctctatttttgggggcctggtgcggccgcaccctcggcacccccacagggacgcgcgcgggttttcggtgtgttcggtgtcggaattgaatagagagttaggcttgtattgagcataccattgcatgcagatcgagctaccccccatcaccttggaacgacttgaggtaccagaacgtcgtgcgatggggcgtcttcattctggtcgggtacggtgttccctcagccgcgcgttcggtgtattgggtgttcgaattgaagagagagtttaattaggtggggcgatcgagttaggctggacactggagtttcctagctaggccggcgtagaggcatctgtgctgtgatcgagttaggcagcactacctgaatacaatattctccgtcgcgcctactcctcctcctcctcttcttcttcttcctccttcctccttcgtcttgccccttccccacgttcacgtcacacacaccgcacacccgtattaatagctgcagcgtggccgatgcaacgcgcaaccaccggatcatgcagagacagacggcacagacagcacgcagccggaccgatagtacgatccatcacgtcggtgcacgcgcaataagc

SEQ ID NO: 94916 - DNA, 734 bp, Zea Mays
gaattcggatctgctccggcctggggttccaccgcgactttgaatctagggttcgctcccgcgtcgtcgatccatccgcagtgatttctgagagcatcgagttggtcgcatccgccacactcgtcgaagcagaagacgaatcttcgatcgtcttctgggtcaccttgtcctccttcgctccggttcctggtctccacctctggcaatcacttggatccgtcagcaaacccttgaccgcgatctccatcctctccatagcagactgcatcgagtccatacaacgatgaatctctcgatttccttcctcaattttcgccatcagctgcgccatcggatcttcgaggatcggccacgccatggttccaattctcgcctgaaattgattcgcgacagtgtggaagaactagctccgaataccaaatgttaggatccaggcactctcgactcaattttactccggaacgatcaccacggatcaccggccgccaacaaacttacagttcagacttgtgttctgtctattcctctcagttcgccgccaccttctcctagtgtaagccaatacttcttattacagtctgttacaaggccacttgggccaaataaacttagccactcacagctcgggccatatcgctctcttactccttctgagcccgtcgaggcctgcttctggcttcacatccttctcctttcccgcactggtattcttcgcttcttccgcgtcctggttg

SEQ ID NO: 94917 - DNA, 526 bp, Zea Mays
cagtggatcaagatgttaatgttccctgatgggtatgcagctaaccttagtaggggtgaacttatctactctgcgagtcttagggatgaagagtcatgacttccacatatggattgaatgaattcttccggcgatggttcgaggctatgtccctgagcatgtctggctagcgcttgcagagttgagctatttctttcgccagctttgtgcaaaagagttagctcggaccatgattgcagacttggaaaggatggcatccgtgttactgtgtaagctggagaagatctttccacccggcttcttcaatccgatgcagcatttgattcttcatctcccgtatgaggcacgaatggggggccgtgcagggacgttggtgctatccaatcgagagatgtctaaagactatccgaaagaaatgtagaaataaatgcaaaatcgaggcttccattgcagaggcatacatactggaggaggtgtcaaacttcacaacaacttactatggtgacaaactgccgagtgtgcataa

SEQ ID NO: 94918 - DNA, 428 bp, Zea Mays
gctttacgtcgactatatgcgttttgggtggcttgccaaccccaagacaaccctagtatctctccttcccgatggggtccctccctagagacgagatttaggttcttcatgaagaagaagaccctctacgcacgcgtggaccgtccgacccataactcaaactgtccggcaagcgcatagagataattcactgatgtagcaaggtcacggatcgtccggtctagggtcgtagatcgtttgtgttcccccatagagcaccttcaggtgattcatcctagtgtttggccccaattcggagccaacacacttttagcgaccccgttggggatgatgtgtctagatttactaaaaaatggcccccaaatggttggctctaaggatcatactgacgtctctgccaccaacatcatcaagccaaccctagaggc

SEQ ID NO: 94919 - DNA, 366 bp, Zea Mays
tgataacagatttaataagttggcgccaatatctagagtatgaaatgataacagagaactgcaatagcattcctaaaaaaataaagagaaagctttcataacagaaattcagtcaagaatggcaataggtggaccaattgcagaactaatagaagtaacctgtttgtcaacacaataaattcagctttctgaaataattaacataccttgagcagcattgacaggaccttgtacgctctcttttgaatcaaagagtcgttgtcctataaacagaaaaaatatggtaaactaaacttagattcatggttacatgaaaaacacaatcttaacttgcattaaaccatatatgtaccttaattgcaggtt

SEQ ID NO: 94920 - DNA, 1370 bp, Zea Mays
ctctggtgaacttcaatacccaagaaatagtgaagggagccaagatctttgagtgcaaaatcagcccttagatcagagagaagagcatcaacagcctctgaacaggagctagcaacaataatatcgtccacatagataagaaggaatattttaacagtacccttgcaataaatgaaaagggatgtatctgcttgtgatggtttgaagccaagacataccaattttgcactaagacgtgaataccaagcacgaggagcttgttttaatccatacaaggccttatcaagtttgcacacataggtcggatgagttgagctgataaacccaggaggctgcttcatataaacatcctcttccagaacaccatgaaggaacgcgttctgcacatctagttggcgaagacaccacccttgagaaacagcaaaagataacaccaatcggatagtagccggtttaaccactggactaaacgtgtcttcataatctatcccgtatcgttgcttgaatcccttggcaactaggcgggccttgtaacgatcaatggaaccatcagctttctttttgattttatagacccatttacagtcaataagattagtagcctgatcagcagggaccaagtgccaggtgcaatttcgcataagcgcagaatactcatcatgcatagcctgtgtccaccgtgcatcagacatggcttccttgactgtttctggttctccagtggcacaaaaatgaccatagcgaatcataccagggaacatcttcttaggttgcacaatattattctgaagtcgagtccgaggacgctcagccagatcaagcattggaggctctggtatagccgaagaagcaggcaatagagaattaccaacggatgttggagagaggccttcagagaccgcaggagatcccgctgctggtactgcatcgggtgcatcagtgggagcagattgctcaggatcaacagaggaaccgacatgggcaacttcctcggcaggatgatccggtgcagagggtaggagtagtgccttgtgtgcatgctcctgtacaccaagaccagagctttctgggaagcaagcagtacgtcgagagaagtcatgtacatcagaaaattcctgcacaggacaatcttcacgcaacagattagtagacttaggcattaaggacaaatctacattatcacccccggtaacagatgaattaagcaatgttggagaaaggagagcgatctcggagcgtaagcgggcaccagcattggggtgtagcgtagcaaaaggaaaaattgattcatcgaagaccacatcacgcgaaatataaacacgaccagtggaaatatcaagacatttgtaacccttgtgatgagaactgta

SEQ ID NO: 94921 - DNA, 1614 bp, Zea Mays
tacctgtcttcaacaaaatgccctaaccaaactccttggcttgcatttcagaattttgtacaagaaaggagttgaaaacaaggtcattgacgctttgtctcgccgaccagacttaacggaagatgagccgcatgcacagttgaatagcctatcagtatcgtcagtggttcctagctagttggaagaagtgacggcggggtatgacactgatgaaactacaaaagaattattgaggcgaataaccgctggggaggctgtgggagaattcacctacaaaggaggaattatatggtataaggaccgggtgtggctgggttcaaatcaaaccgtgcaacatatagtgatgaccgtgttacatgacaatgcagtgggtggtcactcaggatttctggttacttatagacgcatcaaggctcatttcggctagctaggtatgaaataggcagtgaaaacctttgtccaaacctgtctgacctaccagcaagccaaggccgaaagaagtcgctatcctagtttattgatgccactgcccatactagagcaagcatggtaggtggtaagtttggattttatctcgaacttacctaactcccatcactacaactgtatcatggtagtcgtcgacaagtttttgaaatatgctcattttctggccttgactcacccattttctgctctatcagtggcaaagctatatctgaaagaggtttatcatttgcatggtttaccttcatctatcattttgcatcgagaccctattttcactagcaagttgtggcgagagctatttctttggcagacactaaactgtgtatgagtagtgcctaccacccgtagtctgatggacagacataacgagtgaaccaatccctagagacttacatgagatgctttgtgcattcttgtccctcattcgaagttctctatggccatgctccttcatagcttggactgatatcagcggaccaatgttcaataccagatctgcaggatttgtttcagaccaggcagcaagtaatacaacaagtaaaagtgtacctacagcgagctcaagaccggatgaagaagcaagccgataaaaaatgagtggagagaagctttaaagtaggagattgggtgtttttaaagctccaaccatactgtcaacaatcagtaactaaaagaatgaaccaaaagttgtcattttggtattttggtccttttgaggtggtgaagaaggtgaatcagatggcatatgagttgcaactccctttaggcagcaccgctcatcccatttttcatgtctcacaattgaaacctgtcttaggcaaacatgttaccttatgtgctgaggtaccatatctgtcacatgagttacatgtacctgaataagtgcttgactcgcggctaactaagaagggctccaaggtgatatcgcagacatgggaggatgaagaagcgatcaagcaagcgtttctgtatgctccagcttggggccaagctgtttttgatggaggaggggatgtcagcaaggcccagaagacagtagtggctgaccaacaaacacctgaggacaacgaccaggcaacggtcgaaaccaagaggagtaggcgaacaaagaagcccaataccaag

SEQ ID NO: 94922 - DNA, 593 bp, Zea Mays
cctactatacatcgcagctttgcgtagcacagtcagcgcaactctagtacagtagagatgcaaaataggcaagccacaacgatacccggtctactttgtctctgaggttctcaccaattccaagtgcaacatgacagagcttgaaaatatagcctacgcagtcctcatggcttcacgcgaactcaggcattacttcgaggcacataaaataagaatccccatcgatcgaggtctaggtgacctattcagaaaccctgaagcatttgtcagaatagcgaagtggtagccgagctctctggctacaatgtcacattcaaaccaagaacaacaatcaattccaaggtcctcgccggcttcatagtcgactggacagggtccttagcgtcaaaccaccaaagcacaaaaataattggaccattcactgtgatggcgcatggtgccatgtgggggcaggcgctgcagcagtcaaatatagatacgtcgcgcgtctcagcttcgcgctcgagtcacataaatgcacaaacaacatagtacattatgatgctgtcattctgggactttagaaactcagagccctaaggctaacaacctgc

SEQ ID NO: 94923 - DNA, 715 bp, Zea Mays
taactgatgatatccagaccttagatcaatcttggagaagacatttgcacctgtcatataataaaatagatcttcgattctaggggtgggtatttgttttttgatagtcacatcattgagatccctataatcggtgcacatccttctagtaccatcctttttatcgacaaagagaataggtgctccccatggtgacgagctaggctagagaaaaccttttcctagaagctcttctatttgttctttaacttccggagatccttaacatccattctatatggtattttggaaataggagcaatgccaggtaaaagttcgatacagaactcaatgtccctgtatggtggcatacctggtaattcttccagaaagatgtcagggcattcacacgcaactttgatatcctccaaagacttctcttttaccttgttcaattttcactttgtatttgttgaggtattggctccaacttttattatatgtctccgtaatggctagttaacaacactgatttcttggcacacatgatcattccatcacaactttataactagtccattcccagcatcacctcgatgccactagatcttaaaactactagctcaattagaaaatctatcccccatgattttaagattgaccaaaaggcatacatagttgactttcatctcacctctaggtgaattgactagtagcctctgccttaggatactta

SEQ ID NO: 94924 - DNA, 586 bp, Zea Mays
cttataatgagtcgatctcaattttgtaatgattcccccactgataaatgaaacctattctcgtgccaacctgttgttgcatattccgctcttgtgtctgacagttcgttagcatttagaggtaatgttcgagtgatgttattttgctacgaccaaaactctctcgagctatcggcctgtccttttgcgcccgacttagtgtgccaacccatacttttgttggcgtcctcttgacctctgaaccctagttcctatttttcctccgctgctccccaactttctaagttctcgagtccattcgcgttttgtcccagaaccgcgccgtttggaaaatcgtgatggcgcccaagaaaataaaacagagtgttgccaccctagacatccctccgatcgatcccaacagccaactccatttcgttggtaaccatgtttctgtcatttatgaggctgaccttctacatcttgttgaaattggtgttctaccgccgaaggaactatgttcctggcggatctggcacggagttattgtcccgacagaggatactcacgaggcggttatctttgtgcctttctcatccggggactg

SEQ ID NO: 94925 - DNA, 453 bp, Zea Mays
gaaggatgttatggaagatggaagtggggtgaaaacagctagatatgtggtggtggaggaagatgatgaggaagaagaaaaagtgcttcccctggttcgcgcgagcggctctaaggctcgcggtaacaccccaagccttgctgctgcatccaagatgatggatatccgggttagactatgtcagctgttgacggtgtactcgaggatgccattcctgaggatctactacttgaattacttgaaataagaattatcgatgtccatatagattgcccaggcgaggtatcttccactggatttctggctaggccagaggtaagcctgctagtccaccatggtgcttcagctcttgtcctggggatcactcctactcctgaggctcttccaacccccagggtactccagcccctgaggctggtctagcccctgtggatactcctgttggttctcctt

SEQ ID NO: 94926 - DNA, 332 bp, Zea Mays
gttttggtcgccgctgctcgggaagtaatagggttttgggctttgtgcgccaaccggcctaaattgcacatattttttatggcgactgacagtgcaatgttatatgtatgaattgccgactgacaacgcgacattattcacatataaatataacgactaacactcggttggaattgagacatatgccgactcaccatctgtggccatgtataccgactaacaatttgatgctaattctctatttatagcgacggtcgtcagacactaatttggtgttgtggtatagtgatttaggactagtttggaaactccattttttcaagagatttctg

SEQ ID NO: 94927 - DNA, 473 bp, Zea Mays
tcaaccccgcctcccgattacatgatctcgtttgtttgtttccatgagcggggtctcgccttccaccttcatccttttgttgtgactctcttcaagtatctataggtgcagctctagtttttgaacctgaacgggatccagcatatggttgtcttcatcgccctatgtgaggggtacctaggcgtcgagcccaacttcaccttatggaagtacttcttctacgtcgagctattgtggaagagggaggagcaaagggtaatagatgcatggccagtcggatgcgccagcatccaccttcacggcagaaggtcatgcgagtacatcttaattcccctttgcctttctaacaagggctagcacagatgatggttttatttgtgggatgccggtcgggggccttttccgaggcagcatctccatggcttggcatggagcggagcactacgtttgaggtccccctaaattggagctgc

SEQ ID NO: 94928 - DNA, 411 bp, Zea Mays
ctctcgggcaaagcagtcgtcgcggtcggttttatatgatagtacaggaggcggtttcagacagtatgacaaaataagcgtaaacttgtgtacaacaaagcataaaagtctgttggcgttatattgaatggatcagacggtgcatctgaaacatcttgtgggctggtcgggtgagggtcagggctttctctagttagagagagcccagggctcctaatacctaaactatatatatatggtaatggaagtcttgatctttcattagtaggagaagctccagccaggacacgatcgcccagcacccgcgtgcttgcgtcagccatacattcgaaagccaagaatccagaacgatatgcgtaaggcaatatacgaatgcatatatatatggattaaggtgcataaaccatgcat

SEQ ID NO: 94929 - DNA, 345 bp, Zea Mays
ttaataaaaatcattgtcgatgttgattttcgaatttagattggacatagagattttaagccgagttggataaaattaaataggcgccaacacatggagtatcccgtttgagagcacgggctcggattaattttttgacacagatcgaacatcgagaaattggattcggacacagctcgactagcaattgtcgagcgcctgattaaatgagcttcagatgagatttataagtcaagaatgattttcgagtttgcgttcgcgtcgagaagaaatttttgacaggctccaaattcggcctttctgagattgaataaaaccagaaattggtgaaaccttcacaagtaa

SEQ ID NO: 94930 - DNA, 389 bp, Zea Mays
gcctgaagcatcacaatacacatcaaatgatttggcgttgtcaggttgcgctagcatgggtgtggttgttagatgctgcctcaaagtctgaaaggcctcttcacatttctgaccccaatcaaactttactcccttcttcgacaactttttcattggcttagcaattctggagaagtctggaatgaatcgtcgatagtatcctgccagtcctagaaaactctgaatctgccgaacggtggtaggaggcttccaatccatcacctcttgcactttctcaggatcaactgctatcccgtcctgagaaattgtatgacccaagaacttgatctcccttagctagaaatcacatttggagaatttggcatacatgtgatgatcccgcagtcgct

SEQ ID NO: 94931 - DNA, 609 bp, Zea Mays
gccttcgtcatggtgtccagcttctgctccagggctgcgctggtggtgtttggcgccgcagcagatgcgacttcgctggcagtgttgtcgtcgttgcccgacatctctgataccagattggtatgccctcttctccttaggttgtagctgtgtgtggtaggtggccgctccttgagcggttggcgataagaggaggttgtggttctcacggtcaggggaagacagcaggagaggagaaactagggcagggcggcggctgatcaacaatatgttgatcacagcctgttctcattttattccaattaagttataaataacctcctattacagattaacctaaaaggcttttagcctctttattctactgctaaaagggcctggctaacagcccacttagcctaagctggttcagccccctaattaggactaccagccttgttgcaccatgcatcttgtatcagcttgttttatgactagttaaggacgatactcatttctctctcaacattattagtccaccgtaccatagtagtagtgccattatttctttatatatcaactaggtgagtgcccgtgtgttgcaatggggacatataataccacgataac

SEQ ID NO: 94932 - DNA, 510 bp, Zea Mays
gtctttcggtgcagacgatgagtcatccaattgtggttagttctgccaatggctccattagtagctgttcagtctgcctgggttgttctgtcattttcttgctgatgagatcttttcatctaatctcgtggtgatttccctggggtcatttgatgttatcttcggtatggattggttaacttagtatcacgcaattatatcctatttttggaagacagtattattgcaggcacgtcgggtagggaggtagtattcttgggaagttctccaaagttcactctctccttgttgtccaaattacttccgggtcgtcggtcaaggaagtcgggaatctttttctccatggtggtggagagtgaggctgccttgcggatgcaggacatccatgtggtgtgtaattatgccgacgtgtttccagcggagcttccaagcattccactggagcacgatgcatcttttgaaatcaagctaattccgggtacgcagcctatttataaggccccatatcag

SEQ ID NO: 94933 - DNA, 313 bp, Zea Mays
gtttaccaagcgaaacgaaaaatataggtattgagaggaatgcaagaataataaaaaatgttttagaatagtttggtttaactgtcttttgttgatggcaacacttggaggtggattctatgggggatggatatccctgggtcctcacgcacactaaaacgcgtcctgggccgcctagcaggtctcttcttgggtcattctacggatgggccaatcgagtgtaaccagcccaagcaaggccaatctaagccggcgaagaccaacgtctgagttaagcgctacgggagcacgagcatatcaagcggagcagttg

SEQ ID NO: 94934 - DNA, 488 bp, Zea Mays
tgaatatctatcatcaagataatccataagcaccatagatatgaaatcacacatagacaccaattaatcttaaattcatattagctaaatatgatgctatacaccgatgatactaattaaagcacaagcatcaacaactacatagtaccagcatcattaacacaactaattctttaacaccaaagaataaaaaataagatcatgataagcactatcaacattactaatgcgttctccaccttaagatcaaaagaaactcaaggagacttcccacctttaacaaggtgagctcatcctcatcacaaggctgagctttgaactctttagtgcacaaaacaccttcacccttaagacaagctttcctcctaggtcgaggtaatctttaatgtatacttctcccccttgacatcaaacaccaaaaccttatctcaaccaagaacatagtatgatgtcaagggacaatagggaatgaagcaaggaaatgcaac

SEQ ID NO: 94935 - DNA, 442 bp, Zea Mays
gacagattttgggtgccttttaggacatattttgggtgaagttgaagataaaaactgggtgcttttgtggatagattttgggtgcattttaggacagattttgggtgaagttgaagataaaaaaaactgggtgcttttgtggacagattttgggtgcatttttggacagattttgggtcaagttcaagttctaaaactgggtgcttttgtggacagattttgggtgcatttttggacagattttgtgtccagttgaagatcaaaaactgggttcattgttggatagaatttggacgcaattaaatgaatgtataccatctgaaattgtaccatcaagtgcatacacagaaactgggtataacaaacttggtatgtcaactcaatttcaaatggatcatcaagcgcatacacagaaacatcacataagtccacaccataattc

SEQ ID NO: 94936 - DNA, 416 bp, Zea Mays
tcccatacacttgcacgttcccatgaaagattcctctcacaaaaaaaacttaaatttcatttaatgtgtaactctctaactcctttcttacatccattgagttatattgcaggttgctagatctattacattttcagacgacgacgacactaggtaagtatatttccattaacattctattcaactcactattatatgcttctattatatactcctatttaataacatttattttttgttaataaaccagtagaaaaaacaattcaaagacgaatgttgaagcgtcacatgaggtataatttataaccttaacagaacaagcttatattcagttatacttaactgttaaaataaacctcatcgtatggtacaaatgttttaccacccaacactcccgaaagttcaagaacattaga

SEQ ID NO: 94937 - DNA, 373 bp, Zea Mays
ttgaaatgttttgaagctaccagcgacgagctgcttgggacatattccaaggccgaatatgatgccttgtccgcagctttcgggggtcgagggaagaaaagattgaacagggtgtttgatgcaattggcttcgtataccctgattatcactacccactacgaaggcaaggaaagaagagaaaagttgccacttcggccaccactgctgtgccgaagggtaagaaaataaaggttctgacccaccggccgtgatatattgaacaagccgtagtgcctgaatttggcgaagggacctcttcaactactgaagcaaaacaagtggcccccaccatgcagagcgctgaagaatcaattgtagtgtcgaaggtgccta

SEQ ID NO: 94938 - DNA, 629 bp, Zea Mays
cagaaaatcgaattgcctctaaggtgactgaaagaatgttgccatttctgacaatgatagaaaaagggtggaaatggtgggggtggaaggagaagagtatacctgcgtctagaatggtgtggtaggaggcaccggggtcggacacccaatcgatgagagcaggagtcagaggcatcatgagtcatcatgcaaaagactgctgatctcactcactaggccacacggagtccatggttgaacttggtggagcggtcatggaagtagtggaggctagtatggtgctggtggagtcgtaggaggtgatccaagacgacacctggagctaccgagggcggtgcgccagctgcgacagatgcccaggagggggcagcgcgctggacgggcacgctgaccatggtggtggcggcggcacggctctaaggagaacctgtgtactgtaatagaggaagaaaaatgcaacccactacagaggttggagatagggttacatagtaacatagcccagggttacaaccctaatggtcctcttgggccagcaaatacgtcgcactgccgatgtctacttgtcaatgacattttaccttggttgaatatgtatgaccaagcaggacaaagttcttacacaagct

SEQ ID NO: 94939 - DNA, 359 bp, Zea Mays
agccactcaaaaagttctgtatgtacactaaatctgcaaactgtgaccaactagtcttatttaaattaatctctgacttgaagctgaatattaatatcttgtggttatagagcaatacttgagtgatataactaaaatcatagtgcaattttcttagctcaacttactacatacctaaaagatcaacattttaaatttattatcttgttcaaccagcagtcatctctttataatgaaagatagctgtcatagtaatatcaatatggatctactatttatgttggaaaacacccaagttatgttgttagcagagtcactgagatactaatgacaactattaacatcgtgactctaaaaac

SEQ ID NO: 94940 - DNA, 1043 bp, Zea Mays
tatgtaatgtcggctgttcttccgaatcagagggatttcgtcctcttcttcatcatcctcatcaacaacatggacagcacacccattgaggtcagcgtcagacgggtcacacccattgggatcagcttcagtaaattcaggcacgggcacttcctcagcaacaggagcagaaggaccagcaccctaatctaagctagacacccgacgaagacgtctcttcttctttttctccccctcagcgggaaaagaggcttgatcggctcggcaagaacgttttggatgaacattgacagacttctgagtgtccaaagcattgtcagcctcagggatgggtaccaccaccaatgtttcagcaggagcggcatcagaagaatcctcagctaacatatcaagcatggcacttatctctgcatcactgggatccaaaggcacctcaaattgaacctgccgtcttcatcaggaatttcttcaagcgaagcaaccaaagcactaacttcttcagcagagggtcgcactctaaggcccaaactaccatcaccagcaggaggatttgacacaaaatgggtaaaggccttggaaggaggcaggttccaggccgagtatgcaaaaggggcagcaacatttgataccttgcctctgagtatcatttcgagccggctcaccaagtccacagcaggaattcttctgttggttacccgggttgagtcggctaggcctcggtacagataggccgggtatgccctatccttcagtggctgaatattcttgaagacaaagtcagcaaccacagcctctgcagtcagacccctctctttcaacaatccaacttcagctagcagagcccctgcttcagccacctcctggtctgtgggggactcagtccaactaggagtgcgaacatccggctgtctccctgaccgtggggggagggaattcccatgattctccacgatgaaccattccagacgccatcccttgatgctgtccttgagggggatgtcgaggtaatcagtcttccttccgcggcgcatctccaagctcgc

SEQ ID NO: 94941 - DNA, 311 bp, Zea Mays
aaccgacaccatataattcccaaattgagtcactcacagaatttcagcctagagcactattcattatctgaaactgtgaggcatctgacagtccaacttcgggcgcctttttctgtggtttttgtgtagcgccaagtcctattcccttaaacaaggttgtaccctgatagaccctctacaactttgatattatggtccagaaccaaagccccatggtccggacgggaagaagctccaaaattgatccaagcataaaatttcagaaccagaattggcactaagtctgaaatttcatatttgaggataggacc

SEQ ID NO: 94942 - DNA, 970 bp, Zea Mays
acagtgcctaaattatgtgacacaaccctaaactttcatatgactactatatagcatgtgttacacacgatcccgaggagatgaatgatgatggtggtggcgcaagtggggagagggggaagggatgagggatgattcaaataaagtagttcatggggaagggagatgagttatccaactatctggaccgttgattttgatagtgtgttaagtttgagtacaatatgtttggtgaatttagtgggataatgagtatgcggtgatttggttgtgtgacttttgcaaagtttaaactgatggattatatagtggtaagagcataactcttttctattatatagatatatgtaactttctatctttaatgtatacaattttatatctaactttctatctttaacgtacataccattctatatttgatgcaagttttttattattattattttcccggccggtcccccctccccgcatcacctgcgcttccgcgaaacaacgctctgaattcaacagtgcctaaattaagtgacacaaccctaaactttcatacgactactatataacatgtgttacacacgatcccgaggagatgatcgatgatggcggtggcacaagtgaggagagggggaagggatgagggatgattcaaataaagtagttcatggggaagggagatgagttatccaactatctagaccgttgattttgatagtgtgttaagtttgagtacaatatgtttggtgaatttagtgggataatgagtatggggtgatttggttgtgtgacttttgcaaagtttaaactgatgaattatatagtggtaatagcataactcttttctattatataaatatatgtaactttctatctttaacatatacaactttatatctaactttctatctttaacgtacataccattctatatttaacgcaagttttttattattattatttttccggccggtcc

SEQ ID NO: 94943 - DNA, 357 bp, Zea Mays
caggaaacaccaggcatgatagtaggtatgtttccagttgaatctcatattgcagaagtgttatttggtactggagcaacgcattcattcattactgcatcatgggtagaagtgcataatcttccaataactaacatgtcaagccccattcaaattgattcagccggtggtaaagttcgagtcgatagtgtgtgcttgaatgtaactgtggaaataagggggatagagtttcccgctaacctcatagtaatgggtactcagggaatagatgtcatcctagggatgaattggctagataagtaccaggcagttatcaactgtgataagaggacaattaagttggtgtctccactagaa

SEQ ID NO: 94944 - DNA, 511 bp, Zea Mays
acaataaggatggagttaaaaactcgcaagcgacaaggaagagaatacgaccaagggaaaataggtaaaatacaacgctaaaattgagatggaagggagaagattttaaagggcaggtataaaataagcatcaaggtaagatatagaggtgacaaaagtaaagatgataataatgaaaagcataacaacggatagagttaaagcaagactcgcgaagtggtgaagtagcaaagtggataaaagaatcaagggtaagataggcaaagttccaacaagatggttgaagtaaaaattcattaccgagggatgttataagggaacaacaagatcaccaaggtgtgcgaaataaaatgattgctcatggatcatcgagaaacaagggtggtcaagggcatgtaaactaaaatgtcttaaacagacattatggtatgaagataagcatacataaaatataagagtatgcaagactccaaggatacgatcatactaagactaagggaatagaaattgc

SEQ ID NO: 94945 - DNA, 653 bp, Zea Mays
cgagaacactactttccaccatgctcatgcttctactaggaagaaaaggtgctccatcgccagagttcaggttgactctgttatctactctggtgaagaggaaaaaaacccaagctttcactgagtactacacttcctatatggggactgctcccatcccatgccctgcttttgacttccaagagttgtacccaccatctatcccacctgtcagcctcacacaccattcactacaaaaaaaaccttgacgccatccttgccatgccttgctagaaagccatggccctgatggcttttgccctagtttttacaaatctgcttggtatatcgtgaaccctgcacttatatgtgtccttcgtgccttccatgctggaaacatcaatcttgatagcatcaataagtcttacatcaccctcctcctgaaaaagcatgatgccctcgctgtcgacgacttccgccccatctgcctccaaaactgcaacataaaactcctctccaaagttcttaagaaccgcctcaaacatgtcataggttcacacatcaacttaaccaaactaggttccttaagggtagatccatctcagaaaactccaacaagagtgttgtcgttcccatgcatacgagcgatgatcacatccaacaagtcacctcct

SEQ ID NO: 94946 - DNA, 722 bp, Zea Mays
cactgatcagatctctaggtgtcacttggattatttgctcatagctcgacgaaaatgacatttgcactttctaggtaatgtcagtatgtccacctcatctaggaatacataagatacctatcgatgaaggtttgataggtacaaataagaaaaggcaacactcgattctatctcaagatatatcattggaaaacgtccatcggacgatctatacatagctccaatgcaaaaacgaccaacatgcctgctcaaaggatctaatatttgctccaacacgccaataccacttggtcaactagacaaccacaaacatgaggatccaaccaaaagattgtcacaacctccaactgcccaacacattgacttggggacctcgaggtctacacattaaatacacctaggcggcctaaaagggaaagctagcaagcacaaccacaaaccaacatgacaaagaaaggcttactcaagggattgaaggtcatgccctctaagaaaccaaacacaaaccactagtcttaaaccctaggttgattttatacgagatcactcaggagctatacccaccagacgtgtttccacctgggggctcaaaggctaagtccacataatgtgctatgcacgaacaaaaaaaaacttactcttttcacaaaaaacataggttccatcatttttctttgagccctcgatggatttttacaaaatcacttggggctcgagggcta

SEQ ID NO: 94947 - DNA, 419 bp, Zea Mays
cgcaaactccgtcactactttgacgaccacaaagtcatagtagtcaccgggtttccaataggggatatccttcacaacaaagaagccattagaagaatagccaagtgggcttgcgagctgggagctcatgacatagaatttcggctgcgcacaacagtgaagactcaagcactagttgacttcgtatcagagtggaccgagcaacaagttcctgacaacccggaagctactgaagtatggcggatgtatttcgatggcttgctgaaactgcagggtgcaggcgcaggaatcctcttcattgcccctggaggtgagcaactcaagtacgcgtttcagctattattcccagcatcaaataatgcaacagaatatgagacactaatccataggttgagcattggcatatcactgggcattaa

SEQ ID NO: 94948 - DNA, 713 bp, Zea Mays
tttttctggaaggctctctttcgtaagattttctagtacagcttccgaaggacccgcttcggcgtgggcagaggtactagcagtaatcatctttggaacatcttcagttttactcccagaagcttcgacagaaggaggtggcattctcacagattctagaacaacttccaaaacgctagccattctccttctccttggagttcctgcggtagctggcagcttcggcaatatcgttactttcatctttggctcctctggtactttttctgttactttttctggctctggctctttgatcgggtctgcaataattccagtgggcacaacaggaacagtctctatggccagggggttatttccaccctttcacataacatgggcacatcggccgtctcgatgcgcctaggtctacgtgtcaaaactttgattttcttcgacctcgacacatcagtagatgtcgaggtagcggctttccttttcctcccttgcttccaggtgggatagcagtagtctgggtatacgaacccgataaaatcaaacaccctgtttaaccgcttctggccgcgagcgccgaaggcagttgtcatagcttcgtctttggccttagaatacgctccaagtatctcatcacttgttgcttctatggcgtccaaccaatcatcatttggctcatcaaactggttcctgaactgaaaagtgtacttcagataaac

SEQ ID NO: 94949 - DNA, 292 bp, Zea Mays
gttttttcgaataccggatacgggtatttcttcaagcgggtcggatacggataatacccggatcgagctcaaccggatacaggtaggatacgtgatagctaatacccggtaactacccgcaacttccgggtaggatacggatacccggtacgcgggtacccggtttatggcccacattttaaatctcacgtgtagagtggaggtgactcaaacaaatttgcatttggcccatcaaaatggtgaaacgtcagcccacttgcccagttgcccgcagcccacttggtcacatgcg

SEQ ID NO: 94950 - DNA, 878 bp, Zea Mays
ttcattttgggatagtgtgtggatgctgggaacaagggtaagagaccttgctccgaatatcttccatgtttccaagaaaaaaatagatcattgaagagggccttgtctaataacctcaacctgcaacattgagatttcgcacccatgcatttcgtggagtactgtcagctctgggtgagagtgaaccggatataaccacggtcggaagtgcctaacaatatatcttggaaacattctagaagcaattagtactcgatgtgttgttttttggtccatgcataccgacttggagtggatcatttgggaaaaccaggctccgccaaagtgtacgtttttcagctggctagcaaatccaagacatgatttggacggctgacaacttggcgaggagggtgatggttaacaccgaccggtgtgcgcactctgccacacacgtttcaaagaaactgggctgcacctcttctccggttgtcgttttgtcaggcacattttggacagaggtgtgcatggtatatgctgctaggtcgcccccctcccttctttgtatggcaacgtagctggtattttattttcaatgaatagatcagactacaagattttatgctggaatgtgcgtgggttgaatggtgctgcaagacgtgccagcgtgcgtaatcttatttcttcctccggggcatctgtggtgtgtttgcaagaaacaaaaatctcacaatggaatgacttccttctaaaggaaactcttggtcaagctcttgcctcccagacagtgtgccttccggccaacgggactgctgggggcgttctgattgcagcctctgaccagcacttctcacttaatcacttgtacactacagaacacactattactgcaaatattt

SEQ ID NO: 94951 - DNA, 448 bp, Zea Mays
acccacgggtcgggaggagtcagatgctccctggagagacatgggaggagacgaaggagaactgtctgtgttcaaccccatccccttccaaccatgttttgacaccagctacgacaattagatgtacgtcgggctgccgttcccctcttggtgcttggactccgaggaagaagatggcccaaacttcgccctggacttctccgggctaagagaccccaagtccatgctacagttcctatacgcatgtgacgagatgctctccaaaatctcggagggttacaactctggtggtgaagtctacgatccgactcaggagtgcttccacgtcgactcagcactccctaaggaaggagatcacctcggcatgccactgaagggagaccagcctccatcacacaaccaagacgggacctagaccccactggggagctgtgaggctcacttcgag

SEQ ID NO: 94952 - DNA, 386 bp, Zea Mays
acaaccatacaagtttacagactgagttgtgcacaactggagtatagggaccagaatgatacaactttataagtttagggacttgaatacacactttggaagttaaggaccgggatgacacaacgctacaggtttagggaccggtagtgaattttattcaatattttaataatcttttacagcaacttccctactctcgtttgagattgaacagaaaaacattcccgtgacaaggcttggggggatagtgtattgttctgttgatgttaacacccctcatatccatagtatggaaaatgggttagtgtaatcgaattggtgagcatatcgtatatatggtcggaccactagttcactgttccaggtggtgattcatataaaaatca

SEQ ID NO: 94953 - DNA, 313 bp, Zea Mays
cctacacgcggtaaagaagaggatatagtcaagggtgagataagtaaaacatatctctcgaattgagatagaaaagaggggatttcaacaagcagacctaagataagtatcaaggcaagatctacagattacaaaggtaaggatgatatcaaacaaaagctcaacaaaggatgaagttaaggaaagacaagacttgcaaagcgacaaagggaaaggaaacagacaagagcaggatagggaaaataacactctcagattgaaatggaataagtgaggctaagaaaaataggtaagcatcatggtaaatatggag

SEQ ID NO: 94954 - DNA, 790 bp, Zea Mays
tacagcccaactatgtatggtcatgtcgaaagcagcttggtcagggttatgcccacctcagacacttaaatttcaggggtttatacagcaacatccaatagccatactggttgacagtggtagttctcatacattcttgagtgagaatatgcggcccttgttacaaggtgtgatcgaggtacccaatgctttgaaagtgcaggtggctaatggtgaagtattacaatgtcaatacaaaccataacaagcacagtagcatatacaaggttgcacatttgtgtcagacatctcttttctacccctaccctgctatgacatggtagtaggtatggattggttatagtctttcagccccatggagatagattgggatcgtaaatggctagctataccatacaaaggctccacggtggtgttacaagggcataatgctaagggatctgtatgtgctatggtggaattcatgatgtctcaagcggtacctgctgatcctcaggctgacctgcatcatcctcagattcaggaaatattacaacagtatgctgatatatttgaggattcccaaggtctacctccacccagggactgtgatcatgtgattcctctggtagaaggagccacaccttttaatataaagccatacagatatccccctctactaaaagatgaaattgaaaagcaaaattcagatatgctgcaacaaggagtgatacaaaatagcactagtccatttgcctcaccagtcttgctagtcaaaaagaaagatcagacatggaggttttgtattgac

SEQ ID NO: 94955 - DNA, 520 bp, Zea Mays
cagagttctgttggaaattggttttatttttcttccggtatgggtagtctttgatgaagtgtccggactttccacagttgaagaaaccagtggaagaactagggagagtagggaaacgagtaccaggggcactcgactgattggtaggagcggggtcagtagtgggacgaataaaaactggttgcttaaagggatatgaaggtgggtgaggtgaagaacgattttgattcaacggtcggatcaccaacctggttctcttctctggtccttggtttgacctttcacctccaaacccctttgattttccatgcttgatatttttgtcttccactatcagtgatgtactgacagccctactgtaggtaagatccagacatgttgccattttccgttgaagcttgtcatcaagtaccctcataaaacaatttttttcttcaaatctgtattcacttggtcgatggcatactaagatagaaggttgaatttgttgagatactgcagtacagtatctcccccttgc

SEQ ID NO: 94956 - DNA, 437 bp, Zea Mays
gtttgtttggtatgatgcatatggccattggtaattaaaaagattgtttatttctttaagtactcttcttgttgatgtaaaccgtggtcactaattcaaataagttacgatttgaaggatggccattcggacttttaaaatggaagactaatgtaggtaggacatagggaattaggtacccttcagtaagctggtcatttggtttgctgaccatatacccgtatttaactaaatgaaatgtctcaatcaggattttctattaccatttcattttagctgccttgtctattttgaattttcgatagaagggcattacgggaaatctgggtgctctatatacatctttgcatggtgctgtatttcatggtaatattcaggcaaattctggcatttgtcgaactagtatattgaaaataggactgtatttaaagcctgca

SEQ ID NO: 94957 - DNA, 649 bp, Zea Mays
cttgtttcagcatccaccaacctccgacttagatatgtcaccacatgctcctttccatcagtttcttgtgtcagaacagcccagtgaccttatcttcagctgcaatgtataatcggaatggtactcctgcttgtggtgcttttaatacaggagccgaagacaagtattttttaatgagatcaaatgcttcctgctgctctgcccccaagcgaattcggcatcattcttaagccgaaggataggtgtgaaggcatcaatcttcccagctaggttagaaataaaccttcgtaaataattccccttgccgagaaacttctgcacttcgaccttacaggtcggaggtcccacattccgaatagacttaattcggtcagggtctatctctatgccatgttcatggatgataaatcctaaaaacttaccagccgacaccccaaaagcacatttacgtgggttcattttcaaaccataccgacgtattttatcaaaggctttacgcaaatcagctatatgagaactaaactcagccgatttgactacaatatcatcaatgtagacttccacagtgtttcctaacaactcatggaaaatcaaattcatagtcctctgataagtagcaccagtattttcaagaccaaatgtcatgaca

SEQ ID NO: 94958 - DNA, 489 bp, Zea Mays
gccggacttctcttctctggcggcagcggcgccacaaaccggcgggctgatgcatggaggggctcacgctcacctgatgtgagacggggcgtgcttccttcaattcgtaccatgggccatggccccgtatactacagtatcatcagtttaagaggcatgcatattcctggacggcttgcatagttgcattgcatagcagacgtgtatgtctcatttttccctcagcatttgtagcagtattggtctgtgtcgtgtcttgagtacgtacgccgtgcttcaggttcttgcctgtgctcggctacaaagggttctccaagtttgcagttttggtctcccttatatatagggtacgttgtacgtagaatatatggtctagctagctaggtgcaggttcgtggctgtacctgtactcgttgggctgccagccaagttctgctcgtgtctcgtgtgccggtgaatgttaagcttataccttacatgtaatttact

SEQ ID NO: 94959 - DNA, 468 bp, Zea Mays
ctgcgtcggggtatcacctcagtgactgaagccttgccctgtcgcggccttctgactggcgccctcagaatcccaccagctggtctggtcagcttattgatgaactcttttgcacccgaaggggggggggggaggaggggacggggacgcgccaagcaactgactgggttgactatccttcttcctcctctgtcgaaagtaagtaatgatggggcctctccgagataggcgactcgacgttcgcgcctccaccaaggctgacatctgccctcccatgtcgaaagtggcccgagacggagatcccaggggtgacccctgaattgcctgctccttctcgcatccacccaaagagcaacaaactgccggagccctcaagggtgaagagggggaagatggaactggcaggggggagtgaactgggcaaccaccggacagccccgacgccccaacctccaccatgcaggcctg

SEQ ID NO: 94960 - DNA, 424 bp, Zea Mays
gtggccactgccgccaatactgctggatcaagggaggacaacaacgactcctgggcagtatcacataatattctgtcttgcattctatttctcccccactccctatctgtctgtctcacgccagaatctcctgttgtttgcccccttctcccacccccgccaagggcacctcatatggctcctgacacaattgatttccgtagatttggacgccaaagcgacggtggtgacatacatatgtaaggcatttcgacgggcatggtgtcaacccttaataaccatggtgcctaggattgggcatgggcattttgcctatgtcgtatgtattttgttctcttagtacaacggcaggcggttgtcctaagtcattcgagagagagagaaaaggacaattttgtttcttaaccacagatatgagcctaag

SEQ ID NO: 94961 - DNA, 407 bp, Zea Mays
cccttcgctaaattccctcgggatgactgcgtggtcgcgccatgattttgtctgggcttggtatttgtttagagcatgtagagcgaagattcggtctccatcgatgagatccttcgaagtgggttcgtccacgtcggggacagctgacgaaactgttcgcggggacccatgttttatttcttgtggggtcatggcctccgatccatatagaaggcggaaaggggtgaacccagtcgccctgcactcagtcgtgtttagcgcctagaccgcctcaggtaacaaatcggcccacctgcccttttttcgtcgaggagcatctttttgacagctgtgaaaatttttccattggcgcattccacaactccgttggactgcgggtgatatactgaggcgaaggcaagcttggt

SEQ ID NO: 94962 - DNA, 500 bp, Zea Mays
gccatactctcgttggggaggatgagaatgtaggcgtccgacgaagctcgacggagattgagtgcaccaacctctaggttgaaccttgcggcgagcacattagaaatctctgggatgtcgaccatttgattatctccgatgaccgtgataagcagagcgcgccgtcttccatgtggttgatcgcggtggagcgttggaggaaatgcactagacacacaggacgctctggggacacatgaacaggggagtgcggcaccgggttggagtcaccagacgccccatgactagctccctgccgcctgcgcccacacctagtcgtcttgcgtggaggatcgttaggaacaaagaggcatccaccctgtcccttgcggcgtcacgaccaatggctgtagaggtcgttgggatgagaagttgtagaggacacatggcgccagaccattacatgacgcgacatggagaagtctcgtctaggtgcgcgagctcgggccactggctgctcg

SEQ ID NO: 94963 - DNA, 381 bp, Zea Mays
tacttattatgcagcttgattaaaatatttgattgtttgacgtcctcttcaactaattgaggttctaaattctttttcgctatagtacattgttttttatcaattgcataagtctgtctccatgatttctgtctgtggtttcatgtattatgtgcaactataggttattagatgcaacccacatacgtgcgaaagccacgatacatgtgtagaaatacttaaccagtgcataacatttcaagcaacagttctttgctaacagccatcaccagattagttcactacattgaaaaattagtttattatattgcaacccatagatgtttcctaactgccatgaacaatttaatttgaccaattaggaacaagactgcacctaat

SEQ ID NO: 94964 - DNA, 427 bp, Zea Mays
caaaactcgtctcttttattttcaactcttctagtctgattttggtctatcagaagactctactcagaagcactacaagatgatcaagttaggattgtggaacttgaagtgaattctacctgaagaaatcctttagaagctattgaagatgccccattctctgtcttatccccgccccgcaagaagttttcgttatagatctcttggatctattacaattcttcttggttaggttgataggatagttctatagtgttaagttttcaactagatcggtaaagacgacgttatattgtggttgttttctaactcataatattgctatataacccttgatttcttctactcttgttttcttgccattgtattgtcatccttggacaatatctaccttgatatattaaaccctttgcctctctacttctct

SEQ ID NO: 94965 - DNA, 543 bp, Zea Mays
tagatttctttgatggtcgtggatccattgatggctgtggagaaggtggatcccttgctggtggtgtagacagtgggtcaccaagaggatgaggaggagaaggtggtggagccctgaatggtgatgcttgtggtggagacagtgggtcagaaagaggatgaggagcaacatgtgaagtttgaggaggtgctgatggatgtacaataggaactacaggtgatgacttttgtgttaagggttgggcaggggacgacgacagtggtggatcaaccatttcgacatccctttgaggccagaagagaaattcttgatagcttatccatgtgtctcagtaccttcgggcccagggatgtctagcatgtcgccctcagatccttggatgaccgtcgtcacttgtaccctacaataattttctaaaatgtcgcttgcatgaaacttgtgtcctaggatcacaaggcatgtggctactttcttcgtacgatgattgttaataccatatcttataattagggtgcacgccacaggccttgtgatgtaatcaac

SEQ ID NO: 94966 - DNA, 479 bp, Zea Mays
cttgccttagtcgagataggtatctccttttaattctatacttctttcgcatgcccccttaatcttgatgcaactatggtgtcatgccttcttctccttattataacatatagaggtaaccatgggtcatagcagtagatctctgagactctgagtggacattagttgtctgacgttaatttagggttacttggttcagatttgtattcccatttcctaattcaatagtatgagaagtagttcgattatattggtttttttgcttgggcaagaccgcgagagtaattctatttggagcagtcccacattccaatcaacactcaaaccataacaatacatatcttatagtgaaaacattatagtgaccaatttataaatccagagagtttcatagtttcctttcgcaggtagttggtataaattggcttcttttctgtgatgtgagctgtccagtgcaaggtattttcctttacctggcc

SEQ ID NO: 94967 - DNA, 937 bp, Zea Mays
gcgccatgatcttgccgtgcaagctgcaagaccatatggaccggatcgatccacctggctttgcccagcgttctcgcgaaaaagaaatcgtagcagagggggcagccaaagatctcagacagctagccagctgcgctttgagtttgaggcacaccctgctgtcgtcaacgtgcaatggcgagagtgcaatggctagccagctgctctgctgatgacacgggtataacgacgctgatggcaaggagtctacagtagctgatacaccgatgggcgatggcaagcaaaatgctgactcgtcgtctccctcacaagtcacaagtacgctcgcacaaacggagggccccggccggctgctagtggatacaccaatgcaatgcaacaacggcaagcaaggcgtggtcgttgtctgtgtgtgccttttggcagtacgtgatcgtgaattcgcaacactcgagtgtgcaatgtaggccactgggacccgtttgtttattcattcatcctaatcgaaaacgcgcgcgagagagatctagagaggagcgacgtctccctctgagcgtccttgggcaacagggaggcttcgagtcctttgctgctgccgcgccactgcatgcaccaccgagtgccctcaattcagtcgtcctaatcacaaatctgacattttagtcgaagctgcaattcgacagatgtggggtttagatctggccacgcatgaagcctacggcctacccatccagcagcgagcagtcactgcagattgaaggatagtattagagcaagaacacagtagtgcacccttacctgatacgactcttgatacatcggttcacttcgaatttacggatatctatggcgcaaattatttcacatgggattatagcctcatctgtctgctctatttggtcagaaaattgctcaagatattatactggaccctgat

SEQ ID NO: 94968 - DNA, 489 bp, Zea Mays
aaaacgccaatagagaaaaaaaagaacatcccttttacatgcaaatattcttgaattcatccaaatcaaagtaaattaataccactgcaatacatctccatttgtaacagtagtacgtacaggtccactgaagccccctatcatagtgccaggccatgtagctagagtgtacgtacgtacgtcgtgcacttacacacaataatcctctgtgtacagtaaattaatgagccattgaaagacatcaaatggagcaacctaacctactacccttcttgcacgacacaacacagcacatatgtaagcatgcatgcatgaacgatcgtgtagcgggcaggatttcggaggcagcagcatgctctaacactaacccggctttacggcctgcatggactgatgatctatctagtatagtagctggttggggtgctctccacatgggcgagctgagagctcgcatatcactgcaagagagagagagagagagagaga

SEQ ID NO: 94969 - DNA, 874 bp, Zea Mays
cagcattgctaagcctttggctagactcttggagaagggtgttctcttcgtctggtccagcgattgcgaggtcagttatcagacattgaagaacaagttggtggatgcccctatcctagctttggctaagagcggtaattgtttcactgtttatacggatgcttctcgaattggtcttggttgtgtgttgatgcaggaaggcagagtgattgcttagggctcaaggcagttgaggaagcatgaggggaattatccaactcatgatcttgaattggtcgcggtggtctttgctctaaagtcatggaggcattatctttatggcgagtcttgtgacatttacaccgatcataaaagtctcaagtatattttcactcagaaggagctgaatttgaggcagcgtcggtggctcgaattgattaaagattatgatttgtccattcattatcacccgaggaaggcaaatgtggtggctgatgcccttagcaggtccggggttccaaaagtggccttgtctttgatcgcagatctggaccgtttggggatcgctttgtgttatgtcggcatcgctagtgaggagactcggatgtttattcaatcctccctcatggagagagtgcgtgcggctcagtagcaggatcgtttattgcaggaagctcgaaagagggttggcgatggtaaaccccaggagttcactattgatgagaatgatttggttcgtttcaggggccatctttatgtgcctcagaaatcaaaggtgaagatggatatcttgagagaagctcataaaacgccttacaccgttcaccctggcgaaaccaaaatgtaccgagatttgaagcaaaacttctggtggaagcggatgaaggttgacgtt

SEQ ID NO: 94970 - DNA, 497 bp, Zea Mays
gttgtttcttcatttgaattcagaaattgcagatgtcgcaaagtaagaataggaaaaaaaattacagctgaattacttgagtttagaccaggaaggcctgggtggctggattgggtagtgggtactgggtagcaaggcggtgagccatggcgtcttaacatcatttacaaggggagacttgcttctgacagggagagtatctagtactcttgttgaagcaggttaaatgcaattttagatgtcaccttacgagcaaactcccttagaatttttgaaccctttgttttgttctacgcaaagtttcgccaaatgtctaaggtagttggtgtcagactgaatctgatccttggtctttggtgggtttctatttcttcagttgcatatgatttttttttcttcttcttcgatgtgtgtttttttctcgggtttgtttgaacatgtactgcggcataatattatggaattactatatatacatttgttccctggctgacttg

SEQ ID NO: 94971 - DNA, 513 bp, Zea Mays
agtaagtagcgcgtaagtatttttcttctttaatcagctgacagcatctgctgttcagcggtaaaagtatctgcagtgcggtcactgccaaaatacagcagcaaatcagaacgaaaagagaagaacactacagatctcatcgtaacttcagcgtcgcctggagaacttttctatcagaaattttatttcataaggcgaactacatgcagtaaatataaaccaacaggtggctcgctgaagccgaggttcagcacatcagatattgagatggtatcctcttcttctttttttaagttggagtgcgtcagacaaaaaagagcgaaacgatttcgcagaggcacatacctgcacagctcagttatccaacatacatctaggcaaaatgccaaccaacggcatgggcagcgcaggctaaattggtcagatgccaattggatgattctccgcagcctccccttctgtgacgcctgcatatgtatgctgatgctatgcagagttgctcaactggtcgga

SEQ ID NO: 94972 - DNA, 338 bp, Zea Mays
ttctttgtgcctccaaaactcatgaactgcttgctagcttcacgaagtctgggttttatttaggcacattttagggcatttaattggttgaaccaatttggttcagagaaaaatgttctgttcctaccacagaacgagtgaacattaatttaacctgtgaaactctgatagccaagggtagaattgctttacggtaccctggatattaagatactattcattatctcactgcttttttgagtaaataatttatggagggatggatttttttcaatgcaacaggtccttttgttcctgcatttcattctcttttgggagcataaagctctgtttcaagg

SEQ ID NO: 94973 - DNA, 525 bp, Zea Mays
cggccaccaaggtgtgacgaggagagcacgacgaggctggtaatggggatccacccgttgccaagccgacagggagtccggcaggaggacacagttctgtcagcaggccgggggaacacccatccgtagcctcaccctggcccatacccgaaaacatgtccagcccaaccggcccatgctcagccacaccaactgggccaagatcaggggaccccgaagcaagcatcacaacaatagggtgctacatgggaacagacgtgccgcccccaatcaaagcattaggagcaacacatgcagatgccgccgccatctcttcagaagccgaaacagccgggcaacaattactaatcagggcacaaaccaaagcaccctcctaagctcccacgccccggaaggacgagcatgcgggcgcatcaaccaaagcgggaccacgttgaaccatcacaggaacgggagactccccggaacccgcgacctccgcctcgactccaccagacaacaacgccgagcacgccggcagggaag

SEQ ID NO: 94974 - DNA, 433 bp, Zea Mays
aaaagggaaagtctatctggaagtccttgtgcctcggaccggtccggtgctcagccaatttggaagacgtcaatcaggatcctagattgaccgcccctgttcctagtccggtgtgcactagaccggtctagtgaccgtgcacataatagttttggtgggcaagtccaatggatagaaggggaattggggctataagtaggcccccattttgacctcttctacacaccaagcatactaagatcctacactccattcctaagcattcgtgagacaccccgaagagattcgagtgccagttctgcaagattgtgttgtttctttgttgtgtgttcatgttgtgtctttgggtggtgttctcttagctcttgtgtgtgttctatctctcccttgtgctgatctagagttcatctctcatgaaacttgtaagggtgca

SEQ ID NO: 94975 - DNA, 395 bp, Zea Mays
tcagagccctgtagcgatgtggccgacgggactgcccttgtccttgcgtcgtcttttggtcaggaggtcgttcgatccctgtagcatgttcttttgacggggcagagagccgaggcagggctcgagagcatgggcacgtgcccgagccctagcccgtataggggtacttgtgtcgagttagagtggttgtcacagtgcttggcgtggtcttttgcgagattcgcgggagaggtggcacttaatgcgcttctgctagggcagttggccgaggccgagctcgtgcgaggcgaagatttctcccgaggccgaggtcttgatcggacattgcaagtagccatgctcagggtggttgaaacagtggtcagagtggaggaacagtgctctggatttgcgcc

SEQ ID NO: 94976 - DNA, 486 bp, Zea Mays
ctgcaatccaattgattagatgttgcgtatgcgatttggtagaagggctgtccagaattttagggggtggacgaacagcagcagtattagtggtttcagggcatttttcgtgggaaattaatgggaatcagtttgggaatcatgtagaactttggcatacctttccaacgagtatttatgcgctcaatttagagttataaattaaaagatatcaccgtttgaatccgggtatgtggctgtgcagaaaaacagattttcaggtggacgaacagcagcagtattagcggtttctggggatttttcgtgagtaattagtgttaatcagtatgagaatcatgtagggctttttcttacctttccaacaagtacttatgcgctcgattcggaattatattttaaaagttatcgctgtttgaatccgagtatgtcgctgcccagaagagaaaaaaacagattgcagggtttatcttgtggaccgttttgggt

SEQ ID NO: 94977 - DNA, 320 bp, Zea Mays
tgcacgcccatgtccccgacggcgttcacgcccagccgagctccggcgagcacctacgccggccgattagggcgatgaccggcgtcgagactaagactaacccaaattcatgaccagtggagtattttccccaaactaattgcatctaagactaactatggagctctagccacggtgaccgaaagcatggcggttagcttgacgtgttcccagcgattaggggcggtttggttcgattggaagggtcggagagcatcaccaatacgtaagtatgctagacagggatgaaaaaggaatgagcagacctggggacggctggc

SEQ ID NO: 94978 - DNA, 551 bp, Zea Mays
tagtagtgtagtgtaagtagtaaagtaaagtagtaaaaagggtgggaaaaggccgactcataatgagtcagcttttgagtttgtgtaaccccctccaatattaatgaagaactttagttgcctcgagtgatcgctgcctgttgctgctttttctgtttgcacgtttgatagttcgtccatatgcctgatactgccggcgttttagaggtaatcgccgagtaatgcatgaggctttgcttttccgagtagtgacttggcactttagaaatagtgaccgacccaggaaatcccatttatactcgcaccgacatgcttttttgatttctgagccctaacttcaccttttgcattcgaaccattcctctgcttccctaaaatttcgagcctgctcgcttttccggaaggatcgcgatggccccaaagcggaagaggcagagtaccactgttgcaatcatcccgcccatcgaccccaacagtcagcttccatttgctggtaaccatatttctgtcatttccgaatccgatcttcttcatctcattgaagttggggt

SEQ ID NO: 94979 - DNA, 663 bp, Zea Mays
ggagaatctccatgggctaccattgtggaattgggggctcatgaacccggagaccatttgtcgctgaacgaacaccaccgtgctgcaccaccgtccgcctggtgtcgtggccgggaggaaccactccgagatatcctgtgagaaccttctacactgctaaaccatgtccccaatttcgtgttgcgccgtttaatttgagtttgggggtgtggagcgccgaattgtgattcctccggcgaggtcgcaatcatggccaacgcggtggccatggcggcgttggaggggaataggaaattagggccctggccataggatttgagttggacggcagagatgttgtcccgcatacccgttcacgtgaatggatcagtgcctttagatcttgatcgcgcagttcagagaaaatcaatcctcataaaatctaggccgtccatttataatccaagggatcccgagccataccggttcgattctaatcagagccgcacgtgtctgatccaacggctctggttgctccttaccccttcgctggttcctttttgcataagaaaccctaggaaacctagaaactcacctgcagtccacactgtgggaatactgagccttaggaatgtttctgttttagtcccgaacttctcggtaatattgcgcccagtccaggac

SEQ ID NO: 94980 - DNA, 646 bp, Zea Mays
tagctttctccaatgattctttctccctcttgctcgtttttccttcaattgctctgctgctactctttcttgtggaggctgcctctctacttgaatcttcaacaggttcagcattggatttctgatcagaaggaaaagttttatcggtttcttctggttcatgaattttgattctgtcagccaaatatggatgaacctggtttgacatccatactttcccacaccacctgccagccaagagtattttcttcgtcctgccttgccttctggaataagtcctcagctttactggtgagtcactgggagagccgtagccaaatgcctcatagataactctattgtatggcacttgcttgttgtataaaggagacttagcaagattagcactatagtaaagattaatgcccagtttcacagcccaatcactatttgttggtattgcttcctcatcctgcacaacttcctgtatcgtctccctatccgcaatagtggcctctttgaaaaaatatccttccaatcatactcaaattccatttcttcagccaacgattttgcttctaattccattcggggatattctgtgcaaatgataataaatatgtcatttaaggttttgagaacctaggaagcagcggcagtaatttgg

SEQ ID NO: 94981 - DNA, 494 bp, Zea Mays
cttctcagaaggcacatttattggatacatatttgatttgttatagtcaacctttaggccagtagaagatgcaaatgagttgagaattgccttaaggaagaaaagttgctttggacaagcctccagaatcaaaagagtatcatctgcatactgaacaatcgagaaatcctggtcaccaatagcaggtaaaggaagcttaagaagattcaaaagcctggccttattaataatgctctgaagaaggtcggccgccaagacgaacaacagtggcgaaagagggtctccttgtctaacacctcgtttgcaatggaaggatttaccagggacgccattgagtaacaccgaagaagtgccagaaagtaggatgctccgaacccagttaatctacttaggaccaaagcctttgtggatcaaaacctgaagaatcagttcatgctctacagtgtcaaaagccttttcgaagtctagtttaagcacaatgatttctttctttg

SEQ ID NO: 94982 - DNA, 357 bp, Zea Mays
tgcatcaccaggagatgcatcaggacatgaacgtggatgaggacatggatatcgagggggaggatcccgagccagcttctagcttggacaccgctagtgtagctcactcaggaggaccaccttctccggaatctagcgttgccacgtatgcccgctagatatcgtgctgggaatagatgtgatagcgagtagcactcctcgggatagcttagcttttggggtttcatggtatactaagctaggagttggattttgtgttggtaattgtaactgtggaaaacttttattttggatgatgggaaaacaaatgagattaagtttgtgtgtgaagatgttctgaccaaacctgaaattgaa

SEQ ID NO: 94983 - DNA, 968 bp, Zea Mays
gtgaaaagcaacactaagagaaagcttggtacccaaagcactgtgaagactcccaaaatttggatacaaatttggagtcccggacttaggtacaccatgaagccttattacttctttcatatacaagggaaccaattctgaagcagaatttgtggtcttcatgggaataaagtgcgcagacttagttaggagatccacaacaacccatataacatccttgcctcgaggggaacggggtaagccaaccaaaaaatccatggtgatatgctccgacttccattctggaattcccaacggcttcaataaacctacatgcctcttatgttcagccttcacacgctgacactccccataggctgccacatacttagaaacatcaaccttcatcctcttccaccagaagttttgcttcaaatctctatacatcttggtttcgccggggtgaacggtgtaaggcgttttatgagcttctcccaatatatccatcttcacatctgatttctgtggcacacaaaggcggcctctgaaacgaaccaaatcattctcatcaatggtgaactctcgaggtttaccatccccgtccctctttcaagcctcctgcaacaaacgatcctgctgctgtgccacacgcactctatccagaagggaggattgaatgtgcatctgagtctcctttctagcggtgccaacatagcacaaagtaatacccatacggtccagatctacaatcaaaggcatgaccactttcgagacaccagtcctgctaagtgcatcagccaccacatttgcctttcctggatgatattgaattgtcagatcataatcctttatcaactcaagccaccgacgctgcctcaaattcagctctttctgagtgaaaatgtacttgagactcttatgatcgatgtaaatgtcacaagactcaccataaagataatgcctccacaatttcagggaaaacacaacag

SEQ ID NO: 94984 - DNA, 363 bp, Zea Mays
tctgggaagggcaggggtctccacgcaaattatcctaagactcagactaccagcgctaggacgaagggtttattctgtaaaaaccaaagggatcataagcaaaattgccacgccgaaggggtatcgggtggcatcaaccgtccgatctatatcagacgtcccggattagactcatctcaaaccgaaacggtacacaatctattccactggatctgaaagcaacggtctagattttattatagcccgatctattatcactcctccgatctcatctcgatggctcggattcatcacggtcttagatctaatctccaccgtaggcaccaggatcaacgacccatagctattttctccagatcgaac

SEQ ID NO: 94985 - DNA, 656 bp, Zea Mays
cacttaaccaccgttgcttgctttttattcgtgtgcttgaaagtttgtcggcattttagaggtaatgcccgagtgatgattgcgatccttattttttcgagttgtgatctggcactttagaggtaatgcttgacctaaggagctaacttatacttatgccgacgtgccttcttgagtttcgaaccctaaatcttactttcccctctgccgcttctccgttttctgaattctttagcctgctcgttccgcccgagagattgtgatggctcccaagcggaagagacagagcgccaccattccgttcattctgcccatcgatcccaacaaccagcttctattcgctgttaatcatatgaccataatttctaaatcagatcttttgcaccttgtggagactggggttttgccaccgaaagaactgtgttcttggcggatctggtgcggagtcactgttccgacagaggacacccacgaagccattgtctatgtgtcgttcctcatccgcggacttactctacttgtttctccctttttccgcggtctccttgacttttacgatttaaatcttacacatttaaatcccaatttcattcttcaagttgccattttcatgcacctgtgcgaggcctttcttggaattctccctcactttggac

SEQ ID NO: 94986 - DNA, 523 bp, Zea Mays
cattattctttcatgtttaaaggccaaaaaatagttatacccctaaccaaattctgaaagatgatcttagtagggctgctaaaactgcacaacaagtcaaatctccatcagccgcacctgttacatctgaaataaagtagaatgctcctgttttacttgctacacgtgctgattttgatgatttacatgaggctcatatgcccagttatgcacttgtatgctcacgtatgcttgttcctcttgatgatgcatcgtctttagatattccccctgctgtggttaaccttttgcaagagtatgctgatgtctttcccatggacttaccaccgggtcttccactgctccgtggcatcgagcattagatggatctcatccccgacgcttctcttcccaaccatgcctcgtaccatacaaatccacatgagacgaaggagatccagcgctaggtgtagacactgcttgataaaggatatatttgtgagtctcttagcccatgatcggttcctgttttactcgttccaaa

SEQ ID NO: 94987 - DNA, 626 bp, Zea Mays
ccgagagcggcgaaggacgagagctgggacttgaccgagggaccagagaatctaggtgactagccatggtggctgacacctaggacacgcaccgacgtgaggacgtgacagaggtgatcatgtcaccgacgtgggcgcgaacctatggggcacatgtccaggacgtgggggatgcgtatggagtacactactcgcgatagtttggtggttgagcctcaaaacccccagcactatggatggcgggtgtagtcgagtttgggcctcaaaactaggtgatgcagtcccggcgggaatcggaagcgacatgtggcgtcgtcgcgaatgaagcttttataagactagttgcacagagaaagagctctcactcgagtttgagctccctcgtctgctaagtagtactagacatctttagtgggagctagagctcttctcgctcaccaactcagacatcatctgagtgtgtaataacttctaattaagcattttaccctctccatttgttttttctctagtactcttaatactttggtatcgtaaccaaaaatatatacaatgtcaaaaaaaattcgtaaaaaacaggcataagtatacggtggatattttagatatcttaaatatgtctaata

SEQ ID NO: 94988 - DNA, 618 bp, Zea Mays
ggagcttcctcttctgcaggtatttctagagcttatgtactacccgctgcggatggcagagagcaaggaggcgtggtgacaggtacgatttcagttgattcgtttgtggcccatgctcttttttactctggcgctagatattcgtttgtttcagaggactttgtgttgcgggctggtctttcagtgcagaggttgggtcacccaattttggttagttctgctaatggctccattagtagctgttcagtttgtcaggggtgttccgtcattcttgctgatgaggtcttttcggccaatctagttgtgatttccttgggggcattcgatgttatcttgggtatggattggttatcccagtatcgcgtagttatatcctatttttggaagacagtgttattgtaggcgccgtcgggttgggaggtggtattcttgggaagttcccctaagttcatgctatccttgttggtgcaattgcttccggatcgccggtcaaggaagtcgggaatcttcttctccatggtggtggagggtgaggctgccctgcgggtgcaggacatccgggtggtgtgtgactttgctgacatgttttcggcagagcttccaggcattccttcggag

SEQ ID NO: 94989 - DNA, 598 bp, Zea Mays
acacctgatgagccactgctaggagatagccaactgccagcctgttaagtttggactctgaataactgtaatgcttcatacatctttcagtgaattcatgttttgggtactaactttgaaaatctcccctgatgtacggctatggtttacgactgaatgcccatgtgctaataatagcccactatcgttcgaagtaggactctgaataagtgcatacatctttctagctaaagcaatgccttttggtattaactctgaaagtctcacctaatgcgccagtaccagttgatagtgacaggtggtaacacgttcaagtaatagttctctgccatatgagtttggaccctgaataattgcatgcaccttttagtgaaagcgctgctttagggtggttgatgatcatgtggtactctttctaaggccacaacctggtcaactataattttgtatgaattgaatatatttgagattactaaacctgcgttgctttagtcgtggatttgccactcacaaattatgtctgttgagttaaaagaaattgtgagaaagtcgttgcgcctgcgccgccagcttcgacgacctaccgaacctccccgag

SEQ ID NO: 94990 - DNA, 496 bp, Zea Mays
tgaactttgagtgctcggggtctgaggactattgttagtagctgcactgaaacttgacccctgtaatcccccctgtgacacttgtggtgttacggttatttgtggtgtcactggtgtgtgaggtgagggtggagaattttgtgcaccccctgaatcttcaacacttccacctgaaacacctggcggctgcaacacctgaccaggcacaatgtactgaaactggaattcacaaggaccagattctgtctcagcttgctgaacattttcatcactgtcccaattccaccccacttcttcttcaaacacaacatctctgctgatatacagtctcccagctgaaggatcatacatcttctgtagtgatgccaatgcctgatcctttgtgttgaacagatctacccacatatacatgctgtaatcatctactacaagcaggaaataggattttgcaccaactgtctttggtctgatctgcccacacaaatctgcatgaaac

SEQ ID NO: 94991 - DNA, 581 bp, Zea Mays
ccggagctcctggaggacaacattgaaaagggagggtcgggggcctccttggccgaggacggcgccctagcggcgtttgacggagacgacatgaagctcctggaaggcttcgctagcgcgttagaaggcttagaggtgttgtggcccttgaggcaggatccgacggctgaaacaaaaagattgacgtggcactctgtacgcgcgactttccgttcgactttaataataaggaaactagagacaggtagacaccgcagtcattaagtgtagagatattcttcaagcatacatagttcaattccaaggatagtgaatctactcaatgttatcccctgtataggccttctcttatccccaacttaacccagatgcacctggaatccatagtggacatggatcttttcttcagatattttggtccaacactgcatctctactactcgattgaacctctctgttcgacccctcttttctcattcttgtcaaggacaagccgacctcctttagtcagacttgttcaccaagtatagccctataactctactacaatagcccaagacccaaagtgtatagaccacaag

SEQ ID NO: 94992 - DNA, 376 bp, Zea Mays
gtcaaagagacagaagaaaaagttcaatggataagacaccacttgaaagaagctcaagctcggcagaaaagctatgcggataaacgacgccgacctttggtctttcaagccaaggattatgtatacttgaaagtgtcaccgatgaagggtgttaataggttcgaggtaaaaggaaagttgacaccccgatatattggcccatttcccattgttgagcaatgcagaccagtagcatacagacttcaactgcctgaatcattatttgcggtacataacgtgttccatgtatcccaattaaagaagtgccttcggattcctgatcgaaccatcgatgtggtggatgtcactttagaaccagacttgacttactcggaac

SEQ ID NO: 94993 - DNA, 419 bp, Zea Mays
gtgcgaagtcgtctaaaagacgcatatttttatccaagcaaaagtcacctaagggcgcagttggattagcacagcaggtgcatcccaaaggtgtgaagtcatcgccaagacagacgtttataccctagcacaagtcgcataaggttacagtcggatcagtacaaacgtatctacgacacctaagaacgcgaagtcatccaatgatgcagctgagatagcacaaatacatttttatattaccaaaacaaaaggcacatcatatttcaaatacaagatgcataataagcacaagaaaataattcaaatacaagtgtccccatagccgtcctttggcgaagtggtggcgagggtagcgttttcgcttgaattcaccaaagaacggcgatggcaacacacatctcacattgactcttttttcg

SEQ ID NO: 94994 - DNA, 342 bp, Zea Mays
cagtcaccttccatgctttggtaggtgtactactttggatccctctcctccattgcagatcaagaaggcgtcatgcaccgcatcgcggatccattcgagaaaatatcttctccgatggcaccaattgcgggggtgggttcatcacacctgactccagcgagaactacgctgatgaacactaaggctcgaaaacctcaaccaacttccgccccacgcaggattgcgcttgcattgggcggacccagtcagtacaaggagatgcgccacaccctgcgtaattgtagggacttcaagaactcagtcgaccatggtcaaccattccaaccgctgtcgccgcccccg

SEQ ID NO: 94995 - DNA, 371 bp, Zea Mays
gggaattatagcatcagaaacacattttaagccctctaagtctctagctgtgtaacagcagattatctgtaaactagatcgaaatggacgactggagaaagccttacatagtggccatcatcgtacgggtgatcatcaccggcatgttcgttatcaacaaggcagcaatggaccacggattcaacagcttcgtcttcgtcttctaccgccaggtagccgcgtctgtcctcatggtgcccatcgcagtccttctcgagaggtaactcgatcagtcacccgctggctgctggccgactaaaagccacaaaaacaatcaaaaccatgatatgcagatgtgatttgttcaatctgtggcaggagaaatgcaagat

SEQ ID NO: 94996 - DNA, 340 bp, Zea Mays
gtcgatctcgcgctggttgttgcgccggtgtagaaaaccacacagactctcctaggtctctataaattctcggctgccgcacctccccttgtcaaatcccaagcccaatcccgcggaggaagccacctcgtcgccatggccggagggaaggagagagaaccgagagattggggatgaatgccgccatgggatatggccacgacgtctccctgttcagtgtacgaggggtggtggcttgggaggtctctccgccgcctgtgcgtggttcagtcaactcgggcttggcgcgggtgccgcgcgagagctaagacttgttcatccacgtttgtcgccgtagtgc

SEQ ID NO: 94997 - DNA, 436 bp, Zea Mays
agcagatcaaaataaacgaatgttagaacatataacatctttttttaaacaaagtattggtacaaacatgaacggtctgccttggcgccatctttgagccgagctgttgtaattctgtagcacacgggggtatgcgatcttatcaaggaaaattaaatgcaggaaatgtaaaatttgaatttgttctcaaatcgatacactaaaatgtttgtttctagtgatgtaaatgtggtcggctgagtggtcagcggctccaattactcttgtggggtcggctgtgtccagacaacttaggattcagccaagggcaaaaaggccaaaacaacccctttatgagtagctcgtggctgctttgttttccagaggaagtaacaagcactagctcatttgcaaaataccagagaaaggtagctaggcttagagagaggatagggag

SEQ ID NO: 94998 - DNA, 334 bp, Zea Mays
cacgatctacataatgtggaacatttggaaagaacaaaatcgaagaatattcgaacaaagttcgctttattcgctccagggggcgtgttaaggagaacctatcactctttaggggtgcaaacaattctgtgagatcgtgacaaggttgtttttttctcagacctctgtccatgtgtatcttcacctcgagagcttgtcaagctcccttctattgcacattacttttcacctcttaatgaaggcagaactcatgccaaaagaaagataataactacacatcagcctctgaaatagctcgcctcaatcctagtccctagagcaattttcatgctgc

SEQ ID NO: 94999 - DNA, 901 bp, Zea Mays
atcgaatggccctaaaggagcaggttaaattgaagcggcaattggatgatttgctggctaagggtttcattaggcctagcaggtctccatgggcttccccagtattgtttgttgagaagcagaataaaagcaagcggctatgtgtggattatcacgctttgaatcaagtgattatcaagaataaatatccactcccccgtattgaggttctctttgaacagttgaggggtgcccaggtgttctccaaaattgatttgaactctggttatcatcaactaaggattcgtgaggaggatattgagaagaccgctttttgcaccaggaatgggcattatgagttcatagtcatgtcttttggcttaactaatgcccctgctgcttttatggaagcaatgaataggacgttgcatgagttattcgacgactttgtggtcgtgttcctggatgacattctgatttattctaagaccaaggctgagcatgagcagcatctccgtctcgttctgggtgccctaagggagaatcagttctatggcaagttgaagaagtgtgcattttggctgtccgaagtggctttcctggggcatgtgattaatcagcagggcattgcggttgatcccaagaatgttgcggctgtggtggagtggaatagaccctctagtgtctttgaaattcgaagtttcttggggctcgctggatattattggcgtttcataccaattttttccagcattgctaagcccttgactagactcttggagaagggtgttctcttcatctggtccagcgattgtgaggtcagttatcagacattaaagagcaagttggtggacgcccctatcctagctttgcctgagagcggtaagcgtttcatagtttatacagatgcttcgtgtattgg

SEQ ID NO: 95000 - DNA, 362 bp, Zea Mays
ggcaatcacctcaagtcacccttcgacttatgggtgatgttacatgccttcgttagctcttatatggtcaactcaggccctacctcgtgaggcaatcggcttgagtcgtgtctccgactcaagttcagtgctacatgctcacgcaaaatctcgacagggtaactctagacccttcatacgggcagacgtcctggcccaccggtgttgcatgccttttgcttaattagtgaagggtgcatctttcccgttccccacgggcgttacctgccctcgcgtcctcacaaagtcatgttctcaaggtgcaaactcagcctcgctggctctccatcactcggggccacgtcaccaccatgccacctcat

SEQ ID NO: 95001 - DNA, 615 bp, Zea Mays
gaaagggctaatggaatgatattggaagcactcaggaagaaagtcttcgacaagaatgaaaagttcgcagggaagtggatcagagagtttccatatgtggtctagagcttaagaactcaacctagccgagctttgcatggaaatactcccttcttcatggtctatggttcggaggcagtactacatgctgatctcaggtttggggcaccaaggctgatcttcgaaaacatagctgaagttgaagccactagactggaggatgttgatatactggaagaagaacgattgaatacagtgatttagtcagctaggtaccagcaaactctgaggcattatcatgataaggccatacgacatcgatccttcgcagtgggagatcttgtcctccgccaaattctaacgggggaaggacggcacaaattgtcgccactatgggaagggccattcatggtagcagaagtcactcggccaggatcatatcgacttactcaaatggatggcatagaaatagggaattcatggaatatagagcatctcagtaagttttacccctagctagatctcaaaagctatcggggcaacattgtattctgtaattggaaaagtaggtcatca

SEQ ID NO: 95002 - DNA, 438 bp, Zea Mays
gttacttggttcgtctgcttgggaatcagttgcaacacaaataatcttctcaattggctacactaggggggtccaggataaaaaaaacttggaacatctatgttattaacctggaagcactaaaattgaactaatataggtgaaaggaatagaaaaaagaagggacaaatgtaaacaatcaagttattgaacaattagcaatttgaatgccctatttcgagttcactgatgtgctatgtcaatacccttacatgcggtgggatgcctatatcggtactgttttatatttggatttggctgcatagagatgaattaaggtcagggtataaatttgttaatggtatagaatggtagctagactggtggcatgttagctttgaagatatatgttattggtttttacaactgcatgcttattactatggccagcactatcat

SEQ ID NO: 95003 - DNA, 487 bp, Zea Mays
ccgaggtattcttggggccattcaccgagttggagtaggtaggtctgggtgccttcaactaggggcagttattcttgaagtgactggggtctccgcagtgccaacatgcatttgctggcgattggttgcttgcaaccgaggggggctaaaaggaactctgactctactggctgaaacgtgacggagcgggtccagctggtctattgaagcttggtcccttgggtggaagctcgaaggatcgagctctctggtgtcggtcttgctgctgagctcggagaacttggaatttcctcttgaggtgacctttttcttcttcttttgccctttccacttatatggctttgttggagaggtgcgagaagctgaggaaatcttggctggcgaggatggtcttgagttctggtcttagccctttcagaaaacgggccatcttcttggtttctgtgctgacatcgtcaggcgcgtaacgagccaactctgggaattt

SEQ ID NO: 95004 - DNA, 546 bp, Zea Mays
ttcttcttgggatagttcttttcccgaagcatgacgaatgatatagtcaatgtctttatctgaagcttcgggagcagaagtttcgatcttttcaaatgcaatttgttctatcggcttttattcagatgcggcagacattgtcgccataggcactgaaggcctagcttcggtttcagcttgaatttgcgtagcttcggtttcagcttgaatttgtgcagcttcggcttgcctagttttggtttcggcctgtgatttagtttcggttggaacgactttctttacgagagcaggactcaagactttcatcgtttccagcacaacatccagcacgtttgccatccttctcctcttaggagtggcagcagaagtcttttgtatctttgctagatctgcctctatcggaaggctcagaatctttggtgtttttgttatctcgtcaatctttggctctccagcctttttagccttatcttcggctagctcagctatatgcgtcttcggcattacatctggttattcaacgccatgtgcagtcgaagcagtttg

SEQ ID NO: 95005 - DNA, 732 bp, Zea Mays
ttggtcacttgttcttatttctgtaaattatcaaaacaaggcaacaaaattaagaatatgagatctcctcccccttaatttatcttcaaagttgaaaataaattggtgagagaaggtcattgaaattgaaatattaatagaagcaaaatgcatgaacacactcaagagaaatatttattgttttgttatttgtattatcttcttcttgttaaaatgactacaattatacattcgaaggatgagataacaacatgtaggtagagaccaatagagcttcgggcacagagctgattgatgcgacgtgagttcgtgtccgtgcatgagcattgttcatctatttatatagacaatctagtatacaaactctatgtgaaatgaagcggtagcaaacgtgctagccttcttcgtttttgggtcagctgcttcggccttgatgacatgcttcggctcagggcctaaatcaaagcttccttcacttttctttttaccaatgttggcatccgttagcaaacacaagttagttacgcatgaaataaattgtataaccattagtatgaattattttttaggaccttcggcaaaggtattcccccaacagtagctctcgcgggattagttcattttctataacgtgctcagaccacgaaacagacaaaggtttacgcgaaaggtctgaacaacacctttctcgagtatgttagtataaaacataattaaatgagcatatcttcg

SEQ ID NO: 95006 - DNA, 292 bp, Zea Mays
ccgtgggcagcagccaccacacatccaacaccggtgagacaccctatctctgttcacttgagcgtccgcgtcccgcatgtatctcttaggtatgctctggtactcagggtctggggctatcgttctccggtgggcggctccgccgtggtggcgagcgcgccgccgcctggctcggccgggcaaggggggagtgcgatgtagtgacggttgatttggcgatggacggccaggattacagcgtgccttgtctccttcgtcgaacagtcgtgtccgcccgttcgtgatcgagcga

SEQ ID NO: 95007 - DNA, 488 bp, Zea Mays
ctggtatgaagggctacaagtttgctacagatgtattggcaagtctttgcacaaaaattcgagatctaggcattgcaattcggcctgtcaggcactctgaatcagggcttcgatggtacagtgtaaagatcagatcgccagttctgataaatcatcgccggttggataacgcatagtggtaagaaatatcgcgtcgtggatgaattccggccactattctactcccgccgccatacccgcctgagtcacaaccgctttggatgggctcgccggagttagccacgtcacaaccttgcaccacttgccttggtgctttaaccacgccgccgtgagtcatcttagcccatccggtgatcgttggtgagcttgccacggtaaatgctaccaatcgcttgcgccagtgcacccccttctctccgaccgccaccgcgcgagctcaaattcacgggccaccgctcaagggccctataaattgagaacaccctcgg

SEQ ID NO: 95008 - DNA, 360 bp, Zea Mays
ggcatcattggccaaattaggtgagccgaaggccgatagtattgaagagacagaggtcgagagaacaaagatattagaagttataagcccttcagcagaagtgacagtgccgaaggcacaaaaagatcttacagttacccccaagaggaaaaggatggtcaacgtattagatgtgctggagacaataaagacttcaagctctactccagggaaaactaccgaagcttcaaaaacacaaactaagacaaaactcaccgaggccaaagctggaaagagccaggccgagaccgaagccgggccttcagagcccgccaaggagaaatccttggaaaccgaagaggaaacagaaaaagaagctgc

SEQ ID NO: 95009 - DNA, 386 bp, Zea Mays
gccacaacgtttagagtggcccaaaggttaaaagaacttgaaggtattgactttgcaacaattagagtggcccaaaggacttcagagtcttatcaccattactaggtgatcttttcccgactctgccatccacttgaaggacttcaaagtcttgccaccattactaagtgattgatcttgcattcatgcgaaggtcttcgagatcttttctttcatcttttttgttacactcgaaggtgtatccttagagttatattcacaaatttaggcatgaaatacaaccttgtagtttgttgtaatgaaaagaaacaacaagaaaatgcaacagtatataagaaatctcttttcctcaacagcttcagctaccgcagtctagcccctcgagc

SEQ ID NO: 95010 - DNA, 455 bp, Zea Mays
ttttaatacaaagtcgtatggattctgttagatcttgtattttttcctactaatgtcaatatcaacccgcaagcgtctcttaagtcactctttttaggatcattatttcacatactttaaaccacatatgaaattttgttaggcacactatttgacaattcttatccacttacagaatgttgactagctttcagaacaccttaacaaaaaagatcttttctaaatttgcctttcaatggccaaaatcccatttttatgcaaatgagaaatgaacagcctacaaactatttttgttgtgcatctccactgttttgggcttccaatcttttcttgagtatttttttactttcaattaccccctcttatagtttcatcattaaaaagtattgttttttactttcaattactccctcttataatttcatcgtgttacacaatgttgatgtcgatataga

SEQ ID NO: 95011 - DNA, 413 bp, Zea Mays
ctcggagatcctcgtcgcagacggaaacggagcgctaaagcagtaattacagggtacacatctcatttccacttcacccacaaacaaacaaacatgaatcaacagcgacagagaaagtgcccccccccccccccccccccaaacagtagctcatcatttcatcccataataatagcgttggtgagtgatgacatcgaaccgtgtcattatcaaagagaagaagaaaaatgtcgccatgcatggacggacgacctccgcaccttcaatcatcatcgatcggtagcatttcgtggacttgtacgtggtcattcattacggcccagctatctttcagtactctattcagcccaacataccaaactgttcggcctgattcatggcttcgtgtcaccttgtggggggctccatatttt

SEQ ID NO: 95012 - DNA, 1527 bp, Zea Mays
agatttttcttacaaagtgggtattacaataattagaaagaaattttatacccccaaattaagggtgttacaattggcgaagtcatcttcctgctttggggtggttggcaaacttgttggtttgcttggggtggaagtggcaatctttcttggtattggagttgtaggtgttgtgggtgttgtggggacctctgattatagttttgttgttgtgggtggtattggtgttcgttttgataatgagggttatgatattgatggggtgataagtatgggcgatggctcgttggttgttagcgggggctgtcctagccatactcactttggtttcttgtctctgggcaatccctggtggggtggtttgagtcttcatcgtggaagacgcaataaaacttcttgggttgttgtggacctctatctcggcctctaccacttggtgcaccaccgaggctttgccgctgaggataacgttgggggggacactgccctgttgttggttggctatgttgtggacctagggttgcacctgaatgtggtcttgacagggatattctcactgttggcctaggttccatgacctacctgttgcgagtatatcttcggctagtgctgtaactctaccttgcggtaatgtagctcttcggaccgagcatatttctcgaagtgatatagttcctgcagagttgaaggtgattttcttgtgcaatggttgtacaggtgtcatgtgcgaaggcagtttatcgtgtagtggatcatgatctgatcgtcgacctaaggcaactgtgactagaacgatatgaactttttgtaataatcacgccggctatctttttctagttgtctgtagagggagaatttgtctaaggcgtttgtctcatgtctgtaaccctaaaagttgagcaaaaacttgtcgcgaagggttttccatgagtcaatagacatgggtggtagccttgagtaccacatgagggttgagcccctggaatgcggcttgtgcctgaggtggcctctcgaattgaaaattgttctgattgaagacagcatcaagggttgacgatgagggggtttcattctgcatttcagcaagttcctgttcaagggccttctcctttcttcctcttccatgattattctggtctgcatgtttgttcgctgccttttggctgtgaggatttatctttgcttctagatatggttgtccatgatgcttctctttgcttctagatatggttgtccttgatgcgaaggccacgaagtttgagttcatcctcagacgagatacccaagtactcaccatcttgaaagttatctttgtcctcttaaattgtgtggggtcccatgggtgggaactcaggtggtgcgtctctgaggggaaggtcttcaatgtatgtgtggatgttgccttcaggtgtgggggtcctcgttgtgagggtgtatgttgtttgctaggctagttttatcagtctcaactatggctggcaggtgctgttcgtgaggattgccttgcctttcttgtctatgagggct

SEQ ID NO: 95013 - DNA, 276 bp, Zea Mays
tacttcagcagcagaaggagtaacaagagtatcttcttctcgaaccagcgtttccggctctggagatgcactttttctctttcttgtagtggccaccttcggctcagggtttaactcttcaaggctaagttttccagaatctttctttttctttttggctaccttggcgacctcttcgtcagtagcgctggcaattctttttcgcttcgggcctccagcatccccgcctaatcgaccataatcagcatattcaaatcctatagcgtcaagcaccct

SEQ ID NO: 95014 - DNA, 846 bp, Zea Mays
ttcatttgatgaatgaattgtatctccatcaactatatgttaagaaaacatctattagagacatcatatccaccacaccacatcttattttgatgttatagtagaagatatgagagttattaaaagtaagatatggcctggctgatgccacactaagccataatggctcctccaccgatgttgtccggcaaaccatcacattctgtgacgcgggacgtcgagcaactcctgacttggggcactccggtcccatatgacaaaatcccccattcccattcaaccattcctatcgtgcaagccatcacacactccggacgttgggcccacattgcagactacggacacccacatgacagccaccattagttttgcacacaccgaacccacgtctgctcgcgcaaaaagttgcctcaatttgacactagcaggagcatttgaccatgattgctttctctaaagaaggaaggcttataatccggtagaagctatgttggctggccggtatggtcataaaaatgtgcaagccgtgatgacgacataggtcgcgtgggctatgtttctttggtgcggcccaagtagctaccaggaggtcgcacgcttcttaccctgacccagcttggctttagggtcagtctcccttgctttctctgcccagcaagccctcgccctctagctcttcctgctagcgccgtctccgtcccgtgatctcctgttcatcgtcgatctcagccatctcaggagcacccgctcactcccagacgcccgcacaaatgaatcccccacgatctccctccaaactgcccactccctccacgatctccccctctagctcatgatctctccgcc

SEQ ID NO: 95015 - DNA, 876 bp, Zea Mays
gggatttttgcgtgtatattacatggcttcgcctcattaaaaacctcaccccccgggaggaaaagagtccgggccggaataaaactgtttggtgaattacaagggcgtgttagccctgaggattcaaacaaaaaatttacggagattgtcaatattctaggaatgctctaagtcttcgccagatggcgttgttagcctttacgcgctgggggacgccttcgtcttgacgatgaagggaccctcccactttggctccaacttgccctgtgactctgtccgagttgtccggacgagtacgaggtccacttcgttgaattctctcgggacgactgtgtggtcgcgccatgcttttgtttgagcttggtatttgttgagggcctgcagggcgaagacacggtctccgtcgatgagatccttggaagttggttcgtctacgtcgaggacggctgaagtgcttgtccgtggggacccatgttttatttcctgcgaggtcatggcctccgatccatatagcaggcagaaaggagtgaacccagttgcccggcactcggtcgtgttcagcgcccagactgcttcaggtagcaggtcgacccatttacccttcttgtcgtcgagaagcattttcttgatggccgtgaaaattttaccattggcacgctccacgacgccgttggattgtgggtgatatactgaggcgaaggcaagcttggtgccaattgagaagcagaagtctttgaagtcctggctatcaaattgtttaccgttgtcaactgtgagctcggacgggactctgaattggcaaacaatgttttgcctgaagaatttttgggcagtcttagatgttatcgtggatactgcccttgcctcgatccactt

SEQ ID NO: 95016 - DNA, 398 bp, Zea Mays
gttttaggcgtggctgctgggggaaagtgtgattgtagtttggttgatgttgggggtagtatgggtgttcgttttgatagttagggtggaggtatggtgtggttggtaagtgtgagtaatggctctctggttgcttatcgtagcggttctggccatccagtctttgatttcttttgtttctgggcaatctttggttgggtgcccggagtatttgccatggaagatgcagtaaaactttcttggcagatgggggcctctacccccgcctctgcctcttgttgcgttgctattgggccttgttgcgaagggtagttttgcagctagggatggtcttcgcgttggctgttgttggtttgtgatattgtggacctagagttgttggccgcactcttggcagc

SEQ ID NO: 95017 - DNA, 621 bp, Zea Mays
ggcacatttccctttcaacctttcaactctggggaatggaaaataggtttgttctccatcatgatatatgaaaaccttaagaagtctctccatcagttcataactgctggaagcatgagtcaaacaaatttaataaaccaaccactgaaatgaaacaaccaattcacaatcgagtccagcacattacaacagtgtgataagttagaaaacacaatgtgtcatattaggaacataagttatcattgcagcttcctttttattaaggactgctcacatgctagtgatcatccaatatacagttggttggcattattgtacatcaaaaaaggcaatgccataagtaaagaagttattcttataagtgatcatgatgtcggccaaaattagttctgtttttcgaagaagttactccaataggtgatcaaaattagttctctatctttaatgattaagaaataaacaacagagaataaaaatatttatacctcaaattaaagtaggtagagtgaattatcaagttcaacaatgatagtttcaaattagtgaacttaccatcacacaattcgagtaccaagaatccaagatttattcaaaaaattcagttaacctgttagagatgtg

SEQ ID NO: 95018 - DNA, 312 bp, Zea Mays
attttggaagatccttcatgagaatatggatacgaagttgaagttcagttcgacctatcgtccccaaactgatggccagattgagagaactaaccaagtacttgaggatatgttaagagcttgtgcccttaagcatggaggcagttgggacaagagtctaccatatgttgagttctcttataataatagttaccaggccagtctgaagatgtcaccatttgaagctttatatgacagaaagtgcaggactcctctctattgggatcatactagagaaagacagttctttgggcctgagattatccaagaggc

SEQ ID NO: 95019 - DNA, 715 bp, Zea Mays
ccacctcgtcgtcgacccagcaaggaaaaggccaacgacagagaggtggccgcggccgaaccggacctcgggtatcagtcacccgagggggtcctgaaggatgtcttcactggaggctccaattccggtgaagacaactagacggaccaccagggggcctcgtgctacctggcctacggggccgaagcctgccttcccccggaaacccttctagattccccacgggtccaacctttcgatgggtttgtgtaggggccactacaacgcgaggacgtggactcaagcggtggactcaggtgtcaagttgcaactcgaaatgcacatcgtaaccaagcgctcaagtactatggccgactgttcgtgcatagtagggaacccagggtcgggacctaatcctgcggcaaagtactgaaccaagaggggatctgcaacctctcccccagcagggaggaacccctcaaggcaatggaaatatgccaacccgagggatgccaactttgctatagctaaagaagtaccccttcctatctctgtaagttcaatccatagaagcaactctgaggggttaaatttttctccttttataattaaatttcgcatatgtgtacaccagcccggtgaggtcagcccacataaacccggcctgatggtttacacccatgcatgtcaagttataaaaaggaaattcaccccctcggatgcgtttctatgacaa

SEQ ID NO: 95020 - DNA, 805 bp, Zea Mays
cacgtgggtatgacatgcttgcacaattcgaggataccgatgatgaagagagggaggagaaccttaccatgggtgtgcccgatgatgtagaagatgaggatagactaattgttgattgggatagagaaaatccaagtctagaagaaggcaatacttttccaaccatgagagattgcaggaatgcactcacaacctattgcatcaaaggggaatacgactttatcattgacaagagttcacccaagagatacactgtgcattgttggtttgagcgatgtaagtggaggatgcatgcctccactatgaggaatagcactattgttcaagttaaggtcaacccttttctgcacacatgcccaagtgcggaaagaaaagtgacgcagagggcagccaagagcaggtggtgctgtgatgcagtgttacagtgggtgatagaaaatccttctattggtccagccgcacttattaagaagattcatgagaagcataacattcaagtgccttacatgagggtcttctatgggaaacaaatggctcttgataaaatctatggtccatggaaggaaagttttcaactattgtactcatttaaatccgaagtggagaaggcttgtcctggaagtgttgtgcagattgacaagcacaaagtagtgtacaatatgaaaggtaaaactatggagaaggaatgctttcggagagtatttgtttcattcaaggcttgttggaagggttttttggttggttgtaggccatacttggcggtggatgcaactgttttgaccggcaaattcacaggacagttagt

SEQ ID NO: 95021 - DNA, 891 bp, Zea Mays
gcgctggccacggtgaggtgttcttgcggtgtgtttgagcagatttgggggaactgtaaaattcaagctcgctggtgatcaactgagggtaatactgggtggctgggtgtgtgatgatcttgcggagcttacggagggctcaatttatactaagcgagagcggtggccgggaattgtagcgaagacgcgcgacgatcagaggagggggagttcacaggcgtagtggattcgtggcatcaactgtggcattcactccggtgatcaacggagggctaaagcagatcacggcgatgcggtggagatgcctagacacacggcacaaggccggaaggcagcagtcaccggtgatctcatcttaatccaccgcggcgagcgtagtacggtggccggaattatttactagccggagcttatccacgacggtgtgactccgagcgttatccgatcaacccgagcacgaatcgagacggcagcggcatgaatcgcgacggagagatcgtcggtggcgaaaaacttagctggcggtctgatctacttcagatactgtaccatggcgaactctatgtagtgcacctgacagccaagatttagggcagattttctctaaatttttcatggcaactcacccaaagctccgcagcaaagttgtagaccaatgattcagctacaatcttgccataacaactatagccaagttcctactagatcatgcttgaattcgtgcccaaagttcctgcagttgcactgtcagtctgaaattcagtcttcaaacagcctgacagcccatctttgggtgcatttttctccaatttcttcataacaaccatgcttactctcttaagcaaagttattctcctttgataggtctacaatgttgatgtggtgatctag

SEQ ID NO: 95022 - DNA, 357 bp, Zea Mays
attttgcttcggatatgggtagtccttgatgaaatgtccggactttccacaattgaagcacccactggaagaactgggaagggcagggaaacgagtaccaggggcactcgactgatttttaggagcagggacagtagtgggacgaataaagacaagctgcttgaatggatatgaaggtgggctaggcgaagaacaattttgattgaaaggtcggattactaaccttgttctcttttcaggtccttgacttgatctctcacccgcatatccctttgattttccgtgtcctgcatttttggcttcaactgtcagtgctgtactgacagccctgctgtaggtaaggtccaaacatgttgc

SEQ ID NO: 95023 - DNA, 458 bp, Zea Mays
aaattgatgtgaacatcaccttcgtaggagtggagcttctgatgcaacagggaaaaacagctcactccccgaaatctgaacatcaaatgtcacaggataatcgttagtaagcagttgtcaaattgtcttgattatagggggaagtattaaccacagacgtcgatgcaacctaaaccctaattagtacatgggggatgaccggatccgtaacagcacatcggggaggagacagggtacacatggaagttacgaatgtacctgcgaagacgaggagttgggatacgggaggagtccaaccttgcagacgaactggcggcggcacgggcaaaaccctagcgacgtcaacgatcagggaagttttcgaaacgaggcagcatggggaggacgacgagcggatacggaacggaatggacgaaatgatccgcgtacctgagaagatgacgatgcggcggatgagc

SEQ ID NO: 95024 - DNA, 466 bp, Zea Mays
ccatgttcgatggtgatgagaattcaaagtattttcacttgctagccaaatacaaaaaaaggaaactcaaaatcatgtctctttctaatggagataatgtggctcaagatgagaatggaatcaaccagctagcgacctctttttataaaagtctctttggcccttctcaagaatctagtatttctttggataatctatacatgaagcgactggatgatgttagtagagatcttcttacaagtccttttttctattgatgagattaaagatgtggttttttatctgaaacataatagtgctcctggtccagatggcatcccatctgaattttttcaggaattttgggacacgatcaaaagtgatttgtttaatcttttcaaatcctttcacaatggttccctcaatattgagagacttaactttgggatagttactcttattccaaaaattccagacgcgatcgaca

SEQ ID NO: 95025 - DNA, 954 bp, Zea Mays
cgaggagtcccaggcatatagaactgctactgagggggcggtacaaattttttttgctcagcgcttgtcatcatgttgacagtgccctgcgaagaggaagaagtcactggctcccatttaagtttcccatttgggattcctcctacacaccacatccttgtgatcctgtctgcagatagagcacctgccactccactgacactcggcacggcgatgcgcttcaccacaatggaaacacaccaaccccaacccaggcttaggaacagcccgatacgtatgattactccctcctgaagtacccgattcagagggcttgccacgataggggtggtggtgctggtgttgtgactttcccctcttgtgggctggacccccagtgttgcccctcctcgcgtcctggccacgaggctaatcaacacttgaagacttctgagattccattgtgtactgatgctgcatctccacgcccaatgcctgctccactatagtacaaaaatacaccagcggaaaggcacccagagcatgcttgatagagggtttcaggccctgacggaactggctcgcctttgtaacaccccaggtgttactcaggattttccctccacacccacatttgtgaacattatcacatgtgaattaagttgagcaaaagacaccaaacttgaaatgctaaatcaaaatcaagtcttttcatcccaagaatcataccctaaccacatcaggcaccccaaagtgagcaaaattttcaaaccctaaaactaccctattaagcctttttaagtaccaccaagaaatttagtgaaaaggctatgaaaacataaaatcatgatttggaccaattaacaaagttgtagtacactaaaaaagctacaaaatatagtaaggaagtttaatcaaaagggttttgcaaaaatctcaaaacagccacttaagtggagacttcaaatgaaaatc

SEQ ID NO: 95026 - DNA, 291 bp, Zea Mays
tcagaatggaaggccgagatgggtcggtgcgtgacatggagcgatatgaaagcaactatcctgatgcctctcataccccacctccaaaccaaactatatgttgcttcgatccacccgtgcttcttattagatgactgtatagctactagctatgtgaaatgcaaccaccacacatgttttgcccatatatataataccaagaaccgggtagatatcttgcctagtgtcatggcaaatgaaagcagcaagcgcgaaacactataaatgccccccatgtgatgctgttcgtgg

SEQ ID NO: 95027 - DNA, 565 bp, Zea Mays
acccacaccagatatccccaatgtaagtagcaccaacgaactccaatctcttaaagcttacatagacgaacagcgagaacagttacaacgtatcgtaggggatatacaaaatgatcataaacgtctagtgcgtgcgctcgataagtctactacggcaaatctttcttcgcacgaggttgaatggagggaatacacacataattcatcggctacaggttggcacgaccagtcacaacccctttatgggatgccgatggacatgtaccctaggcagcgacagcctcccacgcacatcggcgataaatttgccgatctgcgcatgtccggaccgtctgcacatgggcgcggaccgtccgggccagcggcggctgatcctatttttagaagcgaattaccgagacctgcacccaagccgccacatgccatacgaaccctagataacccattcggaccgtctgcgtatgacgccagacagcccgaatataatgtcggacggtccggccatggtcggacagtccgcgcacggagtcggacggtccgcgtatttaaccggacggtccggcac

SEQ ID NO: 95028 - DNA, 405 bp, Zea Mays
gaggccatggttgtacccatgatggggcatacagtcgtgcagggagtggtagtacatgtatcggagtggcctcctacaggatgcggggagttgttgccggggcagttggctaaagccaggcttgggcgaggcggagtcctctcccgaggttgaggttgtcttcgagtgaggcggagttccctcctgagagtgaggtcgtgcccagacgcgtgcatgtctcatacggagttgttcgagtacaatggtcagcgtgggggagcagtgactattattcttgggcatgcatcaccgtagttggtgaaaattgatgggattgtagtcccatcgctctatgttgactgtggcatcacatggggtagatatctgaatcgtcgcatttagtgcgcacgtctccatagttcccgg

SEQ ID NO: 95029 - DNA, 635 bp, Zea Mays
ctgctatgttgtgcaaggcggcctccatgttccgttgcatgccttccatgttcctctgagcacccaggaatgggcaaagaattgctcagcggtaatgggcggtggaggcgggagtggaatttcttggccatcgttctcgataccactgtcgctagctccactggcaccaatagcggtgtggcgagtatccaccatctgcatgtttcagcaacaagtaattatcaggtgatgttgcaaggattgcaaacgaatgtaatcatccccgaataaattgacagggggagtaactgtggtaatttaaaacagaggcataataatccattcacgacaacatcactaattatattacttcatggtgtccaagcattctcgcacacacgcaagttgccagcatacatacactggacttttaaagtatggtcaacacaacatgatcccaagttctacatccaacaagtcttaaaaccgacggacaaactgacaagcttgacgacaaaagaacgcaaaagacagtctaatgtctagcgatacatctactagactacttctcgtggtcgctgtccatgctagaagcgttgtcatcttcttcaccggcttcgtcattctcaacaaccggctcctcctagtgggcctca

SEQ ID NO: 95030 - DNA, 347 bp, Zea Mays
ggggattggatccatggatgggtagcctcggccgtccgatgcggatcttgtgtgcgagaatcgatctaggaattttaaatctgggcggttgattctcgaaccaatggtgctggtgtagcgttcgttgtggactgtggatctgtgatccatgggtcgttgtcatagattgcgtcgttaaagtggagatctaatctgggccaccggatctagatcggacggctctgagtccccggtacctcttcgcgttgccgagttgctaaagagcccttgtacattgtacgaattaacccgcagactaggggtagtgttaaggtattaaacttaagtcctaatattttcagaatggc

SEQ ID NO: 95031 - DNA, 490 bp, Zea Mays
gaggaaggacatacatatccagtgtagcatccggtctacttcatcagcgaagttcttgggccctcaaaaatgaagtatccccaagttcagaaactgctatatgcggcacttctaaccgctcgcaagctccgtcactactttgatgaccacaaagtcataatagtcacaggatttccaattggggacattctccacaacaaaaagctatcggaagggtagccaagtgggcatgtgagctgggagctcacgacatagagttctgacctcgcacagcaataaagactcaagcactggttgacttcgtgtcagagtggactgaacatcaggtcccagacaacccggaggataccgaagtatggcgaatgtactttgacggctcgatgaagcagcagggagcagggatcctcttcattgctcctggaggtgaacaactcaagtatgcactccagttattatttcgagcatcaaataatgtggcagaatatgaagc

SEQ ID NO: 95032 - DNA, 416 bp, Zea Mays
cgttcgctctcttcaagctactgcgccgaaggtttgagcacctgccggcgttgagcaaacaagaagtggacgactccagggacctactcctgaagggcctctacaacaatggcgaaaccagctgctcggccgaagcaatgttccaggtcatgaacgacgaggtggtcttcatcaatgagtactaccactccgttgtccccgtcgtccttgcgagccccttcttcctcgtcctaaactacttcctcctcaacatcgtcgtagccatcctgtgcgtcatgaccgtcatcctctgcgccaacggtgacgtcccctacgcgttccagagcatagccaaagacaactacaccttggattctggggtgtttaagatagccatctgcctcctgcagagagtcggcacgccttcaaacttcttc

SEQ ID NO: 95033 - DNA, 581 bp, Zea Mays
cactgtgtcaacatactctccaatcttgaatggaactttcaccttataaccaatcttgatatctcctgattcattcaaccattggacatgatatggatgagggtgtcgctgcaacttcaaaccaagcttttcaaccatctcatgacttgcaagattatggaagctccctccatcaatgatcacctttactactttgtcttgcactttggctcacgtttgaaaaagattatgtcgctgtccaatttcagcttctttcatatgaacactcaagatttgtgtaaccacaagagtagtaccatgatcaaattcacatccagtgtgttcctcaattttatgagtgtcttctacatttcctgcttcagcttcctcttcactagctgatgtatattctccatcatcattcacaaggatcacacgattatttggacactcctttatgacatgaccacgacctccacacttgaagcactgaataccactactcttggctgttgaacccactaatgttgaagtggatgctactggtttataactcgtgtttggatcagcaccgttctttccactagaattgtcttgaatat

SEQ ID NO: 95034 - DNA, 417 bp, Zea Mays
aatctaaacctacagcagactgctaataaccaatctataaaatgtttaaaacaaccacgtggccacgacagtctgctatcctctgttgtgctgcccgctacagcaaccgatgagctgatggatatgttgtgctacccgctacaacagccgatgagctgatggatattgatcctagtattctacaatgtgaggtgatgtgagatgatggatcaaaaaacaagaacatatatatattcatcgttcattttgttccatgactgaagaagcaagcaccggagccatctggaagaagcaagcatcggagcccagtacgccgccgcccgttgctgctttctctaccaaaagaactgcgcacgaaaaaaaatacacggaaccaggtgcaatgaagctattgggaaacaatgtgtaacacgtaaa

SEQ ID NO: 95035 - DNA, 647 bp, Zea Mays
tgcggagcttacggagggctcaatttatactaagcgagagcggtggccgggaattggaatgatgacgcgcggcggtcggaggaggggggtttcactggcgcagtggattggtgtcctataccgtggcattcactctggtgatcaacagagagctaaagcaggtcatggcgatgcagtagagatgcctagacacgcggcacaaggccggaaggcggcggtcaccggcgaactcatccgattccaccgtggcgagtgcggtacgatggctagaatagtttactggccggagttatccacggcgacgacatttacgcgaccttgagcgctatccgatcaacccgagcacgaatcgaaatggcagcggcacgaattgcggcggagaggtcgttggcggcgagaaactatgctggcggtctgatctacttcagatactgtaccatggccattcctcattcagtgcacctgacagtcaaagtttagggcaaattttctcttaattttatttagtaacatgatcgacactctttagcaaagttatagatctaggatccagctataatcttggtatagcaaccctaggaaaattcttgctcgatcatgcctgaattcgtgcccaaagttcttgcagttgcactgttagtctgaaa

SEQ ID NO: 95036 - DNA, 588 bp, Zea Mays
aagatggtccgctttgttcctcatgtggcttacaatgagttggagaaggtgaaccagttccatcagggcctgaaaccttctatcaggcatgctctgggcgcctttccgttggtggattttcgtactatagtagagcatgcattgggtgtggagatgcaacgccagtacaccatggagtcatagaagtcttcgggtgttgatcagcctcgtggccaggacacgaggaggggcaacactgggggtccagcccacaagcgggccaagtcacaacaccagcgccaccacccctaccgtggcaaatcctctgaatcgagtacttcaggaggaagtactcagaggtatcggactattcctaagcccgggctagggctggtgtgttttcgttttggtgaggcgcatcgctgtgccgagtgtcagtggagtggtaggtgctctatctgcagccaagaccacaaggatgtggtgtgtaggaggaatcccaatgggaagctcagatgggagccagtgacttcttcctcttctcagggcactgtcaacatgatgtcaagcgctgagcagcaattttcagtaccaccccctccgcagcag

SEQ ID NO: 95037 - DNA, 478 bp, Zea Mays
gagattagttagaatctagtttggttgttttgcttctgaatggtttggataggttatgtaacctatcatgtaggtcaagttgttgggtatggccgagttgatttaagtcaccaatttaggcataactaaattaggagtatggccttatcctttgtaccagcattgagtaactcacactagattagatcatattaggttagataggatctagagtggatcaggtctgactagattagactagttttaggttagatagatccaccagggtaggctaaatattattaggatatgttaagatcttttaagataggatggatcataaggtgtaggtaagtcagaatctctgttaggttaacatagaggggttatgcaaccatcgaatggttaaggtagttgcataaggccgagtaggtctgtcgttcttaatttagtgcaaagtgaattaagttaaacatattttataggagtagagtctcat

SEQ ID NO: 95038 - DNA, 757 bp, Zea Mays
cgcccgaaggggacctgaaggatatcttcgccggaggctcctactctggtgaagacaactagacggaccccagagggaccccgtgttccccggtctacggagctgaagcacgcctttcctccggaggcccttccggaccccacgggtccgagctacagacaggtgtatgcagaagtaatcacagccagagacgagggctcccgggtcaaatacagatgggaaccctgggtcggggcttagccccacggcagataccataccaagaggggctccgcaactctcccccagctgggaaggacccttcaaggtaacgggagtacaccgacccagggtgaaccatctagctacgactggaggagtaccttatcctgatgccaaatatctctgtaagttctatccatagagcaagactaaggggtcgagtctatatccttcttttcggtaactagataacgcatacgtgtacgacaacccggtgggtctgcccccatgaacccggactattggtctgcacacatgcacgacaagttatgaagaagaaactacccccctcagtcgtgctcttgtgatagttccatcttgctgcttcgtggtcctatcttgcaatctttcagataatacctttcagctaacccacccgtacggtttccattcgtctgacatggcggcatccaaattgaacagcaaggcttgcagattagggcccctgacgcgaaagtagggaagtccgacagcctaggggtcggctccagagaac

SEQ ID NO: 95039 - DNA, 1070 bp, Zea Mays
ccttcctgtgaatccatcagggccaggggccttatctgagggcagacatttgatggcatcccaaacttcctgctctgaaatgggggcttccagatcggtcagatcaaaactgggcattccaagagcctctaactcaattgcccgtatcctgtccatactgtttcccaatagattggtgtagaaacggtccacacaggcagctttctcctcatggctggttaggttttgatccccatcaacaagacatgccacaaaattttttcttttacggtgacgggcgtgaaggtggaataactttgtattagcatctccatctttgagccatgaaatcctcgctctcagccttgcaatagttctcttgcaagatgataaaagtaatgcctgtttcttgagtctgagtttgagccagcattcagcagggctgagcactctaccatcctgcgctatttccagcttatggaggatttctttagcaagggcaagttgggacctcacgtgcccgatctgcttttcgctccaggcctgcaagctttttgcagttccttgaaatttcatttccagggatttaaaaggacatgtagctgtctcaatagagttccatgcagcaaggacaatatcctgaaacccctcaagcttggtccagaaggattcaaagtggaaacgcctttttccggatttattatccctaagccccaggagtaaaggacaatgatctgaatcttgtgaggcagtactctgaagaagaacattggggaagagcaattcccaatctacagaacagaacactctgtctagcttgaccagtacaggcacattttgttggttggaccaagtgaactgcctgccatgtaaggggatttccttcagggccatatcctcaattaagcttcgaaaccttcccatcattgctctgttgaaattattgttgttcctatctgagtctctataaatgaggttgaagtctccagccaacatccacggtcccagacactcagcccttatttctctgatttcttgtaggaacataatcttctcattgcttccttgaggaccataaacacaggtcagcc

SEQ ID NO: 95040 - DNA, 370 bp, Zea Mays
cccacccaccaaagtggcttcggccgaggggtctttcgtgtcgtctgtggagaaggcggcttcggtctgtgccgcagctttaacattgtcacaaccagccttctccagaattgctgcaacccctcccgcgccggcaaaggcacaaatgtccccacgatcactgaggatctcttcaaaagcttcgacttcttcgcttatccaatcaataactccctcggggtcacctcgaatgaaattctcttcggaagaatatgcacccaccttggcaaagctggttttcaattttcttaggcaatccaaggatttctcaaagcatctctccttggattcacgaagctcctcaacattcttctccagcctagcgttcgac

SEQ ID NO: 95041 - DNA, 286 bp, Zea Mays
tgatggaaatgtgtgagcaaccagtgcatactgtagtggcccattgagtccttctgtgaagtgctcttgctttctttcatcatcaggagcatatcttgacagatgaatgaatttgtcacggtactcgctgatagacatgttgccttgcttcaatgacagaaactgcgtgctaaattccgcctaagtaatagtgccagcagcatcatgggtagtaacataagaatcccaccagtcagcagcaggaccagtcagacgaccagaagcatagagaaccttctcccggtca

SEQ ID NO: 95042 - DNA, 450 bp, Zea Mays
ctcctctcagtctcctcgtcactcgaggaagatacaacatcgtcggagtcgtggtcgaggtcgctaagggaggcaaggaaggcacgctccttgatctttgccttctgaaggtacttcttcttgagcgcctccttgtcaaatcctcccttggacttgtacttgttggaggagtacttgcccttgcgccgaccagagtgatggtcgcgcaggctagactccgattttcccttcttggggcagctggcaacgaagtggtcgggatcgccacagttgtagcatccgtccttggacccaccacgccgtcggctcatacggttgttgtggaaccgcgtgaaccgactggccacaagtgccagctcctcatgcccaaggctctccacctgctcctctgtaatagagaacaaagaagatagagcaaacatagcaggtgaggagttagaagcagaacca

SEQ ID NO: 95043 - DNA, 461 bp, Zea Mays
gcatcatgtgcgtcgctcgtcggcgaggctccgccgtgcctatcgcgtgcgactcttcctgggccgtggaaggtagacgatggcctcctgaccgtcgatctcgcgatatgtggcggcgattagatctatcgtaatggttcggccaaagtcggtagttaccgttgatccttgatcggatggctgggtgatcgcatagtccaggatcttttattggccgttggatttggacccgaggccttacgtcgtgtaccgcttcaatccactaggatctaatccaggccgttagaccagatcgtgcggctgtggtgttcgcataccccccttcggcccgtgtgttttacaaaggagcccctactctttttcagatttaacctgcggtccactgctcgggtaaactgagtcttaggaaaacttacaccaggacccctaaacttctctgtattagtgcgcccagtcctgag

SEQ ID NO: 95044 - DNA, 418 bp, Zea Mays
cgtggacttggattctttggctagccacgggtcaactgtgatgtcgttcgacattcacacatgtctcgtgtgctatgaacttatcgtaaccacttgttggtaaacgtctttctgtgtgttttacccaagaggttgcatctgattctgtttgggtaaaatggagtattttccgctcgctcaacagactcagatagtacaatgtcatcagaaaaaagcaaactacacacatggaaccctatgtgttcttctggcaggcattatctctattgttggacatctctaaattggcttaagtcgatacatgttatgtccactagagaaacaacatcctgaggcactcgccttcgttccagactgtcttagggttatcgctgatatggacatgggttatatgcttctctacccttagaagtctttc

SEQ ID NO: 95045 - DNA, 664 bp, Zea Mays
gacaacatgtgcattcaaaaactcgaagatgatcatatcatggagaagtcccaaaagaacttcaccaggtgttttgccagagagttttgatgacaattgtctattgatgagatagaccgccgtagaagcagcttcactcctaaaatgtgaaggaacaacagatgatatcaaaagagttcatgtagtctctatgacatgacgatgtttgcgttcagcaacgtcgttttgtgcataagcacgaggataagaaagttgagcaagcatacccttcgaggtcaataaatggcgaaaattatcagataaaaattcgtcacaaagtcaacgcaaaaaaattaataggagtagaaaatagggtgtgaaccatggaagcactcgcttagcaggaccgtctcgcacacgatgggatgggaggcacggatgaaaatcttgatgagggcgaccgcgggtttgaacacggaggaccggatgtcagcgaaggacgtgcgcgcgacgcggagaagcgaacacttgtgcgtgaagacagtcgtgaccgcggcgagaaatcaggccgcaacaacgaccatgaaattttgctggaattaggtgatcctaatactaacctgctctgttaccatgttactaacgttaggattgatgaatgataatctgtccgtagggactgtag

SEQ ID NO: 95046 - DNA, 383 bp, Zea Mays
cgtaacgttgtccgtcgagctctgatctagcgacagtgggtgcgtaccggttataaaatggatggtttaatcttggtggtccaatacagatcgaacgactcacgagtgtcgataccccttcgccgtgtatttattgcaaaagagaccctgaatatttcatgaatcaacccgtagtacaggtcagtagtaaactaattggcagaaggccctggaattaacgaaaataaccccgaactccctggattttgtgtctgcagtccataggttatccagaaataataaattaatttagaaaaacgatttttagattaaaaataaatctagaaacttgtttaattcatatttaattcattctaactttgttttgatccattccaatttcc

SEQ ID NO: 95047 - DNA, 857 bp, Zea Mays
taggaatccttcgttcgaaaagctatcacaaacagataagctcgaaaacctccctatacttgagcaactcctccccgcttgtccctttcacgtaggattctcacacactagcttccttaattaattagccaagacgaaactcataatactccttgtggttgcaccgtttttccgggtggtcgctccatatttcaattaaacaaaggatcagggttgtacatgtaacattatcatgatcagtggtcgctccatatcatgcctaagtaaaccatcaataataaatcatgatcagtgttatacatgtaacattatcccataaccaaatagagcaatagcaaatatacccaataatagagttgtggttcgttggtggtgacgtttccttgcaccaagtctccgatgtatcctcaccatcatctcatggctaaggaactttccaaatacttcttcgggagtcattttcttgtacctgggattctcacgaaccaaagatacaagagtagcattgcgagaagtaaatgatcttaacataagttttaccacttcatgattagagtattagaccacttcttgctcccgagattgtagatttgattcactaggctcttaaggcgattgtatatctcttgcatgccttctctcttgaggatggcaaatctcccgagatcccattctaggagcccccttttgatgatctttgtaattttgtcaccttcatgcacttttagtgtcccaaatatcttaggcgctttccaagccattcaccttattgtattcttccctgcagagagaaacaagtaataccgtggtggcttgggagttgcggtgtaaaatttctccacctccacaggattata

SEQ ID NO: 95048 - DNA, 372 bp, Zea Mays
caatatgaaaagtagttggaaaatcttcttcttgaaacacctcatatcaaactgctcaaattgatattcatcttcacaaggagtgtataggcgttcgcgggggttcacatcgtacacgacccaccatgaaaacaactctttgcatggatatgtcaagaaatagacatggtccacttgatgggcaaggatatacttgtcatgcccttgaagcaatttttcatcttttacctgtcatcccaaaatcagacctataatgtttcagatcataccatgaaaacaactctttgcatggatatgtcaagaaatagacatggtccacttgatgggcaaggatatacttgtcatgcccttgaagcaatttttcatctttta

SEQ ID NO: 95049 - DNA, 365 bp, Zea Mays
aagcaagagagttataagtgaaatgtagctatcatatgtagacttcggagactgaatgtcggtctgtgaaggttcatttgcaccagcatatttgtgactcctctgtttcctatttctttttttggtaccgtttagtgggcacttataacttgtttgtctgtgaccaagctctccacattttttgcatcgtatagggcctcttttcatttgcctaccaccttctttattggttgtcttaggtttactcccaccttacagacaacctttcattcgtaatttcctttgcctaccaacacctcgttttgctaaaggtccttttacaacaaggtccatatcaacttgaggccactgtgaacgatccctta

SEQ ID NO: 95050 - DNA, 625 bp, Zea Mays
ctcctggaaactgcagcttatacacatgccaccatttctcagcattgccttccatatgtaatgctgctgcccggacccacaagacctcaggaacctcataaatgaggaagtaatcaatgcatttggccacccaaatttttggagaagaaccatcgaactttggaaaagaccacttgggaagcatgtgtctagaccagtgcccgtcatgctgaggaggacgcattggctcccgacgaccatggttgtggtgaatatgaggagagtgcccacccatcccgtcggaaccaaatgagttattagatccatcatcgtccaactgtccccccatctgatgaagatttagattagccaccactcgacttgtttcatccaattgcttagccatgacttgttggtccttagtaagctgaccaatcacaccagaattgagatctaactagaccatcatgtgttgctggttcgcaaacatcatgtcaatattatccaacacccgctgccaattgttttcctctttctcaaatcccgctgccataacatccaatacaaaccgggattgcacggaaggctttggaggcgccgtgtctgttggttgatgaagcaatcaaagagaagaacacactcagac

SEQ ID NO: 95051 - DNA, 347 bp, Zea Mays
gaaagcattgatgagataagaagataagcgcgccactaacacatgcttttgggctttaccacttgtttaatctctctgcaacctaagtgaaaacatgtctgtttgctagctgcaaactggaataaataataatgctgcaaattgaaaatgggactgaagatatcgtcatgctagtgctaggctgctaggacttttgttcatgggcggctagactagagttcgagagtggtgactgctgagtgtcaacaagagcactgagccgagaaagggcatcatgaaggggccatttgtggaattgtcacgtgtgacgaattgtgtgtgggtcgtagaaatactcaaaactaaaa

SEQ ID NO: 95052 - DNA, 649 bp, Zea Mays
atcatttctggtcggtgacttgtatgccctgtttttttttttttttgaaagtttgcatgttgcacccctagtcactgtcggaacacgtttggttgcgcttcgtatcaaggagagcgattcggtcggtatcaaggagagtgatataaagaatttcgtgggattcgaatatgatttggaataaagagattcgggcctcttcttagggcacgttttattggatgacagagaaagctcatgataaagtggacttccatcacctttgctatattgtttaggtccgagagaggtgacaagtatggtgacagcaagtggtccatgtccagatcgtccggccataaatggtggatattccgctcagactattttaactggctagtgttctggtagtccaagttgaaaggttccggaccgttcggcctaggaaggcagaccgtccaggcttctgacagcactgacaaatttcaaacggtctttattaccttccacctgtggttactatttgatatcctaaatcgacctataatgtattttctggcctagctcatattacatagcaaatatcaaaccctaacaccataaactccacgcctaacgctcacaattctctactgttggccgccctttctagccttgctggcttcctgcgttg

SEQ ID NO: 95053 - DNA, 368 bp, Zea Mays
ctggttaacactaattacccacgaaaaattcccagaaactgctaatactactgctgttcatccctctgaaaatctgtttcttggacagccacatacccggattcaaccggtgataacttttaatttataactccaaattgagcgcataaatactcgttggaaaggtatgccaaagttctacatgattcataaactgattcccattaattctccacgaaaaatgcccagaaaccactaatactgctgctgttcgtccaccccgtaaaattctggacagcccttctacccaatcgcatacgcaacatctaaacaattggattgcagcacaaatgaacaagagataaacacaaaaatcaccttgggttctc

SEQ ID NO: 95054 - DNA, 434 bp, Zea Mays
cttggctcctctttgttgcgccatcattccattgcattgcattgcgttgcgttgcgttgcgttggatccaaatccagtcagtccatcgaggcgcccatccataccgcgtctgcgtgcgtgcgcacatgatcctcgttgtgttgcccacatggaaaagccagaacctgcagaagctaattaacgtgcatggtcgctcctatatatgcttggtcggttacgtacgtacttgtcacacgccaggcaacaatctacagcagtagtcactcgcgtgcgtttattttgtttggacctgtttaatctaatatatatatccggctgcatatgtagacacacacgcaaaacccgccggtaccttttgacaatgtagacacactgagtaagtaaatactatataatattgtggaaaaaataaacaaaactcgatccaaagtacc

SEQ ID NO: 95055 - DNA, 598 bp, Zea Mays
atctaggcccctaagtggtgttttggtaattaatgacaactgattgtggactaacaattcttggagaaataagaatacatgattggaccacaggaaacagtaaagtctttgggacttataaccattgattgtggatcaagtgaaggcaaaggtaaaacatatgattttgtttttgccggtcagcaggtgtttagagaagaaattgtctggattaataggatagacagtcgtactattaagaggggtcaatgaacctgattagtgtaaaacttagtgcctcgtagagcataaacggtagcatttgcatgagggctaacaactcttcggatttcaaaatacaaattcttttgaactagcgcaaaaacattttttctgtggtcgccggaccgtccgggccagaaggccggaccgtccgcgactctaccagagaagtcagctggcagtctgtctctgtctcccttcgtggaccgtccgggcctatagaccggaccgttcgcataagctgaattgagtttgggcagggacagtgtgtttttgtgtccttactctacggaccgtccgaagtttttagccgaatgataagtggtctatgtgcgga

SEQ ID NO: 95056 - DNA, 542 bp, Zea Mays
caacgtttgggcctgtgcaagcaaccgctgctgactatactgattttgtggcggcctcaaccatagtgcctgccgatgataatttgtttggttctatgtctgagtgttttgagtccgatggtgaatctgggagttcgtttccttggacggaggagtcctcggatgaaggcttggattattttgttgcattggatgtggctgcggtggagacttcgccgcgtgtggagggtgctgaggatcttcctggtgcgagtactgggtgtaggcggtgaagggtggtgggaaaacatagtgtgggtgaattttcgtgaagtggtaggcgtcgtcgtatggggatggagcgtggccatctccgagtagaccggattggtaaacgagaattgttgtcttcgccgattggggcgggcataggcgagggggatcttcggaagctttttgagggtgaggaattgaggataatgttgtttaattatagggagatgggtatcatcccgaaggttgagccgatgtaatacgtgatgccctcgccgtgtgtatgtaat

SEQ ID NO: 95057 - DNA, 363 bp, Zea Mays
atggaaagcccagtcagtcgttcaaaacttgacttaattgtctccataaaaacttactttatacaaaaactcgtctcttttatcttcaactcttctagtctgattttggtctatcagaagattctactcggaagcactacaagatgatcaagttaggattgtggaacttaaagtgaagtctaccggaaggaaccctttagaagctatggaagatgccccattctctgtcttatccccgccccgcaagaagtttcgttatagatctcttggatctattaccattcttcttggttaggttgataggatagttctatagtgctaagttttcgactagatcggtaaggacgatgttatattgtggtt

SEQ ID NO: 95058 - DNA, 579 bp, Zea Mays
gttcaccgcaatgctcaagcggtgagcataataaaaggaagtctttgtccggaagaataccggaaagtccaaggaagagaggatgctcatgacatttggaacattcttaaaatgtcacatgaaggagaccccaaagctaagagacatagaattgaagctttggaaagtgagcttgctagatatgactggactaagggtgagtcacttcaatcactctttgatcggttaatggtgttggtaaacaaaataagagtgcttggaagtgaagattggagtgactccaaggttactagactattcatgagagcatacaaagaaaaggacaagagtctagcaaggatgataagagacagtgatgactatgaggaaatgacgtctcaccaactatttgcaaagattcaacaacatgaatctgaagaatccccaatcaaggcaagagactctcatgccttgatctcaaatgaacaaggcacccccaagaagaacaaagaccacaaggtaaagaaagtggtcgagacatcaagtgatgaagatagctcaagtgatgaagacacagctatgttcatcaaaacattcaag

SEQ ID NO: 95059 - DNA, 403 bp, Zea Mays
atttgattatggttgctatagcagaatcaaggctggtttatagagctacaactttggtgcagatggatcaatagctctccacatgaaaaatggagaatggagcttctgaatctgctctgtcaggcgcactgaagggaattcgcatggtacagtaacctgacgaagatcgccaggttcactgcaccgctgccggtgatcccgcgccgtgatcctcgccgctgttgcgattcatgcccggtggcgtgcagataactacgtagggtaaaagatctcacgcaagggatgaagtcggggcactgttactacccggtcgttgtacctacttacgccttgacgtggccggacgaccatcgctatggagatcgccattcacagcaattgcgccacaccgtagtcgattcac

SEQ ID NO: 95060 - DNA, 330 bp, Zea Mays
atcatttgtcacagtatgcaattgatcaggtcaatactgacctgaaaaagaggaattgttttatgagaggcctcaatgaccggcttcaaagaaagatggtcacctgccttgatctctcctacagcagggctgtcagcacagcactggcagttgaagctaagcatgcaggcccaggcaaatagaagggaattggaggtgacaggtccaaccaggggcctgaaaagcgacaaaggttggtaatctgacctttcaatcaaaaccgttcttcacctcgtccaccctcctaccccttcaaacagcctgtctttatccgccctgccactgcaccca

SEQ ID NO: 95061 - DNA, 517 bp, Zea Mays
ctgccgtcaactcagaactcacatccttttcttcctattgtttatttcctaacagcaaagctatctcatccagacaccatgttgttgttaactcatttccaactagtgtcgcttacatgtggggccatgtcgtcagctgcacctcctctgggtccaacagatcgcatttgcctgagttcggcggacgttggatccctttataaccaccgccgcacaacaaacaacgaagatatctggtgaacgttgaaccgcctttcgctgcccgtgatcttcccggattgtcgcccatgatccacgcaactgaagcttgtttctgcgccgcacatctaccaacctccccacggactcgagctgagccatacacccatatctgaaccaccacggcgatcttgcggggggtcgttctcttcctcggctggaacgctctcgtacagtgggtataaaaatcgagtcgatgcttcttcccccttgctcctcagattgcaacagatgagcgagggcggacccaagaaccgag

SEQ ID NO: 95062 - DNA, 484 bp, Zea Mays
ctccaagttatcgggtccgaggaccctgccacatgtgaaggccctctgctcccctaagacacgaagacaaaggatgagccaagataatgtctacatagacctcgaagccaaggactttaggacacgatgccagaggaccaagcctcaggtaacaaggacttggtgggccttccatctagtgtagccggcccaccagcgggccttgtttgtctatgacgctaaccctagcggtggatacaataactggtgttattaggccctaggtcgcactgttccataattaccctattggaaaagtatactctaagaatgtagtaggtaactgagggtacatagatactttgggccctagcccttcggttaccctataaataccatcgtctagatctgggatgggacatgctttataagacattgaaaactactatacattgtccacctcactgttttgtttcaatcgcttcagtgttaaggtccatgtgtc

SEQ ID NO: 95063 - DNA, 543 bp, Zea Mays
gaagagaaatctttagaaccatcagagtggtatgtgagtacccaaacgtgttcccggaagaattaccagatatgccacccgaccgtgctatagaattctctattgaattattatcttgaactgcagctatatcaagaagaccctatagaaagaatgtcaaggatttaggtgaacttaagaaacaaatagaagaattgttagacaaaggctttatccatccgatctcgtcactttggggagctttagttctatttgtggacaagaggatggctcacggagaatgtgtgttaactataggagtttgaatgaagtaaccattacgaacaaatacccattacctcagattaaagatttgtttgatcagatgagaggtgctaagatattctctaagattgttctaagatcaagttatcatcagttgaagattcaagctgaagatgtaccacaaacaacctttacctcaagatatgggctatatgagtttttggtcatttggactcactaatgcattagcatattttatgaacttgatgaatgaagtat

SEQ ID NO: 95064 - DNA, 382 bp, Zea Mays
aaggaaagagcctctgccgttctcgcaaatcggcgccactgtcattcaagcttcggtggtgaagggtagagcatggcccgtgcaagcggaggccggccgcgacatcgctcaacttggtggtgacttgtcatcatcgcaattccttgccggaatccagaatcggccgaggatccgcaccgcattggaccgacctttttcccatcgccattcgtcggtgagatacccctatctagtctgtcatgttctgttcactctaagacgcggggtcatgcaagatttagagaacggtggcaaggaatggaagaactcacggcgagctggttgccgtgaggcgcacgcgcaccgccgtgttgcggcgccaaggaagaagggggcattgtcg

SEQ ID NO: 95065 - DNA, 703 bp, Zea Mays
caatcatcgtaagatgaaagtaggcataggcattgcgatcctaggacgcaagtttcatggaagcaacattccagatgataattgcagggtagaagtgacaacggtcgtccaaggatccgaggatgacatgctagacatccctggtcctgaaggtatcgagacacttggacaagccatcaaaaatttcatcctttcgcctcgaagggatgtcgaattggttgaaccaccaccgccgtcgtcgtcgcatccccaaccatctccgcctcctcaaactttagttcctattgtacatccatcatcacctcctcaatcttcacatgctactcctcatcctctttctgacccaccgtcttcgccacaagcattgccatttagggatccaccaccttctcctcctcatcctcttggagacccactgtctacaccaccagcaagggatccaccttctccacagccatcaagggattcacgaccatcaaagaaatctaaattccctataccaaaattggtgtccacgttcgagaaaaagaagagtaaagctactactgctggcaccgctcgatttttaaaagggattgcacgggacctcacgtcacatacagttcgtttggccgagcacgaggagtctgcaaaaaaggctgaggctatggccgcaaagataaagatcccaactaaggcagattataaaaatgtcctaaaaata

SEQ ID NO: 95066 - DNA, 376 bp, Zea Mays
gagaggtgaaagccaaagtgaccgaccggagcggagaagtaccaacacggggtcctgacaaaatcgatggcacaactggagcgtgaagcggaggaggtggagcagactgaaccggaggaactgagacaccagactgctgtagcataagagccatgaatgccctgctctcagcccgatcctggagtagctgctgctgaagcgcatcctgcctgtcctgcatgtttcgaaacatcgagagcatcctcttggataaccgggcctgctcggctgccaggtgagcctgctgctgagtgataaactggagaatcgaagcaagagcagggtccatagccggaggggcagcaggggcagcactagaactcccagcctcatgatc

SEQ ID NO: 95067 - DNA, 465 bp, Zea Mays
tgtttaaaggaaatcttaaaccagctttaaagaagcttttgaagaccactacttcatcctttcctggcttcggagtgatctcctccccgccgaaacgaaccagctccttcgcttcactgaaatagcccaaattcatcagcttcggcatgtcgccttcggaaatggtggatttcccaaactccaggtggctgggtttagttggcactgcgctgtaatcatcttctgactcaacttcctcagcatcagcttgctcagcttcagtggcaggtgcatcctccgatactaccagccttgaacgctccatcacttcagagattggagcagtttcggcaccttcggcttcctctccgtcgcgagtaaccctagctgttgaacgtactctggccatctgatgattgaatttcttgtttttcgaatgaagttgaaattttttaactttgccgaagctcttttttgttatgaagc

SEQ ID NO: 95068 - DNA, 859 bp, Zea Mays
gaccacttcgtctgaacgacgggtcctgtgattgcgacatggttgacccttcgatagtgatccctttttgtcgtttgttctcgaagtctgagctagaccctctggtgatcatgtaaatcactcccctaaaggctgggtccgtgaagtcttcttgctttggtggtgggggcgtggtaggtgttgatttgggtgccgtggtgggggtggcaaagctaatctttcttgatgttgaaggcgttgttgctgtgggaagagattaggtttttgctgctaggggtagtatgggtgatcattttgatattgatgctggttgtactattgcggttgataggtatgagcactaactctttggttgtctgccagggtggccctagccattcggtcctttgttgctttggtctcggggcagtctctgtttgggtgtgctgagtcttcgccatggaagacacagtagaatcttctcgattgctgacagttcagcctcggcctttgcacctggtcacgttgccaccgtggccttgttgcgggggatagtcttgacgacaaggggggttctctcctggttgctgctggttttgcgatgttgtgcacctggagttgagcacgctcatgctgtgctggatcctgctgtggaggtctgatccatgtcctgctgaactacggagtctccttaggcttttgctaagactcaacttttcttcgatggagttcttctgatcgggcatatttttcgaaaactgctacaactcctgcaagttggttggtgggtctcttatgcagaggctatataagatgcctactcgaaggccgttgattgcatagtggatgactatattgtcatcgaccgatggcagttgtg

SEQ ID NO: 95069 - DNA, 446 bp, Zea Mays
cttggccgtcatactcaacacagagttggaccatgcccttgacgagttgggcaaggttcgggcagaggttgcggaattgcgtgctgagtgtgcaacacgccactatctggatggtggttctcccgcccgtgtcgggattcagcacccttaccgttcaccgccccgtggtcgcttcgactatggtaccccagactgcaggacccggatagatttggatccctagatcgacagagtcagagtctgtaataatgcttagttcagtgtctcagtctagtcagtctagttagagttagtttgcttattttatgttggatgcttgttatgatggacatgtactgaagttggatctttgtaatgattgtcaccaagctgtgggtatcccctgcaacttggtgtagttattaataaaattcagttatttagttgggtaatccatttatttccac

SEQ ID NO: 95070 - DNA, 344 bp, Zea Mays
gggggagagatgtcatgtggggccgcacctacacgcgggcccgcgacgccaggagggctgatgctagggcgtttaagggaggcgccaacagcagctcacctaaggaaggttcgtccaaagaggaaagtagcagcagctcaaccaaggaaggtccgtccaaggaaagtggctagattagtggccaaattgataggccttaattggaggggagttggtttccaaataagtcatttcctaaattagggtttccaagtaagtcatttcctaaattagaagttacctagttggtcgggccagtggcctatttatatggaaccatgaggcaatgaagggaataagaaata

SEQ ID NO: 95071 - DNA, 426 bp, Zea Mays
aatctcatcggactcatgaccatagtcatcaatttttccctctttttctcatcagcttttatatagaaccactcacttgtccactcggtcggccacttggtacggtagccgattaccggggctttggtatcctttcgatacacaaaattatagcaaccaaagtttttgtgaaggccatccgctctggccttcgtctggtagtgcaactcatgcacccggcagaaaccttcggcattagcgctcatgccctggcttcggagagcccatatgtaaacactgagcctaacgatggtatttggtgttagctgatgaagatatatctcaaaattctttaaaacttctcctatcatgtcatataaagggaaccgaagccctgccctgaagaagctcttgaaaacaagaacttcgtcctcttttggctccaag

SEQ ID NO: 95072 - DNA, 531 bp, Zea Mays
caaggacaagctgaacgggttgtgcttcatcgccgacaccgctggaggcttctgcactatggcacttggtgaggacgcggtcggcaccagcgatgacaaagacatcagcgatgacactactgctgaggtactaccttccgccgatgatctcgccgctgagatagaagagttgaacgctgctttggctagtcaaaataagttgcttaggtaggctgctcgtgagaggagagagtttagatccaagtacgagagcacgcttagggaacttgagtctgctagagcttcatttgaggtgtccgatgagactgaatgtgatgagtgcgctctacacatgtcaaacatcaccactttgcagaccaagtactccaccttgctagatgagcacgacgagttgagatctaggtctatcctgttgggtgcgtgtaccgtttgtcctggcttgcagtctgagctagcagagacagacgctatgatagctttgcttgagaaagctagcttagtgagtgcccctgcacctacacagtgtgcact

SEQ ID NO: 95073 - DNA, 363 bp, Zea Mays
cgaatattggttctagggtatgtagatgctagcggttctaatttgtggcaggtctggtcacgaaaatgaaacaatggtaaccagggtactatcgtcgtctgaaaatgtcgtcattgtacacagggatgtttgcaaagtagtcttccacaagcctcataacctgaagacctatcccgatgaataatacgtctacctggaaccgatcctctatgcacatgtggcttttcttcctcgtctgcaacggcagatgcatgaagcatgtgtagcacttgttgatcctcgtacatgcatttaaaacgtcagtgccacggattagatgaagaagccatcttgtcagtaggatagctgcaacctaaaaacctc

SEQ ID NO: 95074 - DNA, 626 bp, Zea Mays
ttcaggcctaatttggttaaaacagaagaaaacgtccaacgcataagacataactcgagagaagctcaagcccgacagaaaaattatgtagataaacgacgtcaaccattgatttttcaagtcggagatcatgtgtacctaaaagtatcaccaatgaagggtgttaatcgattcggggttaaaggaaagttagcaccctgatacattagcctgttccccattcttgagcgatgttggcaagttgcgtacatacttcaattgccagaatcactatctgctctgcataatgtgttccacgtatctcagttaaagaagtgtcttcagattcctgatcaaactatggatgtggctgatgttaatttggagccagacttaacctattcagaacatcacatttgagttttggatcagaacgacagaattactcaaaaaaggactctcaagttttataaggtacagtggaaccaacacactgaaggagaagctacctaggagactcgagacttctgagagaaacattttcctaagtttttagcttcctgtaatctttatagtttatgtacaaacccccacacccaccccctgctatgtaagagaaattaggaaataaagttgtgacacgtttc

SEQ ID NO: 95075 - DNA, 273 bp, Zea Mays
tggaaggcgaggcgcttgtgagtgttgatggtgatgggcatacatgctcaaaagaggctgttctcgacagtgtggttcatgttgtctttgcaccttcctggtgaagcacgacgttggggcgatacatgctcaatgccatgctggctgtgccctctagctcatgtcactttaactctccttgtccttttttgcaccaccacattgtcagttagcacttgctccttggcagctcccctgtccttctcgtgccactgtgataggggtggtacccta

SEQ ID NO: 95076 - DNA, 369 bp, Zea Mays
gggaagttggctctgaccgagctgtccaaaccaagacaaaaaccatgtcaagtcgtgtcaaacgacttagggttgggttcaaacttttccagggtgttctagaggtctttaggcgccattttgtcaattgggccataaggttttgaggtttggaaaaaggtgaacatgtttgatctttgaaagagggttggttttgaaagtgagaaaagtctgatttttcatttatgtccttctccttggtgacctttttggggtttttttgaactctttttggggtcattctcttactaacttttgtagggtattaagtgtactacaacttttataatttgccccagtcatgataatgtggcttacatagcccttttg

SEQ ID NO: 95077 - DNA, 396 bp, Zea Mays
gtagtacctaattgtatgtccaatgttgcctacagatttcccttatcaactcggggtcttcgtcttcggttccagtttccagtgcaaccaaggtactctcatacacattttgtagcgcagtttactatcaacatgggctcaacccaatagagtttacagtttactaaggatgacattgctctgttccatcagtattatttgttcagggattactactttgtttgtttgtcacaacctgtctgatcagggttcagttcatactttgttcataaatttgttagttactagttgtatgttagttgcttcaaccaacatttgtcccatgtcggcaattcatgtcaatacatggaagttagtacattgtccccttgtctagtacactaaccaacctaaatc

SEQ ID NO: 95078 - DNA, 348 bp, Zea Mays
gcaggatgcatgcagaattgcagacgccctaggatcgttgtatactcctgcagcgtcaaccaactttggtcctctggtgtcgtatggtcagtgtcccccacttgaattcatacagtagtacagctctgcagcggcatcactgaatcactgccacctttttttgcatcctagacgacctagtacgtatctctctttacccacagaccacagctagctaaagctagccatcgtcttctggctctactcctacgtgtaatctttcagacacatggctccagaggtattaaaactgcagcaggtgaaacaaatagacagagagggacagaccaggctcatcctgctgcggtc

SEQ ID NO: 95079 - DNA, 567 bp, Zea Mays
gacaaattaagatggattgagatcttagttgttaaggtagaagcaaaagcaccaccactgaatcctgtactttaaacggtgatagcagcagttgcagtcttcgatatcttagtgtgttacttggtgatagcagcacctgcgatctccaatattctagggcatgtttgcctccctcttctaaacttagaaatctaaaagctttagaatgttttactttcttttgatgtccaaatctctaatataaggtgggctaaaggttaaagccaactttagaccacctgatgcatataaggaagaagggtccacatgcaccattctctgtgtcatagcaaaatcgagctcaatgtccttgaagattgatcgagataatattagtcagtactgaatttaattttaatgacaagtttgtaatgggtaggataataagggatatgttacaggttgttggtttcttggatgaatatgttgatgcatagggttaggcctgaaaggagaaatagaacaggattggtttttgtagctctcctcccctcatctctccatgggattggaatatataactgtagc

SEQ ID NO: 95080 - DNA, 442 bp, Zea Mays
gaagttttccgatctcctcctcgatggctctccatttctcttcgttaaaacggagtagtcgctattttatgggtttggagctggggattgatccatagagagtgaccgacgacttccctcaggatgcccacatgtcagaagctttccacgcaaagatgtccttctcgtggaggaagtcgacaagcatgctttcctatttggtagagagcatggatccgatgcgtatcgtctacttgttggcatgctcggggtctaagggcacttccttcatgttgtctgccggtttgaaggtcgtgcccgtcctccttgcatcggacgcctactcgttgatggttcagagcacctcctatagctcctgagcagcggtggctccctcaccaagtcatagcattcgacttcgcactcgtatgtgtgccacaccatggtgcccacggtaatggtt

SEQ ID NO: 95081 - DNA, 505 bp, Zea Mays
agacagacgtcgtcaggcctgtgtggatcgacaaagccagtcggttgctgacaatagacgttgtcggtgaggtggccatgaagaaaggcattggagacgtccaattggtgcgcaggccacccgtgcgtagcgacgagagtcaaaacggtgcggatcgtcgtaggcttgacaacgggggagaacgtctcgccaaagtcgacgtcggcgcgttgattgaagccgcgcacaacccatcgcgcttgtagcgttcaagggtgccgtctgagtggaatttatgttggaatacccatttaccggtgataatgcgagcacccggtggacgaggaacaagagtccaggtttgattgtgttggagagcatcgaattcaagcttcatcgcagcaagccagttgctgtcacgaagagcctttcggactgaggtgggcacgggagaaacttgtggtgcggatgtgttgctggagataggcatagcataatccgtgaaacgagcaggtcgtgaaggcac

SEQ ID NO: 95082 - DNA, 460 bp, Zea Mays
gatagaggagacccaacagctactgctactacaagcatgacaatgaacaggatggtgctgctctaccaaccttgagtttactccacttttttcacgaggaaaagggaaaggaaaggaacggcacctgagcgggaaaagaaaaagacccgttgcttgttggcatccagtggagagtttgcttagctttgcttgcttggaatatttttcggttggtttgcgaacgaggtcgacacaaggagcagcagggaaagtgtgcttctagctaggttagtgaaaagcaagcgcgcacacagaataatgggacttttttttttaatctttccacatcattcacatgcatggacttgattggagcataaatgatgtcccgtagagcatatatgacacaaccatctatatcttgtgttaatgaagaatatcagctaatctttagttaggaggctatttagatccacctgct

SEQ ID NO: 95083 - DNA, 342 bp, Zea Mays
gagcgaggcacggggggcgacgatggccgaagattttgggcatggatttgcagagtttccaagctgggtgggggcatggatggaggcgcggcgtgtggatggaaggggagatgcgagcaccaatggaagggcagttgggggcgcaacgcatggatgtggtgtcaatggaaagggaagatgcggtcgtcctgtaatggcgtctgtcgaggctcgggatcgcaggagcaaagttcgcaggagcgggggcaggcgggggcaccagggctgtggacgccctccttacactcttaatagagtagtaatagattagctggctaactatacacaccaaatgctccgatt

SEQ ID NO: 95084 - DNA, 548 bp, Zea Mays
atttagcattgacttcattctcattatggcttcaatttttctggatttgcctattttcctcgatggctgacgataaacctaaggagctttccagccggtactccgaacacttatttctttggattcagcttccatcggtagcgcctcaagttgttgaagacctgctgtaaatcctcgatgaagttatccatgtttttagttttgattactacgtcatcaacataggcttccactcgcttgccccagtggtcggctaagcatgtttggatagccctttggtaagttgctccagcgtttttgaggccgaacgacatggaggtatagcagaaagccccaaaaggtgtgatgaatgcagtcttttcttcgtcttcttttgctagactgatttggtgatattcggagtagcaatccaggaaagagagcatagaacagccaggcgagctaattccgcccgaatggcctctcttttgtagtacttctctaatgaaacctgacgataccaggcgagctaattctacccgaatggcctctcttttgtcaagcgtgaa

SEQ ID NO: 95085 - DNA, 703 bp, Zea Mays
caattatcaactccacattggttcatctgcagttgagacaccgaacttggtccaatagcacaagtacaacacaaatatttaattatgttcagttctgaagatagtaacaaacaaatatggacttcacttgtggataggctgaaaggttcaaaactgatattttcaacaggaagctggaacctaagacccctttgttgtccaccccactaaactcagtttgtgcatatgagtagagtccagaaaaggggtgaagatctttttctcccccggcaactgatcccagcttcagtcactgtccaatgttcagagcatttccccccttcctttatggctgacaactcactcgatattaccagcaggagtgggacccctaaaacttgagtcatgcacttcatccaccatacaaacatagcccaacacatttttctgggactggctcacaggtgcaatacaaatatccagactgcccaggaattcagataataagaagagcagataaagactcactgcccccaaaacagtccaaaactttgatatttctcaatggagctgaggtctctagccccttggctaagcacctcgaccctatctccacccaaacacacaagtgacactagctgggagagtgatcttcttcagtttgccaatcaaaaactgaatccaattcactaacactgctgcttcctttgcccacttctctgtt

SEQ ID NO: 95086 - DNA, 551 bp, Zea Mays
gaacgactgaagaagatcctgatggtacagtagtgaaaagatcttcaggttcagtgcatctcgccgccggtgaaccaacgccgcgatccacgccagcgttgcgattcgtgcccagtggcacgcggatatctatgtgaggtgaaaaatctcaatgcgggaagagttggagccttatcactggactgttcaccgcaccacttaccgcgcgaccggccaaagtgttctcgccggagttcgccctttgtagccgtgccatgtgcttacgcttgttatcgtgtcgtaagacatcgcagtggatagcccgtttaccgccaggatctttacctcgtgagcgccacgatagttatgctccgatgactcacctccgctccgaccgcaagtcatcccatctcaaattcgcgaaaccctcgagtggtctctataaattgagtgttcagtgtgctctgttagcttgttacgaactcagagcaccgctcctcgccccagattagccaccgtagcgcctgaatttggattttcccccaagtcagtttgccgcgccgccgtgaaac

SEQ ID NO: 95087 - DNA, 442 bp, Zea Mays
aagaggttttacagataaaacaggaggagtttatacatttaaagcaaggaggagactcggtgatgcaatatctcgccaagttcaatcatctctcccagtatgctatagaccaagtggacatgaatctgaagaagaagaattgcttcatgagagatttaaatgtttgactccagcgaaagatggccacatgcttggacctcacctatagcagacccgtaagcacagcgctgtcggtggaagccaaaaattcgggacaaggaaaaacaaagagatatgggggtgaacgatcgtctcaagggtccaagaagcggtcgaggttggtgattcatcctttcaacccaaatcactcttcttttcgtccacctacatatcctttcaagcaaccaggttttatccgccccattcctgcccccgctaagaacaatcagccgagtgcccctgg

SEQ ID NO: 95088 - DNA, 289 bp, Zea Mays
atgggctattctgcgtctggtgtgttcacggtaagttcccatgcccagtttgcaaggaagctctcaggttcatttggttgaaaaagggtggcaaatattcatccttcgataaacatcgacaatttctccctgctgaccatccattccgcctagacatcaagaactttacgaaaggtgtcgtagtgacagaccgtccacctgcaataatgactggtgccgaaattcgtcaacagatagatgggctcgtggccaatacagaaggtggttttgtggggatatggtgagcagc

SEQ ID NO: 95089 - DNA, 379 bp, Zea Mays
ctgcgaagttggcatagtcaggtccggagtattttgggtaccggaatgaatgcatgcctctgtaaggaaaaggttttagtaattgaatagaaacaactaaaaatggtgaactaaaatacataaattgaaaaaatttacaatgtgggaaggtcacatgacgatagatgatgagatatatctggaagtttacctggttgaggcgcttccgtagcattgtctgtgtcgatagactccgcgcgaaggacatcatcgatcatctcagcaaatgtgtccgctaattcatatttcttcacaaccatcttggtaagagtatttttgatggtggaacacgctttgccaacttcggaatcgtactcaaccaacttttctatgaatttcg

SEQ ID NO: 95090 - DNA, 430 bp, Zea Mays
tagaacctttccaataactatcctttttagtgatcaccaatgtatcccccatttctcaaatatggtaggaggggttgatgtattgctaatctgctgcaggggcgcccccaataatttaaaaaaaaacagtattggtgatcactaataccactattggggatgaattattgatgagctgctggagatgctcttatgcatcctgattcctggagtggaaatctagctgggaggttctgtactgggaaatcctaatactcttagcgctgtaaaggttctgctttctagctgggagtgccatcaaacgtttgtgttgcagtcgtcccaactccccagagtttagggccgtggctgccacagctgttttcagcgagttgttttgtggtattggtccagttggaacgcaatgcaacaaagtgaaacgcaattgaag

SEQ ID NO: 95091 - DNA, 757 bp, Zea Mays
gctgatcgtattattgctttgagagatgtgttaaagctgatgcatgtgtgggaaggagggggtcttgcccttttatagttcaagggtagggctttatacagatgacttgttttctactagtaaggacacaatttgtagtagtgttgtctttaattgcctcggcgtagccttcctgacgttgtcttcgggatcgtgcgtagttgttcaccagtcatggcgtaccgtcttctacacgggtccctgaagcgacgcccgttggtccccacaaggcagagacagggcaagtcttggtgtcgtgcgcgttgtgaccctgccttttgtcatttaaccatgtgtcatcctcctagcgtgcttaatcgtacactcgatatgatgtattgatgtgtcctactcgatatgcatgttactatggcaacgccgatgcttaggttccctaggactggtggtcatccgatcccaccaagcagagaccgtatgcggtgacgtaccgtcacgttgatagatacttcccgacacccctttggtaatgccgcgtcacatgtagtttgttaataccatgtcttatcgtggctgacgtgggtcaacagtaccggattggggtctccgcctcgctgagctgcttggtaaggatttggtcgacacctccacctcgcagggttgctcgacatacacttggtcggtacttcagcctcgtagggtaggattgctcgacagagacttggtcgctcgcttcgccccgcagggttgctcgatagag

SEQ ID NO: 95092 - DNA, 582 bp, Zea Mays
cactcatgcacatccaacatatattaccatatccatatatatgcctacataacgtttggggtcaccacttgaaaaatattgatatatcatggcataactacatcaacagctcttgtttggggcaaatgagtcaaatcattttatccgtttatttttggaaaacagaataaaaccaaaacctagttgcactaggatcgtagccctaacacaagggctagattgtggcatatccacgagtaagaaaaaaacaccaacacaccctagcacaagtgtgaacagcagcactaccacaaatatagcacaagaaattgttggtgtgcatcgtcattgtagttccaccaattattactcaccattctagctccaataatgaaatttcactatagctccaaactctaacaaataaatctgaagattattgtttttgagaatgtaaactaagctgaagatataactagatctctcttgtgcacattatgatatgattcaattttagcaaaaggttaaagtctaataggaactaatataaacacatggtcaaaattaaatatctacatcaccaccttccactctcccttttca

SEQ ID NO: 95093 - DNA, 557 bp, Zea Mays
acaaccagaaacagaggtactactggagagcttggacatcacatcacgcctgaggtggctgagaagacgatgccaagtcatagaagaggcggccgctgcaagaacatgcggggcagaggtcgatgtagtggaagcaggcaggtgaagtgtgtagaggggcccgaggctgtcacaccgagcgagaagggtcatggtggcaagatccttcacagacagaccaaacgggtcaaactccatagaacaagagttgtcagtagtgaactgacggatggaaagaagattctaaatgatgttgggggcaacaaggacattggttaaacggaaaggaccgggaaggaccgcgtcacctactaaggtgatgggtagggcgaacccgtttccagcaacgatggaagaaagaagggaggggtgggggagggaagtgtaagacataatacctgcgtctggggtggtgtggtaggaggcacctgagtcagctgatgaggacatcactcccatacaaataatgcatgggctgacaacacgagcaagtgcacaacagctaaatctccaggttc

SEQ ID NO: 95094 - DNA, 659 bp, Zea Mays
gttgactagaactctagacgatgatgtagccaagatggtcgcaacccaatccctccacttttggccaaaacccagggccttcaagacatctagaaggtaaggccagctcaaagagtcaaaagcttttgatatatccaatttaataaaaagagttgccttattgttcttgtgtagactacgaataacattctgcacgtaaaggaaattgtcatgaatgcagcgtttctttatgaaagcattttgtgaggtggatacgagcttatcaagcattggggccagacggtcagccaacaccttagtaataattttagccagactgtcgatcagactgattggccaaaactcactaaactctgtagctccctctttcttcggaagcagaataatgtgcgcctcatttgcgaaatgtaactttgaggttttatgattatggaaatcttgtaatgccttaatcaagtcgaccttgataatttcccaacagtttttgtagaagatcccaatgaagccatcagggcctggggagcggctcgctagtaaagccttaattaagtcagtgatctcttggtcagtgaatggggcttccaaatgtgaaaggtcatagggtatgtagtcgagggatgaccagttaaaagccatggtcctaacagagctcttcccta

SEQ ID NO: 95095 - DNA, 301 bp, Zea Mays
cgttattggcgttgtcgtagcaccatatttggagttagaaagatatgcgacgttctaatctatggccatatttgaacctctagagctactcacccagacagcctatgttgtgctcggtttgagatatggagtggttcatcatttttctcactcaagagtttgttagattctccaccaatcctcctccctcatccctcaagctaataattagttagtacaagcatgagaatggggtgattcattggattcgtgaaatgaactcatgatgcaccgcctcatctaggatgagttgatcctcaaa

SEQ ID NO: 95096 - DNA, 304 bp, Zea Mays
gtttttgttgttcacatgaattctttagaaataagttttcactttccaaattttttgttttatctttctcattttctaaatcaatgttcatgctagcaagtctatcaacaagctcatcatatgaatatgaatgattagtcacattagcattatatacctttgtattaccttgtgacatcaagcaatgtggtgtaatggatgggcttgtagtagcgatatcatcatccgagcatgaacaatcaccataatcatcaagtatgcttgagatagaacaatcatttgcatcacttgagtttgagccagc

SEQ ID NO: 95097 - DNA, 595 bp, Zea Mays
ctctatgtctacttaacccgtactctataaaatcaagtatcaagcactcaacttttttaagtcaattatttaagttgaatctaatcttatggacttgtatttgccgccatattagctatcaaccaaactatcgatcatgttatagactatcgtcagctctcatctacttgagtgttttagtgcacaatctttactagtattagcctacaaccaacttgataccacgtcaacttttttgtagacttttagttgatatgaaataagtcattttatcgaaatataaatatatactattacataactaattgcacatataaagactaaacaacaagacaaatttattaaacctaattaatttatgattagcaaatgtctaagacaccatcgcataggcgaatcatgtagcaaatgtctacattagttctaatatatgtaattattttttgtaactacactgtatataatatttctaactagcatctaaatacccggagagtaaaatttagtgggttggatccaaattaacacaccccttcactttattagtgtcggtcctcggatcaatgcgtgcgcacgagaacgacaagtgaacgca

SEQ ID NO: 95098 - DNA, 801 bp, Zea Mays
gtggtgtgtcgttttgggttggcttagcctttgtgcccttcggttgggtgtcgatatctctggtggctaaagtaactctagtttgtttggtgttatcagcggagactgccttcgtcatctcaatgggggtagagttggatcgagtggttttctaggaggcatcatggggtctggttttcgtcgcgagcacgatggctgccaaatgttgggccagacaggtggaccctaacactcgggggcacatgataaacatggtgctccaaaaaacattaggttgggaacagtagtgtctcgtcaagcatgtcccatcagttacaggtcgtgtatttatagggcgactagggcatgtaaatctaaatacaattttgcatccgactactggctacatccccggtatatgttgtgctatggggtaattacagtacaatattaacgcttcggaactaagtacaccagggcactcacccaccctgtaggatgaagagtgggcctagcagggcaactgtaacccttctgtggcccgctagcttagctctccttcgaggccttcgagttcctaggcgtcttcgcccgagcatgcgatacaccaccagcgaaggcttcaacctcacttcagtcgccacggtttggctctcgcttgaagggtatggtaagtgccttcgccttcgatgagccccgcgagtgcttgccttctcatggtcttcgtcgagcatgtccaattaagaccctttgggcgatgcgagcctggcgaggttccccgttgcgctaagtgcactcagtcattgttagttttatcttgag

SEQ ID NO: 95099 - DNA, 541 bp, Zea Mays
gggagacttcatcctaggcatgtccgatcaattcataactctagtgccaatgatgaaagggccagcaatgttcagcataaccatcacaattctcagtcttcgagcatgaagcagacttcttttagaccaccggctctgaggggcaaaggaggaagaagttttagtgtggaggaaggttcggtaatcaacccagaaagctgtattgtcttttttgtggcaaggacaagggccacacaacaagaacatgccaggtcacaattcagaagcagaaggaaattgccgaagctgaggcgcgacagagtcagccaaagcaagtcctccacactgcttcatgttattccccatacatcctagaatacataggcaatcaacaacatacgacttttgttgcttcggcaagctattccccagcttcctggccctagttgccaccaccaccaccactgatccacaatcaatagccagaagggcaatcatactcctcaatagcgcgaccttcgggaggagtccgaagctcgcacaatcaacaacactatgcctg

SEQ ID NO: 95100 - DNA, 577 bp, Zea Mays
actacccaattatggcgtagcgattggggtcccaaaatgcacaactacacatagtgagaaacaatggtgatctcaggtctaaggatttagtaggtgtaccactcaaaaacaacttatggcacatacagaataacaatcccaacaacgtttcgaggtgggtcaatccaacaccatgttcattaacatgtgttcacattattaacctgatatctctgtatccatatccgtgaaacatgatcatcaattaatacatgtgctagtccgtgcgtactcattatctcatataacgatatggactagggagtatctagaataacaccataatcaacaaagagtttcacaaacaagtcacatacttgataatcgatgtaaatgatagttattcaaacaaaactttattcaatagtacataaacatagtcatgacatagctctctcacacattcacactagaatcactgatgtgagcatcttatacccattgatcttgtgtgtgcctcatgttttgcttgtgaaagaggtttcgtcaatggatctgcaacatttgaattcgtgtgcaccttgcaaatcttcacatt

SEQ ID NO: 95101 - DNA, 512 bp, Zea Mays
ctaatatttatggactgggtacataattttctaagagatcaggggcccgactgctaaaaacaggactcaattgttttgttcttataatactatgcatggcgggtttgttattaaattctacggggtgtcttttgcaaataaggctcggcgaaggggtatctgccaaccacgaccactcatatctaatcctacggcccagattaaaccatacaacttaatgtatcggtacgctctcgggtcccttggatacgagattgatggtcgagggagttccatgtctacgactcgacctagccctcagatctacaatctacggctcggattttatctaaaaagcggtacgcggttttctaatctcgtacgcacatctagatcgaacggtcaatactcatccaagcaaaagggtatgcgagatatgattgccacagtcggtctgggatcaacggccaccaacgcttctcccaccccgcccaacagggcacggcggcgcccatggacggacccccttctac

SEQ ID NO: 95102 - DNA, 838 bp, Zea Mays
tctgaaacatggagagcatccgttcggacatctgctgatggatggctgcctgtcgagcctgctctgctgctagatgagcctgatgctgcgtaagagactgaagaatcgtggctagagcagggccaatagcaggtggggcaccaggagcagcactagaactactcgcctcatgatcatgtgagcgaggtggcataggaggcggtggtaggatcccaaggtcgtcatcatcatctgaagaggtgttagcaactgtaccctaggtctcaaactatctgaacgcctcatcctccgcctgaacatttgtcactagatctggcactaggactaggtcctcaggggctgtatgatacaaaccaaactagaggcgagaggactcgagggtgccctagaactgaggaggcctgatgagctgcgcgaagatgtgacagagataatgcgcatatggcagctgatggcgagcatggagaccatccaatattgtatcctcgatctcacaaataaggaagtcaaccacatcaaactctaaatgtgagatcaaggcaccaagtagccatagctgaatatgagtagtggcctctctatatcccatcctgggtagcagtgtccgtctcatcagctcatataagtacttcactgtaggagtgaagtcagcaggagatcgtcgagacccatctgtgaaaggaggtctgaacagggccacgacgtgagctgtagcaggtgcaactccatcgtgagggtgatgaggaggatccgaggtgccattgcacagactgtagagccgagtcgacgactctggaaatccaaagagctagcgaatccggctggcatgcaaagtgac

SEQ ID NO: 95103 - DNA, 730 bp, Zea Mays
cgcgagtgagggagagcggagaggcgacgcgagatctactgttcgcgtcgtgtgcgagggataggtgacgcgagctccaccatccgcgctgccaccatcccctccatcgccaccttcgctccgccgtcgactgctccgccgctggctgctccactatcgtctaatctgtcgctggctgctacgctgcccctaggacatgaggtattcaaccattgccaccatacgcttctggatctagggctattgttggtctttgcgccgaataggctagggcctccggctcgcgaggccttcttcctatgccgaacttcctgtaccagattcactagcctatctgttccatcagacccgagcagacaagcgttgtagttggtacttgcttgattatttatggcattcgttgttgttctaccgaactcgtcttcttggttgtgaagacgcgaccgccgatcatgccacacatgccacacaactgcatagaacctagtggtctttgtcttgctccaaacaaccaccatggtcggtcagttttttagaatagcgaccactcttggattcccttttgaaaactacaagcaggctccatgttcttcgactaggaggaggccatgtgtggcagctgctcgtaagtcagggcaagctattttcttattctgcagttctggcatagtgtaaactaatttctctccatctctccgctgcaaatggttgattaatcaatctaattttg

SEQ ID NO: 95104 - DNA, 574 bp, Zea Mays
cccatgataatcctagaccttctgatatgttgacaaagcttgtttaaaagctaagtttaaattatgctcaggtttagttattatagtttaaggcatagtgacttttggtgttagtgattatttattattgaagtgagttgattgatcatacttcattttctatgaggtggaattcgtcttaaggtgaagttttgttgggatctagattattctaaagtgctccattcggtttatgtcaattagtggctttgttttctattggactatagtccatcctccctatatatacatcttgtaattcgcatggaaagagagaaattattgtatttcatgtgttcaatgtaccatcttcatatagtgaagattgccggttagagtctatggttttttctcgcaagattttctatataaaattgtatgtgtcatgttcgatctttatttatattatttgctaacatcttcaatagattcctagcttcggtgttgcatgcatgaatatgatagaaagcacgatagagaccgacaacaaccctatgttggatctccaccatatcaggctgtccctacaagaaaa

SEQ ID NO: 95105 - DNA, 571 bp, Zea Mays
ttcgcagacggacgttggcaatttctcgccatcgtcagcacttcgccaggaacccgcgaccatcgtggatagctcacctacgcgtacgattcttggtatggactcctcgcctatgcccgctttcattaccataatgagtagagtcggtcgaattaggttttggtgcgactatgcaggggattcacctcgccggcgatgggtttcaccgtgaccgcgccgcgaccatcgtggcaaaccgaccgggggaggaggaaacacaggggaccgtggatccggtattggatgacccagattagagcttcataacggttggctgggggttgatcctaggcgttgatcggattatggacgggcgaagttaggtctagagggttttaaatccggtgcgttcatccacgatcgcacggctggtgatcggtaccggtccgagcgcactgctagtctaatatggacggccagcgactgcccgtactccttcggtcgtgtaaacttgctaaagaaaccctagctttattagaaactaacccgccgtccagtatcactattgacaaagtcttgggatacttacaag

SEQ ID NO: 95106 - DNA, 356 bp, Zea Mays
tataggaataggagatacaagtcagagtcctaaatagataggataaaacccaacatacaagatgtagtcctaagcagataggacacaatcctaatggataaggaaggcgtacatgtaattatggagagttggattctcatacaactaggttaccatattagacctattatgtaagctactcgtattcacccttgtaactgctccctccttgaactataaaaggagggacgggaagccctcgaaagcgcacactagaacacaacaaatcaatagcccccaaaacactggacgtgaaggtattatctcacgatgagagtccgagccagtctaaatcttatgtcccttgtgcattttac

SEQ ID NO: 95107 - DNA, 757 bp, Zea Mays
cagtggctaattggaggcgagagttggtgttcgggttttgtaataagctaacagagctagctgtgcactcaatttatagcatctgcaagcggtggctccgaatttggaaaagggaagcttgcggccggagaggtgggtgagtcaccgaagcgaaactactgtggcgttcaccatggcaatgaatcaggcgatagacgaggtatctacagcggtctactgcgatgtgttatcgctcccaaatacatggcgtccaggcggcaagcgtcgaactccggcgatggtcatctcgactggtcgcagggaaagtgggtacgacggctagctcacggcatcatccgcggtcaagatctttcacccgccacggttatccacttcagataggcacgaatcacggtggccggcatgaatcacggtgcaagctcactggcggtgacagattcactgaatcagtgatctggttcagttactgtacaatctgaatcacattcagcttgttctgacagagcaagtttaggagctcttttcacaaatttttatgtaataacccaccaatctatctgtagcaaagttgatctcctacaaaccatctttgattttattatattaacctcgatcaaacatccactggatcttatttgaaattgctctcaaagtttgtcccagttcactgtcagtcgagcttcagcttcagggatgactgacagcatgactttaggtccatttatctcccattttcatacagcaccaaggctcagtc

SEQ ID NO: 95108 - DNA, 414 bp, Zea Mays
gaacaagtacatgctgatgtatcggcctgtatcgctgtggccgatgcccctatactctggacttatgagactgctacatgtctcacaggagtagatttttatgattatcagttcataagtatagataagaagggtttcattcctgtaatgctagagccgatggagaatcggctaaatcctaaataaagtttaaatgatgagtacacacaaaattcatgagtccttggtcacggacagttcgacttctaaggccggatggtctagtctttcacaaaacagtttggactttaagaccaaacatctaccacagcgtaaagacagtattatggataatccggcccccgagaccggagagtccgccatcacacaaagatcatctgattcctctgtgggggacatgatagaggaattcag

SEQ ID NO: 95109 - DNA, 693 bp, Zea Mays
gacgtgcagaagtgcaagtcatgtactgaggcggtttacttgtaacggaagcgaatccgagggaaaaaggtaccatgaaccataacctgaaacgtaattcagaaaataacggatgatgaatattgtcttctcccgaacatgtaggagaactgaattgtgcatcattatattaagaagaaaatgatgatgacttgtacaacccctaatgggacaaaataataaatgtggaaaggactagccaaacaaacagtaacgcaaaccagcgaccaaaaaagagagaccatcatggccatatgctatggagccccttggctcatgccagtgccccgcatgatggcatcaaggttaggtggaaagcccttaaaaagacaaaatgacactcatttatatgtttccaaatccaccttgccgccaatacgaccaatgagctgaaacccatgcgggcatctgtggtatagatcacgacattccaaacaagcatctcggtgtattgataacaccccgggtttccagccacagtgcttgctgctggcgtcgacttccctatagtggacatggccctggaattcaggtcagctgtttcggtccctttgcatgtgctgccattgttgcgtggttggcatcttgggttccctgttgctcgagttgaagggtgtgggcttggtggaagtaggcacggtggatgaggagggg

SEQ ID NO: 95110 - DNA, 916 bp, Zea Mays
gtcattcttgttgattttttatgttcaatttagtaatggcaatgtgatggccccctttccaccaaacagaaaacggaaacatttcacaagtccgattgtgatgacattagaacacagcaaggcttaaaaaattgtattaaaatgtagtgtatatattcagtgaactatatttgaagtgtagcacatatattcaatgaattgatatttcagtgcatatattcagtgacctgatatatttcaagtgtagtgcatatattcagtgaactggtatatatgtgtaaaatcattattaccaaattgatatgttggaaatattagcaaaaaattgatgtactcttgagaaaatcctccatggaaaaaaacaagcaggtggctaaaatttgtaggtcctatatgaataggataggaggaaaattaatacgtcaaaaagacaaagtgtgcgcttacttagactctctccagcaacgaactgtaaaacaacctgtactctaaatttagaggatattgtgctcctttatccacccaacaaggaaccctaaaagacactctaaaatttagagtctctgcttcagccgctatatgtagagaaacactgttcgtcctctatcccgcaatcaaagcgctacaacctgacacttgtgtacgtgacgaccaatgttgattgacttacccacgttgcatgcatgcatattgtgttaaaaaaatggtgtccgatgctggattgttgcataatgcagttgcgaatagcttagtcaaacttttttaattttggtagagactaacggttttttgtttgcgtatacaagaaggaaaatatataatacaaatttgtgatacattgttttgctatatatgaatgatgagtaatttctccataaaatgaaaatatattgtaataagtatttcaattttgtga

SEQ ID NO: 95111 - DNA, 384 bp, Zea Mays
atcttaacaaacctgtaccggccttacgaatccgccggtggtgggggctggttgagatccttccgggcgcattgccaccgcccagtctcgttttctccccggccctataaagagcatggtccgcgacccctggatccccgcaatactaggaagccattgtcggagagagagaggtgaggaacagagaggttgccgccagccgccgtagctccatttgcggtcggtgatcctttaccgaagttcaccatgctattgtaattgcgtaacattaaatcgtcgtagtgattagctcgctagcccgcggcaattgctcaccggacataaggaagcgtcgcggagccaccttctccgtggaccaccttctattcgtcatccctacctccg

SEQ ID NO: 95112 - DNA, 338 bp, Zea Mays
ttgcacatttttatcactttattcctgtaactcgagtcaaagtgtcaatactcttaataggatattccgtgtaagtaaaatcacactgaacactgagctcttccgttggtaactgttccttagggacacggggacacttcttaaattgagacacatggaatacattatgcatatcagatagattatcaggtagctcgagttaataggccatctttccaacttgcctaaaaactccgaatggtccaataaagcgaggggacaattttcctttaacttcaaatctcctcataccccggagtggtgacaccttcaaatagacatgatcaccctccttaaac

SEQ ID NO: 95113 - DNA, 471 bp, Zea Mays
atggcacccctttgaagctttgtatggacgacgatgtcgtactccgctaaattggtctgaaccaggtgaaaggtacttcttcaggcctgatatggtgaaagaggtcgaagaaaaggttcagaaaattattcataatatgaagaaagctcagactcgataaaagagttatgcagaccgacgacgacaacccttatgctttctggtaggcgattttgtctacttaaaagtttcaccaatgaagggtgtatcgcgtttcggggttaaagggaaacttgcacccaggtacattggtccattcctggtgcttgagcaatgtggaccagtggcataccgactccaactacccgaaacattgtctgctgtgcataatgtgttccacgtgtcacaattgaagaagtgtcttcgggttcctaatcgaaccgttgaagtaacggatgttgtccttaaaccggacttgacatactctgagca

SEQ ID NO: 95114 - DNA, 1239 bp, Zea Mays
gtgagagaacttaattctatttttattgcttcatattagggttggtttatcattcctctcccttctctgattcgtggtttcatttgtttgatattattgtttcatgggcctagtttagtaggtgtggatctagcgtggtggctagggagggtcttgcaccctctacctacatgttgtccatagaatccccatgaagcatctcttagatttctaactatggatgaaaaggagaaaagatgacaaggaaaaagtgaatgatgagaaaaatgaagatgatggtgagcaccccctcttgcatgatcttggatccatgcctgtagtttagtaagggatacatgtaaaccaacatattattgttattattattaattatatgaaggctactttaaattgaccaatagattgaaacatttaccacaatatttgttctcctacctagggctacatacacctacaaccatgtatttcgcacaattacgatctatgtcattcctcctccctatactaatcatgggatgacctagggagctacatcgatatggttgaaacatacctaaggcccaacccaacaaatcaagcaatagttgtaagaagaaaagaaaactcctttcacatacaatgtttgtattcgtctagctccatttgtgaataatgatgctcacgacacattcgacctgtccaagtgcgaaggtgccatggattgatgaggatagtcaccgacgagtcaaaaagattcttgaagtgaacaatgtgtattccccatctcgccccctagtcctctttctccccagattccaaattcgtaacctctatatctctaattagatgtttaggccgttgtagagggcaccaacgcccctatttgttttcttatcattgcaacattgacttgccccttgctcaatagttgtggaccatagagggcatgacaacaactgagcatgtaatctccacacaagaactcaacccaactcttttgaactccctaaggcacaaaccataacctatttgttattcaaatattcaatagatcaatttaccctaaaattagtttagttaatgtagaaaaagtaggtagagagaattaaggattttttgttaaatggaagaatatgacataataaacacttccacgtccattggatagcgtaggatcaagaagtaatgtgtatatttatttgttgtctaaacttttcggcatatttctttaggattgattaacaataaggtagacaatcg

SEQ ID NO: 95115 - DNA, 272 bp, Zea Mays
cttgtggtaacattcttcttccttttctttgaatcctgagccatgacaggataatcaggatagaagaatccgatggcatcaaaaacatgattaagccaacgtctctttcggcccctgaaggcccggtgcagagcctcacattgcattttgcttcaacataatccagctaaccatcgttgggttttccgaactcatcttcgaagctatacttatattgaagcctaattagccgaggctcagcatccgaagcatcccctttcgacacctctggc

SEQ ID NO: 95116 - DNA, 574 bp, Zea Mays
acgatacaacacgttggaatggagatcaatggcgtggattttaaacattagagatctgcttctgcgcaaaacgcttccctccatctaatctaagccaatcatctctagatcaacgatactggtttctctccctctcctgtcactcttgctcgtagaggcaaaggttccacacggcggcgccattgcctggggtcatccccatgaggccccctacatccaaactcgacacccatggtgctataggaagagtgcgacccgacgaatagggttaagggaattgtgttgcggatcgcgcactcatatgcaccaaccacaacacacggcggaagctcagggatgtcctaccctgatgaggaattgtgctccccccataaccaaaactcaacctccgatggctactaagcgctaccataaccttactagagaccatggagcaatggccctgtccacgacgagatgtagagcggcagtgaggttcctgctccgatgagcaatctcccgcacatcgatgggcaatcccaaccgagtgaaccacgatcacgcgcggtgagtgccggcaaatccctaagttcac

SEQ ID NO: 95117 - DNA, 303 bp, Zea Mays
aaaaaacgaacgtattgtttagaggtaatgcagtaagcacacataatgtttagagtaaatgtgcaaagcaatggatagttatgcaaagaagaaatacgtaatagtaccactaatgggaaaaagttatatcggaggacactattaggaaatggaatgtataattaaatatttcttgatgaaacagattttatttccctgagcgaatatgtagaattttatgaagctcgtgcttccaaacctaagattataatttactgtaagcagtaaatgcacattcgattatatggtgaagtaggcaggatg

SEQ ID NO: 95118 - DNA, 339 bp, Zea Mays
cctatcggcaattgcggcggcgggagttatgccttttttggtgcactcgttcgtcgggagtttctctcactccgaggctttgtcttgggacacaggctgtgccggatcccgttccccggcttcatgatgtcgccacatgttctggcgtctgtttctccatcgtctggcctcacgctggggaggttcctccccttgcatggtaggctgatcgtcggagaagggtgctgactccgatctcccctggatgaagaggatgtcagggtagaaaggagctggtgcgacagtgttcttcttcccgtcctcctttgagggcgaaggtattggaaaggtggattgacg

SEQ ID NO: 95119 - DNA, 297 bp, Zea Mays
gccttaccttcgaaaaaatgctaaatatatggtaacaacttctttattgtgcattgttggagacggtctcagaacctatctagtgcactcgtggtgtacgaaagtattattcactacaatattatattgtatggttgagctaaccctaccattaatttgggccgattaatgaaggagttaatggtggattgacgtatgaggtaatgaatgtaggttccatatcttttaatctttatgtagctcatggtattatatctaactcttatgacacgtatagaatagagaacacaacaacac

SEQ ID NO: 95120 - DNA, 640 bp, Zea Mays
caacaacggcaagcaatttgacagccaagacttcaaggatttctgcttctccattggcaccaagcttgccttcgcctctgtataccacccgcagtccaacggagtcgtggaacgcgcaaatggaaaaattttcacagctgtcaagaagatgctcatcgacgataaaaagggcaagtgggccgatttgttacctgaagcgatctgggcattaaacacgactgagtgcagggcgactgggttcacccctttccgccttatatatggatcggaggccatgaccccgcaagaaataaaacatgggtccccacggacagtcccatcagctgtccccgacgtggacgagcccacttcaaaggacctgatcgatggagaccgggtcttcgcactacaagctctaaacaaataccaggcccaaacaaaagcatggcgtgaccacgcagtgatcccgagggaattcagcgaaggcgacctcgtactcgtccggaccgctcggacagagtcccggggcaaactggagcccaagtgggagggccctttcatcgtcaagacgaaggcgtcgcccagcgcatacaggctcgcgacgccatccggcgaagaattggagcattcctggaacattgataatctccgcaaatttttt

SEQ ID NO: 95121 - DNA, 1031 bp, Zea Mays
cttctcaaccaaagatccgactacattgtgtttttgggcgctagactcatctcatggtactcaaagcggtagcccgtcgtctcccactccaacatggaggccaagtatcgagatatggccaatgacgtggtcgggacgtccttgctccgttagcttcttcatgagctccatagccccattgcccgtgccaccctcatctcctgtgacaacctcaacaagatctacctctccaatctcgtgcatcatcagcgcacgaagtacgtggagatcgagcttcacttcatccgcgagcatgtcgccgacggtgatgtctgcgttctgaccacttcgcagtttgctgacatcttcgccaaggggcttccttctactattttgattgagttttgttcccgtctcaacatctatacaggatagagttgtgactgtgaggggatgttagcgtaagtgttagggttaccatgtatacctttattgtaatgggctttagcccaaataactcatctattaatacatgtccaaccctgattagggttagggttttctcccactctaacaatatcaataatatgatgatggaatttatggtgatcataataaactaagcaaatttgggaaaggcaacaatgacatctttgggtgtccacaagccatatgatacggaatgcatccaatgtgtttcggttacaaggacactacatccaattgataaaatatacctagagtccgagttgaactgcacaatgaaggcaatgacgagaaataattcatttcaccagtccgcactacatattggactaacaaaaggcatgagcaatatgtaagtcattaaggcatgccattataagcatgattgtgcctttttatatttaagcatacaacttcacctagctttgcaaatatgcatgaatgtcacatagttgattgaatatcttgaaataaattaaagatatgtaatttaatacaaattaaagaatgtttataagttttagcaaaagtatttataaatgatgaaatcgtgcaaagcatactga

SEQ ID NO: 95122 - DNA, 394 bp, Zea Mays
cgggttcatttctaaagattacaggggcttttatgctattctgacccacgaaggggtatggatcgattagggccgtccgatcaggagcggtcagctaagattagatttaggtttcacatgaatggggacgcgctatcgagggttggatcccgatcgaaccgtcacgatcaaggacatctgaggttgaatcccagccgcgacattacgatcccagggatcagaatgatcccaccgatatgagcacgcaagccctgatccagagcgctcatttacaaaccaacggccacgagctcattactgcactacccaatcttacacgtacgtatacgattggacgactacggcactcatctaatctccaccgtccaacagtcgatctaccacgtatgggctc

SEQ ID NO: 95123 - DNA, 299 bp, Zea Mays
taaagcatagctctattcgtactttcttaagtattattgctatgcaagatcttgagcttgaacagttagatgggaatactgctttcttacattgagagttggaggaagaaatttatatagatcagcctgagggttttatggttcatggtaaggagaattttgtttgcaaattgaagaagtccctttatggtttgaagaagtctccgaggcagtggtacaagaggtttgattcatttatgatttctaatggctttaaaaagtcccggtatgatagatgtgtctatattaaatttgttaat

SEQ ID NO: 95124 - DNA, 446 bp, Zea Mays
ttggctaaaggaaatcaaattcttgggtcacactatctctcaggcaggaatagctattgatcctgataaggtgcaagaggtgatgaactggaagccaccaacgactatccgtcagattcggagctttctaggattagctggttattaccgaagatttaatccggatttctctcgaattgcgaagcctataactgagctgctaaagaaagaggccaagtttgtttggagtcagaagtacaaagatgccttccatgcattgaggcagcatctgaccacagcaccagtgttagcgcaacccgacagcagcaagccttttgatgtatattgtgatgctatggcactagactaggttgtgccttgatgcaggacaactgagtcactgcgtatgcctcaagagcactcaggcctcatgagcagaattatcccactcatgacttagagttggc

SEQ ID NO: 95125 - DNA, 576 bp, Zea Mays
aactcgcaggggtccgatacccggcgggggcacccgtggacccaaagtatataacatattacatgtacaatgagataatgtccacaatttatagatctttctctctcaactgcaattgagatcaggttcaaaggtgtgaaagagactgttgtatgtgcatgtcatggaaaatttgtagtcgctacccttacaacaaaatgtttgttgtcgcccaacagtgcatatgctgctctggggtcgttgtacgtagatgagacgcacatcagcacatgacatggttgattggttagctacttcgtggctcgtctcatcaactcgccaacctattggacaaatcacaaacgtccagctcggtggctctagcacaaaatcttgtccctcgtggagttccagcagttccaactccagcacaacacaatagctcactcagctccaactcctatattcgagggactgtggagcactcgtgggtgggggagaaaacccgtccagaactcacagatccgtgagggaaaattaagacacgtccccgcccctgccgggtccgaaaaccgtgggactctcccccgatcctac

SEQ ID NO: 95126 - DNA, 296 bp, Zea Mays
cttttccgcagttctcttgtaataattggcttctgcttcatctgcagcttgggagaatagctgatcctcagcctcagcctcagcctcatcacacttctgcttgtaataagcagcctctacctcttcggcggcccgagacataaactcatcctcctcctcttgagcacgtaatcctgcctcagctagtgcgataagctcactcaaccttgatgtgtcgtcctactcttcccatgtaatcctgccccagcgagagcgataagctcactcaaccttgatgtgtcctcctcctcctcctc

SEQ ID NO: 95127 - DNA, 411 bp, Zea Mays
cttgaaaaatttatctttgtccacaagttctccttcagaagattcttcaagctctcctttacaagagtctctctttgaagattttatggagatggttctgcagaaggagttgtcatgtagtatctcaagtctacctgagcatcgggattcgctttttgagaccttgaaaaatcctgcccataagttgcatgatgccatataccatccagcatttctctcagatgaagagttctctaatctatgcattcacactcaccgtctcgttcgtcatgagatgttgatgaggaatcaaggaactgaagcatgttcaatctgtgcacatctaaatgtggcatattatgaccaagatgttatctttacttgccagggtcacttcatgttatccaattttcttggggtacattccaaatt

SEQ ID NO: 95128 - DNA, 465 bp, Zea Mays
tgaatcatcaattaacctaagaccaatcaatctcttttctaactcccaattggaattaacaaaatgagcaactaaagatcgataatgttcttagccttaccattccaaatgtcagatgcaagagtaacagatgaaacaaatgttttaaaagcttcaatcaatttaaccacatgctcattataaagcttcaccatgtctctagcagtggtttgtctataacatttgataaatttaggattatgggcattagtaatgtactcctgaaaagcatcagactctccaaaccatagaggtaggtcctctttagctattaaccgacagagcttatttcttgcaacagaaggagaatactccgaatgtttcaaggatccctcagagttgtacttaagcaaggattgaactatacctgcacgttgttgttctttcttagcagagcagttatgacgaagcaagtgaccagttcca

SEQ ID NO: 95129 - DNA, 567 bp, Zea Mays
gtcgttttaggaataacggccgagtgattactggtgacgccgacgtttaagaaataacagccgagtgataacgggccacgtcggtgttttagaaataacgaccgagtgaagactggtaacgtcagcgttttagaaataacagctgagttatattgggccacgtcgactgttttggaaataacggccgagtgatgacttggcacgtcagcattttagaaataacagctgagttatattgggccacgtcggcgtttttggaaacaacgaccgagtgatgaccgggcactttttagaaatggcatctggcctgggaaaaccccatttgtaccgcgccgtcgcatgcctctgcattctgagccctagccctgcttttctgcttccagaccttctttgcttccttgtgatctcacttccgctcagtttgccagcgagattgagatggcgtccaagcggaagagttagaattcctctgctgcgattattcctcccatcgatcccaacagccagttgcctttcgcaggtaatcacatgtctgttgtttctgagtccgaccttcttcatcttgtc

SEQ ID NO: 95130 - DNA, 426 bp, Zea Mays
gaagaagtgccttgctttatttgatgctgaactaattctctcttagcattccataataagtaagatttgcatcctatcatgttttacaaacatctgtgatatgggtgctagcgttaccaaacgaagtgatggctgcatacatgttgcatctgtgtccatctatgacggaattggtagattgacaggcacatccgaccaaaatcttcaggctgcatacaatacatctgtgcccaacaacacatctgtagtattgtgctgctttgatgctgtattggtgtatctgaaatgtagttaaactagtgacttagcaccgttgttgaattgttgtaccaggccaattgtagatagacaagtgtgcagattgggttgaggattcaaatatgcaaccaatttgcttcaagtggaatgttggacaaactctcccag

SEQ ID NO: 95131 - DNA, 320 bp, Zea Mays
acagagcctcgacacaaaggcaaagaaggaggtctgggggtgcccatgacatattagaagtaagaggtggccatagcaggcttctcctgatgagaggtgagggggccatcgacaacaaggcgggcgatttgaggacgacgatgatggtgggtagcatgggtgtggtggaaggcagtgttggcgtccccctcgtagatgacacgttgttcattgccttgtttccagtatgatgctgcgtgctcccggatagcaagggcggccctgaagtgacacaaggaaaagacatgaagctcagagggagaggcagaggagttcctcgg

SEQ ID NO: 95132 - DNA, 441 bp, Zea Mays
aagactaagttgtgaccgtcgtaaaccctttgcctagtaaatgccacgatacgtgactccggtgactcaccttgctccggcctccagcatgcctttcccaaattcggagccacggcttgcagacgctataaattgagtgtgcgacctgctccgttagcatgttatgatgccaggacaccaactctcgccctcgattagccactgtagaccgcgaatttgggtttcccccaaatcggccaaaattgccgtcgtgaggaatgtcgccgtggccagccgatctcaggtccattcatcccattctgtgccatgttttagcatccttgactgttaacatttctcatcggcccaaccgattgagcgacaccgtgttctagtatcaagaacatcatctcgccaccacggaacacccccgagagcacgctcacgccgactcactcttcc

SEQ ID NO: 95133 - DNA, 384 bp, Zea Mays
tttgctgctaggtttcttaaagaataaagacgtagatagcgtctaaactttctacaaaataaactcttgtaatttcattatgatgtaaaagaaatctatttgtttgacagagggactttgtcatttaatccttttaatgatgttttctttgcaataatgccatgattggtcctacaagatcaatggcgcgatcagatagactaaaccaacataggacagttccagccattcgtccctttcctccgtaagtatatatatagttcacttgtcacacttatatatgattgcagaacttaagctaaagtttgtgttttatatagtttcgtgttatttgatgatattcaagatgtcaataacttaccacaagtaaagagtatatttgcg

SEQ ID NO: 95134 - DNA, 464 bp, Zea Mays
attgggtcgcgggtagtagcttatcggagaggcttgggggctgtgcgacgtgggaaaacggccgtggttgtcagaggtcgccgatgaactcgactgtgccacgccgtggtccttcaccacgtagtcgtaatcctggcatgctcagaattactctccctgtgtttgtaggccgtcgagcaccacgacgtgctcgccagtgcaatgtcttgtcaccgccgccctccaaatccattccaaattcggagtaaccatggacaacctctataaattgagcacctcccttgcttcaccccctcataacgaacctagtgcaactctaatctcggtcggtcatccaccatagctcgagcaattccgttttcccccaaatcggttctacgcgtcgccgttagcatctcgccgtggccagtaatccacaggttggttcatgcttctcttcttggtgttttcgcatcccttgagtt

SEQ ID NO: 95135 - DNA, 583 bp, Zea Mays
gtgaatccaggccgttggattagaaaccgagcgcccaaattagattgatatgcacccgaaccgatatccactggttatcgtccaatgagcaatcaacgttgggcattttatttacccatgagtcatcccgattcgtccgatcagatcggacgactcaacttgctccccatgaatcgctatgacccgtttgatcccagccatacataccccatccaacggctaaattgcgttcctcccccgatctaatctcagccgagcatatcctcatcaacggccccagatccttccctttcctccatccgacccgagtacggtggcggacaaccatcacgacggcgccatcaccggagaaggtgaaccccgagctcccgtgcctgaaaccctaatccactagggtgctacactatcacagggctagagtaaaaacgacgcagggcttactcaccggagacggacaacgggtgagcacagtcgcggtgtacgacggtgacgcgactccggcgagaaattcccgagtcccccgaggttcttagcctgaaatgagggctcctgtagcttcatgggtttccagagaacgccctcg

SEQ ID NO: 95136 - DNA, 309 bp, Zea Mays
gtcgatgtgagagtaattatggaacaactggattttggacccatctaagggtggcataagggtcaatatagtagctcaaagctaaaaatgggggaaagacatcactgctatggtaccatacaaatacggtgaagaggctagctggagagagttttacttagcaatatcatgcatgagtacccatttaacatatctgagcatgagtattttgtttactacatcaaatccatgtgtcctagctttccaatcaaatcttgggtcaccattaggaaggcagttatgaatgtgttcttagctaaaaaggaaaag

SEQ ID NO: 95137 - DNA, 372 bp, Zea Mays
tggactcaaagtctggctgtcagtcgactcagaacctgaacttttactgacaataacttgggatgaactttgggagctcttttgaagataatctagtaagtattcgagtatggttactatagcaagattgtagctggattatagggctagaactttgttacaagtggattagcaagttctcacataaaagttggagatctgggcgctgcaaatctctctatcaggtgttctaaatggtgttctcatagtacagtgaactgaagaaaatccctggtgtagtgcaccttgccgccggcgacccccgcgcctggattcgcgccgacgaggtgattcgtgctcactggtgcccggataacgcttcaaggtaaaaag

SEQ ID NO: 95138 - DNA, 559 bp, Zea Mays
cacaattacatctgcatatacacataggtataaaaatatatatatatatttataaaataactagacaacctagattatccccattagaatacatctagcttcagagatttatcttatcctaaaagatcccattctaaccaatttatcttatcttaaaagactctctctaatcctaatagattcatcttatcatgaaagattcattttatcctaaacactatatttatctgatcctaaagtaaccaccaggacctaatccaaaataatgagatcttaactagtttaatctagtcgtaccaacctaatctagattctatctaatctattatgatctaatctagagtaagttacttaatgctggtacaaaggataaagtcaaactccaaatccacttaaacttaaactagtgacctagatcaactcggccatacccaacaacttgacctacataacagatgtatcttagcctcttgtcccaaacccggatggagacaccaaagaccaagactggagaagaaaaggatcaacggcatcaagaaaggataagcaccaactcaag

SEQ ID NO: 95139 - DNA, 530 bp, Zea Mays
cgttaggcctgcaatcatctgagttccattacatgtgtaagtcggctgcatgaaaacctcaacctatttagtcaaagaaatttgtactcataacccacaaacgtaattgcatcggtgcatgtgcaactgtaacctaaagttgttctgagagaattaaactacaacagtatgcggaaaaggcaggggttattcttggggtaatctttgatccatgctacgtcaccgtcttattgtcacagctaagcatggagtgaaccacatagtcttccatgctttgactttagattgttgttccaatgtataatatcatctcatctcatctgtatctatctattcttcgaatttgcaacgtcaattggcaactcattgaaccaaatggtttaaagttgcatatcataaaaaggccatctgagcatgttaaacactctccatttgggacaagtttgatcacacactaacccatggtaacgccaggttaaaaaccttgaggccgagctctagtcaagctataaatcacagctcagtttttg

SEQ ID NO: 95140 - DNA, 556 bp, Zea Mays
gtcaaattcaagagcaaatccagagcactgcaaaatcctgaaatgatctatcgggagtgggcggccggggtggcggagagcagggcagtggagacagccggtgagggagaaggttaagggaggcgaggcaaacggggagattaaattcaagtgtcagactcaattattgcatgattttgatctgaaggctttcttgctacaagaacataaattgaaaaaatccacaccaattggcaatatgcacagactgggcaaatgcctaacaaaattagttgtaggcaattcagaagtagttgtcattgtcagaaatattaacatggatacgtgataggaataaagcatgggagagacaagcacatcatacatgccaagtctggtataaaatttaactaccaatgtagaggtcctatctagttacatcctggccttgctaataaaaatcaggctaccgtcataacaaactgcatcttggcgtagtcaataaaatccggcataacaaatcaggctattgaacatgtataaaagtctagcataacgaattaggctattgaactac

SEQ ID NO: 95141 - DNA, 304 bp, Zea Mays
ggctgcttcagttccaactacagccagaagagttcctatgatggaggttgtccagtatatggcttatgcagttagagtatcttaagtttggtgaagtttagcgcgcaacgcattagcataccgtacatctgtaagatagacctatgccagtttgtgcatagtgtgcttgttctggtaatatagctaaaagaaaagtcgttaaaacaaactatgggaactaaaggagacatttagtgtctaggacagatttcatggtttgtgatgtctggcaatcgaagcactctgtgcaggtacaagatatccc

SEQ ID NO: 95142 - DNA, 447 bp, Zea Mays
tatcgtgaactcatgagaattagaaggttgtggagggcagacgaacagagcagctgagcggatgggacaatttgctggatgatgtgcgtaaaactatcactagctgagtaaacaaaacataggaaagcttgttcctaatgactctcgtgcccaatttctcatcaatctatacgcagtgcatgtcaaatcctcccatggtctgtgttgtatgtcatacatctttgcctcaatgtttttgttggtttatccaaaactgctacaatgaggcacaatgtgtgaacatgcttgatctcttcaaagaccatatatatactttgatctgcatatgcggttcatggtgccatatacataatataacgtcagaagtactttcacgccttgatgactgatgaggggcatggagaaaggacatgcatatggttgtggcagctcgatattgaatagaaa

SEQ ID NO: 95143 - DNA, 294 bp, Zea Mays
ctcagatgttgatgcatatttgcaccccttcaccttttacattcagtgttagtaacaatgaagcctcctttcatccataatgtgttgttgggtctagcaaacctagctgattccttggttcatgcaacttgactacatcgaccctctagttttcaaggcatttgccttgattggatggtcttcgttcgaatatgctttgatgaccctattctgtcggcctcgacatttcccccttctatggcaactacctcgatgcatctctatcatcttcatggagcctcttatgcatctaca

SEQ ID NO: 95144 - DNA, 644 bp, Zea Mays
gagttaagtaagaatgcaggtcgacaatgaataatttgagcgctcttgaagtctttttattgatgatatatttcccagtttacagagtacattgtcgtcccaatagcttttgaaatacggctaggggtaaaacttcctgaggtgttctatgttccatgagttcccaatttccgtgccgtccatctgagtgaggcgatatgatcccggccgagtgacttctgctactatgaacggtccttcccatagaggtgacaacttgtgccgtccttctcccgttagaattcggcggaggacgagatctcctactgtgaaggatcgatgtcgcatggtcttatcgtgatagcgcctcagagtttgttggtaccgtgctgattgaattaccgtgttcagtcgttcttcttcgagtacatcaacatcctccagcctagtagcctcggcttctgctatgttctcaaagatcaaccttggcgccccaaacttgagatcagcaggtagtactgcttctgaaccgtagaccatgaagaaaggagtatttccatgcagagctcgactaggttgagttcttaggctccaaacgacgtagggcaactcccttatccattttcctgcgaacttttcatttttattgaagacttttttcctgt

SEQ ID NO: 95145 - DNA, 1073 bp, Zea Mays
ctaaaacgacagggcagagggtatgagcggatctaagacgagctgaccacggtgaggactctttcacggtggcggaaacacagtttgggggaaatgagcaattcgtggtctctggtgaagaattggaggcaattgctggtgctttggatgcgtaattatcctacggagctcatggcgtgctcaatttatagcaggcttgagcggtggccagtgaatttgaggagagacgcgcgacgactagagaagaagaaggttacttgcgtggtgattcgtggcctattaccgtggcaagctctccggcgaccaccagacggctaacgtgagtcacggcggtgaggttatcattccaaggcacgtggtgcaaggccgcgaagagacaatctccagtgaacctatccaaggcggccgcgacacgctcgggtacggcggccagagtaaaattgcggctggagttcatccctgggcgatatttcttatccccagtgctatccaacagatctgagcgcgaatcaccgcggtgatagcacgaatccgcgcgcgactcgtcggtggcgagggcactaagctggcgatctgatcagtgcactgtaccatcgcgcaactcattcagtcggtctaacagaagatctttagaggcattgttcttgaatttttgcatgacaacatgttaatcggtttgtagcaaacttgtagcctaatatacaaactataattctgcagcagagatcatgcttagttgtttactccatggagcatgaatcaagcctaaagttcttcaaaactcactaacagtgtgaatttagacttaaagcagtctgacagctcgactttgggctcatttttctccaaatttttcatgtgaccatggtttaatccctatagcaaagttatcctccttttatagctctacaaacttgatgtgttgacctagggcgaaatcttcataatttggaagatatagggcttcaaagttgacccattgtcactgaaattcagacttgactcaatagagtttaagtggggcttttttgcaaataggtccaaatctcaaggtttactttgcaaatccacat

SEQ ID NO: 95146 - DNA, 1234 bp, Zea Mays
gttcgagcagaatatccctacttccagccatcgacgacttgcactaccgacaccattgatgatcaaaactcatagtacgagatacaagcaggcgatagagagagaggagaggctcccaagtctcttattcgtggtggagttggttacaaaatggagtcctagctaagtcttggtttggtggtggactccggcctctgggtcctcctcctgtccgtcggtccttctaagcatcttctcgtctagggttcatccttgcgtctatcgtgtgcccggggcccgaatcctagccaggggattcaggttgtgcccgtccaacatggagcctcgggtcgtcctcctccttttataggccaagaagggggtcggccaacaacgactgcctaaataaagagccaacggacgacagtaaaaccgatagttctaccatggggtaaagccacgcgtgctcgtggtcgattggctgtcttgtactctttatggcgagcaacgcggacaacgtggggtccgagcgccatcattcgggctatgtcaacccctggccttcatagcctagggctaggcgcggttcgttgtgttgtgcactgccagaggtctgcgcactcaggcctagtcctggtaggtcatgagtgcgtcgtaggtgggggtgtgtgggccataaatgtgtcgcagtccgagcagttcaaaggtcatgagtgctcatggtctgagtggctcgtaggctataaatgggaggcggactaaaaactccgctatggctcggcgcgagacgtagttaatgctgccggtcactgatgaagggtcggtctcgggccagacgagggatccactcgagtggtttcccttcgctatgttcgaccccctattagactctaccactctcgacaccgggcttggtgctgcagggctcgtccagtggtgggttcctccagggcagacactacctgcctcctctagctgaccgatgggccccagttgctattggctttccccggacgtgctcgctgatcgatcggccctagggactagggatcttatccccgatagtagcccctgagcccctagggggatagtatttcccctcgggggcttctcccgggtctggcgtcgtcttgtcccttttgtcgctcgcaaccaattagttggagaggctcgtgaggcccgctattggcttccgagatccagtcaggcgctataagtaaagggtccctctgcacttcccccaactgatttcaat

SEQ ID NO: 95147 - DNA, 635 bp, Zea Mays
agattaaaactcagtaaacaactgaacaagcaagcccttggtcatgatatcggtgaaatagtgagaggacaacacgtggagcacctaaacttgtcccaatgtgacctcatggatgaagtctatgtcaatcaatatgctttgtgcggtgatgatgcactagattgaccatcatatatacaacactcacattatcacaatacacaatggtcgtcgaaagaatggagatgtgaagtttctatattagttgccttaactagtatgggtgatggtacgataatctgctttggcactggagcgggagagtcgtctggcgttttgagggccaagagacgagattatcaccaaggtagtcacaataaccggaggtaaaatgtcggggatcaggacaaccagctgagtttgcatttgtgtaagcagtcaaggtctagatcgggccaatgacgatgtgaaggccataggacaacatgcccttgatgtaccagaggatacacttaatcaacacaagacggggctcatagggatcattcatatagaaacaaacctgttgtacaacatacgccaagtcgagccgagtaagtgtaagatactacaaagcgacgatgaggctctgatactttgtcaaatgagcaataggc

SEQ ID NO: 95148 - DNA, 343 bp, Zea Mays
taaatttgttgatgtgcctaatgttaaatcaaagaatgcatcaaatgttccatgcttatcatatcatacttttgacacttcttatgttctcacgcgcaaatctggcaaggttgttgccaagtatgttgggcctaggcacaataaaacaaaatcttatgtttgggtgccaaaggcgcttgttactaacatgagaggacctgattcatcttggataaggcctaaatttgttttgtaggttcatacatccaggggcacaagttggattagtgatagcggatgcacaaacacatgatgggtgagaagtatatgttctcatcctatgaaaagaacaaggactcccaag

SEQ ID NO: 95149 - DNA, 315 bp, Zea Mays
gaatgaagtctttttattgatgatgtattttccgattacagaatacaatgctgccccgatagcttttgaaatctagctagaggtaaaacttcctgagatgctctatattccatgaattccctatttccgtgccatccatttgagtaagccgatatgatcctggccgaatgacttccgctaccatgaatgacccttcccataatggcgacaatttgtgccatccttcccccgtcagaattcggcgaaggaccaagtctcccactgcgaaggatcgatgtcgtatggccttatcatgatagcgcctcagggtttgct

SEQ ID NO: 95150 - DNA, 547 bp, Zea Mays
gtttctgctggaaagtgcactgcaggttctaaattttttctgttgtctcctttttgttctccatcgttgatactttggtggtcctcttagttctcagtcacacatctatcacttagggtagaaggatgtttgacatgttcttgtctcaaattcataacttaattggcatcttttctgttccaatttttatgccacttcgtggtttagagggtctaatcgaaggcacaaacaatgtttcctgatttcttttttaaatatagtctggcaattatctcagaacatgctgatggacagccaacctaaaagctatacctgaaaatctgataactttttggcaacctattctacctttcaggtgtggaaagccgactagttgctggtttgcctttgtgttacccagttcccggtaacaacattataatatcattaaaattaaaatgtggatgcataatgttatctatgaaattgttatgttcattcccactacagtaaacgaggaaatttccgacggctaaaaccgtcggacataagaactaagccgtcggag

SEQ ID NO: 95151 - DNA, 759 bp, Zea Mays
actatgagcaggaccacttgatgattcttcgctttcattttcattccttctatttgtgttataaggcatgcaggagcacttcacattcattaaggcaggagcgctgcccattcattaaggtaggagcgcactaagttcagtacaagcaaacacctcttttggtgatcaccctgctctgtattgccaaacgcccagatcctttgattttctcttttatttgttcttttttggattcctatttgcttgttgcatgttgtgcttatgcttggtaccacattgatggtttgtgctcatttgattttgtagagtttgatgacttgaaagaatctgcattgtgggactagcaaaaatgacctgctcaacttcacaatagatggtaggctccttgcgcagagtgcggcactccaggggttatataatgcagggcacatctctaacatgttaactgaattttttgaataaatcttggattcttggtactcgaattgtgtgatggtaagttcactaatttgaaactatcattgttggacttgataattcactctacctactttaatttgaggtctaaatatttttattctctgttatttatttcttaatcattaaagatagagaactaattttgatcacctattgaataacttcttcgaaaaacagaactaattttggccgacatcatgatcacttattggaataacttctttacttatggcattgccttttttgatgtacaataatgccaaccaactgtatattgga

SEQ ID NO: 95152 - DNA, 711 bp, Zea Mays
tgcattttgtgtgcgcatttcccacacatatatactggtatgaaacagtgtgctctttcagtatccaggtgcttgcatctgacataaaaatgagaggcacatggtctagacacagacaacaactagcagccacacacaaaatgagaggcatgtacactgcgtcactgcccaattgatcaagcaagtaagcaattcagcactacaattccatagttgaggaattcattatctaggttgaaatatatgcctattccaatttgcacatgggttggacaacacaagcactccgactagcaaacacaaactttgattaatgatagtcgtgtgttcccttgctttggtagttccagttggcactagatatgctttggtagttccagttagcactccagcttgcaattcaccgaacaagaaatatgaatatcactagatgttggacgccacaatggcagcagcctcagtagtttcagttggcacgactctgcataataacaatactttggttagttgacagtcgtacattcctgcgagtatgaacgaatacatatgcacaaacacacatgcggtccatcatagtgattccacacatgatcaacgaggtcatgtaatagagagttgtgccccttgtggctgtattttcctatgcatttccattagtgtttggatttcgggcacaactttgtcggtattgtacgaagccgttgaaccgtg

SEQ ID NO: 95153 - DNA, 572 bp, Zea Mays
gtctatcggatgtgcacaatgtatttcatgtatctcaacttaagaagtgtctctgtgtccctgaggaacagttaccaatggaagagctcaatgttcagggtgatttgacttacatggagtacccgatcaagattttggatactttgactcgagttacaagaaataaggtgataaagatgtgcaaagtacaatggagtcaccatggagaggatgaagcaacacaggaaagagaagaagagcttcgtatggattttccccatcttttccctagtccttcttaaatcttgagggcgagattcttgttaaggggggtaggatttgtaatacccaacttgtaagaagatataaaaggtggtgaaattattttctttatatgtgccatctttattcaccatctcatgtgaacaccacatttaaaaccaaaggattaataaaagtcaaaccattaaattgtgcatcatgttggattttatttggtgtgtattctgtgacaatataaaaataaggcaaaaataaatatgctgatacccaaattggaatttgaattctaaaggaaattctataatttgaga

SEQ ID NO: 95154 - DNA, 625 bp, Zea Mays
ggagttaaggtgagattccgtgattgagttgatatttcaattttcaaaaggtacacgcaagacatttcagtttttcgtgatatcagttgatatctgaatatccccaccaaaacaaataatataaagttgctaactgagtagcagaaaagtgagaacctcacagtagttcttggagtacctagcatctagcgtggtttcctttcgtttttttaagggcgactgaaggggagagaatcccccacctaaattgattgattgcaagagccttacattgccgctatgaatacaaagtggtctgctttgtctggctgtatggcttcagtttcatatcctccattatcatttgcaagtaccatgtacaaatccaatgtccttgcaaagtcccgcagtcctgcgcctgcttcactggaaattttgagtcaaggaatccattgctacatatggacacaggtgtgggcgtcagtgaccgacttggacgcagctgtcccaatttcttttgggatgcgccaaataccacttgcaatgtgacataggtgttccaacacgtgtggctatctgattaggcaaatatattggacacaaggtttggaaacactgaaaaaatcatgaaaacataaaacatctg

SEQ ID NO: 95155 - DNA, 1376 bp, Zea Mays
gtttatacgatataaattaaaaaagattgaaaaaagataacaaatatacagcagactacatgagagaataaaacgaaaaaatcacctcctgatcagcccctacatcatcagcaatgacaataacttcttcctttttgccacttattcctccagagttcctatgtctttcagttgagtttaactttgaaaagttcaatgctagcgtaggctcatatatagtatcattccctgctaaaaatgcaccagcagcatgtgcctgacataaggcacacacacacaaaaacagatatacaaaaagaatattaaattatgaactaaacaaatataataaacataaaaaataaccacaaactatacctttggattctgagacaacaccacagaagcaacaccactataaacatcattgttaacacaacctgttgccgctgctgatgttgcacctggatcaataggccttctattaggatttgcatgtgacttaagtaaatggtcttaatgatagtacgccattgagagaaatataccataaacaacatgggtggctataggaggagcaagttggcctagcccaattggaacaccaggacatatagcagctgcagtatttctgccccttccattgtgatcactttcatcatctgtaatttgaaggtcaaaaagacccacaggtgagaaaagctttgtacgtggaaagagacccaacttatcagtttttgagtaatggaatggcttgttgagaggatgagcacactctgcgataaaaaaataaagaaaaaatagacatacatcagattcgtattaggtttacacgacgaccaaaaaacagagcaataataacctaaaaatgatgctaaagcaagaaaccaaaaaaagagttcagtggcacctaccaaaatcatgcaagaaaaaaagtatgcgttgaagggcactgactgcttgaaaaataaatagagtttcatattctacataattaatcacatgccaaggggttgcaacaaaaaggttattgtattatccaatcaaggtgcaaaaaggtggactcaggtcctgagactgagtttaacgcaagatcaatcaaacaactcgcacatgtcacattcgaaggagcttcgaaacaaaaaatgccattgcaaaacacagcaaaaaaaccacctagtgtaggcacaataagcaagtcacagcgctgccccccttgatgaaagatgatgatttataccctccttttctccccaccaagtgcaatcctggcttttgtttttgcccccgagagaggcaagacaacgatgaccatatacatgatagggcatggaacacagtacagttccataccctgacatagacatctcctccatcacctacaatttcccctttcc

SEQ ID NO: 95156 - DNA, 308 bp, Zea Mays
atctggccagagaaatttgatatataaagcgctcagatcatgggtgaccggcctatataattcgtaagcaggggagtatatataaaactaattattagctactagttgcgcatatacaatcaatgcaagtcgtcctcatcgatgacgctaaaatctgaagtacgtgctacgtaccagtagtagtagctagaaataatgcaggagcaaatcacatgcatgctcaccgtaccggccggccatggcccagacttatatgcatgcatctgcgggcaataatcagaatcagtcaaaaactaagcaaaactaga

SEQ ID NO: 95157 - DNA, 472 bp, Zea Mays
ttcttgtatagctttccatctatcgtagcgaagtgatggcttctgtgtttcaacctcttggctatgctttggtcagaggggtgataatgaccttgaaggtataaggtgatggatgcatgccagtcttcggtcattatcagatgtacgattctgcggccgtcagggtcttgtgttatctgcaggccttcggggtttcttatagctggtgtgccaattgtgtggaagaacacgtcagatggcagtgggtcgcctttcgtcgctgctttcaccaacacgtcggcctcttcattcttgttccgctctatgtgatgcaatgtgaatcctttgaattgtttttctaggcttcgcatggccgagagatagtgcatgaggactgcctctttggcggagaaatcctttttgatttggccggggactatcttggaatcagttttgactatgcatgttgtcaccctagggctcgtagtttgcg

SEQ ID NO: 95158 - DNA, 1079 bp, Zea Mays
tcaccatgtatgagggtgctagcttttctcgatcaggctcccgttgatcttttcttagtgaaatagtgtggggcggtctttcccccaccggccgagttttgatatactgaagatatttggatatcaacatatttggtatccttgttggttcctagcaagctttccaggaacaaggagccaagttggctccctttctacagaaatattattgctactcatcaaggattagatgagggattcctcttttgaaatcttgcaaagaaagaatgaaatagtcaatattacataatgacttcttgctccatcaagagtgtggcaaagcaccttggtttgttttcaagttggaaagttaagccacatcgctttggcgtcgactagttgtatacttgtcctatcatgattagacaatgactagccatgatttatcgatgagtacaaatctggagagcacatctcttcattttgggagaaagattacttggaaatggcagtgaagcatcaccactaacaattacagcccaatgtctaaaacacaattgacttcaagattgggaaagagaaaaactttgacgctcaaagtcattgcagcccaatgcctaatcaactcccgatgaaaattaagcatctagcttgcctctagccctctctaggccatgttattatgttgattcgcaagtgctattttttgacgtctaatcactaacatatcaatgattagaagaggatctggtatcatcttgctcattttgcatggccatctaaaaactaatcaagctacaactacaaggaatacaacaagggaggatagaacatttgaggtgcactcatgactcgtcaaacctactagcccaacaaagtaaccgagtatagacaaaaaatgcataagccctaatggtatggttgggggaataggagtttagaaatacatagtttgaaatctctcgtttattttgtggcagtgggagggactgttagggcacaaacgacatgtggttttaccatctatttaggttaaattaaccacaattaccttgctaaatgaggatacggaaagcctatcattgtctcacgaggcaatg

SEQ ID NO: 95159 - DNA, 513 bp, Zea Mays
gccttggcttcttccccatctatgattgccgtcagcatgctcactgctactggccccaacaccctttccgatggccttgtgggggtgccccgctggttctctccccgttccccatatcattaccaccatctcctcccaccgactgggttgcgaactctggcgcctcattccataccactcctaaccccagaattgtctctttacctcatcctcctggcaccacattcccttcctccatcatcgttgataatgggtcaactctacctaccacctcggtagatgacactgtacttcctggtcctttgtacctcaacaacattcttgtggcccccaacatcatccaaaaccttctctcggttcgtcacttcaccactaacaaccgttgttctatagagtttgatccttgggggctcaccattcgggaccttaccactcgtgctatggttgctcgatgcgacacccttatattccattcgcttccccgctccaccttcctccgcccatgttgccaca

SEQ ID NO: 95160 - DNA, 474 bp, Zea Mays
ttgtttccgaataggaaaacagtagtcagggtagataaacccgataacatcaaaaaccctattcagtctcttttttcctcgagcgccgaaggtgactgtcatagcttcgtcttcagccctcgagtaggctccaagcagctcatcacttgttgcctctatagcatccaaccaatcatcattcggctcgtcaaaccgatccctgaaccgaaatgtgtactttagataaatcaggccactttggctggagccaacggcagcctccttcggcatttcccatccactcgcaaggggccatactctgtaagcaacatgctcttggaccatatcccttgtgccgatataggtgcatatagtattgaaagctgtctggcacacttgcacatcatttccgagtgcgacttaaggtcttctgatgccgaagggtgaccatataggacgttgaatgatgccccctatatcctccctctagtctag

SEQ ID NO: 95161 - DNA, 685 bp, Zea Mays
ggattttaagtgtaaacttttgtctctgtgatactgaacctcggttgctgcgcagattccgacgtttgggcctgcgcaagcaaccgctgctgacaatactgattttgcggcggccttaaccatagtgcctaccgatgatagtttgtttggttctgtgtctgagtgttttgagtctgatggtgaatctgggagtttgtttccttggacggaggagtcctcggatgaaggcttggattattttgttgtgttggatgtggctgcggcggagactttgccgcgtgtggagggtgccggggatcttcctagtgcgggtactgggtgtaggcgacgaagggtggtgggaaaacatagtgtgggtgaattttcgcgaagtggcaggcgccgtcatttggggatggagcgtggccgtctccgagtagaccgggttggtaaacgagaattgttgtcttcgccgattggggcgagcataggcgaggggaatcttcggaagctttttgagggtgaggaattgaggataatgttgtttaattacagggagatgggtatcatcccgaaggttgagccgatgtagtatgtgatgccctcgccgtgtgtatgtaattgtgatttttatggtaatgtggcctgtttgccgtattcgtacgcctgtgttggtccggctgcgcccgtgggcggatttgcgaag

SEQ ID NO: 95162 - DNA, 456 bp, Zea Mays
gcgtcaacgcgtgtgcgaccatcagggctacgacaacacaacaagccttcgtaataagtacaacaggcaaaattattgctcggtaattgaggtacacgataaatccacgcaacgtgcgcaacaggcgcaatcatggttcgatgatcacggcagacagacagtgcctacaggacatgcgaaaaatacgcgactccgcgatggcggttcgactcaacgggagctgtccgattaaacgagagtgctatatagcaatcacatgacgcatccaagttcgtacgacacaaatattgcgtcgtgttgctagggcgcagccaatgccaaaactcagccgataaataacgcagcctcatcggtgtgcccgagtatccactatacaatttaatcgctcggcgtgagtctgaagctcaacgcaacacaaatatttagagcgatttaagtatgtacatacagtacaat

SEQ ID NO: 95163 - DNA, 755 bp, Zea Mays
gaactgtcttatctgcacagcctatgacgccgttatgctaggacaacaaatccattcctaggattacatcaattccatgggatggtagtacgactaagtgtgccaggaatactaccccacttaaaagaattctgactcgggagcacttgaggtggcacaaaaggtctgatcctgaggttcaggtgatcagagggacttctaatggtgtagtgggaatgccatgcctttccacaaaactagtggcgttgaaagaatgagatgctctagaatcaaaaagtactgtagcaggggtaaattttactaggaactcaccgagtactactccaggggtctgttgagcttcctgggcgtcgacgtggttcactcgggccctgttgtggaactgcggcctgcttatctgactattggaggagagtgccttggaggtgggtgctgcggcattcttggggccattcatcgagttggagtagacaggtgtggttggcttcaggtgtggacagttgttcttgaagtgatcggggtcaccacactgccaacaagcattggttggaggttgactgcttgcgatggactaagtgcggaaggaactctgaccaggctggttgaaacgcggtggagcggatcctgctggcttgctgaaatttgaccctttgggagggaacccaaaagatcgaatcttcttgtgcctgtcttgctgttactttctcttgaggtgacctctttcctcttcccagactctttctacctggatggcc

SEQ ID NO: 95164 - DNA, 650 bp, Zea Mays
gggaaaacttcttatggcattgtaaagagccagtgggtcatgctgggggtattttaatgggtatagatctggatgtctttgatataggggccattgatgaaggggatttctatgttaagtttaccttgtgaaataaacaagacgacttcaagtggtcgttggctacagtttatggttcggcgcaagctgataggaaggagatgttcttggcagaattagtccgtcttggtagtcaagaaagcttgccgctggtcataggtggagattttaatattctaaggtgtccaagtgaaaaaataaagataattttgatcaacggtggccttttcttttcaatgcggttatagatggtcttagtttaaaagagctggagatgtttggccgacgattcacctaggcaaacaatttggccaatccgacttatgagaaactcgatagagtgctggttaccacagattgggataaaaatacccattatctatggtcctatcattaaatcaagatatctcggatcatacacctttattactaaatacgggagagtcctgctcgagcaattcccaacatgcttttaagtttgaactaggctggttgcttcgggatgggttctacgatttagtacaggaggtatggtcgaatgagtctggcgg

SEQ ID NO: 95165 - DNA, 451 bp, Zea Mays
caaggatgcgcttagttctgctacccgggatagagccttggcctcacaatcctaggcgaaagagcgcaaatttatggcccagtcaatggccgtgttgcgttccgcaatttccagttgcaagcattgaactttcgctgacagtttagcaatgcgacgactatctcgcgcacgctccctactcccgtggcgtagctccaacatgagtcgcgccaccctggcctccagatctcctattgggtcgttgcttccgctgggtacaccatgaggtccggttgatgccggggtacaccatgagatccggttgctttgcgctgggtggtcttggttcgcgccatatctccataagagggaaaattttatttagtgtagtttaaacatgatgcatgcataacctaataatcatggaatcaacttttcgttgatcccttatttcctacgcatactattattt

SEQ ID NO: 95166 - DNA, 376 bp, Zea Mays
caaaaatgtaattggcctgggagcaaatcctagacttgactgaaataagtggcctatgctcaatcaaagcccaaactctagcatagccgacagcaaccacatcataaagttgtcccaaaaagcaagattaacaagcgtgtctgcccaaataactctaccacctacacctaaagtctaattagatttcaacatatgtataactaaaaccagtggcaaggtataagatttgttgtcgtggatcggcaacatatttcgaataggccaaaccaatgaacctaccaaaaggcaactcaccagcaccttttgcgtcatccagactacaagtaatgtaaaactactgttgctatcttcaaccttaaacacaggccaaacaaaa

SEQ ID NO: 95167 - DNA, 384 bp, Zea Mays
gtgtgacgtcgcgcgtccagtcgcgcgacgtttcactttaagctcagctctgttgacgtatgtcgtcgtgcgcttcgtcgcgcgatgcttaacgtctctttataattaatgcaagtgtctcgttgtgcgctctgtcacgcggcgagtcgtttacctcttaatttaatctaaatgtcgtgtcggacgtctcgacgtgcgaccactcccttttattcatcttcaatcgcttataatgattaaatgtggaacttgattttactttatgctaaaacgtagtatccaaattaatgtccttctgttaacgagtggtttaatctataatcatgtaacatgatcgtttctcgactgtcttttttctctttctctcttaaccttaattgcgag

SEQ ID NO: 95168 - DNA, 857 bp, Zea Mays
acacatttgccatgaggtcctctttaatgatttgccaacaaactctgtaaaaccatctggcccaggagccttatcatgtgataagccatcgatggtatcccacacctcttcctcagaaaagggagcatccagttcagacaggtcatgagaaggtaaaccaagagcatctaaatcaatagtccaatccctatccatattagttccaatcagattagagaagaactgatccaccgctgcagccttatcaatatgactagaaagaatatagttgtcaaccaccaagcttgccacgaagttctttattttccgatgtctagcatgcaagtggaagagctttgaatttgcatccccctccttgagccaagatattcttgatctcaaccgggccattgttcgtttcaaagatgatagtagtaatgaatgctttttagcttcttcttcagccaaaattctgttggcgttaagggtctttcatcctgctcaatttctagtctgtgaagtatttctttagccaatgccaactgggaccttacatgtcccacctgcttatcactccaggcaactagcctctggggtgtcttcttcaatttcagataaaatgtttgaaaagggcatgtgtcatataaaactgagccccaagcactctgaattgtatcttgaaaaccctctaatctaggccaaaaggcctcaaaatggaatcttcttcctgatgaattatcccgaaggcccaacagcagggggcaatgatccgagtcctaggaggccgagctctgcagcaggacattaggaaaaagcagttcccaactaactgagcaaaaaaatctgtccaatttaaccaacactggatcagtttgctg

SEQ ID NO: 95169 - DNA, 509 bp, Zea Mays
tgctagaccttcatggggctacatctagttggttcatcaacatgtactaatcacagacttgctacctgaggtacaagacccaaaaggagttctattcaatacgactattcgagtcattttacacgacacagttgatgtttatgatttctctcaaggatcataaaaccatcgacctttgtatccttatagaggaagttggactagaggttgaggagtacctcacttacctggcagacttgcaagagcttctcattagtgtaggactttaaattgatcaatgagccaatgtggtctccatatcataagtgaatataatttaggtttatgggacatgactatagaatctatgctagataggtcagagagcctttcaccttccaacatctcagggtagaattcagtttatgctatggagctataggtccaatgaggcatcctcatggtggggatgtaccatggacaacacatgtaaccgggctatttaggccacactttggagagggatcctg

SEQ ID NO: 95170 - DNA, 592 bp, Zea Mays
ccaacaatgaattgatgaataactcctttaacctgcacagtgctacaaccaggtgtcccgtcgactcccttttcatgcattaggtgcctaatttccatagcagaagcatgcctacctgatggcagcataaatattagctagaagtacataaagcaccacttttgccagattccaacaagatccaatgcctgacaacatactcagcgaactccacatttcttgtgaaatgtacaaccagccatcagagctccctagatcaaggcatcaggtttcatgggcattttctaaatcatctctttggcctcatgcataaagaaagccatttcgtggcaggaggtccagtccagcatgcatccgtagtgctcgacctttggtttaatgtcatactttctcataatggaaccgaaaagctctcagcacttgtcaaccaaccctgcatgtgtgcacgcacacacacaacacgccaatgaaggccatgtcaaccggtctgatacctgagctctccatctgagtgaagagcagtattgcctctgaacctcgtccatgcatagtcatgccttttctcatagtagtccaagccagcactttcttg

SEQ ID NO: 95171 - DNA, 487 bp, Zea Mays
acggcataatgtggaaatcaaggcatattacaaagcagcattaagtatatttaggcctacaaaatccatgtttcactacacatcatcgcatatcaagatctctcttcaacttaccagttcttgctcctaacaggctacacatgttcctaccaaaaccatggaattccatcccaaatcctagtttcctttatatatcaatcaagtagtaccatgcacggcattgcagcaaaaccttggcaggaggtactctacgagcagagaataattttctctagtagttctttaatcagtcgatcttgacagaagcatatatcttcctcacgaaccagaagcaggcatagaaaccaaaggtaccagtcagcacaaaaaaaggcataagagattatcagcatgtaaccaaagtacatgatgcctgagacaagctttgtaatctcccacttattgaagaagtagaaaatagcataaacaaacaaatagagtgttgaag

SEQ ID NO: 95172 - DNA, 870 bp, Zea Mays
gtgacctttgaccgtgccattggatctgggtctaacgaccaagatcggatcacgtttcatcaaatcatgatcgttgtgatagtaatggacgactgatatctgtagtaaagataccgattcgatattttaaatcgttgccgttaatcggtctgtggatggcgtagattagctcaatcatacccctttggcccgattaaacctaggtcgttgggatatgatctgagggctcaaggcttagcagggtgtggcacgtttctggccattgatcaggaatcctgtggcaatgggctcataccaattcatgcggggtgataatctaatccgaaccgaggagctctgattggacggttgtgaatggccgataccccttcgaccagggtaatatgcaaagaagacctcgtagtttatcaaatcaacccccggtctagaactataggaaaatcatcactatcaggccccaaaatttataaaaccgaccctagggaattccagaatagtgtccgccgtccaaaagacttccaggaaaggttaaatgaatttcgaatttaattctaaatatagaaataaatcacaaaaacttataaatcccgctgttagtttgttttaactccgatttaatccgttcgagttgcgatagctccgtaagtaaattacctacgctatagtaacattattttatcaagtgacatgttttcgaaaataaatattatgtttaacctatgttagtagattaacccttttaatctaacacttaaactttagaaattcataactcctccgttttaattccgaattgattcattccagttgtgttagtttcgtataaatatttaatatgcagtaacatcataaattatactatgtcgcaca

SEQ ID NO: 95173 - DNA, 334 bp, Zea Mays
ccgactgacagcgctatttcaaacctatttatctctcatttctgtgcaacactagtgcttggtcacttaatcaaatttgttctccttacatagctctacaaatttgctatactgaccaagagcaaaatcctcaagaatcctgagatgtagagctccaaagttggccctatgcactgaatttcagacttaggcatatgaagtgcatggggtgctttttgcaaataggtccaaattccactattccacttgtaaaccctgcaatatgaaaaatagtgggtttgaggtgctcttttactttgatatttgtacttgggtccaaaagtgcacaaaattt

SEQ ID NO: 95174 - DNA, 676 bp, Zea Mays
aagcagccctctgtttgtctttttcaatggattggattgcttgccttttcaaaatgcttacaactccctttttctttgctcccccagcttctttgtcaagcctttcgtagtccaggtactcgaagttaagggcatccattacccggtttagccttcatttcttccgagtaccgaaggtagctataatcgattgatcctctttctttgtatagttcccaaggatctcattacacattgtctctatcatttccaaccatttggcacaggggcctctgaaagtgttatgaaacttgaaccgatatggcaaccgaacaagctcaaaattttcccttcttccttattctttggcattcccacccactagatgttggaaaggttttgctagccaaatattcttgcaataacctcgagtactaatgtgctctgccatgactctgaattccacttcggctaattcgcatggggagccgagttgcatgttacacaatggccttgtcatgccgaagcttaatttcaagggactcattaccatgctcatgagttttcccctttcttctcgtcagcttttacataaaaccattcattcatccaactggtaggccacttggtgtgatagccaatcactggagcctttgtgtcttttcggtatgcgaaattgtagcatccgaagttttta

SEQ ID NO: 95175 - DNA, 371 bp, Zea Mays
tttgaggtttgcagcctaaagaacactttgtgtctttacaagggctgatttctaagctaaaggaaaatcctgattttttcctttgttcacccacatatgtgacatgattggggcttttgctaatcctttttggtgcttaactcttaatagcttttgttagttatttagtgagctacaacttttgttaatggcccattttttgatgaggtgatctaattagttttcttaatcactccttttcggtgttcctttttcatttaaggggtaaacttagggttttggttaattccctcctttgatcactatgagatggttaagctaaaccctctaggatgatttgtacctaattagggtcttgatccataagtgtg

SEQ ID NO: 95176 - DNA, 422 bp, Zea Mays
gttgtgaagccgttacattttggcttttttctattctcttggtcttggtacgctcgtaccattggaatcttgcatactcttatttttatatatgcttacctttacatcccaatgtttgtttaatacatttcagttaacatgtttttgaccacccttatctcttggtgatccatgagcaaccattctatatcgcacatccttgatgatctcatcgtttccttataacttcccttggtaataatttctgttacttcaaccattttgttggaaccttacatatcttacccttgcttgttttatccacttggtcagtcttgccttaactctatccatggttatgcttttcatcattatcacatttatccttatcatctctatatcttgccatgaggtttatcttatacctgccctttaaaatcttc

SEQ ID NO: 95177 - DNA, 296 bp, Zea Mays
gcgttgctaagtattaagccctacatgaaaagaatgaatggattaatataagaacaaaagactaattcaaaattcataaacttccaaattcacaattttcgtacctttagactgttgtatgcaaggctatccgcaatatcgtccttcgtcatggcgcagaggccaacttcgagcttcggaaagcccatacttctggccatctcccggcagacggataattctttgttgtctgggaggcaatacaagaagtcatcttcatccgtaccattaaacactagggcccctttcgggtactt

SEQ ID NO: 95178 - DNA, 320 bp, Zea Mays
cagaaataggtgatatgacgcaatctgattggttaattaagtttgttaaaggtgggaaagatgtgtttacaaatgcatgacctcgctgttgccaacttatcatgattgtacctactgttaaatttgtgctgattgacggacttgtatgtaaaaaggcctatgttggtggtggttatttattaggtgggaagcgtcaaacctattaggcgggaaagacccctaacttaccatcaatcagtgctatgtgcacagaaggtcacgacaaagtatatgggggtttcccaccgttgggggagatgaaggcgagaccggtcaacgac

SEQ ID NO: 95179 - DNA, 301 bp, Zea Mays
cccagttgaaggcaccaggacctacctactccaactcggtgaatggccccaagaatacctcggcacctacctccaaggcactcccctccaacagtcagtagagcaggacccagtatcagggcagagcatgagttaaccacgtcgatgctcaagaggcccagcaagctccgggagtagtgctcggtgagttccttgtcgaatttactcccgctactgtacttttttattcaggagcatcccattcatttatagccactagttttgtggaaaagcatggcatcccctctacacccctagaaat

SEQ ID NO: 95180 - DNA, 503 bp, Zea Mays
tctgaaactgagaaagtgttgtctgtttgttcccagaaactgagaaagtgtattgtctgtattatgtacttgatcccagaacttaactgaagtgttgtctgttgtctgtttcttcccagtttatggtttagtgtctgtctgtattatgtacttgattccagaacttaactgaagtattgtctgttttatgtatttgagaaagtgttgtcttgtctgaaactgaaatggttgtctggtttgatctgcaactgaactggtgaacatcaccaaaaaatggctgttatctgaaactggagtgttgtcttgtctgaaactgaactggtgaacatcaccaaaatctgctgaacatcaccagaaactggctgtctctggtggcctgcaccacctcttcccgcctccccctgtttcggccctggtttcagtgcctcctagtgcgcctgcgtcggtactcctcccatccgttctcttgcctaggtagctgaacaccaccagaaactaaagac

SEQ ID NO: 95181 - DNA, 420 bp, Zea Mays
ttgggtcacaccatttcttaggatgggatatcagttgatcctgagaaggtgcaagaagtgatggattggaagcctcctaccaccgtgcgatagattcagagttttctgggattggcaggatattatcggcaattcattccggatttctccaggattgctaaaccaatgattgaattgttgaagaagggagtaaaatttgaatggagtcagaaatgtgaggatgcctttcatgcattgaggcagcatttgacgacagcacccgtgctagcacagcctgacaacacccaatctttttatgtgtattgcgatgcctcgggcactggacttggttgtgttttgatgcaagacaatcgagttattgcctacgcatctagagcactcagacctcatgagcaaaattaccccacacatgatttggag

SEQ ID NO: 95182 - DNA, 646 bp, Zea Mays
cgagtttgtccgagtctcacgccccgtttctcgtcgacggcggccacgggacgtgatataggtcacgctgtcgttcgggctcgacgtgcgttcgtgctgatgcctcttcttcctcttgtgcttttccttcacttagcacacatgattcaatcctcagctcgtcatcaaccatctcgatccatcatccatcgccgcccccatctactcgacggcggtcagccccatctgcctgacgccctctgttcccttcctgctgtcgtcgtctgactgcatccacccgatggcctctctcatccagcccccatagtccatttccacacttgatcatgaggctcagtagcatttaactgtgttgcttctcttgaaaacagtagaataaaactctttattgagagagggtattgttgtaatgcaatggaaacgagacacaaagatgtagagaaatcaatctgatacttcattgatggatgtggtttcttataaacaaagtataggggtgtggtgtagggacgcgactgttgatcgcgtctgtaagccagtgaacggtagtctcaaccgttggagtgattatccttaacactcccccttgattgatccaaccaaaacatccttcaattattcctccaagatatctgtttaataaatc

SEQ ID NO: 95183 - DNA, 310 bp, Zea Mays
acctgatcgaggcctcaatgacctgttcaggaatcccgaggctgttagaatagcaaaatgggtagccaaactctccggctacaacatcatcttcgaacaaggaccgcaatcaaatcacaaggccttgctgacttcgtagtcaactagatagggccttcatcctctaataatcatagcacagaggcaatgtggaccatccattgtgacggagcatggtgccatgcggggacaggcgcaacagcagtcatcacgacaccatctaggaccaagtacaaatttgtcgtgtgcctgagttttgcactcgagtatg

SEQ ID NO: 95184 - DNA, 398 bp, Zea Mays
tctatcttttcagaatataatacactggtaattgaagttgtttctcggctctaggaacttgtataatatgccggcatgggatgtcgtgggactcaaacaatttgcatgagcacctaccagtcatattggacttgttgaaatgaaccaatatctcctttccagattggctgccaattgtcactagcttgatgttgccatgttcaactatttcttgaataaaacaatcatctctggaaaggactatttgttgttgaaatttattaaaaatctcatgtgtatatatgatactacattgcttctccatgacccatggtgtcatcagcttaggagaagtatgtaagcttttgtggtcacatttcaactcctcttgacgctagcactccaaagctgtgtcaaac

SEQ ID NO: 95185 - DNA, 583 bp, Zea Mays
aagcgtttcaaccaactacgcatcccattgggcctcacgtttaactaacatgaggccaaaagcatgctcatgcatgaattgtaggcgatttcttgaatggacgaaaccaatcatagatgcaaatgcaatgaaatttcaagtaattgatcacccgatttccataccaaaaacaatagttgtgtggtatgtggtaaggccacaatattgatacctgttgcactactcgacagtcactagaaatagcacttaattagaaccaataatcgaacacaagctagcctattagtagtcaactactaatagtgagtcgaccaatccataaggaagaacaaatcataggctcagctcactgagatacaactcaaagcacataatgcgacagactacgccctcctttacgccctcctccttgttggcgttacatgaggatcatgaacacttacgtctctttcagtcgataggggctgactcaagtaggacatcaccaggagatacttccaccagttggtcgactcattcgagtactcacacaggcacgacgcctactaccataagctcaagccgcaaaacatactcgtcgatg

SEQ ID NO: 95186 - DNA, 431 bp, Zea Mays
gggcgttgctagccatgggcgcagattagggaacggtccgacggccatgtgcagaggaggatatgatccaagactggggctacctactgtttggtgagaagaaatatggtaggtcaacgacgagcaaacccacaacgacccatttatggtccaaaacattgattttgttgatatagaggatgtaatttagaggacgctgctagagatgttaaaaatgtagaggataaaatattttagagagaactataaaggactgaaaatatttatttatgggatgaaatttagaggatgttgttgtagatagccttagattgtcttgagtgccctccctaaattccgccctctatatcccactttcgtgccacatcagcaatatcactctccttatatattcgccctccgtaggaccatcccaataaaatatacatttc

SEQ ID NO: 95187 - DNA, 289 bp, Zea Mays
catggtctgaaatcttttgaggtatgaccggagagtctcatcccctcggcgcttgatggatttgaggtcccatggctgtgtcggtttgtcggagagagattggaagttggagatgaagcgccgactgaagttgctctagtcgtcgatgcagtgtcagggtaggtgtcgtagccattgcagtgcatcctgcccgaggacgatgggcaagtatgcagtcatcacgtcttcagtcgccccagcagctcgggcggcggtggtgtagacggccaaccagcctcctggatcctgc

SEQ ID NO: 95188 - DNA, 392 bp, Zea Mays
gatttctctgttttccagggactctttagcaaaattgtcgagacgaaggggtataggacgatcctagccgtccgatcggttgcgcacggcccagatcagatcttttgttttcatgaaccggtatcaattgatgaccgccagatcacgagctaagggctcagattcatctgaccaaccggtaagaaggtccctcaatcctaagcatccatctaacagtcgacgactagatctttatcgcatgaaggggtacgtatgttatgatctcggccgtccattcaagatcgacggcccacaacccgttcgcacccgatcaaaacctggccctccatttcggatcaaaggactcccacctctctttcttcctccggtcgaggctgagcagggcccccaat

SEQ ID NO: 95189 - DNA, 514 bp, Zea Mays
ctcgtttcctagccgctttcctgttcattgtacaaaacaaattactcaattgcatcacaatctattatcaaaatgacgatgtcattcgtaaatgaaaattaaactcagatttgagtaaccgctcttacatgtttttcaaatcttgtgtagtaataggaacattttctgagccatcatgcatgtctaaaatcatatccacaatacagtgttgtggtaccctattcatgcattgctccaacaaagtccataaattccgggtcacgtgtcttgttacagcggaggtgttcttgctcagtttcttgggttacaaaatcatgattatgcttaaggttaactagttcaatcctgacagatatgacacttttttgcatcatcataattttttctaagctttaaccctgctttgcactgtgtttgacctgtgtatttgttccagactctagggttaccatcttttctttctgcacatctcccctctctagagcaatttaaccatttatagtttgtcttttcc

SEQ ID NO: 95190 - DNA, 303 bp, Zea Mays
gggcaggactcaggattggtcttgcagaaaggagggtagtgacgctgcattttggcatggaaactatagggatgcatagagattagagcagagagattacagaagaggaggtggtggatatgtttatgataaatagagaagataaaacgtggtgatgagacatggcggtagagttgagaccaccgtaaattggctgagcttcttggtaatagtgggccttatgattcatctgcctctagaaatgactagtaccttattagctcacgcttcgcgcgagcgttttgacgatgtgtttaagagctg

SEQ ID NO: 95191 - DNA, 436 bp, Zea Mays
ctgcgatgggtgtcctagtatcttgaaccgcggtccaaggggtccggacacacaacttggtttcccagactaaatcatgcaggtcccgtgcctgtatcaaaggatggctagtatcaggcgatgggtcctatgggtgtgctactaacgctccctagccgaagctgtgttcaggtccaggtcccagtcgaggctgcctcctgtagtcgttgccaactcttttaggtatgctggtatccagcctcgacacgtcgagcctacatcccagggggccaggtaccagggaagagtcggcaacgccacacacaacagggacaaatagtatgcaaataagtgctaatactgctcgataagtagtactcaaaagtaccttacaaaaacaaagttattacatccgccttcaagcgggaccctagccttatgtctacaggtatgacct

SEQ ID NO: 95192 - DNA, 834 bp, Zea Mays
aaaataatagcctaactttgattagcaagtttaaccccaagttaaaccggtatttatctatatactttttagaacatgtcatatgataaaacaatgttgttcaatgtgtgggcaattttaatatgaatctaacacaagttaaaagggttaaatcggaattaagacgtggaagatatgcattatataagatttaggatcactgtatacttgttttactagcttcggggatcaatttgagaattccaggggcctatacccaattacttaacacggcaaaggatggcgagttgttttgtgtaaagtacatgggttcttttagaaaaagaccatgactgttataatgcgcgggcaacccagagccgtccagatcgaatccaatggtcacaatacaacgcgcgaaggggtatgtgcataatctatcctcgccctccaacgacgatccaatggtcagcgtatatcttcaacctcacgtgctcctgcctctctttctctctccgctatggtggcacgccttccgtgaccccatgcctcatgatcccgtagcgacgagcgagaagacacgctaagcaaacggaacagcatcgcactgccccaacgttagtgaagttctgtgtggccttcctagtagcatcgttacctagtaggttaggcagccggaccaacaatggagctttacgggttatccataaaaccacgcccccggcccagtaccccagacccgataaacgctaggcacagttgagcactggaaaaacattctaggggttgcgtaccggcggttaagatgacgaagacgcctgtctgctctcggtgactccgtggtgtccctacaac

SEQ ID NO: 95193 - DNA, 297 bp, Zea Mays
atgctccaacttcgtatcattggcatcttaaaatttaccaaaaattgtttccacgtgacacttgtgcaaatgttggagccctaagacaacaccaccagaattgatttcactgactttccagaagaatgaaaaatacatttttagatgagaagtaaaagtcaaatgcaactgagctagttatgactgacggcaggacaaatacagatgagaagtaaagtccaggtgaacttgacgcaccgtaccattgtgttgctactaacttcggttgatctctatggcttagcgctcagtcaagga

SEQ ID NO: 95194 - DNA, 612 bp, Zea Mays
tgggggagagggacatcgtaaaactatacatatttggtatttagttccaaatctcacgtaacttttgcgataaataactggttcagagtgtttggcccacgcacgcacacaacgatccacgtgtcacgtcttacgtcacctaccatatgtcatatgacgttacccattacctggtctctttaaacgagtttgcgatgcatgccttgtgattgtgtctgtgactgttgcatcacctaaaagcaacatttcaaaattgaagttgctgaaaatttatttaaggtctaaaatgttgcaagaaagactaaatactttggctagtttatatatcgagaagatattagtggataaaattgatactgatgttatcatcaatgacttcgcatcgagaaatgttagaaaattttaagctgaccatatattatgtatttttccttgagatggatattttatacatgtttgagtacttattagtaacattatatatataaaggcccttattacaagtcttgctctaggcccccaatttgttaggaacggtcctatcctcgttccccatccattagctcgccttccccgaccaaatagaggagcgagttcttaccttcctccgac

SEQ ID NO: 95195 - DNA, 403 bp, Zea Mays
cctaaaccatctgaatatgaagcttgatgcattgaaatgtcaccatatgcattatcttcagatttcgaagacgagacaacggttgcattctctaaaccaccatacatcagggaatgcagactcctaattttcttcttcctacggcgcacatgcccttttcttttgggttgtggctgcgacagttgtggtccatgtgttgttgcttcaacttgtacatcctcatgctattcatcttgatctgaattagcattttgtacaagcctagtaataaactcattggcatcatcctcaagaacatcattcatttccctctctattggatctttgctcttgttctctcttttttccttagtcttgaattaaatttaacaaaagtaagttctctcattcggtcatgcagcaa

SEQ ID NO: 95196 - DNA, 891 bp, Zea Mays
caactcagcaagttgcttcttttccttttttattaaccctgctgaattctttgcccatccccttagatattgtcgtaaagctctaatcttgttctgccatacttgaatggcagtttctcctctattttcttgttgccaaatagagctaaccatatcatgaaaaccctctctaattaaccagcctagctcaaatttgaactcgtagtaatttcctaggttcgtggaggttttgccattaagtagtaatggtgtatggtcagaccgagatctatcaagcgcatggactgtgacgttaggaaatttaagttcccattcagagctcattaacaccctatctagcttttcaaaagtaggtggagccaaatcattcgcccaagtaaattgacgtcccaccatttctatttcccgcaattctaaattttctatgatagcgttaaacaaattaggccatcgataattaaaatttgcattacttttgtcttccgctcttcgcataatattaaaatcccccctatgataaaagggtgtggttcagcactgcacacacctgcaaattcagctaagaaatcgctctttaagtcatcttgagttggcccataaacagcaaaaagggcccaaatgaagccatcttctttatttcgaagtcggaacttacaataaaaatctccttcgtctatagctccaatgtcatagacacccggattcacgcctaacatcatccctcctgacctccctctaggtggcattaggtgccaaagaaaatcaacaccaccacagaaatgtctcaaagtggattccgagaaagatctacgacccgtttccatgagagcaataaagtcgagtctatgttctctagcaagttgggataggtaattatgtttggccaaatcc

SEQ ID NO: 95197 - DNA, 712 bp, Zea Mays
caggaattagccctcgtggcgaggtcaatcgcgcagtgcatggttgataaccagaggagaagtggtgctgcgattgcggggttctagtcgtgttgattggaagccggatcgtctatgtgacatctccaccaaatcaatagttatcttcacctgacggaagatcgggcacccccgttcctatcaagtggtattcaaagactcaggtattaccgtcaggcttaccctagtttagtttaggtttttcatcctataactccagataattgtcatacaaaaaatatattccgatgtcctagaacccttgtttagccttgcaatttcgtttcagattgttttgttgagtttgtgtccgtgtcgagtcttgttgctggtttaggtcgtgtcgtcatcgtagttcaaccgctccatcgctgttatttgtttccaccgctatcccatccaccttgcccagattacaagtcgagacaccacattactcgatttgccctcgctagccgccttgtgtgaattctcgccacgctagccctagattaggttgcaagccgcattgcattgcagcccctccttgtttcatcatctggcgcttacctattgcttataccagggaggtttgtgcccctgtgctctatagccgccactacggttcctaccaatttgtgcccttaaaaaccataacttgaggtaccttctataaaacgggcataacttttcg

SEQ ID NO: 95198 - DNA, 369 bp, Zea Mays
ttcacggtgaggacacatggtgtccgtggctagagcggtaattcgatcatcgaatctgagccagagatctttttaccacgcattgatccacgtctcggcggcaccaatcatggcgcgagctcaaattatggcggtgggatgttagcggtgagcacacgacacttaatcttgtttagttgactctaccatggcgatgttcgttcaactagcctgacagagcgatttgaggagctcctttctctaatttttatatgacaatatgcttatccgactacatcaaagttattgtccatcatgccagcttcaattttgttataaggttcgtgctcatacctccactcgatcaagcacaattcagctctaaagttg

SEQ ID NO: 95199 - DNA, 431 bp, Zea Mays
gtgggttgaactatgtgtgttaaatcttatgtttaaattagttcgaattattctgtgaatggttgatcgaggagtgattaaatttactgcgcttactttacatattacttcttgtatgcctcgataaccatgactgtaggaagatctccatcaaaactccgatcgattatgtgtgttgtatcttcaactagaaatatcatgcacacacataggcggagctattcctacattctgagttttattgggatttatctatctctcggacgaaacttcaagtcaagataagtcttatgaaactcatctctaaaatccttcttatacctaaggtatgagggagatttgaaaaacaaaacttctcttggatataatgtgtagtgttgtcatcaattaccaaaaagggggagattgtgaatcatctaggccccttagtg

SEQ ID NO: 95200 - DNA, 495 bp, Zea Mays
taagccactggatctaacatcaagggttatgatttaaagatcgcaatccaatcgaatccacacgaccaacatccaacggtcctacttaacctgagcgaagagatactcgatcgtctgattgtagccgtcaatcaagagatcaacgcacaaggttgtttcacctccgcccatgtaccccagcgcagaccgagcggcggtgcagtagcaaccgcggcggcggccatggccggtgaatagccaaatcccgctagcgcgcacgaaactcaactctgactggttccaaacctagaacacgcggtaaagaaagggtaggaagggttctcatcgtgtgacgcacaacaggatgaccgtgcgacgaagcagggcggaatcacggcatgatctcgcataggtgcgcaatcccgggtcaccaggtcgtcaatcccacaaggcaaagccgcaatccatccccggagttgcgcagtgaagcttcgacgacagagcccaagcgcagcg

SEQ ID NO: 95201 - DNA, 774 bp, Zea Mays
gcgctctctctccctcccccatgtcgttgctctcctctcttccgctcgcgagcgtctctccctctcccccggcaccgctgctctcttctccctcccccatgttgtcgttgtgtggctcgccatcacgtggccctgcgcgccgccgccacaagcgccctgcacgccgctgttagataatattaagaatgtatctgtaaagtaaggaaagggtgttgcgcatgtactaaaagatagggaaggatctgttcagttaggaaaggatctgttcagttatagatataatctgaggcaatcgaacagatctgttatagatagaatccaatcaaccataatctgttttgggagattggttgttgctggcgccagcccctttgtaatctgatgatggtattccatctcctataaatacatacaggcggcctactatggtaggtaacaaacacttcccaacctagtggattttacatggtaatcagagccacctccttcaaaccctaaccaccactcagcccatagcagacgccaggagatctcatggcaagctcatcctccatggctatacctacacctttgctacggcaaactatatatgagaagctaaccaagtcgcaggttcttcccatccttcgtggcgcacaactgcagggctacattgatggctctaccaaggcgcctgaagagcatatcgacgtcaagaacggcgacaagacagtgaaggaaagcaactcggagtacatccggcgggctgccttggagcagcaagtcctcggcttc

SEQ ID NO: 95202 - DNA, 305 bp, Zea Mays
gcagattggtaatggttcgagtagtgttaactgctgctcctatttaccttttgattgccatggatctaccaaagtgggttctaaaagccatcgacaaaaggaggggtctcctctggaagggccaggaacaagctaagggaggtcactgtttggtctcttgggaaagggtgcaacagcctctggaatatggtggtcttggaattcataatctggatctgcttggctgcgcgttgcagattcgctggttgtgggctgagaaaactgatcctagtaggctttgggcaggcctccccgctcaagtccct

SEQ ID NO: 95203 - DNA, 467 bp, Zea Mays
ggaagaaaaggaccgaactcggccagtctaggagcatcagaccatggttcggtgcaacggaccgacttgtaaggaaactcgccagcttcaggaaaaaactaaaaattcatcggaccaaggtttgggggcataacaaactcttgtttttccagagaaggttgtagacttcttcttcgaccagggccagcggaccatggtccggtgaccatcggaccggtcgggtccaacggctacctcaggtagagaagatcggtgcaacgactagctgatgtggcaacggtgactatatgcaacagaccggtctgttggtcacctcagttggtaatcgtcaatcaagatcccggagaaggtgtgcatggaccccttccgatgtgcaacggatcagtccggtgcccgtcgagagcagaattctgaaagttttactaggaaggaggcaagagcgcctaggccccttgggactataaaat

SEQ ID NO: 95204 - DNA, 540 bp, Zea Mays
tttccaaggcagttgcacgagcttgagctggggtgagatccacatggagcttacggttgcgcttctctacatcttctgctcgggcaatcatctgacggtggcgccgagccaagaaatcatactgcacatctagggtgagcaggtatgcggtgaggtacacgactgtggggtcgtcctcaagcagctgctgaccttccaatgcatgcatcctggccatccaaacgggacagtctctctgaaagggcggaaagaatctgagcggggtgtcggccacttcttcataaatttgacatagggccctcaatgccttgcaagcgacgacttgccaggtgtatttgaatctgtgccccgcagcagtgacactccattccacatggtgcatactggatccaatgtatacagtcacgacacacttctctgtgccatgcatgacaaattcacgaccatcatactctggctggctcctgattccgaggcgaactgtgcatgctctcaacatcttggggaaaccatcttcattctggcaaaagctggtttggc

SEQ ID NO: 95205 - DNA, 1522 bp, Zea Mays
ggatgacattctgatttattctaagaccgaggctaagcatgagcagcatctccgtctcgttctaggtgccctaagggtgaatcagttctatggcaagttgaagaagtgtgcattttggctgtctgaagtggctttgctagggcatgtgattaatcagcagggcattgcggttgatcccaagaatgttgcggctgtggtggagtggaagagaccctctagtgtctctgaaattcaaagtttcttggggttcgctggatattatcggtgtttcgtaccaaatttttccagcatcgctaagcccttgactagactcttggagaagggtgttctcttcatctggtctagcgattgcgaggtcagttatcagacattaaagagcaagttggtggacgcccctatcctagctttgcctgagagtgttaagcgtttcacagtttatacggatgcttcgcatattggtcttggctgtgtgttgatgcaggaaggcaaagtgattgcttatggctcaaggcagttgaggaagcatgaggggaattacccaactcatgatcttgaattggccgcggtggttttgctctaaagtcgtggaggcattatctttatggcgaggcttgtgacatttacaccgattataaaagtctcaagtatatttttactcagaaggagctgaatttgaggcagcgtcggtggctcaaattgattaaagattatgatttgtctattcattatcacccggggaaggcaaatgtggtggctgatgcccttagcaggtccggggttccaaaagtggccttgcagttgattgctgatctggaccgtttggggatcgccttgtgctatgtcggcaccgctagtgaggagactcgtatgcttattcaatcttccctcatggagagagtgtgtgtggctcagcagcaggatcgtttattgcaggaagctcaaaagagggttggcgatggtaaaccccgggatttctccatcgatgagaatgatttggttcgttgcaggggtcgcctttgtgtgcctcagaaatcagaggtgaatatggatatattgagagaagctcataaaatgccttacaccgttcaccctggcgaaaccaagatgtaccgagatctgaagcaaaacttctggtggaagcggatgaaggttgacgtttctaagtatgtggccgcttgtgaagtatgtcagcgcgtgaaggccgagcataagcggcctgcaggtttactaaagccattgaaaattctggagtggaaatgggagcatatcaccatggattttgtggtgggtttacctcgttctcctcggggcagagatgctatatgggtggtagtggatcgcttgactaagtctgcgcattttattcccatgaagaccacaaatttagcttcagatttggtccccttgtatatgaaggaagtaatgaggcttcacgaggtacctaagtccattgtttctgatcgagactccaaatttgtatccaaattctgggagagtcttcacagtgcattgggcaccaagc

SEQ ID NO: 95206 - DNA, 466 bp, Zea Mays
aagattttcactttttgagatcatggagtcattgtgaaccctaatgaagactttcttcacattggttagtttgcttgtgaaattgcacttgaactggctcagaatgtgacatttgtcctgcataacgatcgaaactaattaaagaaaaattatagatggcaaaaagagggaggggtgttaaaattgtgatactacctgttaggtgtgtgagagcatgcatgcattgatttggtttattgagagaataatgtacaaaatctgtgcattattggtgatgttcctgatgaccacaatagtcatgtgttattggtcttttgctgcaatagttataaaagactttgtattttgtctcagcgagaatgtcaggaaatagaccaattatatatttttaatcaggaggggatgaaaaattggaagttccatgttaggttcagattgactctgctgttgggttggttgggtggtg

SEQ ID NO: 95207 - DNA, 631 bp, Zea Mays
aaggatagcattaaagggtggcgccttgagtggtttattgcggaaaagcatgtcaagtccctccccctcggtcggggagacagccagatgtacacactctgagttgggttgagtctccctctgtcttagaggtaacataagctagggttctgattgctgaaatctgtccgctgaaggagagaggtctgactgccaaggttgtggttgctgactttgtttttaagaatattcagcctttgaaggacagggcatatccagcttacttgtacagtggcattactgactcgactcgggttaccaacaggaaaattccttctgaggatctggtgagccgactagacatgatcctgaggggcaaagtatcaaatgttggtgctcctgttgcctactctgcttggaatctgccacctcctaggtcctttttcaatttcgtgtccaaccctcctgttggtgatagtggtctgggtcttagagtgcgaccctctcctgaagacattgaggctctggttgctcctctttgtgatcttcccaatgatgagaggaaagttcattttgagatgccggcaagtccagatgatgcagaaatagatgttgtactcaatatgttggctggagaatcttctgactcggc

SEQ ID NO: 95208 - DNA, 650 bp, Zea Mays
tggttgtgttggggtctccatcgcgatctgctcctcgcgaagcgctggcgacctcggccgaagcgagggctgaagactcgtggaggcggagggtggttgtgtcaaaacagagcaccagcgagacttcacgaagtggaagacgtcgccgaatgggtatggaaaggtctcgtcttcgactggatcagggtggtcagcgcgagctactttcctcgacgtccgggacgtgcattggagagggggacttgtgggacctatttgagggggaagagttgaggatgatgttgttcaatttccaggaggcgggtcttattctgaaggcggagcctatgtgacattttagttgccctaactgctcttgttgtgatagtgagtgaaaacggtgccctccccctcttcgcaatagagttgtgagggttacagttgtgatttgtattattgcgtgatggtgccgttgagccctttgtttgttgtatatttgagattgcgcgcttgtatgttgtgcttattgcgagttggcttcgatttgtaatcgtgttcgtgtcgtagggatgactatgcaacactttagttatcggttgcgcccctaggcgatatctgttttggaagttgcttttgtaggggacttcacaccctgcggtggtgacacgcac

SEQ ID NO: 95209 - DNA, 1178 bp, Zea Mays
aagaagttagggtttctaaccttggagtaaaaggttggggtgctacaaacctaccccacttaaaggaatctcgccctagagattcaagctgggtttgggaaaaggtaaggacattccttcctcgttgagtcttcactttcccatgttgtctcttcttcacattatctgctccactggactttacagagtcttacatctgaattcctggtctttcgaacagctgagtcaagaatccttactggtttttctcagtattatagatccccctgaatctggattaactcttctgcgatgtggctttctggcagtttcaatgattttcggagctgggacacgtgaaaacacattatggatatttgacattgattggtaactagaggcggtaagctgctggtcctaccttgccgataataggataggggccaacgtagcgtggggctaactttcatcttgcttgaaaccttctaacacctttcattggggaaactttgagatagacaaaatctccttcttgaaaactgagttcccttctcctattgtcagcatagctcttttgccgactctaggcttcgaggagtctcttgcgaatcaaagcaaccttctcttctgcctcttagataaaggcagacccttctaaggtcttttctcccacgttagaccacatcagaggggtttgacatctccttccataaaaagcttcaaaatgtgacattttgatgctcgcttggtaactgttgttataagaaaacactgcatacagtaaactggattcccaatttctacgaaggtcagaacacatgctcttaacaaatcttcaaggactttgttgaatctttctgtctgcccatctgactgaggatgataggtggtgctgaaatctaacttggtgcccatagcttgctgcagacttaggatggtaggtgtgctaaaatctaactatgttcctctgtctgatactattcttcgtggaatgccatgcagtctgactatttcctttatatacaactgagcaagggtggctcctccgtaggtagtctttaccggtatgaagtgagctaccttggtcagacagtcaattatgacccagatggagtcattccctctttgggttcggggcagcccaatcacaaaatccatgcctatttcttcccatttccatttggacactagaagggttg

SEQ ID NO: 95210 - DNA, 643 bp, Zea Mays
acatccttcaatctcccagcattggagcccgattcaagaagttccaggtaatccaacattgaaataccccgagtttgccgtcgattttttgaagcctatcggtcgattgaagtggatttgattgtaacccttattctccagtttaatgtgtgatttgtatccgcttagacatcactataatcgggtcattgcatcgcgcattgcatctcttttttgtttaggagccccgatattagggcatgtgtatttattctatattcccactatcgcccgacattcatagatttagacaaaggctgtggattaggtatttactgatgagttagtagagagtactcttatacaacccaagtaacacatatatgctttttgtatgtaatatatatgcatatcttcagtactgtttatgctcattcacatgagtcatttgtttacacatttgttttattatatatgcatatagtcagtactctttatgcacatttactttaatgatttgttttcacatctattttattatcaaatatgcttttttgtatttgatatatatgcatatccttagtactgtttatgcacattcacttgagtcatttgtttacacatttgttttattatacatgcatatagtcattattctttatgc

SEQ ID NO: 95211 - DNA, 845 bp, Zea Mays
ggaagctggctcaatctcctcggggtcctcctactcttcactgcatgcctccattgcgttcatgtcttggtgatgcatttctatgtgagtgttggcctcctcaagttcctcttgcacatcatggagctgattttccaggacctcaatggtgttgtcccggatttccacctggtgctccaatgcttggatgcggttgctcatctgttcaacttgtagatccttctccaccaattctgaagacaggtcgaccacgaagtcctccctatcgtcgagggtggtcttttccgtttgagcgagcccagtgaggtgcgtcatggcatcgctttgtagggcctgcaagcggtacagtgcactcatgcactggatggtgattctcccaacctggtcaggatgcatggcccacacatccttgacgtggctcactctgttgcaccacatcggatcatccctcttttcagcggggaagagtccaagtgggtgcatcatcatctccagtgggtggtatccgcagaaggtcgtcaaagcctttagtgtcgcggtctcagtggtgtcgtccgccctgaatttgacagtttcagcatcaagtgaacgccacccaggctgcagagggtgagactccagggttagccaaaccctacaacgtggcacctggtgctcctcgtacagctgcaccatgtacacagggggtgtggggtacccagcggagcagagtacctcccacaagatagaggaaaagccctctcgtgaaaggtagtcaaagcttaagcgggtgtctcctccatcagcgggggtgggtgaagccatatgtgaaggaggggtaagtgtaagtgctatggtagtggtaa

SEQ ID NO: 95212 - DNA, 312 bp, Zea Mays
caaaggtcatatggtagacaaaacaaacattgagggacatcttatcttttattctaaatttcatcttatgaacaatgtggtatatagcgtaaaacaatgttttacgcgattatatacacgatatgctgaagacagtctaaacatggtcgataatacttgagtcatcaacaaactagaggacgacagtaagcggatgatatttgtggtcatccacaagtgcaagagaaaatggagaagtagaccatgttgatgatggttgatggagtcaagcgaattcacgtatcaacttgactatcaggcggtcaagaaccg

SEQ ID NO: 95213 - DNA, 392 bp, Zea Mays
ttggtaatcaatacagacatcaaagaaactgtttcatgaaaaacagagcaaatgccacaacccagaaattatcttttcagctaaatacaacaaaatatgcatctgcactgcaaatcatacaggtgtgtttagcttggaacttcaactagcggcggttccatgacaagggaacaacaataagaggttttgaagattcaaaaccaacctgaaggcataaaacaaatactgtgatccgcaaacagccctgcttgagcgctacaccaggggttataatctcaaggaataaatgctggcatgttcaggagacctcagaacaatcaaacagacaaacatggcggcataattgcttcctccttccgggaaaaaatgtaatatgtaactaaaggttgcac

SEQ ID NO: 95214 - DNA, 674 bp, Zea Mays
attacatgatgtcatgtgaagtctagtattagatctattattagaaattagaaatgcagtctgataatcgaataacaaaaaattctatggcatacaggtgcgcaaccaaaaaataatagacagtctgcacaactaggagctagcagatcaaagtacaatagacacagtaacagaacatcagtagtcagtagaatgatacatttgtctaggtagcaactttgaaaggagttacttacgtcccatggccatcactatcagatggtgaagcaagatcctgagatgcgttgaagactcctctagttattgcagatgctgcaaaatgctgagcccccacgagctttctattgcaagatccagatggaaaatcatttgtaacctcacaaatgccagagtagtgagcaggtactggataactatcagtcgatagatcatctgcaaagctagggtgggttggatctattcctgtgtcgatgaggccaatgacaacaccctgtcccgcgaattgtggaccaccttcttgaacccaggctccttgtggcagtccaagaaattcaggggtatgagttgttgctgtcctaactgagtaatccagcatcacattcgctacttcttttctcccggatagcttgtctgcctttcgtacaagcagaaaacaagtaatggcaataagaggt

SEQ ID NO: 95215 - DNA, 700 bp, Zea Mays
ccctaagttgagtaagcgtgagcatgttgcaccgtcttaagtcactgccgacttaagcagattgctccgttcgtagggtatagtggtcagtggtcaccctaagtcgagtaagcatatagattgataataaatagttcgagtgcccttgagaatgagatctttttattgatgatgtattttccgattacagagtacaacgccgccccgatagcttttgaattctagctaggggtaaaacttcctgagatgctctatattccatgaattccctatttccgtgccatccatttgagtaagccgatatgatcctggccgagtgacttctattaccatgaatggcccttcccatagtggcgacaatttgtgtcgtccttcctacgttagaattcggcgaaggaccaagtctcccactgcaaaggatcgatgtcgtatggccttatcatgatagcgcctcagggtttgctggtatctagctaactgaattactgtattcaatcgttcttcttccaatgtatcaatattctctagtctggtagcttctgcctcagctatgttttcgaagaccagccttggtgccccaaacttgaggtcggcaggtagcactgcctccaaaccatagaccatgaagaagggagtgtttccatgcaaagctcgactaggttgagttcttaggctccaaatcacatacggcaactctctg

SEQ ID NO: 95216 - DNA, 1132 bp, Zea Mays
gttagtctatgttaaatatattttatgtattcatcgtggtgtaggatagagtgggtcgaagatataaattatgaggcatgtgatttgtattttaaggacgagatgtgcgaataatcggttagtgcttcacttgtctagtcgataaatgtggtcataaataattgttctcgacataaatgtttggtcgttgtatcacttcctctatgtttataagtcgagtcaaaatgcagggtactagtggtacgctagacgggtggtgtccaaataaattaaccagtcgatgtagtagttgtcgtgcgtgatttattgttagtgagtagtttgaattacgaactatatgaggattatgttagaaactagtgtgtggcctgtgactgtgctcgggtggtaaacaataggtcagtaggtattgtcggtgtcattggcaaatggggatgattcttgttttgcgataaaatttgaaaggcaaagaacatgggtaatgtgtcgatcaagttaatcgataggtttcgtaaacatgcttgtgatgcttttatgtgcatgataaaatcgatgcattgtcgtcgtagtcttaggaaattttctgaaatgcgctagtgctctactgatgggttgaatgtacttgagatgtattacaatagctgggtgtcgcgcaggttatccaaagatggcgaaaggtggcgtatgttggtaattgggaaatagtcacgtcattagccaactcgtgttaaacaggagtcgattgcgttaagcgattgctatatacatattgtgtctcggagtgctatgataatgagttagcagacttgttagatggttttgggttaagttcgtggtcacgatgaattgctagttgtagtctaaatgtgtgtggttatggtcgcgggtaaaaattagtagtgctcatgtggtgtctaagttaaaatgcgaactagtgggtgaaaagcgcttcgatatacatatatgccggatttgatgatgtggtgaatgcgtttgttaaatgaatgtggtaattttagtgcactaaatgacttgagtaaaatttgtaagtctacttgttagtcctcatttgattagtctaactctaacaaatggtaaagtgttagaataattcaagtctctaaaacatggc

SEQ ID NO: 95217 - DNA, 444 bp, Zea Mays
tgctatcctttatccaccagaaacaacaaatggacatattttatagcagtatttgatatctacacagagatctgcagcatgtataacatgtactccatccgtcccaaaatataattcattttagactatgaacaaggaaatttgattcagatgagggtataaaaaagatatagatctcctgcgtattcttacgttataaagttcaataaaaccacggagtttctttaatgcaggggcccaaattttcttctggcacgatggtaatgatgtaaagttctcttgccgttgaacaaaaatgcattcgcttcgagtgtagctgtagctctctgtagagttgatgcacaagcccaaccatcttgagtaaacataatagaacgataacacaagatgctccaatggaacacacatgactgattagaacttgaaaagggcaaaaaatatcag

SEQ ID NO: 95218 - DNA, 618 bp, Zea Mays
tcaattagcacgatatcagcaaactctgaggcgctaccatgataaggccatacggcatcgatccttcgcagtgggagatctcgtcctctgccgaattctaacgggggaggtgcggcataaattatcacctctatgggaaggaccgttcctagtagcagaagtcacttggccgggatcatatcgcctcactcagatggacggcacggaaattgggaactcatggaatatagaacacctcaggaagttttacccctagctacatcctagaagctctcggaacgacgatgtattctgtaaatcgagaaaatatcatcaattaaaaggtttcaaaggcactcagattgttcactgtcaattggcacgcttacttaacccggggtgaccactatgccctactaacggagcaatcggcttaagttggcaatgacttaaggcggtgcgacatgctcacgcttaccaaactcagggtgaccactatgccctactaacagagcaatcggcttaagtcggcaattacttaaggcggtgcgacatgctcactcttacctaactcagggtgaccactatgccctactaacgaagcaatcggcttaagtcggcaatgacttaaggcggtgc

SEQ ID NO: 95219 - DNA, 377 bp, Zea Mays
cagcgacactggtggtagcagaactggtaccgctatcttaatccaccagtttggtagcaacgcgaggaccagcttcaattatttcagagatttgctagccattcaatatctctggaccatttgatttgggcacttagccagcacctaatacttgtctgtttcagtctaactgacagtttgctccatcatgagagacggagagcgagacccaaccgctcccaagtcctaaccgagcgctaataacatgaaccatgagaaacgatatacaaaatcgacgcatttaagagcagttaacagtcttcaaaggcttgtgatgaacttaattgaacggtgctcctgatatgataacaccgacgtactaccagacagaaacacta

SEQ ID NO: 95220 - DNA, 399 bp, Zea Mays
ctttgctccaggccttcagccccaatgtcggttgctctataactaggattcacctccccggtgccgtcgctgctcagctcccagtcctcaccgctccgccgagtttccgctccctccctcctgcgctagaaaggacattcgttcctgtattctatatttctagcgcatcgcggcggatgcgggccgaggcagcctctccacgcccgccgcctgcacagtgcaagttgctgccccctgccgggctgctccccattttgatctgtaattcgtcttcgagattgcgtcgttttcgtaggacgaatagagtatgtgttggtttatcgttcaatttcaatggtggcgaaattgcagattaactcttcatacggtcaccatcgtccacgggttgcatctgctaat

SEQ ID NO: 95221 - DNA, 407 bp, Zea Mays
aatttaggcaaattgcgtgagtgaactgtccaaacataggttaaggttgtaaggcaacttttttccaccaaacagttgctaaaaagttggaatataaagaattcaaaacaatatatcaccttttaaacctcaaatgacgtttctatgatattgtgggcattgtattcacactagagggtattagagtacaactagtggatgaagacgttattgggctagctaatgaccttttgtgatacctggtttccaccatactgttgctaaaaagttggaatataaagaattcaaaacaatagatcaccttttaaacctcaaatgacgtttctatgatattgtgggcattgtattcacactagagggtattagagtataactagtggatgaagacgttattgggctagctaatg

SEQ ID NO: 95222 - DNA, 567 bp, Zea Mays
aaaaggccatctcaagaggaaattccaagtcctccgaccagcagcaagatcagcaccagaaaactcgatccgttggatttccacccaagggaccaagctttagtagaccaactggacccacctcgtcacggttcagttagcagagtcagagctcctttcattccccctcagttgcaagcaaccagccaccggcaaatgcgtgttggcactgcggggatcccagtcacttcaagaacaactgtccccagctgaagccatcaggacctgcttactccaactcggtgaatggccccaagaatacctcagcatccgcccccaaggcgccctcctccatcagccagcagaacaagaccctgtatcaaggaagggctcgagtaaatcacatcgatgctcaggaggctcagcaagctccaggagtagtgctcggtgagttcctcgttgaatttactcccgctactgtactttttgattcaggagcatcccattctttcatagccactagttttgtggaaaagcatggcattccctctacccctctagagattcccttggtcacccgaaccccag

SEQ ID NO: 95223 - DNA, 324 bp, Zea Mays
caccaacagaacacatccaccaccacacgaccattaacaacctagcctaacctctaaagatgagttggcgggtgagaaactcatgtagaggggaggctcccgccacactccaaaaaataccctcattctccacattttgtaggacagtttgaacacaagacattttatcttcaaaacacaaacattccgatgcttccaaatctcccaggcgatcaacatgacgaaggaattaaggcctttccttagctccttcgtaatttccttgaccattcagccccaccagcttaagaatctcttaccaccagataatgcatgataactctc

SEQ ID NO: 95224 - DNA, 584 bp, Zea Mays
tgtgagtaggagtcgattgcgtaagtgattgtgatatataagttgtgtcttggattgcgataataataggcaaaccgatgtgtatggtgcatagcggcctaggttgttgcttgggttaaccaacttgttagatgtctttagttaagctcgtggtcacgatgaattgcttgttgtagtctaaatgcgtatgggtatggtcgcggataaaaagtattagtgctcatgtgatgtctaagttgaaatgcaaattattaggtgaaaagcgctttgatatccatatatgccggatttgatgattgtggtgaatgcgttgttaattgcgtatggtggttctagtgctcgaactgacatgtataaaaatttagtaagtctactggttagttctcacttggttattttaactctaacaattgtcaaagtgttagaataagtcaagtctctagagcaagacaattcttgaattatatagaagctgaaatttattgattgctgtttggactgcaagtactgttttcggtgtgctgtatgtttgatgaactaaattgtgttttctctagatatgtgctatagaaaagttgtagata

SEQ ID NO: 95225 - DNA, 482 bp, Zea Mays
ttcaaggtccattcaggggcacacgggctgtatttaaggtatgtgtagatttgttactttgctaagtttagttgcatagtgtcctttagtaatcagcagaatgccatgccttgaaatttggttctacagtgccttgaaaagattatttgtagtaggatatacacttttgacctttcaatttgtcttcattttattatggtacctttctctgccataggtacatgaatatattaacagtcttaatatgctaagacataggatttgaaacaaaggtataccctggagcccgtgctgatgcttctgaagctgatttgatggcactgaatgagttaaggactcatgcgtttcttcaggttacgtaaaccataaactgctaatagaaactgcaagcctgaactattatcttacacatgatatttacgcacacaaaactattccttggcctctatttacagagtgatgctagtgacatatgcgagaac

SEQ ID NO: 95226 - DNA, 504 bp, Zea Mays
tgtgcaagagcaatcattttgaagtttggcaactttttgcttaagagaagggtggtaggaattatttggattaaatggcctttttcatgaagcattggcaatgggtattgttttacagccttcaattgggttttgtatttttctctggtggcctatttcattattgatctagtaaaaatttatttgcccattattgcactcttttgggcttgcttatgatttaattgaagtatggctcaataccaagttctatttgtttaccctacttaaaatgatggactgagatgtttatcatttttgtagcggggttctagtagttacaagtccactggatttttattaacaattttaaagttgttttcataattctaataattgtttttctagtttggttagtgcttaataaaacatttcacatggaatctgttctggactaggggtccctttatttttcctaggttctctgttacttaagtggactgggaaaaataattgcattcactg

SEQ ID NO: 95227 - DNA, 451 bp, Zea Mays
tgagcaaatttgtggttgaagtgctgaaaatattccaaatcttccttcatcagcttacccccgaatctataattacgatgggcttgtttgtttgggctataagaagccaagggctgcaactgagcgtgaagtgtttttgcagtatgcatgaacttttgtacgagacgaaggccaccggcaaagaacagtatcacaacaacttcggttgttacagattcattgcccgctctaatgcaagctacccggtgccgacataccgaaaaagatggcctggggccctggatggaggaatggttttatgttaaaaatgatctgattaaaagggaagacatcaaggaaattatccagcgcgccatctggtctcacttcggcctccgaaggcagaaggtggctattgaaagtaacgtccaagcatgccagaaggcctttagcaatgtgtgtgctttcattg

SEQ ID NO: 95228 - DNA, 714 bp, Zea Mays
gaagggttcacgggttcaccaggagttatgcacacactttggtttgggcagaatacgagccgaagagcaggtcgacggtgagggtgggttacggcggacaccgagcttgggagcacacgttcccgccaaaccatggtcgactagagcaaatggatgccactatgagcttcgcaagcatgcagaggcacgcagacaacacatggattgaatagggacttactagaacgagctagccacggagcgcagagctctgggttcgccggagacagagaaaggggaaatcggtgtcgcggcggctctaggtgaaattgggagttgggatcggggctatagggccgtaagaggctgtgttttcattgtgcgcaatcaatttgggcgaagatggagagggcagtgcgaatttgacttcgactgagcttcactggtggagatgaaagcacctcgccgtggtccatggtgccatttatagccacggtgagtcagctaatgatcggcggccacggatagcatggtaagcgcatgactaccacgtagaggaaatgcacagtaagggagatcgaagtatggcgacagcgcggcggacaacgctgagtcacggcgaccgccggtgaggtaactccggccacatgcggctgggttcgcggagtcgtgccacgtacgagttatccttttcccgacgttatccatccgatcttgcgcacgaatgggacggcg

SEQ ID NO: 95229 - DNA, 306 bp, Zea Mays
cgttcccatcatttcagaggctgcttgataaggctctagctattgaacacaagcgtgttcagctaggagaattgaagaggaaggctatatcccaagaacaaggaagcagcggtgttcgtccacgctacagttcaccccagggtacaccagttcgcactggaagaggccagcacccagttcagcaatcaccttagaggaccccaccgactcgtcaggctacccccactggtaccctgacgaagttttcaggacagagtgtagacactacttgcttcaagtgttggaagactggacattatgcaaatg

SEQ ID NO: 95230 - DNA, 297 bp, Zea Mays
gttacgtaaatgacatgggcgaagctagggtctaagattagggtggaccgaggtgctgttagaaacattttttatatcgtttacatgataattagctaaagaaattaacaatccctatagaattagaggagctgaatattgcccacctatgccctctgtcgtcacactggtaaataatatgcatataatttcgttatataataaatcatttaactcgtgagctggtttgttaatgaatcgagcatttcgtcgagtcctaagctaacagcgtagccacacggttactcgctgggtcgt

SEQ ID NO: 95231 - DNA, 588 bp, Zea Mays
tggatattggcaatactccttttgagaaatcgtaaacacatggaaactcattctggatctggttggtgccagccttgcaccattaggtctccatgccctcgagggccatgtgctgttccggccaagtttgggaccctttaggttaggggggcaaatcctagggtactctaggccaggggccaaatcttagggccctccatgcctccaagtccctctaggtcgggggtcaaatgctaggaccctctatgcctttggagtcctttaggtctagggtcaagctcctaactcagctaaatctagaggcccatacaagctagggcccacaaccaaagacccctagacattccttaggatgccctagggtgggaagccttgggaataggagggatctaggcgatatggctctagtgccacatgcacctctactcaagacaaccacatggtgcaaggtagacaagctttcgtccattgtatgaaatatgatagaagacgttgcgatgaagaaagtgcattgtcaccatgcttaaggttgcaggtgtactagtgaccactttgtggtatgtgatgttactatagatgcacctaaac

SEQ ID NO: 95232 - DNA, 896 bp, Zea Mays
ggaatattgtcattggcaccatttacttcatttccattggggttcatcatctagtcagaggataaaagagttagtgagacagactgcataagaggcttgtatgacattaagataaagagcaacattttgatttccaatataagattagttaaggatgatttctgattccgcctagcttcatcatactacaagagtgttataatccttaacagagatcttttgagctttatagattttagagcatgatatccaaataatctttctgatccaagagtatttctttgagcacaatttgagagaaatacttgagcgggactttagggcaactagagtagagcatcacattgtttgcatatagtagatgacaccatactttattttctttataaataggcaaaacacaataggtgcgagatattctccaaatttattcatatatcacttggaacgattacaaatcttgaaaggggcaacaacttgacattttttcatgagacacactccttctagctaaatggtatattattcttccttgtcagatgtaccaatctgagctggaggtcggttgtcttcaactactattgtttctccagatggagtttccaagcacatggttttctcagtatgttggattaccgccttagttctttgtaaccaattctttccaagaatcacattctttcccattgattctatcattaggagatcagctgaaaaatctatcccgttgattttaatacttactttcggacatatgtagttcgctaacactttcctttcaggtgtactgatggtccttcttgatcttaaggggcacttaaagataccatactttgttgcaaactgggcacttgtaggattacggggaggctacactagcgcaaaacaaaattttc

SEQ ID NO: 95233 - DNA, 382 bp, Zea Mays
aattgccgaaggtgccaaaggctcctgccgcaactcccaagagaaggaggatggccagcgtgctagacgctgtcatggagaccacaaaagccttgacccctgctcctactaagaaagctgccgaagctgtcacagtccagaccaaagccgaagctgggccttcagtgcccattgagatgaagcctgtcgcgcatgaggataaaactaagcaacaaactctggataccggcacgacagcggggcaggacatgatagaaaaagctaaatctcctgcccccgaagctccggccgaagatgttgatttcattattcgacatgcttcggggaaaagattatccaaagaagaaatcttagaagccagacactacgcccagaaactaaa

SEQ ID NO: 95234 - DNA, 967 bp, Zea Mays
ttcttccttagaatgcattttatcatgtcaacaagactcaagctctagcactaggccatcatacagtgcacacttagaagcaggcagagtatctcagctagcttgttcaaaaaaatatcatatgattcttctttgctagcttagaatgcaaagcaggacaatattttcatatacccaacaacctaggcctagacttcaactcatcatgctcatcaagcaaagtgacatacatggttgggaaggtggatatgttttacatgtatatatcataagcatcacacttagtctcgtcaggcactatgacaacaaccttagcaaactcaagctcgctaaacatattgtctaacttggtcttaaatgcgttcctctattgagtaacatgcttaagaaacttatcatgactaagcaaggtggtattcatagcaagctcatttgtggaaagagataccttagatctagagtcaccgttgttgtcgctccctacctcatgccaagcaccatggtgcagaatcatcccttggtggagtcaaaaagtactagtttatatcttgaagagtatgaggagtgatcatcactagagtcgatgtcaaggtcgctgagggaggtgaggaaatcatgctcttgggacttggccttattgaggtacttctacttgagcgcctcattgtcgaacctcccttagatgtgtgcttgttttatgtgtaattgcacttgctaatggtgtcattgcccttcatattggagcagttggtgatgaagtggttggatgctctatagttgatgcaaccttccttctaaccaccacaccatcgatttatgcggctgttatggaacatcatgaactagttgatgaccaatactagtgtgtcgtcattgagtgcctcaacctgctcctctataacaaaaaccaaagaagtagagcaaacaaagcaaatgaggggtgaaagttgtctagaggggagtgaat

SEQ ID NO: 95235 - DNA, 374 bp, Zea Mays
gttgattgctgccaagagcatgaaggaaatcgctgctttaaaggcacagcttagtagcgaatttgatatgaaggatctgggtgctgcaaacaaaattcttggcatagagatagtcagggataggaagtctagactgctgtatttgagccagaagaattatattgagaaggtcctttgtcgtttcaacatgcaaaatgctaaacctgtgagtactccgttggctcctcattttaaactgtctgctaaacagtgtgctgaaactgatgctgagcttgaatatatgtcaaaagttccatactctagtgttgttgggtcactcatgtatgctatggtttactctcatcctgatttgtctcatgctatgagcgttgttg

SEQ ID NO: 95236 - DNA, 491 bp, Zea Mays
ttctctttcttctgtaacgacttccccttcagctcttcgggggaaacctgctccaatccctgaggcggtaagcgtggttttatccgaagacatctgccagggaagagagtcactatcatgcacatgcaaattgttttcaaccaagttattttattcattacaccatcacattacaagcataagattactacaggtgggactacacgagagcgttcttcgaggtactagcgagttccttgtctaaggtgtccccaaatgccttgagaagatcatcgaggctggctagggatacatcttcttcgtcgaaccaatcatctattctagggggaggtagggctagaggggccttcttcttcttcttcttctctgtctagcatccctggttagtggtcttcttctggatcttctttttgggggcgagtgcctttagcttcttgtcaaagtctatcttcaaggtccgataggcctcacgggtgttggcttcctcgcct

SEQ ID NO: 95237 - DNA, 432 bp, Zea Mays
ttagggaactttcagaagaaaaggcgtcccttcaagagagcctctcaatagctgaaggcgaagagaccaatacccgtgaagcttaccgcaccctaaaaatggactatgacaagaaactgaagaagctcgcccccgcaagaaaaatccgcaagaagactaaaagccaaggatgtcagattgagcagaaggaagaaaaccctccaaggaacccgtccgacaccgaggagatgtccctggccagccttgatgaccttctcaaggaatttggggacactttagagaaggagttcgggagtaccctagatagcactcgtgtgtgatgagcttgtggttgcagtgtgctgtgttatgtaatggcttgatgtaatgaataaaataactagttaaaaaaatggcatgtgcataatagtgactcttttcccatggcagatg

SEQ ID NO: 95238 - DNA, 331 bp, Zea Mays
taacactgtcttccaaaaacaggatataactgcgcgatactgggataaccaatccatacccaagataacatcgaatgcccccaaggaaatcacaaccagattggccgaaaaagacctcatcagcaagaatgacagaacacccctgacaaactgaacaactactaatggagccattagcagaactaaccaaaattgggtgacccaacctctgcaccgaaagaccagcccacgacacaaaatcctccgaaacaaacgaatagctagcgccagtcaaaaagagcatgggccacaaacgaatcaactaaaatcgtacatgtcaccatgtctcctt

SEQ ID NO: 95239 - DNA, 622 bp, Zea Mays
aatagacaaaacagttcatgagaaaaaaacacattaacgacctactctggatgacaggaacaaaagtcctttgacaccagccatcagccacatatctctctcttcacaaaacgggaaaaacagtatccatagaagcagaaagaccctaaaaaacacaaccattgcgcatcttccagataatccaagatccaagaatgactaatgaattgaaaccctttctagtcagcccctctgttctttgttcagcttgtgcccaccaacaaaaaaggagttgtcttcaggtttaggggcaagggggtgtagaccatatagcctggaaatctcgaaccaaaaatctcttgcgaagataaaagagaggagcaaatggttaatattctcctccccttggtcacataaaacacatctttcatgatgtgggaggcctcgacgtgccagtctgtccgccgtccagcatctattgtgtgcaaccaaccacatgaaaaatttgcacttaggaggagcccaggcacaccaaatcctcttataaggttcaaaggagactgagccaacaaagaaacctttgtaaactgcctttgcagagtatttcccatttggagatagcctaaaaacatgagaatcagcc

SEQ ID NO: 95240 - DNA, 509 bp, Zea Mays
ccgactatcgagtcacaactgtgcctgttgcgtttgttacaaaggcttgttgtgttgtcgtagccatgatggccgcatacacgttgacgctagatacgatagagcttgtactcgcgtggattgtagtgtgtcgttcaagcctaaagtcacattatgcgcaaccttcgtaaataattttgtttaactctatattttatttacttgtgttgtgtggcatcatatatttatatatatcgccaagtggccataacaactatatcaagctctatagtgcttggaaatctgggaaattaaattgaattacaatgaaacacagataagttaattttctactctttcctcatgcacaaagttttacccgaagtaacccgaagatatataatacaatgcatgaaatcctttttgtcatagaagacatcacaagttgggattctgttagtaggcaaagagaccttaccagataaataaatgctagaaatctcagccatacattgctcaaccagatgttg

SEQ ID NO: 95241 - DNA, 557 bp, Zea Mays
cggagagctgccatggtgaaatccattaagctcgtgcgccagtgaccccttttcatctccgaccaccaccacaccaacccaaattcatgtgtcgctgcccctggagcctataaattaagcgcacccgcggctcctataggtaattacgcatccaacgcaccgatccttgcctcggattatccaccagagccttccaattcctcttttcccccaattctgttttcgccactctggtagaactctcaccgtggtcagcgaattccaggtctgttcatgctccctgttctctcgttttcgtgttcttgtgtgcccctgatgctccccaaccccgccaattaagctaggaccctatagatcaccgggaacgtgttggattggctgttggtcacacggtcaccgtggacagagcgtgtaagagcaccgttagtaaaattagttgaggggaaactcttgttagggtttgaatttggtctcaaccatagtagggcaccagtcgttgcgtgaatggaccggtgtaggctcacaggagctcggttccccgtcgttcgccgtcatgg

SEQ ID NO: 95242 - DNA, 305 bp, Zea Mays
cttcagataaaccaggccacccaggctggagccagcagcggcctccttcggcatttcccatacgctcgcaagaggccatactttgtaagtaatatgctcttaaactaagtctcttgtgccaatataggtgcacacggtgttgaaagcagcttggcacgcttgcacatcattcccaagtgcagtggatggccttctaatgccgaagcgagaccatataggacgttggataattcctttcacatcttccctctaacccaagtcatttttcacataaaaccattccttcatccaagaacccggccact

SEQ ID NO: 95243 - DNA, 792 bp, Zea Mays
cgaggggaagccaacgactttactaggtttcttcacgaaattgagcgggttgtgcaagcactcaggtgcgtaaggtagtaaagaagtagcgctcgggctcaatttatagggaggttgtcggaatcggatggaattcaaaatatcttcatgtgcgctagcgagcttgtgtgcgggtaaggccacgacgagcacccaggtgaaatgcttcggccgaacgacgccacctcatggttacatgcaccacgtctcggaagatttttaccaacagccgcaattccgagcagtgaacacggcagcggtggcgttcttatccccggcgaggtgcactgaatccaaatcgctatcttgcctgccagcccgaattcggatgaacattgcgccctgattcatgtagttacatgcaaatcggtcctcatcaaagtggtgcattaatcaacgttctttcactttcgtgtaatgaccataccaaaaatccccacgaattaagcacacgacgatgctcaagttagctcaataacactgaaccctagcttcagtttgaccaaatgcagtatcgcatttctttccccatcagaccgactgacagcgccacttcaaggcaccattacttctgttttcacatagcaacaaaccaaccttactttagcaaagttatgctcctatatacagccttcaacttcatcacaatgactttggacttaaacccactgaataatctttaatttatctccaaagtcagaacaacgccactgttaagctaggttcagagttttcttatcactgacagcccaa

SEQ ID NO: 95244 - DNA, 416 bp, Zea Mays
agcgcctccaaatccttattagcgacagaggagatggcccatgggtcgcgagggggaagaacgttgatcttcttgggcatcgggatggaggaagaagacagggagaatacaaagaactcttttttttacaaaaggcgagggcggcgtgtaaagcaggaaggctgaagcggtaaggtaacggtctgaagcatctgtctcgggcgaatttatagggacgggcaaagtcaccaaggtgcgaatcgtcacggccagacggttgttgtttcgaatcctgtgcgcatgcgcgctgcaaacggtcggctcactgacaggacgccccgtcacattaaataattgtgccccctccaagaaaaaatgtgtcgagcgccgttccgcgttcctcctcaaaaggtatgccctcttccctctacccctct

SEQ ID NO: 95245 - DNA, 526 bp, Zea Mays
ctccgcgcaaaagacacccacgggtgtagccggattagcacaggcgtgcggatacggccaacagggcacattacaatacaaattacagttacatacacacggcgagggcatcatatattacattggctcaaccttcgagatgatacccatctccctgtaattgaacagcattatcctcaattcctcaccctcaaaaagatttcgcagatccccctcacctatgctcgccccaatcggcgaagacaacaattctcgtttaccaacccggtctacccgaagacggccacgctccatccccatatgacggcgcctaccacttcgcgaaaactcacccacactgtgtttcgacaccacccttcgccgcctatactcagtactcgcactaggaagatccccgacaccctccacacgcggcgaagactccgctgcggccacatctaacatagcaaaataatccaagccttcatccgaggactcctccgtctaggaaaacaaactcccagactcaccatcagactcaaaacac

SEQ ID NO: 95246 - DNA, 830 bp, Zea Mays
gatgactatgatgtggaaagtggggatgaagattctgagaaccggccctggcggccaagccataccatcttcggaaagtcgaccattaaacaaagtcaaattgatgccatgaagggaagatacttctgtgacatgtctatcgtgagggttggagggaacaacatcgcccctgctcctaaagaaaataaggttgttgtctatagaagcttcatgaaggcgggtcttcggttcccattgagcaaattttttggttgaagtgctgaagatatttcggatctttcttcatcaacatactctcgaacttataattagaatgggtttgtttgtttgggctgtgagaagccaagggctggaaccgagcgtgaagtgtttttgcaatatgcacgaactgttgtacaagacgaaggccagtggtaaagaacagtatcacaacaacttcggttgttatggattcattgctcgttctaatgcaagctacccggttccaacatttcggaaaaggtggcccgggtcctggatggagaaatggttttatgttaagaataatctaattgaaagagaggacataaaggggattatccaatgccccatctggtctcgctttggccttcgaaggccaaccgtggcgattgaaaatgatgccgaagcatgccaaaaggctttcaacaatgtctgtgctttcattggtacaagagacctgatccaagagcacatagcctacagggtatggccacttgtggataactgggagatgccgaaggagactgctgccgggtccagtccagatggattaattcgtttgaaatataccttcagatacagagactggt

SEQ ID NO: 95247 - DNA, 352 bp, Zea Mays
attttaattggtagtccataatatttagaatccagcaaatatggtttgacaatttttggttaagtatctctcaagttatgaatttcctaagttctctgttcattaaaaagattaaacagaaatgattaaatggaaaactattttgcaacggggtccctggcgggtgttttcaagtttccttacagactagtccttgggctactattcaattgagtcgctgacaattcagaaaaccccctgggttcttctaatcctaacccgaggtccttcccccaaatcaaacagtacccgcggaggaagaaagggcggaggggcttaccggcggtgagactgctccggtgaggtggccgag

SEQ ID NO: 95248 - DNA, 321 bp, Zea Mays
ctctctctctctgagtctgtgcagtgcgttgtgtgtgcttggctcccaccactttctctctctgcactttgaaaacttcgaaagcctctggcaagctaagcacggacagccctccgttttcgttgtcggcatgtcaaccctctcctcctcctctttctcccgtgcactccatcagcagtgcttcctcgctctaaaaatgggagccgggcactgaggcggaagagcaaggcgcccttcatccattagccagccaaggtaaggagggaaccacccatcctcctcttccacttcaagcatcatcagtgtcgatccgacgttccc

SEQ ID NO: 95249 - DNA, 340 bp, Zea Mays
tccaaggtcgcatgtaggtggcaaaccgggtataccaagcacggggcgcctgtttgagtacatagagagacttgtttaggcgacaaaacccaatctggatgagtggaatcaacaaaaccagctggctggctgcaatatattgtctcggacaatgtgccatgcagaaaaccattcttcacatccaactgatgaataggccaatctcgggaaaaagcgagagacagaactgtacgaactgtagctggtttgacgatagggctgaaggtctcatcatagtcaatgcctagtcgctgagtgaatccacgacatacctagtgagccttgtaacgctcaagagatc

SEQ ID NO: 95250 - DNA, 376 bp, Zea Mays
atccactctagtgggttcctagcgatccgtctgacccctcctgattgcctctgcctcgtccgacccttggctcggtgcgcaggggttgcccgagggcggatttacctgggccggtggactcgatgtcgttctcccactaactcattgtcctccaggacccagggatctgaaccccgacaaaaggagaatgtatgatacatcgcttatatatttgttcaaatctaaaatcacctttagtcattaaacaatgtgatcaatttgagggctatgttaaaactaaccttatcatattgagttccacttgttcttctttatatgttttacaacaataggatcaatttcaagaaggggagcaaagttcgacgatgttaagaaa

SEQ ID NO: 95251 - DNA, 445 bp, Zea Mays
gcaatgttgaagcatgtcagaaggcctttagcactgtgtgtgctttcattggcacgagggctttgattcaagaacatatatccttcagggtatggccacttgtggagagctgggatatgccgaaggagaccactgccgatgctagtgagggtggtctagtccgattgaagtataccttcagatttagggagaagtttgatgagctagacgatgactggttgaaatgtatcgaagctaccagtgatgagctacttggggcatactctaaggccgaagataatgctttgtccgcagctttcgggggtcggggcaagaaaagattaaacagggtatttgatgctattggcttcgtataccctgattaccattacccactatgagggcaaaataaaaagagaaagattgccgcttcggccattgcagctgagccgaagggcaaaaagat

SEQ ID NO: 95252 - DNA, 1545 bp, Zea Mays
agcagtgaaggtggcatcaaggtaattctgcgggccaagcaagaccagattgtctctttcaagcacactactaaactgaaccaagacctgccccaggtgcgaccgctgaatgtcccgcaacccaagccgacgatgctccaccaaatattccctgaccacgtccctcaccgtcgggaaagtgacctcatgatcaggcaaaggttgaatattgatgatggcccaatcctcatgtaatggcgaaaggcgccgagtcactgacctggccataacctcacgatgcaggaccaccgaagcgctgaagcccggcggaaggaagggctcgggatcaacacgcctatacgccatcaagacgggaagcgaagatcgccaaccagcggccggagagggagcagtttggggttttggtgaagtgacacccaaagaaagcgtcgggtactggagaggtgacgattcggattttttaatacctcccgggcgaactcctcgaagcaactgaaacagggcggtccaccggacagggacaccatgggagagcgaaaccaagtagagtgatccggagaatttcgatttcccaccaaaatggcctggctcccaaaggcaggaaatgaggccaacgggaaaccgaaaaaagatttttttgagggacaaaaaagctccaagtgaccgagcgccttacagaaaaaacagcggaatgccgacgggcccagcagcccaataggcccccgaggctgaatgggatgccagtgaagattacgacgccgataccggttaaaatttgaattttgaaagttggaacggtcgtgcattccgccgccatgaaccacaccaataggatcagagctcgagaatcgatgaggcacaacacccgaccgagaggatgaagacgacaagcccagatgattgaacgccgagattctagggtgagactgataacgcccagtagcgggagacctccaaccgttgcaaactgaggccagtttatcaagggaagaacccagacgtcctagtccgaggctgacgctcaaagccactgggagacttaatgatgttacgaatcggaatagcattggcaccagtgagagggagcttaacaatatccgcaaaggataaactctttttgccccgcacctgctgccaagaagacgcttcttcctccgaaaagatcttgaattcatgcttccagttaggtccaccaaaattccaaaggttgaagaaagccttgaattcctttcgatcaatgcacccggaattgtaaatatggaaacccacagccatcgaggaaaccggaaaccgaaaaacccggtcagcgagctggagcacctcgaagccagaagcgaacccgccaagggccgcctggaggaggtgaccaacagaatccgggttcagcttgaagatgcatctgccaaaagaaaccaccagccagaaagacgatcgaagacggggtcgaaccagacaaaccgaagaagctaaattgagcctgagggaatccgcgaaggccaacccaggccgaaagtctaggagagcgaggtccatgctcgaagaaac

SEQ ID NO: 95253 - DNA, 413 bp, Zea Mays
ggccatactctgtaggaaatgtgctcttggaccaagtctcttgtgccaatcaaagtgcatacagtgttaaaaatcctctgacatgtttctatttcatttccaagtgcagtggctggtcttctaatgccgaagcgagaccagatagggcgttggataatcctttttatatcttccctttcaactaagttattcttcacataaaaccattcttccatccaggatcctggccacctcttccgaaacgtcggaactggatagctcatgttagagcgaggcacgaagccgtaacaaccaaaattattgtgatactgttccttcctagtagccttcgtttcgtaagacagctcatgcatattgcagaagcattttgcacttggctccagtccttggcttctcatagcccaaataaaaac

SEQ ID NO: 95254 - DNA, 609 bp, Zea Mays
aaacaaaaatcatctgaaataaaatggtccaagttcaagcaagcactgtgtatcctcataccttttctaggtctccacccctagcttctcaaggtggctttttatagcagccatctggtatgcctttttggcttgcagtattggagacgccatgccaaggacctcatactacttggagttgttgctcctccttggagcatgcccaaacatgtatttcaatcacacgacaattcccatgcaatcctaaaaagagagataaaactcaactaaatcaactaaagaaaagtagcctaaaatcacctattgaaatattcattctatagcagaccttgaaagacaaacaattttgggatattgagttttttatttgcagttgtctttggtgtaagaaatagatagttcactttgctgtgtgaatgaaatgtttctctgattttggatgtaatcaagtttacatcacacaattgtctgtactgcaccatttcacactttctaagctattgtattatggtccttcaagaatcaagtatgaactacaattgtacggatgattcatgttgatccctgtgttttagatctgattaattaatctaaaacgttaatgcaaat

SEQ ID NO: 95255 - DNA, 544 bp, Zea Mays
gtagagcaaacaaaggagaacaattttgcttaagagtgcaagccatgttcttgtgaaaaatctggagataatcatgctcaaaatctggttgtcacgctgttaaggtctgaattttcagactgacagtggactgacatcaacttcaagctcaattctgagcatgatcctgtgactgtttgtggatgcacgatgtatcaaagttggagctggtctattaagctataattttgctgtagagtgttggtcacgttgctatagaaatctgagaggaatttggccctgaacttcgactgtcaggtgcactgaatcagattttgccatggtacagtgacctgataaggatcagaacgccagcgcaaaatgctcaccgccggtgacctcttctccgggattcatgccacgggcgtatggatttcgttcaccgggtaaatatctcgtcgcggatgtgcatgagctactgtggcctcgctgtcccctgccccttttcaccggcgacgtggcctcatggtcgtcaccggagttgtcgtgcttcactgcggctgtg

SEQ ID NO: 95256 - DNA, 1193 bp, Zea Mays
ctcctgactcttcgagtcgcccttcttcgtcagttgctcctgagaaaaacattactaactaggaacactgaatgcattgtgtatgtggtcaatgtgctcgaatattctgttagaaaatgttctcggtactgaatgctattattatttttctgttgtttgaattcaacattcgttacgattgaagaggtaagtgcagtgtgatgattttgaaacttctttctatttcgcgaggcatagagatcgccctaagacgagtaatcgcgagcgtgcttatgctggatcgagtagatgtgagcatgtctcgccgatttaaatcactaccgacttaaagctgactgctccgttcgtagggtatagtggtcaccctgggttaagtaagcgtgagcatgtcacaccgccttcgccgacttaagtcgattgctccgtttgtagggtatagtggtcaccctgagttaagtaagcatgagcatgtcacaccgccttaagtcattgccgacttaagccgatttctccgtttgtagggtatagtggccaccctgggttaagtaagcgtgagcatgtcgcaccgccttaagtcattgccgacttaagccgattgctccgtttgtagggtatagtggtcaccctcggttaagtaagcgtgagcatgtcacaccgccttaagtcactgccgacttaagccgattgctccgtttgtagggtataatggtcactctgagtcgagtaagcatgcagattgacaataaacggttcgagtgcctttgagaatgaagtctttttattgatggtgtatttcccaattacagaatacaatgccatcccaatagcttttgaaatctagctaggggtaaaacttcttgagatgttctatattccatgagttccctattttcatgccatccatttgagtaagacgaaatgatccaggccgagtgacttatgctactatgaatggtccttcccatagtggcgataatttgtgccgcccctcccccgctagaattcggcggaggacaagatctcccactgcaaaggaccgatgccgtatggccttatcatgatagcgccttagagtttgctaatacctggctgactgaatcactgtattcaatcgttcttcttctagtatatcaacgtcctccagtctagtagcctcagcttcagctatgttttcaaagatcaatcttggtgcc

SEQ ID NO: 95257 - DNA, 305 bp, Zea Mays
aggtgatgcaaataatcttgatcaacttggtggcgatggttccgcagctttgccttgtgttgattttttgcagcacgagagcagagttgtctatgactctaatcatccagtgatggaggttggcagcttgtatgcatctatgactgaatttaggctggcaatgagacaatatgccatagacaaagagttcgagttaggtattgaggctagtacaacgaagaaatatagaggctattgtcgtggaggcgactgtccttggagcataaatgcaagaattgagagggatggttcgccgaccataattg

SEQ ID NO: 95258 - DNA, 501 bp, Zea Mays
ccaacggcccggatttagacgcgcgaaggggtatacgtgttctaatcctagctgcccgtagctgatcggacggccagggggcctcctccttcctccctaccacactgggtcgcgccaccgagcccacaatggcggagcaggccgccggtgcgcaccgccagatgcctccaaactcagatcttaattccaatctcatgcgcacaaagccctaacctacctgaaccagaaagtctactacacaccgccgattatcatggacggatccctgaccacggcgaaccgcggccaatcgatgctagaggggctctggtgagcaattctcgacccgctgaagagcacttccctccctcgcgggacaccacacttcgaggattagccaacgaaaacaacggaagcagccatacctacgacggtgctttgatagagctggcccactgcgcgaggcggaaccgaggtgatgtcgagctccggtgagcgattttgaccgcgcattgctcacag

SEQ ID NO: 95259 - DNA, 489 bp, Zea Mays
caaacccgagatggaccaacagtatccatatgaagcaattcgtcgggctacgaggtcatcaccttggagaccggggaatgggaagtagcaaccatcttgccatgatgacaagggtgatagacaagatccttctcaaatttcaacttgggcaatacttggatcaggccaagtgagcttagtctacacaaaagatcaaagctcaagtgtcctagtctcctatgccacttccaaatcaaagaagaggatcctgccagcaaacatcgagaagggccataaaatgtgaaaaacaacattgaaaactcaactaaaagtggaaatctgataaacaagatcccctaggcatccaaaacccaagacaagcccttttttaagcgcacttcatagtcatcctcaaggaattgcgaaacagaaagtggattgaaatgcaaattcgaaaccaaagcaacatccttgagaacaaaactcttgttcactcgaacagagccatga

SEQ ID NO: 95260 - DNA, 310 bp, Zea Mays
gttggtatcattttgggaactgattggatgacctaacaccaagtaatactagacgttgccaaccgcatcgttgaggtccattccccgacttgcgggaaatttaccttatatctgcccagccaagaaaccactcggtcatgcgccttttccataatagagctacccctagagaagattccagtagtttgtgagtatgcagatgtctttccggacgagctgccaggaatgccactagatcggaatattgagttcgccatagaattgcaactgggaactgcacctatctccaagaggccctaccgaatgccac

SEQ ID NO: 95261 - DNA, 837 bp, Zea Mays
caaagcttcaatattcttttaagacctttttcggcagcttcttctagcagtttgttgacagcttcgttagcgattctaattatgtcgagcgcccccttcaaagatggatcaacttcgagattgtatggctttggagagggagaaagctcggctgcatcagaatacaagtatttattagtaccgaagctgcaataacttacgaagctaagttgtaataggtatacctataagcctgacgcgttcagcagcctcttcagctctcttagcttcttctcggacatcgtgaggctctttttcatttcttctaatagcttcatcagctatctctcggtcacccttcagccatacctctgaatagaatttcccgcttagtgcagtagcgcggttgaagggttttttatatcatcggttgaaagtgagaatcttggctgagttacaattttctcatgttcgcaccagactttctccaggattgatacaactccgcaggcacaagcaaaagcacaaaaatcccctttgtcactaaggatctccttaaaggcttcggcttcacctttaatccactgaataactccatcggggtcaccgcagattaaattttgttctaagaaaaacgcaccaaccttagcaaagctattcttcaaattcttggcgcattctatagccacatcgtagcatttttctttagttgcatgaagcccgtcaacattcctctgtgcccttgatcgttcgatttcagatattacatgttttgtcagctccacattaaaattttcagttgcttcagcaactttcttttctaactcttgcacttcagctttgtgcacttctgcttga

SEQ ID NO: 95262 - DNA, 496 bp, Zea Mays
gaaggatagctgcaaagctcatcggtgtttcgagggtgacaattgatactgcagtggaggactcggttgtctcatagtcttccatgtcatataatcctccacgctcatcatcaacagtcatattgtgcaggatgatacatgcatgcatgattgagtacttgataggaaaaaaagaatgacctggattgtgagaatatgaaattaagccttgatcacccaaataccatctccatgtcctcagtgttccttcctattaagtagcaaacatacactcctttggagtctgtgagagtggaatggtcttcacgaacaccaagtgccaagagtagatgcataagggaggtagtaccgtttgtactcatggccattcatcatgaagttcacatttggtgtttcacctttgagcacgttagtgaacaaagttgattggttgaacacactcacattgttgttcgatcccgccaccgcctaaaaaacatgctagatccatactata

SEQ ID NO: 95263 - DNA, 369 bp, Zea Mays
ccagagtgaaattaacagaagaaccccacggagtcgcaggatgaggcagtcatggagctccaaactgggatggtacagaagtggttggtgcaggagtaggcgctgccaggtactgcgggaaacctggcataggcacgaactgaggagtcccgggcatatagaactgctactgagggggtggtacagaaaattgctgctcagcgcttgacaacatgttgacagtgccctgcgaagaggaagaaatcactggctcccattttagcttcccattggggttcctcctacacaccacatccttgtgatcctggctgtagatagagcacctgccactcgactgacactcgacacagtgatgcgcttcaccacaat

SEQ ID NO: 95264 - DNA, 365 bp, Zea Mays
cagggcactgtaatcatcttcagattcaccttcctcagcaccaacctgctcagcttcagcagcaggtgcaccttcgtcagaaacattctccgacactaccagccccgaccgtttcatcacttcagaaattggagcggtttcagcagcttcggcttcttctccgtcacgtgtaaccctagcagtggaacgtatccttgccatttgatgatgaattcctcacaatttttgatgaagttgttgacttttttaattttcccgaagctcttcctcttgtgacgaagcaaaaccaacagcggtgcttcggttgagtgcgatgaacaagcttcggctatggtcaaatttttggcagcaaaacagtgcaatag

SEQ ID NO: 95265 - DNA, 664 bp, Zea Mays
cttgagaaaaacaaattttacttcccacaaagtctcctcttttgttctcttcaaaattctcaaagtttggtttcagcctccaaaaccggttcaaccggtcctgaaaccggttcaaccggtcctgaaaccggttcaaccggtttcggtactgttcaccctgccacctctgctctgacctgtctgacagtcagagctgtcagaaaagtcgcagcagatatttttcaaaaaccggttgagccgaattttgtccctactcagccggttttgaaaccagtccagtgtccggctgagtagcccagtggaccgggatccccctggtagaaaccggttcaaccggtttgaaaaccggttcaaccggtttgaaaactggttcaaccggcttttacccattttctcccaacggctgtcagcttttggggatcctttatataccccctcacactctctctctcattaattcctgtctctcacacgaatctttggctgaccaaccttcaaacaagagcattcacttcacctttcacacccgcaatcgcatctccttcaatcatttgaaggacccttggtgtgaggtgaactcgatcgaactcgctgtcaatttcttctcgattcttccattctcttgttcttgagctcgttgcaaacttaatcgtgtgcggatttg

SEQ ID NO: 95266 - DNA, 573 bp, Zea Mays
tgcgcatgttagagctgctactagtgagtttactgaatttgcttctgtttggtggatagaacatggtaagaagaatcctaataacatgccacaaacttgggatgcattgaaacgggtcatgcgggccagatttgttccttcttattatgcacatgatatgttaaacaagttgcaacaattgagacagtgtactaaaagtgtagaagattattatcaggaattacaaatgggtatgctgcgttgtaacatagaggatgttgaggaatctgctatggctagatttttgggcgggttaaatagggaaattcaggacatccttgcttataaagagtatgctaacgcaacccgattgtttcatcttgcttgcaaagctgaaagggaagtgcagggacgacgtgctagtgcaaggtctaatgtttctgcaggaaaatctacaccatggcagcagcgcacgactacatccatgaccgatcgtacaccaggaccaactccctcgccgagtcgaccagcaccaccgccttcctccggtgacaaaccacgtgcatcttccacaaattcaaaaaccaaatgtgc

SEQ ID NO: 95267 - DNA, 399 bp, Zea Mays
taaaaacaacatgagatgagagtcatcattgttagtacaagtatcagcaacatgatcatcatcaagactggccgtgggagtagagcgaggacgacgaatgcaagtctgagtgacaggtggtttggaagagtaagactgagatggtgtggaagtggaaggtggtgtgatgagaataagaacatctggggtagaaacagtaggtggtgatactgatgaagtttcagaaatgggaggaaagctcataaaggaggtagactctgtggaataaaaagaagaatgagtggaagagttgtaaaagaaggctcggttttcattaaagctcacatctcgagaaatacgcatgcgacgagaagatgaatcataacactgatagcctttatgttcagggctgtatccaag

SEQ ID NO: 95268 - DNA, 534 bp, Zea Mays
tgggccgcagctgcagcaacaagctccttttgcttttggattgttatctggcaagtccttatggtgtggcccttgtcttctccacaaaatacacagcacaactttcttagctgcgagttaaacctgcctccaaagattcgtcctcctcttctctctattggagctggtggacgaaagttgttttgagaagattgatgtcgggtgcctaactcttgaggttggcttgactgaccctgagaccgagcagttttttcttcactatggaccaggttgtgtatgctccggatgtgtctagggtgtgatcttcctccaaaacccctgctgatctttgtagactttttttgcttcttcccttctttggcgaaaatcattgtctacccttatatactcatccctcttctgtagtagcttctcaagagagtcagggggtttcctggcaaaatactatgctactgggcctggacaaagtccttggatcattgcttctgtgatgatgtcattttgcacaatcggtgcttgatcccttaaacgtag

SEQ ID NO: 95269 - DNA, 283 bp, Zea Mays
tgatgatccaggtcgctagcaagctagttagctaggacgacaaggcaaaatactattatctttgccactatctatctatgaatgtatcccggcgcgagtcgatcggttcttgtttaagcttgattagaagcatgattactcatgtaatgaagaggggttaactaaccaatcaggaaccatgattacacttcacggtgctatcagaatgcattatctatgagtgtgtatgacgtcattgtcttggtttaattacgatggtctgctctgtgcgagcaagctgaca

SEQ ID NO: 95270 - DNA, 414 bp, Zea Mays
tttatgttatcaaatatctcatgccataaataatatttgacagtgagtttgatgaacaaaacatgacgtgtctcggtaggccaacaacgagagacatagacaaattgcgacgtgatggagtgcatgggctacctaatttcgttatgtggcttcaggaccgtgtaagtctcaattatgtggctccgagacctaattttagttaactaatattacataatttgctaatgctttgtggcataattgacagtttggggaggaaatgaatttgaatgatgacttacgtcagttatctattggaagcgtaactgccaaaagctatggacgttacaacgtcaatggatatcgctttcgttcaagcattttcgaatatagtcatcctatggctgccactcaaaatagtggagtcgttactag

SEQ ID NO: 95271 - DNA, 555 bp, Zea Mays
atccccagggaggtgattgagcaccatctgaagatccaccctgacgctaggccggtaagccagaagcctcgaagacagtccattgagcggcaggtcttcatctgtgaggaggtccagaagctgcttgacgttggctttatcgaagaggtccatcaccccatgtggctggccaacccggtcatcgtgccaaaggcaaacgggaagctttggatgtgcatcgactataccatcctgaataaggcctgtcccaaggacctgtatccacttccacgcatagatcagatcgtggactctacctctgggtgcgacctcttgtccttcttagatgcctactcgggtttccactagatccagatggctagggaggataggaagcataccgcttttataacagtggatgggctctactgctatgttgtaatgccctacggtctgaagaaccccttgccaacatttgtacgggcgatgagtaagaccttcggagacctgataagggacaaagtagagatatatgtcgatgacatcatggtcaatactaggaaggggttgactctg

SEQ ID NO: 95272 - DNA, 685 bp, Zea Mays
gaaggcaaggaaaaaagagaaaaagtgccgcttcggccaccactgttgtgccgaagggcaagaaaataaaggttttgacccaccggccacgatatattgaaacagacgtagtgcctgaatttggtgaagggacctcctccgctgccgaagcgaaacaagctgctcccgtcgctcggagcactgagggatcgattgtagtgccgaaggtgcctatagtcgggtcagctgaagccaaagatgatgcggccagagagccagagctggaaaaaatagtgatgctgccaaaaattatgagtcctccggcaaaggcagaactgccgaatgttacaagggctcccgccacaactcccaagaggagaagaatggcacgcgtgctagatgttgttgtagaaacaacaagagcactgactcctgctcctgtgaagaagattgtcgaagctgctacagtgcatacggaaaccgaagctaggccctcaatgcccgttgaaacgaagctcgccgcaaccgagtagagggccgaagaagaatctctagatacttgcgtagctctagagaaaagtatggccaaagaagccaaatcccctgctaccgaagcaccgtccaaaagtcttgattacatcattcgacatgcttcgggaaaaagattatctaaagaagaagtttttgaagccaaacactatgcccg

SEQ ID NO: 95273 - DNA, 640 bp, Zea Mays
cttttggtagtcaaggcctagatcatgaataaccttctgtactttatccaatgtgtccggaacacagtggccttctgggagaacaagctggaacaactgaagtacggccgctaatgcacttttactaagaccaaacatgcatttaatctgaaagagccttactataaaagataccttagtgacctccttgcaacctggatacaattccttcttcgcctctgttaatagattaaagaacgcctttgcttttgcatttggctcttcattaatatttcctatgatgtcttcatgtatagaacccctgattagcgttgaaactagttcagtcacagaaccgctgtcacctgtttcatcatcgttgacaactgctgcagcattgccctcatctaaatcatttgtttggtttccttcttcgatgcagctctcatcaaaccctctaataaccaagtgactctgaacctgagattgtgttctgtaggacatgcatcgacatcttgaacatgggcatggtacagtttctcctctagcagtgccaccaaatgtagtttgtatgaactttctgaaatttgtttgccactcatttgtcgtgaagtgcatgcgcatccaactcctattattctgagacatgactttctagtcg

SEQ ID NO: 95274 - DNA, 406 bp, Zea Mays
ttcaagtgctggaagaatacatccagatatgggatcaagtagaggggatcatcctgcaacaaggtgtgcctgacatgcataagtggaatttaactcagtctggagagtatagtagcaagtctgcttatgctgcgttctttttttggttccatacgttttgcaccttggaagagttgggctccactacgctgcaaattcttcatctggctgatattcaaaaaccgctgctggacagcagataggctagctaaaagggggctatctcatcctaagacctgtcctctttgtgatcaggaagaagaaaccatccatcaccttttagtgggttgtgtcttctcaagacagctctggtcacacattttcttggcactaagattaccggatttggtacctacgatggctgaat

SEQ ID NO: 95275 - DNA, 406 bp, Zea Mays
gcctggtataagctctatggcaaattcaactttcctttcaggtggcatacctggtaactcctcgggaaacacatctaggaattctgatactacattgatagtttttgatggttcaatctcctcaatatggacggtgacttggtgacagcttcctttccttggtccagacaagaccaagtccactaacacttcttctcctgataaggacactaacttcgccattctcttgtcacagctaagactggcttaatacttggttagccaattcatccctaagatgacatctatagtcgcatcctggttacccataactattagatcagtggggaactctatcccccttatttgaactcttgcactagggcaaaatctatacgtttggattcttccaccgagtgaactaacc

SEQ ID NO: 95276 - DNA, 627 bp, Zea Mays
tttggaccagtgtggtacttgagcatgggagccacgtcttggagtccatgtgttgctggcaccccaggagtttttctccaacatgtgttgagccagtccagtgaacccttacctttacctaattatctagtgtgttccaaagctttgttttagtggagctatttcctatcctcgagcttttgataggattcattgtgtgggtgaggtgatgcttgtgcctgcaagcatgtgtagctcccctagtcgttcacaagttccctctgttcttgcttgtcgcacgccagcctctttgtctggtgaccacaacccccagctcaccctcaccgtggtcaagatatttggagcaactacccacccaagtatgacttgtttcgaggtctacatatggcagtgaagctcaccgaaatgagttctctaactctacttttgtctaatgcttggaacagcggcgcgtcgccgttgtctggcaccgcggacaaccctactgccgaccttcaaacccgtatcgttcctggcccttttcacgtaagcaccgagatttaggttggttactgatgctcccctcgtcgaagttgggaaccctatcgtgcagtggccatggaatctagctcgccggatcaagtcatc

SEQ ID NO: 95277 - DNA, 475 bp, Zea Mays
actacacactcattggggagacattgtacagaaggggtgcatcaggcgtcctcatgaggtgcattctcccatctactgggaagcgacttctggaggaggtccatgctgggcaatgcggaatacatgagcgtccagaacactagtcgggaaggtcttcaggtcaggattctattggccaacagcaaagagtgatgcagccgatgttagttcagaggtgcgaagcttgccaatacttgtcaaaacaacaacatctgccagcacagcaactgtagaccataccagtaacttggcctttcgcatgctggggattggatatgatcggacctttcaagaaggctcaaggaggatacactcatgtattggtagcaatcgacaaattcactaaatggatagagttcaagcccattcttctttaacctcagctaaggccgtggaattcatacaagacataatattcagattcgggataccaaac

SEQ ID NO: 95278 - DNA, 315 bp, Zea Mays
cgagaatgtgcatgcatgccatcattgcccgcagccagtctaatttgcaacaacaagtccggggaaaaagatgcgcctaaccgagatcttatcgtaaccatcattatatctttatcaaagatggcgcgatatagtatgaatttacgaatcactgtctcggtaaaggcaaaagtgaagttggagttgataaaccaggccaatcacggaatgatgttgcttgttaattgcaaccaatttaaaaagggcatgagatcagcatgatttcacgcacggtacgcacacatgtaaaaccttactcctatgagtatttttaaa

SEQ ID NO: 95279 - DNA, 372 bp, Zea Mays
ctgacatccacaatgtgtttcacgtatcccagctccgcaaatgcctgcaagcaccagaaagtcacatcgaagaagaggcattgcagattcagaaagatcttcagtaccgtgagaagccagcaaagattcttgattcagcagtccgaaagacccgcacctcagaagtgaaactctgtaaagttcagtggagcagagaaggagaagaggaagctaccagggagagtgaggactccttgaggaaggaatacccttatcttttctcaaatctagtctaaatctcgagggcgagattcctttaagtggggtaggtttgtaacatcccaaaaatcccaacccaaggtttggaaccctaacctcctaaccccccctctt

SEQ ID NO: 95280 - DNA, 280 bp, Zea Mays
gcttgttgtttgcctcaagatcttggcggctaacatattcatcgaagtctgtagggatccttgcttcttctttgtcgcctgccatcgaaacacaaaaataggaaacaaacgatgaaggttatcctaataatttcactacactctcctctcaggtggaacacaggaacacgctctattgtatcttaccaagctcttacaagtgtctgacgaaatacaaagcaaaggatggtacaatcggaggctggttcgtgatacttaccaagaggtagtgaaaccgcga

SEQ ID NO: 95281 - DNA, 315 bp, Zea Mays
catgagttggctgaccccttcttgtataactggccctcaatgattgcgaagtcccggcttcggtgcttgaggcgcttggcctcgttgacgtcgcttggatgataatatccttgtaggaacagggttattggggctcgccaatcttcggtcatgatgaggttgactatgcgatggccctcggcgtcgttggttatttgtaggccctctggattgcggacggctggcgtgccgatgacatggtagaacacgtcggagggcaaggcttcgcctctggcagctgctttggccaatgcgtcggcctcctcgttccttgct

SEQ ID NO: 95282 - DNA, 884 bp, Zea Mays
tggacgaggatcatcatctgtcccaatattaatttcttccaactcgtcaacagttggttgatttccatcttcaatctgtgaaggtgcttcagtagcatcaagaggtttggtggaagtcatattaacttcatagcctaaaccatatttctcttctttcaacactccatcttggtgtaaggcgttaaactgagcttgggacatcagcttttcgaaaggtgctagctgcccccggccgtcgcataaagaaggaccggtagatatatcatatcccatctgttgcataatataaagaactttgttatcatataaagagatgggtaatgctttatcatctctatttaagaaagtaacttgcgcagccattttgttatttttattatccctttcagtttgggcttgttttattttatattgcaccaaaggaggtaagggagttgggaatgaaatacctctattttgagaggcctttttatttataatgcgaaatatcggatcacctttcttcctttggttgcttggtatgtatcggtatattttttggcttgacgaagactcgtcatcttctatctttggaaagttttgttccaatagcaatgctgatgttggctttgagactttatcaacaggttcaaaatagaactttgcgtcagcatagaaagtttccgctatagtgaatggcttcttatccgcgaagatccttactatatcccccgactgatctttgtacttgatgcattgatgaagagtagatggaataactccattctcatgtagccacgggcgaccaataagagcattatatgaagtggccgcatcgatgatgtgaaatttcacatatgtcgtgaaatttttaagtttcagaataaggaatatggtacccaatg

SEQ ID NO: 95283 - DNA, 720 bp, Zea Mays
attgtgtaaacaaacacctctaataagattatataaactagattatataatccacattatataatcaatatacaataagctagagtatataatcctgcaaggacttcatccttcacgcaggcagacggtgaatgcagcatccacaaatctttgtttaccgacgaggcagattgataaccatcaagaatggtagaagtgtgagatttggatatatgcttaacctctctgtacgatttctcatatcttgtctgagcataagacaaaaaaaagttactgcagcacaggttagaagtggggaaactgttgttcaatttagaagatggttatatgaggatctggctacttgttgggagaaaatctgggatgatgtacacactgtaaaacagaacgtatctcattagtataggataatagattatgtatatctgaagtcggtagaggataaccgttcatctaaatccggagctgcgcatccgcttttctctccttaatcttttccaaagatgtaacaaactctatcaagatgagtataaatatatggccggacctttagaggccggtatgcttttcatcatttaacatggtaacagagccattgatcctttgaatgccctccacatattcttcaatctccttctccttacccaccgctccaatggccgccacggcaaattcccaacccaccaaccccatgatcccgctgcatcatgcagtaactat

SEQ ID NO: 95284 - DNA, 353 bp, Zea Mays
gtcatgatacatcttattactgccagggtgcatggagaattttgaaaggtgagcttcatccaatatcttctttctgagctcagggtccttgggaacaaccaatcgatctccaaaccataggattcccttgctttcctgccggaagcatttgtatttttctgctttctgcttgatcatttccttaatgacctgaacacccttgtcttcaatctgtgccctgactatttgctcttgcaatgtgggctccaccgggatataatttaaagcacctgaagaaacaacttctaggttcagcttgcacaactcatcacacagggtggtgacttttgcatccatgctcatacaattgcact

SEQ ID NO: 95285 - DNA, 660 bp, Zea Mays
ccgaaccctcgttccagaaaaagcggcttaggcccactttccacgtggtcaaccacctcttccatagtcaaaacatgtttacgctatttcaatctcctgtttatgcacaatatcgatttagcataaatacttcatccgaacccacgttctagaaatacaggattaggcccactaccccactttccacgcggtcaaacaattctataccctaactccccacgcggtcaaccttcgtggccgactcgccgcgattcttcaagcatcgtcagggcgattcgtcttcctcccctcccgccagtgcgatttgccttcctccgcccccgcacgccctcaactctaatcgtcaccgccgttgatagtgtcatcgagccgcccgctgctatcaatccttctttgttggctcatgcagaagctagaccccagagacatgactcttcgtattggtccagacaaagaactcaaaatcaccaagcagactgtccatctgatattgggtcttccaaattcgggtggtgggaagccactaaatattgatgaagcgaacactgcggcaacccttcggtcctccttgagtattagcaaggatgaatttgtgatttcaaagctacaggacagactgaggctaggcaacgatgatgagctttcaatcagatgtttttt

SEQ ID NO: 95286 - DNA, 816 bp, Zea Mays
cgaggccgtggccgagcttgctccggggttcgcagctatgcatgacacagttgaaggagtggcctcctgcgggatacacagggagttggtagctgaggccgagctcgggcaaggtagagtttgttccgaggctgagactggcttcaggcgaggcgtagtttcctcccgaggaccagcctatgctttgtcgtatgcgcgtcccatcaggagttgtcatgcgatgtgggggaacagtggacgttgtacctaggcatgcgtcatcgtagttggtgaaaaccgacgggaccgcggtcttgttgctcctgttcgactacgacattgcatggggtaggtatgcgcattgaatactcatgttcccttcggctgaggcttggctcggggttgtcttccttgcccgagacgggctcgggcgaggtggaaacagtggttccgtagacagggtaccacagttgggaggagtatttccctgagtacataccttgtccgagagcaggctcgggcgtggcggagttatgagcgaccgccgagagggacctcatgcaaatcgtggtttactctttcttgaccttggagaatgtgtctgacggcggttttgaggttaagcacgtattaggaacgtaatctaggtacccctaattacgatatccgacaactatcatgacaaaggggaaggccatcgaggcgctaaacaataatcaccatgatataatggaccaacctgaggcgttgttcggagggaagaccgtagttgtaggtggagattttagacaggttcttcttgttattccaagatagtcgttgcttcattgctaatat

SEQ ID NO: 95287 - DNA, 1180 bp, Zea Mays
ctcataaatcatatgaaaagtttctttgaaaagtcgagtcaggatttatctcctgccaaaggtaatatttcactatttttatggttgaccgtgaggcctttgaaaaccctatgtctctgaatattgtcatttgttgttataggaaagaaagcaaaagggacaaaaagttatttgccaaggaagaacactgctgcttatgccatactaataacactccataggtatggtttctctgaggtacataccgtatatattgtctatgagaagacaactgttttttcacagcaggttgaatattgatgtctatctataggtggcaggagaatgatacctaaattttcaagaaaatatttaagataatataacaatggaattttcttatagggcaaagactagcgggaaagattttatgatgaaacaagagcttattgatgctgctgaagccagtggactgtcacgagacgcgattgggtgctctttctcagtgaattcctgctgttttgatactcctgttatgtttggcgtgttactaagtagctacttttcattttaatcagtccaaataaaagtaaagcaaaacagagttacgggaaggactggtacactggttggagctgcatgaagacacttctatccaatcgacttgtcaccaagtggagtaacccagcaaagtaatacacaacattttcattttccatttgtgtgggtcctatacacattccacaattattaattttttgttggcaaagtaatacttgactagacaaaaggttgcacatgaatcctcatggtataagtaaatttagagaaacaaaccccacagcttgttataagtacaaatttcataggtatatcttttggctctgcaacttgctgctgcattacacagcatcattgcatcaatgctagcattacacaatgttaaaatgatctttaaataatccgccagatttgctcccaagggctagagacatcatcgtattaatatttttcttatttgttacaaggaggaaactcaatatgctaacgcaagaaagtgattttgtatactagattactagcagataactggtcattccatattagatttttttttctgtgtgcatttggaagtgttagagtatattagacaactcctgatatggttggtttaggattgattgtaatcacgggataacct

SEQ ID NO: 95288 - DNA, 278 bp, Zea Mays
gcaaattcaggcactagcacttcctcagtagcaggaacagaaggatcggcatcctgatccaagctagacactcgacgaagacgcctcttcttctttttcttccctcagcaagagaagtgggttgattggctcggcgagaacgcttcgggcgaacactgtcagaactctgagcatccaaatctttgccggcctcagtgatgggcgccaccaccagtgtttcagcaggagcggcatcagaagaatcttcagctaacatatccagcatggcacttatctct

SEQ ID NO: 95289 - DNA, 387 bp, Zea Mays
gagatatttgagaggaagtgtttcaactttgcaaggaaaaatctgggtcaccatttccatgtccaccggagagcattgaatgggagccacactacttttttgtatgttggtttttagccccgaggcgtccccaaacagatccaaaatcatggttaccatgtgcagatcactggcagccggcctcaagaacatcaccacatcatcagcataaagcgatattcggtgctgaatggaacgagttgaaaggtgttggagcagtcccccatcagcagctttaacaattaggccattgagaacatccataacaatgatgaaaagaagaggggatagtgagtcactgatggaataagtcttgagcatctagaggacagcagtcgcttttgactg

SEQ ID NO: 95290 - DNA, 417 bp, Zea Mays
gttacatataagttacatgatgtgacctaaccaagtcaagtttttataactaatcataagctgctaagttgtcagacaccagctatggcacaataaactaactcatctagaaacttatgttgctctcctctaagaagaagaattccttgtcaaagaccgctccatttcttatgagagagatgcaccaagcgccaagaataatggtactattaaggtccttttaggaatctttaaaaagaaatgcaataaaataaatttaaaatcattatgttttagtcaaaaccagcgcatatggtggtctaccagcctgtcactcccccattatgcactaggacataacctagacctagactaccaaagtggggtcctgcataggttgaaagcggcatgatcgatctgtgtcgtctactattatcc

SEQ ID NO: 95291 - DNA, 294 bp, Zea Mays
tctttagggaagtgtacactgcaggtgcactaatcttagtataatataaccctgattctagcgatgggaatttttctatgacttctttgtcatattccccatactttatgatgcataggtattccttactattttcctttgtggtttctatatgaacaccatttgcacgaatgtccctaaaactcaagagagttctggttgattcggggtacaatagtgcttctttgatttcgatttgagtacccatcgggagtgtaattgtggctttaccggagcctattacacatgaatcgc

SEQ ID NO: 95292 - DNA, 2900 bp, Zea Mays
gccgctatagaatcgtactatcgtagtcgtcgccgccgccgccatcgcgccgctccggtctctggcggccaccgcatcatcttctcttgcgttgttctgtctgttacactgactttcttctgctcagcgaccgacgagttttgtcgtatcgcttcctcccccgcctctatgggtccttttggcggtgtcgagctggaattgggggtggatgtggaagcggaacagagagaggtgcaggctttggcctgcttcgctgatgcgacgccgcgggcgagtcagtgctggtgctgtggtgccgggtttgtcgatcacgtctgcaaattttgtggggaaacaccaattttgcagttgtttggtcatcggttaagcagactttcccttttttttaatcttagtaaagttgcagagtagaatggttgtccattactaatctagcatgttgtataccagcacatcaaagctcctttctgaaagcacgaattatataaaccctgcttggctgcttcccacgaggcgttgcaaatcatgctatgtcggttgaggcatttacgaataagagctattctgagtttgtaagaaagataaaagataaatagttcagcaattcacaaactagaaatatataatggcattcttttgcttctaaggtaactaggaagtactcgttccaagttcttttatgtcatcagcatgcatgtgttctccattagttggaggcattgctatttttcagaactctgctgcatgcacaattattttgaggctacctgaacatccgtacctttcgttttaacatttcctttccttttggcaggatacattcagcttgctcatcctatttgtttgcttcatcactgcttttggtggatcagatataaagaatctatatgctctgagggatgaactcgtggaatcaaagcaattccttcaagactggtttgatatagaaagtcctccatgcttgtggtcacatataacttgtgtggacaaatctgttgcagtcatagatttgtcaaatatcccactccatgttccttttccattatgcatcacggcattccaggcacttgctcgtctcaacttaagtaggtgtgatttatttggtgagattccagaagccttgggaaatttgaagcatcttcagtacctggacttgagcagtaaccagcttactgggattgtgcctttctcattatatgatttgaagatgctgaaagaaatagtgttagacagaaacagcttgtcgggacaattgatccctgccattgctaagcttcagcaactcgctaagctaaccatatctaagaacaacatttctggagaacttcctccagaggtgggcagtttgaaggacctagaggtcttggactttcaccagaacagcttcaatggatcaataccagaagcactaggcaatttgtctcagctcttctaccttgatgcaagcaagaatcaactcactggatcaatatttccaggaataagcacattgttcaacctgttgacacttgatttctcttcaaatgatttggcggggccaatacctaaggagattgctcgcatggaaaatctagagtgcttggttttggggtccaacaatttcactggaggcattccaaaagagattggtaacctaaagaagctaaaaaaactcattctctctgcatgcaacttatcaggcaccatcccttggtcaattggtggtcttaaaagcctacatgaacttgatatatcagacaacaactttaagtcagaactcccagcatctattggtgagctgggaaatttgaccgtcctgattgcaatgagagcaaagctcataggcagcataccaaaagaacttggtagctgcaagaagcttactctccttcgtctgtccttcaataggttaactggttgtatccccaaagaacttgcaggtttagaagctattgttcattttgaggtggaaggtaacaaactgtcaggtcatattgctgattggtttcaaaactggggaaatgttgtatctataagactgggagataataagttcaatggttctatacttcctgccatatgtcaagccaattctcttcagtcacttgacttgcatttaaacgatctgacagggagtatcaatgagacatttaaaaggtgtaggaaccttactcaactgaatttgcaaggcaaccatttccatggtgagataccagaatatttggctgagttaccgctcacaattctggaattgccctataacaactttactggactcttgcctgccaagttgtttaagtcatcaacaattttggagatagatctcagctataacaagctcactggctgtattcctgagagcatttgtgagctccatagcttgcagaggttgaggatgagcagtaactacttagaaggatcaatcccgccggcggtaggtgctctcaagaatttgaatgaaatctcccttgatgggaatagattatctgggaacataccacaagagctcttcaactgcagaaacttagtcaagttaaacctgagctctaataatctgaacggaagcatctcgagatccatatctcagttgacttcgctcactggcttggttttgtctcacaaccaactctctggttcgattcctgctgagatatgtgggggattcacgaatccgtctcaccctgaatcagagtatgttcaatatcatggcttacttgatctgtcatacaaccggttgattggtcgtatcccaccagaaatcaagaattgtgttattctggaggagctacacctgcaagataactttctgaatgaatctattcctgtggagcttgctgagctgaagaatcttatgaacgttgacctctcttttaatgcattagttggacctatgcttccttggtccacgccattgctcaagc

SEQ ID NO: 95293 - DNA, 417 bp, Zea Mays
atacatagttgagtcggctactcccaagtttctataatggtcagaagtatccattacattcaatagatttgatcaccctgatcatgtgccacacactatatgctatccactcatcctaaatccaaaagtgggtgatgttagactgcactgagtccttatcaatggcgacaatagtctcaacatcctctttgccaagacttatagggagatggtgatatctgagaaatcactaaaaccaagtttggcacctttctatggaattattctaggaaaatcaacaactgatttgggatagatcatcctatttgtcaccttcggaaccgaagataacttttgtagagagtttctatacttcagggtagtggatattgatacagctcaccatgctatcatcagaatacttaggctcatgaagtt

SEQ ID NO: 95294 - DNA, 361 bp, Zea Mays
taggaagcataccgcttttgtaccagtggatggtctttattgttatgttgtaatgccttacggtctggggccataagtaagactttcgatgacctgattagggacagggtagaggtatacgttgatgacatcatggtcaagactaagagagggtcgaccctagtggaagacttaaccctggtctttgacaaactgcacgcaacatgcacgaagctgaaccctgagaagtgcgtctttggtgtctctgctgggaagttgctgggcttcctggtttcgcaccgggggatcgaagcgaacctagagaagattagggcaatcgaagcaatgaggcctcccgcccgcatcaaggatgtccagaagc

SEQ ID NO: 95295 - DNA, 599 bp, Zea Mays
gtcgctggatgttgagactaacccttcatgttgaaggataaatatgtagtattcatgccactacattaatgtccaaagctcactgcataaaacccctatctgtaatgtgcgtaagatttcccaaataaatcaccacaatagcatacattggccacaactagatgattgtggttggggattttatctgtatgcttagaacatctcggcattaaggggaggaatgcccatatagtgtaatgcctcaatattctattaaacgcacataagctaaactgaacctgtcgttcggtgtgtactcctgtgtatatggagtttgccagaaatcgttgaggattaaccatattggtttgaatgcttctaactgatgtagatgtggatatacccgggattaatatcatatccacatttgacttattggcatttgatctattctgcggggacgcctgcggatatggtccattggccttagtcaaagcatatgttctgattgcagattcacgtggtctgtgataactctcctctgattaattcaccctgatggtgatttgcctcacgaagaggttcatcttgatgatgaaattcctagcaatgcacgcaat

SEQ ID NO: 95296 - DNA, 475 bp, Zea Mays
gaggtagaggcatagggccacgagcataagatttgctcgcgacagtagattccagcttcttatagtccttggtccgggaaccatcgacgatctcctcctgcaactgagcaagaacgtaggcagtatccaaatcttttggccattgaatcataacagtggatttaatatcaaaacgaaggccatctagaaatcgcatggtgtaatacagtgggtctgacatttcctggtaactattgagctgatcgaccaactgagcaaaacgttccacatattcccccaccgacccttgctgccggatatgaaataattgacgcactaggctagcatgctgatctttcccaaatctctcacggatcaagttcccaaactctagccaagacaaactagcaagcttatgctcaactgaatttaaccaacgtgcagccgccccagcgaagtgcatggttgcaactttaacccacacacaagggtgcac

SEQ ID NO: 95297 - DNA, 386 bp, Zea Mays
cggaacggtggttattcagcacatatgtgggatgggtctctcacaagaccacttgaaccatcacattcaccacacattatttcaatagtgcccataaatgttcgaacttcaagctcgtgactttcattttgcgattattggttcagcctcgattgcatttatcgatgacccgataagagagcttcaagcactcgtgcctaggactttgttttggatccgtttgcaatctagagaggcaagatagatgtcgacacatttttctcccacatttaataatgatctttgtcatttcccaaaaacgaaagattcattgttctgtattcctagcacaatgatattgcgcgcattgttaggaatttcatcatcaagatgaacctcttcgtgag

SEQ ID NO: 95298 - DNA, 346 bp, Zea Mays
ctggtttacaagcatccaacacggtaactaaggtttactacagaagacggctgtgtgggaagcaggaaggttctctaatttcagagcagctgcctacgctggagcttgttggtgcaccaacggctgttacatctccttgcttggtggatgcttctccctcccatgttccttcttcggaggtggttgagctcactgcgactgtggtagacactcaggtgactccagttgtggtggctcctgcgtccaaatgtgggggactctcgctgttgagcaggaggtgcttcattcacaccaaagacagaccttcctggcgtctgtttcccggcggccttccagagttctgcct

SEQ ID NO: 95299 - DNA, 433 bp, Zea Mays
tttgtcctcttagtattgacatgctcgtactcctagattcttcagtacttttgtttcaaacccttacatctgaatttctcctacctacttaaacactctagtttatatgtccatgaacttctggtcttccgagatccctccctgtgtatcctctacctttttctattcccatgtctaggtacgcttgtatcattggaatcttgcatacacttatttttatatatgctacctttatatcccaatgactgttcaagacatttaacatatccttgaccacccttgtttcttaatgatccatgggcggtcattctactttgcatatccttgttgatctcgttgtctccttgtaactccactcggtaatgaatctttacttcaacccttctgttggaaccttacctatcttacccttgattgttttctccactttgtc

SEQ ID NO: 95300 - DNA, 821 bp, Zea Mays
ctatgagggtgtagtgggccgactgtcttgcgatgcgttctgctgtagccttatcatccggtccctcctctttctttatgtacctgatgataggctctctccagtcattagggtccgattctggttggctcaaggtgttgcattcttctgtctgatctgagggaatacttgggcatgatacttcctggacgaagattttgggtgggacctaggcccgactggatctcagcttcgacaacgcgtctgctgctgcgttgcggtctctttccaagtgatggaattccaacccttcaaacttgtcttctaattttcggacggctgtacaatacttgtccatggaatcagtcgagcaatcacagtctttatttatctggcttatgaccactagtgaatctccatataccatcaacctcttaataccaagtgatacggtgatgtttaatccgtggatcagtgcctcatattctgctgcattatttgatgctgggaataatagctgaagtgcatacttgagttgttcacctccaggggaaatgaagaggatccctatgcctgcttcctacagttttaacaagccatagaaatacattcgccatacttcagtagcctctgggttgtctggaacctgatgctcagtccattctgatacgaagtcaactagtgcttgagtctttactgtcgtgcgaggccaaaactctatgtcatgagctcctagctcgcaggcccacttggttattcttccgatggcttctttgttgtgaagaatatctcctattggaaatctggtgactactatgactttgtggtcgtcaaagtagtga

SEQ ID NO: 95301 - DNA, 603 bp, Zea Mays
cagattgaaaggaaagatagtacttgtcgttgattcctcaggtgttgcttctttgctaatgcctaaaggacgaaccgcacattcacgtatcaagatacctttcgacatgaacgaaacagccatgtgtactattaagcgagggaccatgcttgctgaactcatacaggtatcctcattgattgtatgggacgaagtgccaatgacgcatcgacatttctttgaggccttagacagaaccatgcgcgatatcctctcggaggacgaacctgcgaacgttattatcccgtttggtggcaaagtcgttgtcttgggcggtgatttccatcagattctaccagttgttcgtaagggatcacgatatgcgattgttaatgcttgcattaccaactctaggctttggcgccatgtcagcttcttgagcctacatacgaacatgcgtcttgccaacccatgcctaccgtcgaaaaagcgtgctgctcttgctgaatttagcaaatgggttttatccattggagattgtactattcctgttgagaagatggacgacgaggccgagccttcgtggatcatgatccctcccgatctattgattcatgatgacgg

SEQ ID NO: 95302 - DNA, 946 bp, Zea Mays
ccaagtggaaggtggtcgcctacgccaagtcatacactaagagttcaaccatatgccacagccacccaagttcaaggcactagagttttataaagttactagtaatgacgacatgagcatcgtcgatcaccatggtgtggagccggacactggctcaaccacactatagctaggaagttaacaaaagacactaaataaaccactgcgggacatgatggagcataacaacaggctttggggtggtctaggcatggctacaatatcctaatgaagggaggaggagtcatccatggtgtcccttgaccgacgggaatgccaaatacaacaaactatgcgataacgcctgacctccatccacttcacctaacccttagagttttgtaatgaggtttttctcccaccttagcctataaaagtaagggaagtgaccagggttgaggacacaagcaatcacacgaacacaccgccagcacaaatcaaagcatataacacttgtaactaccgaacactcgcacaccaaagacttgggagcttgatctttctcttgtttgtttgtaaccccatactacaaactagtgcaaggcaacatgagcagcctaactatatgtagggacattccacccgaaccagtataaaaccatgtgtcctctttgcacaccattcgttctaaggcacgcacaacatgatatttactagctagtggtttcgaaacaacgatagttagcatgctacataggtttttttgtgtgtcataacaccttttcccccatcacacgataacatatggccatccatgtagttagttgggtcccaagcgtgagcatacattttggtatcctcgacttcatcgtctccatcgaggggcacttgcacgggtggagaccaccgctcagcctctttgtccccaccaacatcgactccatcactaaggtgtttagagagcaag

SEQ ID NO: 95303 - DNA, 586 bp, Zea Mays
cgcccctcgccgccggtgatctcgtgcccagatttgcgtcggccgccgcgattcgtgcccagcgcaagtggataactgagaggagtaaaagatcttagcgctcggattggctcggactaggtcactgttgagctcgccgtacccacttggtctgcggctggccagaatgatcttcatcagcattggccgcttactgatcgtgcaccacgtgcctgggagtgttaaacatgtcgcaatgaacccttgtagcaagcccgtccatcaccggtggccttgccacggtgaaggccacggtatcacctacaccagtgacttcccctctctccggttgccagcgcgccatcttaaaattagccgccaccgctttcggacactataaattgatggtaccactagctccgttgggttatcaagaagccagagcacccacccttgcctccgattagcaaccacaacgcccgaagttcttttttcccccaattcagttctccgcgccgcgtgagtgaactcgccatggccagccttctgcaggtccgttcaagcttccttaattggtgttctagcctccctcgtgtccccggtaact

SEQ ID NO: 95304 - DNA, 443 bp, Zea Mays
caccggcggtccggccgtgtcgcaacagctacaagcacggtgataagcttcccctgtgaccacatctgcttccccgcaagatcttttacctccccatggatatccactgcgtgcccggcacgaatcacggcgaccgacgcaaatccggacgcgtggatcaccgacggcgagggggactgaaccctgggatatttcagtgcatagtaccatcgcgaggtcattcagttggtctgacagaggatctttagaggcattattcttgaatttttgcatgacaacttgctaatcgatttgtagaaaacttgtagccctatatataaactacaattctgctgcagagatcatgctcagttgcttactccttggagcatgaatcaagcctaaagttcttcaaaattcactgacagtccatattcagtttatgtattatctgacatctaaac

SEQ ID NO: 95305 - DNA, 348 bp, Zea Mays
gacttagttggacagtcctttgattggcattgataacagccttattttgggctaaccaattcatgctcgaaataacatctacgtcttgcccttttataactatcatattggtggggaagtcatatcctgctagtttcacgggtacatggaagactacttccttagtaaaaatttgacccttctttgattcaacactaggtatgcaatcttctcaacaaaagatttgctcatgaaagtatgtgatgcaccaaaatcaaaaagaatgacggtgggatgattggcaatggaaaacgtacccatcatcacaggctctccttccggtgtagtagccgcttgagtatagtagac

SEQ ID NO: 95306 - DNA, 936 bp, Zea Mays
gcggaacctttcggtcgggtggatcgagaggaagctactcgagtggattccatgcttgacctaggactgatccgtcgtaagtgaccgaccacatttactatgcctagcaccaagccatagagggggagtcggtccaccgtctactcatgacctacgaacctctaggcctatgacccactcatgacctattaagcctagacctgagtgcactggccacctacaggacccgcaacacgacgagccacgccgagacccaggctacggcgacaaggggtcggcatggcacaaagacgacaatgaagttgctagagctcttcgccgcccacgctgcccaacataaatagagtgactagggaagcccagacgatcgaggcacatacagacaaacgtaactttatcaaagtagaacgccctgttttaccatggcacagtagatccttcctgaaggataggtaccgataacagacccccacctcggcttataaaaaggagaatgtcggctagaagatggacgaacagacatacacacacagacggtgagaccaaaagacccggaggctagagccaaggagcaaaccaccatgacatccaaggcttagcagagagcaccagtctcgtagtctttaggtatagccatgcataagatacttggagctcctccctctctcgttcgtttgtaacccctactacaagcattgagcaaaaaagtatcgaaagcgcgagccaccaaaaattggatgtagggacgttcttaccaaaccagtataaatcttgcacccacctagcataccatccagaccacagaatgcacacaaataaatttacttgtcggagatggttcgaaacaccgacagtttgctcaccaggttggggccttgcgcgttcacgacgctctcttccccaggatctggatgggagccagtgacaaaaacctag

SEQ ID NO: 95307 - DNA, 505 bp, Zea Mays
tctatgccaacacttaggacgagtactttggatacttattcagcattgctatctgttactgacttgtgtgctccacctctctctcgagcagaacatttactcctttgcaatcacagccacgctctaagtgttgtcacatcgaccactctttcccaccagcagtgctagtaagaacattataagagctgggcaagacgcttcataactagtgttccaccaccatccctaagagtagttgtagggtttatactatttgtttgttgcctttgattccgttttttactgacaatgaccggaccaaagacccaaacggacaaggacaagggtcataagcctactgatgatgagtgtctcccacctagaattgaaggagttgatgtgttcgatgactaaagctttcaacaagtaccaagactctgcggcgacatcttttgagtggattgatcgacgtgttttaggacttattacacatatggacgcattggaggctcgccctcatcacaag

SEQ ID NO: 95308 - DNA, 1581 bp, Zea Mays
gatctctctggcggtccacagaacatatgagtcttggtgacctgggggatatctatcccccacatgcgccctgtccatcactctacaacccgtggaccgaccaaatcactgtggcccgccccaaccccgggtggctcgacgtcgcggttgcttccgcctcaccatgcgctccttaccactccaccatttgatggtcctaggtgtcttggcgctatcggtgatgcccccatcaccgcttcttcctcacccgtcgcctcacacggctctgtcctggccgtgggctagggtgtgggaccagcggtgtcttgctaactcgtttagcacgatgaccttgaccccctgctgtgcccatcactgactgggtggtcgtctccgatacctcgttccataccactatggacattggtatccttcttccaccattgttggcaatggttctgttcttccagtcacctccatcaacgactcaaatctttttggtccttttcgtcttcgcaatgttcttgttgctcctgacaacattcggaaccttctatctattcgtcaattgactactgacatttcctgttctacggagtttgaccctttcggtttgttcatgaaggatcttgccacttggagtcttctcgcacggtgtgacagctttggcccctatacacccttcaccttcctgggtccactacatctttggcagcctcacatgttttgaccactacaacttcgtccactacttggcatcgttgtcttggccatccggatcctgatgttatgtccaagttgtctagtagttctgtcatctcttgtagttgaggcccccatgagtctatgccatgcctgtcagctgggttgtcatattaggctcgcttttcctcattcaggttgtgcgcccttttgatctcattcaccgtgatttatggatatctcttgttctgagtgtctcaggctataaatattaccttgtgattcttgatgatggctctcattacatgtggatttttctgttgcgcttgaagtccgatatgtccccccatgctttctcatttctttgcctgggtgtccactcagttcggtagcacctgccaagccattcagtgtgataactggacagactttgacaacttttctcgtgccatcttcctcaatcgtggcgtccatattcagatgtcatgcccctacacttctccctagaacagcaaggctgagcgcatgattcgcactaccaacaacatcatacgcttcctgctcttacaagtctcgattcatgttcggttctaggctaaggctctctacattgccaactacctgcttaatcgtctgcctattgaggcgatctgtgctctcacccctcactttgccttatttggctcacttctacctatgaacatcttcacgtcttcggatgtgcttgctatcccaaccttttcaccactgctcataagcttgcccacggttcgacaagttgtgtctttcttgggtactcccatgatcacaaagggtactagtatgtcgatctttccaccaaccaccttttaatctctcatgttgtcttagacgaggcttcctttcttttctctgcttccc

SEQ ID NO: 95309 - DNA, 467 bp, Zea Mays
gttcttcttagtactaacctcaagaccattatcacatgtgaatccaattgagcaaaagacaccaaaatttaggagcaaagagttagttaagtctttttcagctcaagaatcatgattctaagcacatcatgcacctcaagtgagaaaagcatccaaaaccctaacaccattcaaattggccatttaagcacaaaaagggaattagagaaaacacttgggaaaaatacaaaatattaatatggaccaattaacaaagttatagtgcattaaataaactacaaaatgtggtaagaaagattgatcatttggatttttcaaaattcccaaaacagcccatgaagtaaagcctctagggaaaattcagataattcagaacctgaatttcaacctcttcccaaagatcagttgtgttctctatttttcaaaactcaaatccacaaagtccaaatatcaaagtggcgccaaaa

SEQ ID NO: 95310 - DNA, 409 bp, Zea Mays
cgtagatatgccttattccaggcagtctgcacaaaactgttggtcacacacctaagcatactaggcaaaggatcgcctactttagcgagcggtacaaaaacataactcccgtcgagagggagtttaggcgtgaatgccttaggttgtataatagaacaccaaggcgaaaagaggcaaaggtagatgacaacaggaaacgtagagttatgaaagccgacaatttgaatcaggcctccatcgccagggaggacccaacgtatacccctgagtttgtacaccctatagcagatgcaacggaacctgatggatccaccgtctatgacttggttatccctgaatttgtcaaaacacctttgttcccaatttcaacacagactgaggatttcacttcacctgatatgtctatcat

SEQ ID NO: 95311 - DNA, 418 bp, Zea Mays
gtcgctgagaactgctagtcgtgattgcagatgtcgcacctcagcattagccaactttagggctgaatgagccacacttaaatccctcaaaaggatgtccttcgtccactccaagagggccagtgaagacatggagccatggtgccttctcgctctaggggaggcgtcatccaccctgaaaagcaagctagggattagctggcaaggggataagagcaaaccgtggaaaaagggtgggtcggtcgcaccgtcccctcgaacagtccccctttcggagccactctagtccataagcttaggaaagcaccagctagcgaggacttctgtggatgggggcgcttgatttctctctctctagatcacttttaaaggaggagggtacccggacgagcccgcatagagagaagagggaaaagac

SEQ ID NO: 95312 - DNA, 382 bp, Zea Mays
gttcaggtgtcgatttgtcggttaatcatagattaatcgagtgaattgaaaacagtgatgacaaggcataataaaaacaacaaatgtctaagtacgcaatcagacttaatcaagcaatctacctgtataccaaaggggttggttttttaagggtgccaattacttcaaacaaaattcagaactgtataaaacatgtatggagcacaatgtcatggccagcccttattagtcatttacattttgtattaactcaactctctgctgctaagacctctgtctgaacacaggtactgagcacattgcctgtgaaagcagtcatttagtcttctgacattcaccagaaacccagctctctgccactctgaactcagcctgtgttccc

SEQ ID NO: 95313 - DNA, 669 bp, Zea Mays
gggggacttgcagaatctatttgagggcgaagagttgaagatgatattgtttaatttccaggaggcgagtcttattctgaaggtggagccgatgtagcttttttgctgacctcgctctcgtgttgtgatagtgagtgaaaacgatgccctcccccgcttcgcaatagagagggagggcgacaatgtgatttgtattacttgtgcgatgtggccgatgggcccttcgttttatgtatgtaaactatgatggcatatcacgtgatgcgtttattgtaagattgtctcgatttgtaattgtgtctcgatttgtaatctcgcggacgatgtcgtgcgcttctggcgcgtgcccggctgcacccttaggcggctttttcttggacgtgtcttatagtaaagactttgcaccctgtggctgatgtcgtgcacttattgtgcatgcccggatgcacccttaggcggcttttgctcggacgtgtcttatggaaaagactttgcaccctgtgggtgatgtcgcgcacttattgtgcatgcccgactgcacccttaggcgacttttgctcggacatgtcgcacgcgagggcagcctaggctgccgcttgcggtgactgttttgttcgtcgaatgtcgaagaccgttgtcgcggtcttttttgacacccatgaccgtgat

SEQ ID NO: 95314 - DNA, 279 bp, Zea Mays
tacgtgggctcaataattttgttgggttgtgacacaaatgtagatttagccttggctcctgtgattgaggttggacataatgtggaacataaagagaacagtacaaagatgcactgaacacctccttcggctaggaaggttgagcatctgatgaaacaagctctttctgcttgttgattgtatggtggtatgttcttgtggtgtggcctttgtcctcaccacgaaacaaggagaatggcttccttgtaggtgtactgaatctgccatcgaaactttggc

SEQ ID NO: 95315 - DNA, 372 bp, Zea Mays
tcaccatggaatttagtatctcctatgaaccaactcaactatgacacaaatgtccctaatcatccttgccttcaccatctccttcacccccatgcaacacacagtcccataaacatacccttggtattatatggttaactcaagtaacagagcaccactgtcatccatctattgtgaacttcagtcgacaattcctcttcattaaagacgaactcctcatcacttacattcccatccttagaagggtctgccatggacaactagtgttctatctagcagcgaagtccctaattccatttatgaaaccatcattcttgagtcatcatcaagggtcaccacctccctagttgcatccatcttcaccgtcgtact

SEQ ID NO: 95316 - DNA, 375 bp, Zea Mays
tggtaaaggaaacagaagagaaagttcaacaaataattcataatttgaaggaagcctaagcccgacagaagagttacacagacaaacgctggatacccttgtacttctagttggagattatgtctacctgaaagtttcaacaatgaagggtgtatcacgtttcggggtaaaagggaagcttgcacccggtacattggtccttttcctgttcttgaacaatgtggaccagtagcataccgacttcagttaccccaaacattgtctgttgtgcaaaatgtgttccacgtgtatcaattgaagaagtgtcttcggattcctgatcgaaccattgaagtaacggatgttgccttagaaccagacttgacatattcagaa

SEQ ID NO: 95317 - DNA, 416 bp, Zea Mays
agcagaaatgcgcccgcgcgcgctcgaccatggcgactttgcacaaacgaccctggcgtcttgaataaacacagaagaaaccctcgcactatttcggggagtcactgacattttcagaaaggcccctgcgttcttattcttttacacgccgacaccctcgacggcggacggcgtcgtgcagagctccgacgagcacgcgcatcggacaaattgctcaaagactggcgcccttctttggccgaacccaaattcaagatctagtgagcgtttcccctccactaattccaagaatggctactcggtttgctttggccacggtgaccgcgggcatcggggaagaacacgggcgttcacggcaacccagggtggtctagctccattaggtgggtcgtagagcttgaggagggtctagggac

SEQ ID NO: 95318 - DNA, 699 bp, Zea Mays
gagcctgtaccggccagaacacacaacgactagcgctcaggtgtggctgacacctcattccacccctaacgaccataacccccaagcaattgcaaggttctagctcctaatcgctctgcccacggtgatagcgcaaactacggatgaaccgaggcattcatggtgatcctacgtgttctagctcaattggtcgggttgagaagcatcaatagcacacaagagtgcagaaacaagagcgaggagggcgtgatcggacctatggagagctggccacggcgagctcacacacggcggaattcttgactgatttgggggaaatctcaaattggggagctgtgggggacgattgaaggtgagggctggttcactgggtgcacaactacttagcgaagcaggctggggcaccaatttatagtatccaagggtggtggctcctaatttgggcatggcgtggtggcggccggagatgaagaaggtcactggtggctcagtcgcggcgttcatcggtgcagcggttctgagatggtaagcctaggcgtgccacagttactactgtgcagtaaagagccacggcgtggcatacttgaggttgctggagcttccacgacaacaccggcggttcgaccacatcgcttggttacagacgcggttgataagcttcaccccacgaccaaatccactcccccttcgatcttttca

SEQ ID NO: 95319 - DNA, 475 bp, Zea Mays
tgtatttggtaaaacaattctaattgctgctgacatggccgcacattgatcagtgaagattgtgctaggatgcttgcctgacatagctgctagaaatgtattaaatagctagataaatgattcaattgtttcattatataagagtgcagccccaaaaataattgtccgcttatggtggttagtcccaaggagcggagcaaagggcatttcaaacttatttgtttgaaatgtggtgtcaaatgacacggcgtcaccaaagcatgcgtaatccatgatagcttgaccatctgcccagaagaaattagctatccgaccatcttcttcatctaattgtatggcgtaaaaaaaagctggatcctctaattgtttattcttcaagtattctaatagtatctgtgaatcattggctggcaaatacttcttgcgctcacgtccaattagattattgcaatccattcgtgagaagggtacattt

SEQ ID NO: 95320 - DNA, 849 bp, Zea Mays
cgggggcaaggtaggcaactcttcgacatcatctggcgccacataaaaccaaaagtcccaccagttaccccatttattcttggcataaggaacaatctcaaccacttcagtcgaagccttcccagtcctccgcgtgaaagtgcaggacccaaactgagcaatcaaaccacatatcttccttttctgccagtgcagacaataatttttagcgaagacctcaacaaacagttctccaccatatgaggatactgcccatatatactttgccagtgcaaccatagcattcggcatcagttgatgaatttgaatttcaaacttccacaaaacctcaaatacgaagcgatgcgccgacaagcgaaggccggcagcgaaaagcgcctcgaacacaaccaactccccttctggctcagggacatcttcagccctggagcttgcccgactttgttcccaaaatagcctagatgttgcatctccagcacacggtctgagtaaatcctcgaggtaccaaattcaatcatatgcccgtgctacagttccaccatcgccgctagatcgctaatcatcttctccgacaacggcatggtcgaggatgcggtcgcaatagacaacggtgaggaagaagacggcatggtcacgtgccgccggcagtggcgagcagtttgcttgacgtgggctagatctccgacagagcgagagcgaaagagagcaagcaagaagagaagaaagctagggttttttccaatgtgcgtggagacaggtaaaaggttgcaacccacgcacagccttttataggccaggggtagcgcctagggaactcaacaatcccgcagtaaaacgtctcatcaacgg

SEQ ID NO: 95321 - DNA, 321 bp, Zea Mays
ctaaaatcagctaaaaaagctgctaaaatttatctcttgaaattgaaacagggcattaatctagttgtggtccttcgctgtagcaacaaacttttctgttgcagagtttgtttcagatttgtcgggttgcaggtttttcagttaggtttagattagatcaacaggtatgtaatccggttaggatttagttagttccccagattgtttgttgagccaattctgggtataaatacctatgtctcgttcttgaaagtaatgggttttttcccgatgaagcgaagtttagctttcttcaagttttgcctctgttttgttttctct

SEQ ID NO: 95322 - DNA, 636 bp, Zea Mays
ctccaccacagggagacttcgtcctgttcgcccaactccatttgaaggaagcgccaaataattgcattggagggttgttatcagtaagttctgaatccctaaacattctatttgattcattgattttatcgttgttctacattttagttcgacaactttcattgcaattacacatagttgcatccggttattcagattgaccatcatttgatatatgcatttcagttattgatctgcatatcatatttacacaaattgtatcataaatcagtgtcaccttatagtaactcaatcgtttcatatatcggaaaataaatcagtgtaaattcattgttaatttagcgtaagtcatttagggccagtacgcaagaaagaacccagatgtcgtatttggtaacctaatggtcatttgtggtttgtatgttgtcatggcttacgacattaatttgttgttgcatatgtgcagaattttttggtccaaaaggttgtatttatacgttttatatgtacatgtgttgtttgttttggcaggaaaatcatacatgaagaacgtagaccgacctccgtctaatccaaagtgcattataattcagtctactcaagagtgctttagtgtcgacataccccgtgttccgg

SEQ ID NO: 95323 - DNA, 367 bp, Zea Mays
tgatacttctgcaaatgacaacatattgtaagaagttaagggttaaaatataatttgtatgatttctggtcttctgctgctcaaaatatgttaccattcttggggcgagggagtagctataataacagttctatgaagggtgtccgagtcttatatcacctaccctaattatgatacctaaccttgatagagactagcttgggtctctgccgtaattattttataagtacttttaacatctactagtgttttctttttaattttatcatctatttcagttaaatatgtataatgtttcaatctccacttatgcggttaataggtgcaacgactaatatacaagcagatactaggtgcaagcgtgcaa

SEQ ID NO: 95324 - DNA, 309 bp, Zea Mays
actggccgtaggtcgcagccctgaccctaaaacttactctaaaaagaaaatacctcttacctcaagaaaagttttctcttccccgattttaacaagacccttctttacctattccagatggaagcctctctggccattaagtcatcctactgctcggaagtggaagggttcccacgcctcttgcgaagctgtgcgctccgcatgggaatccgtaagaagccggaatacgtctggacggaacatctcgagggcggaatgataagatgctctatggcagtctacctgggggagagccaaagctatcccaac

SEQ ID NO: 95325 - DNA, 422 bp, Zea Mays
gggaattgagccgatacttcacgaataggtttatatgggtaatattagtgaagtgtgcgcttggtttgattttaggcgaagaaaacagaatttgggcacttggctcggaaacgatcgctcgaaatagggaaatgtgtgaaattgaagcctggtatatcggattggtgtgaaatttggtgaatatgttactgaaggtgttgtgaaggtgcctgaaaagtttgggttcaatcagagcaattttgagtggtttgggcatttcgctgagcatgtgatgtgcagggaattagggtttcggggaaatgatcaattaaggctgtgaaaccctccctaaggagctaggaacctgtaggggatacaatggagcactagggcacacaaccatgcataggattcacaagatttacacaagaatttgaatcgag

SEQ ID NO: 95326 - DNA, 547 bp, Zea Mays
aagttgagttggatatggtctatggatatcacaagtcaagtgaaggatggacattgtcaagtaggactcaatgtacatgacttggagacaactagtcgaaccaagaacaagggaagatggtcttagagatactagagcaagggagaagatcaagagtactgaggtacctaaagccaaggtgaagaagaggttcatgcagaagtcaaggttgagaaaggttgtgggaattgaggatcataacatagggatgtgacttgaagccattgaggtaattcatatggtttatggttcaagtcataaggttcaagatcctagctcgagtagatcatggtcacaagaagtgcagaagcatcaaagttagaacttgtaagaacccaaaagagataagtatagtttgacttatagattgggtctttcctatgtttggaaatgtttttgttgaacattgtagggtgttggagctcatagatggcaaataagatcatgttatgttgacttgggattttggagtccaaccccgagctcaaataggccaaaaggagcaaaa

SEQ ID NO: 95327 - DNA, 491 bp, Zea Mays
ctttaccaagatggattgatatgtagtagcatacttcatgagaaaattgttctcatacatgagactatatgagattactaagataaagtgttagtctcaatataatcaagatatagaaataggctccccctaaagatatgcatcaagaaattgaatgaattggatagatgtactcacttttaaagacaaatggggagaagcattattcatcttgatcaagtcttacaaaatttgcaataaacaatttatgcctagtattctcacaatgaaaaagacttagaatgcttacaaccacactattgattgttttgaagatctcattatccaagtaggtgttgttgctcttgatatcttcctttttcatttgagtgccctccctttatagttaactctttttccttccaaacttattgaaaatactcaagagagatgttaatagcacaagggagtatatgatgaagaatgatttcttttagataaggaatataaac

SEQ ID NO: 95328 - DNA, 410 bp, Zea Mays
tatcggaaatgggttgaaatataaatatgttgtttggatgtgaactggatttgtaaatctagccaaaacagagggtctaggctctgaattgtgagaggcaacttctagttatagtccagtacttaggatttgagctttaattccaactctggattcattagacaaccaaacaacaaaattcaagaatcttggttccaattctcaattctagacttcaatatctacaaccaaatgggatgttaaagaattctataatgaaaccattagatttaggagaagtgttatttttcatttatttcatagtaatacctcattcctctagagtaaaaggtatgttaaggaattcattctcgctgaagccaatttaatggctaattggccaaaggtcagggttaagatgaatatttgtg

SEQ ID NO: 95329 - DNA, 997 bp, Zea Mays
cgatggaggtgaaagttcagctacatcataaaaaatgtttgttaattctgaagctaaaacgaattctgaagctaaacctcagtaaaggtacctataagccttgcacgctcggcagcttcttcagcttgtttagcttcttcttgagcgtcgtgagattctttttcattttttctaatcgcttcatcagctatctcacggtcgcccttcatccacacctcggagtaaaatctcccgcctagcgtaaaagcttcagccgaagggtctttaatgtcatctgctgagaaaacaaatcctggttgaactacagccttagcatgttcgcaaccagctttctctaagatcgacgtggccccccgtgcaccagcgaaggcgcaaaagtctcctcagtttaaaatttcgtcaaaggcttcgacttctccgctgatccactggacgactccatcagggccgccacggatgattttttgctcagaagaatatgccccaaccctagcaaagctgtccttcaatttcttggcgcattccaaggatatttcataacatttctcttttgaaacacgaagctcatcggagttcttttgtgctctagacctttcgacctcgtaaatttcatgcttcactacttcaacttcaaaattttcagcagctttagcaactttctttttcagctcctccacttcggcttgatgagcttcggcttgtgcagcaagactagtctcgctagatttcagcttctccactaaggaaagtaatatcctatctttctcaagagcttcatttctcaatgatataacttctgaacgaaggttcccaagagctattttgcagctctcatcctctgcatctttttgagcctttaaagccttactcagaatcaagccctgaaaaaacgacgaatgagcaagaaatgagggtaagaaaaaccatagaaatggttcactatagaatgacaaaccaaaacatacacaccttcaggctgttataagcaagactgtcc

SEQ ID NO: 95330 - DNA, 358 bp, Zea Mays
gttctggtttgcgatttatgcttgtataattcgatgttatcaactgcatatcaatcgggcttgcattgtttacgatcatatacacaagaaattatgattcatatggacacgacgtacaaccaatggtttatatcacgtacttggcgtagttcttgattaatgctttttgtaaactgtttacgacactttgcacagttctttatgcttaatatgaacacagcgtaaataaaatgtccaactgatcgtgcactgactagtggaccccacaatcccgcgctgctcccccgcgggccgactgagccaatatggtcaacgttcgagacccacccgaccacaatcaattaactcctctcgggac

SEQ ID NO: 95331 - DNA, 349 bp, Zea Mays
aaccaaactttaaccaacaatatcaatatgagatgtgctcaccagatgagatgtgcttgccgaaagtaacaacacagcaaaggagaggaaacggggaaaacgaataaagatcatttaaaccggtgcagtatattaaggctgcaaaggggtagcctgcctaccctggttctgccgttctacaatcttaaccgttcgatttgcctttatgcaatctaaaccgtgcgatggagcccctaccccatcgcgtctctcatccccgtcgatccctcctccccttcgtcccatctctcctcgcgccctctctgacctaaccgccatccatcgccacacgagcgtcgccagcctgagc

SEQ ID NO: 95332 - DNA, 658 bp, Zea Mays
attatacctagatttagatatacatcaaaataaaaaaaaacttttatatagtaggtaaaatcaaatctaatgaaacctagttttaatttaactttttctcgacagttcattgctcagcccgctctccatacaagtagtcgattccttcctgtagcggctagctactcgacctactcgtggctctatcgctccttcgatcatgactggatcggtagtgggtgaccagacccgtccgctaccagtgtcaccttgtcttctcgtcattcgttagttcatcgcgttatcgggatcccgtgtcaccttgtcttctcgtcactcgttagttcatcgcgttatcgggatcccacacgcagcgccactactttgcctcctcttccgcatcgaccggtggacaagctattggtgggatcctgcctttggcaccatggtgccaccaccatctgcctgcactatgtcaccagggtcccaccacgtcgtcgcaatgcaacaattgttgtcgcttgccactgcctacaaccgcttgccctcgctgcccctcgcatgttgctgcctcattatcgtcatctcaaggcagactcaccacaatgacgcgtcgatgtggccgcttcacccgcctttctgtagggtggccaaaatggttttctgatattcatatcat

SEQ ID NO: 95333 - DNA, 448 bp, Zea Mays
ttcaagaaccgcctgtgtgtaccaatgggagaggcacgagaagtcctgctcaatgaagcccacaactcagcttactccatccacccaggaaccaccaagatgtacctggacctcaaagccagatattggtggaaagggatgaagaaggaaatagcacagtatgtggcctggtgtgacacctgtcagcgaacgaaggccgaacatcagaaacctgtaggcctgctgcaacctctcccagtgcctgaatggaagtgggaagaaataggcatggatttcgtgaccggactgccccgaacgcagaaagggaatgattctatctgggtaataatcgatcgtctcaccaaggtggcccacttcgttccggtaaaaaccacttttggaggagccgcccttgcccgaatataccttaaggagatagtcaggctccatggcataccatggaagatag

SEQ ID NO: 95334 - DNA, 772 bp, Zea Mays
cttatgttttatgtaatgaagtttatcctttatcggtcaggagaaaaataatgagaccatggtttttgaggtgtcgcctactcgtaccctaggcgctgaggcgtaccctaattacgccatatcacttaggcatccaggcgtacctccagcaccacacgacgctgcaacacctcaaaaaccatgaatgagagagagtgacagtttgcaaacttgaaactgtaaaaaaagtacagacttaggacatgtttggatccattggcactaaacaatagatagcaaattgctgctaatttttagcaagaaaccatttggatccagctgctaataggtggttcctaatttttgaattattcaccattaaattattacatcagctgctaaatattgaccaatgcatcccataataaatggatcttcagtacgtgattaatatcaaggcttatctaaaggtaaagcaatcagatggctgaaactgctaccttgaaccagaacacaagcttggaatgttttgttcagatttgctttgactgtcgattatgaaagaaccctattattctgatcgactaacctataaatacttaagcacttcaaggaatttccaaatgactaatctcttaaattcacaagcaagttgatccatgctaagtcaataatcccaacgccaattgaataataaaccaacagtctagcaccacacataaacctatcaccacaaagtctggagcaagcgccttggaagcccccacatacaacctcacgtgtcgccagcgcc

SEQ ID NO: 95335 - DNA, 629 bp, Zea Mays
cttttctggtttccaaggatttctccttgacgggctctgaaggcccagcttcggtctcggtctggctctttgcagcttcggctttggatggttttgtctcaatttgtgtttttgacgcttcgacagttttcctcggagtggtgcttgaagactttattgtctccagcacatctagtacattgaccatcctttttctcttgggagtcgccgtgagatatttttgtgccttcgtcactgtcattcctgccgaagggcttataacttccaatatctttgttttctcggcctttatctcttcaatattattggccttcggcaacatagccggctcttcattcttctgtgtaagagcaggtcctttagcttcaataaccgaagaggcctcaccaccaaattcgggcactgtggccggttcaataaagcgcggtcggtgagtaaggaccttcacctttttcctctttggtgcgggctcgcttggagcagctgaagcatcacctttcccagaagttgcactttttctcttttgccctttcgacggtagcggtagtcaggatacataaatccgatggcgtgaaaaactctatttagcctcttctttttctggctcccgaaggccgcagataaagcat

SEQ ID NO: 95336 - DNA, 395 bp, Zea Mays
taaaggggtaagacctaacccaaattgagaaaaacctaaaggctttagggaaatagtcataaaatgtccccaaaaacaaagttgaatcacatttatacccctgggataccaaaaatccccatttgaaccctggaagaccctaagtctaaaacctaggggcttatgtgcaaaattgatgcacctttggactaaagtgtaaaaactactatgtttaaacatataaagtcacatggttcacatttaggatgatttgcaagccaaaccctgagttttggacttatttgcaaaagagccacatttgaactcttttgactaagtctgaatttcagtgtattatgctcatctttgtgaccttgtaacttttaaacaaaagagagtttgccctaggtcaccac

SEQ ID NO: 95337 - DNA, 642 bp, Zea Mays
ccttggaagtatattctggttgtgaatcttaatgtcagcttgaatttcacgactcatgttaatgcacaatgtcttcattttaagatatgcagcagatatagtcatagggtccgtaagaagactgtcgttattgcttgataagaattcatctgtctcgatcatatgcctcctgcaccttttcgcagcagcaatctgtaaaagagtctttatgttattgcctttaaaaaagaatcaaaggaaaacaatgactaatcgtcacttttgctagtttaaatgcaattatgctatagattttttctgttgacggtaattttgcaccataatacgtaaatgatacatcagtgtagtctgctaattggactagatatatccattctgacaaggatggatatgataaatttcaaacgaccatatgggaaattactgcattatgttgcagagttggaaaaccatactatatgctagtcgtaccacctcatcatggtgcagagttggaacaatcaacttcatctaatctaacattatgggaaattactgcattatgttaaaatgtttgcaatttgtataatgtagtttcataatgatccatcacatgttactgatcatagatgaagtcgttttagattgattgttcgaattctg

SEQ ID NO: 95338 - DNA, 480 bp, Zea Mays
gtttatgaaagaacttgcgtgggagcgctaacgatggtggtttatgaaagaaacttatgtgggagcgccccaaggtcccgaggcattttggggagagccgcgtgcaaagatcggggagttaggtgaagctacgttttttcgattcccgtggtagatcgacagacaccatttgttcacgggagctttggaactgcacctggagcttatccaattccactgcgcatgctatataataatctggcaggattttgtagctgaactggtgtctaaggctggaaaaaagctcgagtttcacgagccgagcctgtttttgagctcgccgaaggagtgagccaaaccgttcaagcttgcgagctgtgctaaattaattaatttataaacaacaatggacatgggataattctatggataataggatcgtttcttagcttttgatgatgaatttatgacatttcgtaatttatattactcataatactg

SEQ ID NO: 95339 - DNA, 573 bp, Zea Mays
aaaaaaagttaaaatgaatttaatatgaattaaacaagtttctaacatcaatttaatatcaaaaacctatttcctatattgatttattcccttttatttgctgactgtactggggacactatttcaggaaagcacagggtgcactttataaaaaccaggggcctataccgaattacttaacatggaaagggatggcgggttgtttttgtgaaagccgaggggctcattagcaaaaggggcgggccaaaggggtatctttgatttccagccgtccgatcacaatctgaccgaccagattagatcggccctgatatgtacgggcacgctatccctcggatcaaaatcctacggtcatgatttaacgtatcacagatctaatccgggccgagggatcagagatccacggctcagatcagtttcatccaaatgctaacgaacttctaatcatgtccgaccaatcagacatcgatggtcaacagcgcctcacgccttgatccaatctgtgatcgctgatcataccatggatggcccagaatgaatctggccgaagcggtactccccctctaatttcac

SEQ ID NO: 95340 - DNA, 310 bp, Zea Mays
accttccataacagtgattaatcctatgaaactccttttcggttttctggacagaggtttcgcaaaatgggaagagtaaaaccctaaaccatcagccgccatacccacaataggcatacaaggtttgttttgcttcggcaacacacatcgggccgtcatgtgggtttctttgtgacaaatatcacaccacagagaccggaagcaatcccgagcatgatgaccatcgactccacatttttgacagaaagggcgacgcgcaacttcaagctcttttttcatagtaacgggaggggttttgaggatacctgtg

SEQ ID NO: 95341 - DNA, 364 bp, Zea Mays
gcccggtgggttagaaccgtcattttcttgcctttcggcacagcagtggtggccgaagcggcagttattctctgttttccttgccttcgcaatgggtagcaataatcagggtatatgaagccaattgcatcaaacaccctgttcaatcttttcttgccctgacccccgaaggccgaggataaagcatcatcttcggctctgctatatgtcccaagtagctcatcactaatagccttaatacttttcagccaatcgccatttggcttgacaaactggtccctgaacctgaagttatactttaatcgaactaatccaccttcggcggacccgacagcagtatccttcggcatctcccagttatcta

SEQ ID NO: 95342 - DNA, 560 bp, Zea Mays
ttataaagagttgagatattagatgtattttgcaccggattattatatttcaatcacggtactttttaaaaccaatcatacccttttttcaacatttggtaattggaatgataatttaaaatatcatataattttattatagatagattcaagacaaaaacaatcaagaaaattattaaattttagtccttgtaatattaattttaaattttacataactctatcgtcggtttgttgaagcatgaagagaagtggagatattacatctctttttcagaaatatgcatccaagaagaaggcttcttctacatctattggggatgtttcagaggagaaaatttaagaacaagaagatgcaccagaacaagagcaagtggttgaagaaaatgttaatacaatgccatcttgtccacctccacttgcacctaaaggtattgtgacaccaacaccaacaccgacaccagcacctgtttatgatattagtcggattccgcatgatccaggggataggcaacccattgcaagttatcccgttaatgatcaagatgcaattcgaaaag

SEQ ID NO: 95343 - DNA, 725 bp, Zea Mays
gcgaggcaaatgagatcctggaccacgaaactagcatcaacttttggctttcgctgatgtaatatatcttaagaacttgcgaaagatgacattggaacttatctgtatattatatgcttgcgtttgaccttggcacatgcgacattgtcaatttttgtcatttgacgcagagggaggacttacttctcttcttggtaccctgccccccaggtctcaattggttgaggctagctaccaccaaaacaagagttaaaatttgatgccccgccccctgggaggattaggtgggtgaattccgtcacccgactagagttttctctccaacaaatatcaaccacaaagtttcaatatctttgaactctacaattttaatataaattttatcataatgtgaccttatatgaaagagttatgattttttattcaatacaagctagcattgctgtatgtggcttctatcaataatgatagtatcatttttatcattacatgttggggagcgaaaccttaggcctgggggttctctaacaaatcctaacatgaccttgtaagttttcataaatgaaggagttgtagtactagctctagtgcgtgcaaaggatcatcaaggggtgtgtgaagtggtcgatgttgaaggcaagatggaccctcggtgaaggttatgaaaccaggttggcggtcccaacacccaaaggtccacatagacctctaaagatgtcctcgaa

SEQ ID NO: 95344 - DNA, 499 bp, Zea Mays
aaagcaaactagaggactccgaggcgacctactggtatgaaagaatactcagcgacaaggctttcgacatctgcaaaactcaaccatccccatggactgaccaacttgagaatggtgaagcaaatgcacacacaaaaggaatatgtcagccagaataactccaatcgacattaaaaaaatcaatgggaataaactaatccacgtcggctataagcgagccaacaagagttaagttaatccccttcggccaagatgtcaaccgataggaattaaataactctcgttggcccttgaccctagccgacgagaattacgtaatccccatcaactgatggcctacccgacggggattcatgggttatgaggaccttgacctcctttctcccacacgggctcacgcaatcttcaaacactctatctctctccgtgccgccgcctccatgctctttaccctgtcgcgtcatcgcctccattcgctgctctcgccccaaggtcacgc

SEQ ID NO: 95345 - DNA, 372 bp, Zea Mays
taagccaatttgggacaaggtcgattaacgatcgagctttgcacatagggctgcaatttgagaagaaccatttctccttcttggaacacccgatcagatctcttcttatcagcttgaattttcattctgttttgggctgctgctagctgagtctttagaatttcagagcactgctgcctctctgttagtaagtcatgcactgttgtatccccttcatcagtcaacactggggctgccgcaaacaccgggtcatatccatataataccttgaagggggagcatccaatagaagtatgataggatgtattgtaccagaactctgctaatgggagccacttcttccacttagcaggacaatcatggatggcacat

SEQ ID NO: 95346 - DNA, 945 bp, Zea Mays
gcaagcgatggtttcgtccacaacaaagcagttcatacaggagcgaaaaggtgaaattatattacaaggtattcacaaataagtacaatattttgttcaaactgtcagttacaatcttttgccaaatgacgcaaagagatcctaagctttctacagatagttacaaaaggaagttctaagaatcttcagcccttcagaacaagccccggcttaatgaccttcggcgccaccatcctgtagagagaagaaggtatgaagaaatcaggaagtataataaaggaaaaccaaggtaaaaaagacaggtaaaaatttcatactgagttaagtagttttcgagcttcgtccccggccaattcacgcccgccttttgcccagatttgggtgataaatctgttccctatgcttcgagcttcagctggaatgtcaactagatcttatgtcgaaagattgaaatttggcttattaacaggcttggagtgagtgcaccgggccttcataaaagttgcagctgtgccgcgtgaagccatcagggcacaaaagtctccgtgcccggttataacttcatcaagggcttcaacttcatttttaatatgatcaaaggccccggggatgtcttcggctgaaggggtaatctcttcagaagcagctccaaccgagttgaatatccccttcagccgattaacgcatcgagtggcaaagttagcacacttgttccgaaggttctcaaaagcttcatgtaggtttgtatttctttcagtttcggccttgatctttgcttcgagctccttcgtctcatgattaaagcgacgtgtactttcgcccaaaattgttccagcttcatctagttcctcgctcaacttagtattttgagatcgtgcttctgcgagggaaccttcggctgtttgcaacaggatgtctttttcctttagagaaacttcaagttcc

SEQ ID NO: 95347 - DNA, 280 bp, Zea Mays
aatcttctctgtgtttgtttttgccattgattcaacaaatccagcaatataaggatccacagccttcttctcctcgaatagcttcgcctcttcagtcagcttcgtttccacaacaaccttcttttcctgggacatctttttaccagacagggtgaaaacgcgtcttttaaaccgaagctcagagaacttgaaaatctagcgggcgctagtgaacaggagctaaagattgagaaaatattgcaaatggcagaaatagtgtatcaaatgcagctggtgtgag

SEQ ID NO: 95348 - DNA, 542 bp, Zea Mays
aaggtaatgactgaacctttcccatttgcactgctaagtcctctaaggttggatctgactagccttttgcagtcaaaggaaattgcttcgactattgaggggaaaaatgaggggcaaaagaagcggtgtatgatgaatataatggaagctattgaacagaccctgccctcagcttcggcggacaaagctattatacccgttgatgctgaagataccgctgcagccgaagccgagaatctcgcaaccaccctgtcggaaatcgacagacttatttcggatgtggttgcggagaaagatgtagccatagtgccttctgataaggggaaaagaattgaagagaccacctcggaaaatacgaatttcgaccttcagcacctaggtggccaacagctttccgaagaggacatatcagaattaaaagaatttgccatatcctacggctaccaacctggatcaatgctcttcggcggtgttgatgaagaaattgtgggatgcattcgcgaccggtccggggctaatattataagaactttgtctaagag

SEQ ID NO: 95349 - DNA, 417 bp, Zea Mays
ggtcttagagtgcgaccctctcctgaagatattgaagtcttggttgcttctctttgtgatcttcccaatgatgagaggcaagttcattttgagatgccagtgagtccagatgatgcagaaataaatgttgtactcgatatgttggctggagaatcttctgactcggcccctgctgaaatagtggctgttgtggttatactagagactgtcaaaacggtggacacctgaaagcctgagggtacttgcccaaagcatcttcatcaagtcagtcgcccaactgcgcctgctgaggagaagaagaaaaagagacgacttcagcgactgtcatgcttagactaggatgttggaccttctgctcccgattgcgaagaagtaccaacagaggtatttactaaagttgaccccattggtggtgta

SEQ ID NO: 95350 - DNA, 306 bp, Zea Mays
ggggaagctcgacaaggtcgaggtgagtgactgccgctgcattttctaaagtctggtattgattgggttccttaaatttgctcgacaaggtttctatggatccagtgcctgacagagttcgtccccaattcactggttgatttgaaccaaaagagcttcactggtagctatatgaggattgtatcaccattctctagctcgtcaatgaatgggttttggaggatctcagtctcagttgtcaaggcgctagacacacataacgccactttggttcaagtcacgagcttggatggataactgcaggga

SEQ ID NO: 95351 - DNA, 403 bp, Zea Mays
cttcctcagtttgctcaagtttgtcaccaggtaacaaaacgagtcttccactatgttgatgatagttacaacggagccatgactgattacaactccttgacagcactctgacagagtaacactccttgcttgctcaagatcttgctagctccatttcccagcagcactcctcctctctcttttggcttataactacgccagcactagatctagagagaaatacataagagagggagaagagaaatgttgcacaatgagtctacacttttatgctgcaaagatgtgctgaagaaggtcgcgtagctgatccttttataacctaaaatggacccatagccaatggttcctccttccaaaaagatgctgaaaatgcgttgtctgtgaaagcaccagactgagtcca

SEQ ID NO: 95352 - DNA, 425 bp, Zea Mays
tgagttggcaacatcaactgtagctcgatggttcactttgagatgtgacaaaacacgcgatttatacaggttcgggccgcgagatgcgtaataccctacatcctattggcggtgggtagtattgctttgatatctagaggttacaatgacggctaaggtttggatgtttgatgagagagagggggggtgtataagatcagatcgtctcaagacctctcttaggagggatccctagctcgccttatataatccggtgtggcttgggttacaagtaggtttccctatatatctcctagtcggtttagatttcattagagtcctcatcttgtgtgccaagtacaccctagaccgaggatatgcttcatgaggagccaggggttatctatccccgacaagcccccgagcttcaagttgacttgagaaac

SEQ ID NO: 95353 - DNA, 302 bp, Zea Mays
gaagaagagcatgccggtcatttgcatgtagtgcttcaacgtctgtgagagcaacgtgtttatgccaagctgtctaaatgtgatttttggctaaaggaaatcaaattcttgggtcacactatctctcaagcaggcatagctgttgatccggataaggtgcaagaggtaatgaactggaagccgccaacaactgtccatcatattcgaagctttctatgattggtcggttattatcgaagattcattctggatttctctcgaattgcgaagcccatgactgaattgttgaagaaaggagccaa

SEQ ID NO: 95354 - DNA, 442 bp, Zea Mays
gccctaaccagtgcacgtagtctctcatgttcaatgctaaactaaggtcatccgctaacataaagatgcaaaactaaggtcgtgtgttctgagtggatatgtagtacagatacgcgatgtttgcaaagcaagaaaaaaatgtgtcgccaatgtggacacgcaacactcagtacaatggaatggcaaggttcctagcattgctccagctaacgaaatcgtagtacgacacgcaacactcagtacaatggaatggcaaggttcctagcattgctccagctaacgaaatcgtagtacgaagaggtacaagagacttagaggattactcattattactacttacttggtcaagcgatggtgctggaaaggggaatcttcgaacggtgcttaataggaatggcaacggatcggattcggatcggatgttgcaaatattcgcccacaa

SEQ ID NO: 95355 - DNA, 325 bp, Zea Mays
gtatcatttcaagccggctcaccaaatccacagcaggaattcttctattggtgacccgggtggagtcagctaggcctcggtacaggtaggccaggtatgccctatccttcaatggttgaatattcttgaagacaaagtcagcaaccacaggttctgcagtcagacccctctccttcaacaaaccaacttcagctagcagaactcctgcttcagccacatcctggtctgtgggggattcggtccagctcggagtgcgaacatccggctgtctccctgaccgtgggggagagaatttccatgattctcaacaataaaccactccaag

SEQ ID NO: 95356 - DNA, 298 bp, Zea Mays
tcaccctcaaacaaatttcgctgctccccctcacccacactcaccccaatcggcgaggacaataattctcgcttaccagtcccatccacgcgaagacgacccctctccacctcgcttcgataacacctaccacttcgcgacaattcgctcactctctgcttcgccaccgccctccgccgcctatacccagtactcacgcccgagagttcctcaaaaccctccgcgcgcggcgaaggctccgctgcagccacatccaacgctgcaaaataatccaagtcctcatctgaagactcctccg

SEQ ID NO: 95357 - DNA, 422 bp, Zea Mays
gatcatcaagtacataaaaaatgaggaggaaccagatgacaaaaatgcagcggaacgaattgcaaggcagtcagctcattatactctcattggggaaacactgtacagaaggggcgcatcaggagtcctcatgaaatgcattctctcagccaccggaaagcaactgctagaagaggttcatgctaggcaatgcgggatacacgcagcatccaggaccctggttgggaaggtcttcaggtcaggtttctactggccaacagcaaagagtgatgcagccgggttagtccagaggtgcgaagcctgccagtatttgtcaaaacagcaacatctaccagcgcatcaactgcaaaccatacccgtaacttggtcgttcgcatgctggggattggatatgattggacctttcaagaaggctcaaggag

SEQ ID NO: 95358 - DNA, 670 bp, Zea Mays
gtctagagggtgatactgccatgattagtagcttcaaggaccatatacaatccttcccacttacttctaagcttaccatgaccaaacaaacaaacacgagaattaaacagtagtaacttgtctcctagtttgaatgtcttgatcttgatatgcttattgtgccaccttctggtatgttccttgtagagcttggcattgtggtataccttctgtctccattcctccaattcagggggttaaatttgccttcaaactcctgctgattggagatccagattgttagcgtcagccgaggaaggggagaaggccgaggaagaaggagaagggaatttgctggatccgactgaagaaacgaagagatcgtagagattgggatagggctggcgacggacagcagccaagccaagtgttctgttgattaattttgtgataggttcttagttcttagggagcaatcctaaatactcacgacacctcaacccaataggctgttacatggcccactccagcccagtgacacgcatgttcaagcgccttagccgctttggtcacttgctatcttcctactgcagctgcttgtcctccattgcctcctttggctgctcccctgcttcctttggcatatcggtgctgacattcccccgctttttaggcgccgcttgtccccaag

SEQ ID NO: 95359 - DNA, 480 bp, Zea Mays
actcacaatgaaatccatgctgatgtcatcccatttccatgaagatattggtaggggttgcaaggcaccaactgattttaagtggcttgcctttatcctctgacaggtgtaacattccgagatacatattgagctatctccctcttcattctggtccaccaatataggggcttcagatcatggtacatcttggtgcttcctgggtgcatggagaatttggagagatgagcctcatccaagattttcttcttgaggtctctatttttaggaaccaccaatctgtcttcaaaccatagtatccccttgcggtcttggcgaaagcacttgtacttttccactttctggttaagattctcttcgatgacttgtactcccttgtcactgagttgggccataatgatctggtccaacaaggtgggttcaacggagatatgagacaaggtaccagaaggaatcacttcgatcctcatcttgttcaac

SEQ ID NO: 95360 - DNA, 807 bp, Zea Mays
cacatgacatacatgccacaatccaaaagcacctatggatctcctaacaaatggaaatagaggcaaaaataccaaaatgaaaagctagagagggtttgggtgacccttcctccttatttatagagagtatttttacattcccatcataccccaagatacatagagcttatccattcagccagaggtaaaatagaccaactctcattctgatgatctaactgccacactcccttcataaagttgctttgccatgacataaccaccatgatggctccacatgtcatcttcgattccctccagaaccgcactatcgggttttgatgccaacccaatgaaatcgtcgttgggtggttttgaggcttaaccaccaaacctctataggtagcatactccatacgtgtcgtcacatgtcatgttgatcctcaaccacgttactaacataatccacttgcatttccttgcacatactgatgtccccaagtgttatcactgtagctagtcaccagtcttctctagtccctcaatcaagactcggtgatcatccttcatcgcttccgatcaatcagcacaaccctgcatgaccttcaccgtcgaccatgcctctagactccacacctatgcatcataagccaaaagacatgttgcacgtacacacgccccagttagttcacacgactcaacccaagatgctactccattgcaatcactcgtcataatctcaaaccaaaagggaacatatcaaccttatgtttacaatctcccctttgatgagtgcattatcaataccacaacaggattccgaacgac

SEQ ID NO: 95361 - DNA, 619 bp, Zea Mays
ggagaagggagcaggacggtactaggaaggaggaatacttcgacaaggggaagaagataggtagaatagttatgttctttttagatgtcatctctagttcggatacagacaacatatatcacaattccatgggcctgcctattacaagactagagcacccaatctgggccagacacctacctgttgggctttagcttccttttcacccttggttcctgcagcgctccatctggaacagtcggtgacacaggtcccattgtcgcgtcggtcagaggcgacacatcgggtcattctacattaactccttcccacatcagcagtggaggcccctacatgcgttagcaaaatggggtggacaggaagcctggtcggaagatctgctcagcaaccaaggaggagctctccatcccccgacaccattaattgctccatgttctatgtatttattactatatttctgggcccacctgtcggggcttagcgttcatgtatgtgcccctccctttcgtactataaaaggaagggcacatgcaatatcgggggcgggttcatctaactttactaagggcttattctcattcactcatactcaagtaacgcaactctctcaagtggacgt

SEQ ID NO: 95362 - DNA, 750 bp, Zea Mays
ttacatcaaatgttaatacaatgggtaggcgatgatgtagaacaagtacatgctgatgtatcggcctgtatcgctatggccgatgcccctgtgctctggacttatgagaccgctacatgtctcacaggagtagattttctgattatcagttcataagtatagataagaagggtttcattcctgtaatgctagagccgatggagaatcggctaaatcctaaataaagtttaaatgatgagtacacacaaaattcatgagtccttggtcacggacagtttggcttctgaggccggatagtctggtctttcataaagcagttcggtctttaagatcgaacatctaccacagtgtaaagacagtatcacataagatctgtcccccgagaccggagagcccgccatcacacaaagatcatctgattcctctgtgggggatatgataaaggaattcagagatctcgataaactaggacaggggtttacatcggtcgatccttcggaggagatcgatataggagatggtaaaactctaaggccgacttttttaaacaagaccctagagaccgatcctagaaatgaaataatcagtcttttgaaagaatattcagattgctttgcttggaattacactgagatgccgggattaagtcgtgagatcgtagaacatcggttgcccattaaatccggtttcaaacctttcaagcaaaaagctagaacatttcgtccagaccttctcccacaaatcaaggac

SEQ ID NO: 95363 - DNA, 458 bp, Zea Mays
gggttatatatggccgccgccacaaccccattgtcatctgtgcccctgcctagtacaatacaaagagagcgaccgtgagggaggaagagaaatgccattgctgtaggattggtcctcatcgccattggtctaggacaaatagtccatggagatccgcatctggcgtaggacgtcttcgagagctcggccaagtgagaaatcaggcgagggtgtggtaattcgttgccagactccgaaccttgcggccaagtcgctacacggcgtgggcaagcctcctcggggtctaatcactggtatggtacccgcccctgtccttggtattcacttagctttgcgtagcactaacagggattatggatggggcactagaatcgtggatcattgcgcgacggcgagccaccaccgtgacttgcgactgggggaggaggagaacgcgggggccgtagatcaaagcatgg

SEQ ID NO: 95364 - DNA, 319 bp, Zea Mays
ctttggcatattatattttccaaatgttctttgcctcagatgccgtccaggactcgtggacaggatagtgcgggaacctcccatggaagggagactactcctaatctgccaccagtacccccaaccttggctgaggctatcgctgccttagtcaatgcaacagttgataacacctgtttccttcgcgaaatggcgggacagcaatatcagcagcaaggcgggcgagcttatccgcatggaccccgcgaaacttcatatttggatttctcggaaactcgtcccccactattcgtcaaggctgaagatccccttgaagcgg

SEQ ID NO: 95365 - DNA, 745 bp, Zea Mays
cctcgcggtgcttttgggtaggacggtgtcgttgattgtagctcgatggttcgtgccagaagcacgatcaagagagtcagacgattttctgcaggtttgtgccgctttgagaggcgtaacaacctacttcctagggtggctttgtatgtgtggtgtgtttacaggtggtgtttccgaatggagggctgctaatttagatgaaaatgatggggttccccctaggccttatatacacaaccgtggggcacttcctacgcacatgttgattacactctttcagcttatctcctagctaatagtgatcagactttgcttatcctgagggaaaaccgatggctccgttccaagctatcccagacgtttgaggacgttgggcgagggaaaagcgaacaacttccacgggatcatgtctaattcgcggacgatctggcgcgagcccattgccttcctgggtcggcccatttccactgtagtctttgtctagcccatgatgtgacgaccttgcggggcaactggtttgtggtcccacgcaagggttttcgccctctagtggacccgggggatatctgtccgcacaagcccccaaactttagttgattttgcaataatcaattcaaaggttcctggtctttgcttaagagttggtaatttgacttgatccattgtacctctattgggtgtagcccccgagctttgagtggatttagaagtaatccattcaaaggtcttcatgtttatgtttttg

SEQ ID NO: 95366 - DNA, 527 bp, Zea Mays
gttgtagcgtcaccaaggtgccagtgtcagattgcctggtcccgaggtcaaacggtgccaaaaccgtgccaaatgaatttggtttgagttcaaatttttccagggcgtgttcaaggaaatttggcactaatttgatatttggacttctaggttttgagttttgaaaaacaaagaacacatttgatcttgaaaaaggattctgaaatttagaattctgaattctgaatttccccataggaccttggtccaagggctgatttggggattttggaaaaaccaaatggccaaactttcttactatgatttgttggttatttggtgaactaaaactttgtaatttggtttttaccaaaatttgtattcttcccccaagatcttctcccaattaccctttatgcttaattggttcacttaggattaattagggtttgatatttttccttccttaagattcatgacaagattaaggagagtttgagaagactcattataaatctttgttctcatctttgaggtttatcccttca

SEQ ID NO: 95367 - DNA, 360 bp, Zea Mays
cccgaatggtggaagaccacaagacaggatgggagatttcctgaggctcaagcctcccacattcgctagatctagcaatcccctcgatgctgatgattggctgcgcacgattaaaaggaagctggaagccatcggatgcccggagaatcagcgtgttcaactggctgctcatcaacttttcggaatggccttagcctagtgggataccttcaacgatgccatcagagatgctacctgggcagagtttgaaactgctttccgagagcaccatgtgccccaagggatcgttcaactcaaggaagatgaatttcgggaactaactcaagacggaagatctgccagtgagtacgtgcataaatt

SEQ ID NO: 95368 - DNA, 472 bp, Zea Mays
gagtttgtgggtggaaatctcaggttgcctgacatcactctgtcggctttcctcccaagggtgtttgaggtgtgtgttaggtgtcctattaatgtcaccagctcctgccctatacctctcaggctctcttgtggccgaacagtattcagccctatgtccatgaggtggtatggcatgattataatgtgttgctggcggggcaccataatgttgctacgatgaatgtgggaactgtgtgtattgcgcagctctcggctttgcgtacgcatatccggacggtccagcataagaggccggatggtctgcaaccgggccaaatggtccgaaggtgtgtccggactgtccagccgtatatggtgctgcctgggtagtctcgtacccggaccgtccgcgcgtaaagggctggacggtttgcgatcgacccgaatggtccagggctgtatccagacgattcggtcatatatggcgcgac

SEQ ID NO: 95369 - DNA, 388 bp, Zea Mays
catgtgatagtatcagcagcatcgtgggcagtagtgtatgaatcccaccaatcagcagcaggacctatcagacgaccagaagcatatagaaccttctctcggtcagagcactgagcaatattcagcatcttctctacatacttcagccaatcatcagcgtccaatggatcatgagagttggcaaatgtcggtggcttgtggctcatgaactcccggtgcttatctcggggtggaactggtggtggaggtggaggcagtgttgcttgatgttgttgttgttgctattgcgcccttctctcctggcgtatctcctctcgctcttggcgcatctcctggcgtatattctcccgctcttggcgcatctcctggcgttcctaccgcatttgca

SEQ ID NO: 95370 - DNA, 573 bp, Zea Mays
tataaatctgtaaaaggtagaaataaaattgatgtcgttagacacgtccgaagtcgatgcgtgtacgtatgtgcatatatggcatagcttactctcatgtccccttttagaaaatgacgagtgactatctatttaggttggcattacgaccttctgcttttcacgtggaactaaaagtcatcactcccactcccaccatgcatgagtgaccctttaggatttttttataaattttacttttaagaaaatggcccaagcctattaatctccaataattctcgaccagatcttaaaggcaaaacataacttattctcttgacatccccaaatgttgtttatataccggttttatggtaaaggctattaagtttaacatttacctaaacttagcacacaaccacacaatggactctgccttaaactagcagttttgcaggaactagtttcactcaagaatttgactgatacttggcaccctttaggttacctcctcttttgtatagcttataagtcattcttttacgtctctttcatgagattcatagagaattccaacatctcataggccacgac

SEQ ID NO: 95371 - DNA, 594 bp, Zea Mays
ttttgatatcttcttttgttccttcacacttttggagtgaagttgtttccactgacgtgtatctcattaatagacaaccatcatctaaactttctggcaaatcaccaggtgaagttctttttggcacttctccacgatatgatcatcttcatgtgtttggatgtatatgttatgtcttgttaccacctcgtgagcggaccaaattgactgctcaatctgtagagtgtgtattccttggatacagtcctgaacacaaaggatatcgttgttatgatccatctactcgtcgtattcgaatttctagagatgtgagcttcaatgaaaatcgacccttctttcacaaccagtctactcactcctcaaattatcccacagaatctacttctttcatatgtcttccttccattcctgctgctgaaccatcaccttctacatccacatctgatgttctcattcccataacaccaccttccacctccacgtcatcctctacttactcttccaaaccacctatcatccaaacctacattcgtcgttcccggtctattcctgcggctggtcctgatactgatcatgtacctgattcttgtacta

SEQ ID NO: 95372 - DNA, 616 bp, Zea Mays
tcatcaataactcccgatgcattgatttctaaaatgcttggactgatgttccgaggtacaggaacgaacagactcggccatagtttggtcaccctcaccctccctcaactggtcactggataacagttaaaccaccgggccaccaggcaaggccaccatagaaatagcagcatttttagatctgatgtttccctcaccctctgcacatggatcgcaagaaggtgcagacaatgcacgggggctcactgggtgctcgctcgtccgagacacttcaacatcaacgatatgtattttggtaagttcatttagttcatgctctggagtagcctccttgagaaagaaattgaagggagacacatcaagaccctgcaacatcactacaccatcaggcggagtgagatcaatcaagtcctcttgaatcttagaactcctaagacgacgtacgtgagcagtccctactccttcatgctttttgccctccactacatcatccatgcagtcgaccggtatagacacgtcttccataatagctttcccgctgtcagtttgctcactacaagaggataccagccccacaaccaaaactttctgaagccttagcttctttggcccttcc

SEQ ID NO: 95373 - DNA, 611 bp, Zea Mays
gcgagaatcatgttagaaactagtgtgcggcgtgtaactgtgctcgggtggtaaacaataggtcagtaggtattgttggtgtcattggcaaatggggatgattcttattatgcgataaaatttggaaaggcaaagaacatgggtagtgtatcgatcaagttaatcgataggttccgtaaacacgcttgtgatgcttttatgtgcatgataagatcgatgccttgtcgtcgtagtcttaggaaattttctgaaatgtgttagtgctctactgttgggttgaatgaacttcagatgtattataatagttgtgtgtcgtgccggttatccaaaaatggtgaaaggtggtgtgtgatggtaattgggaaatagtcacgtcattagccaactcatgttaggtaggagttgattgtgttaagtgattgttatatatattatgtctcgaattgcaataataataggcaagccgacgtgtatgctgtctagcgggttgtgtcgttgctctagctagccgactcgttagatgactttagttaagcttgtagtcacggtgaattgcttgttgtggtctaaatgtgtatggttatggtcacgggtaaaaagtagtagtgctc

SEQ ID NO: 95374 - DNA, 616 bp, Zea Mays
cagtttctcaaaagttagtagaggtctgcccatcacatattattgaggcacatttttataatctgctttagttgggatctttacatttgcggccattgcctcagccttttatgcagactcctcgtgctcggccaaatcaacaatatgtgacgtgaggtcccgtgcaatccctttcaaaaatcgagttgtgccagcagtaatagctttactcttctttttctcgaatgtagatatcaattttggtatagggaatttagatttctttgattgtcgtgaatcccttgatggctgtggagaaggtagtggtgtcctaaatgttgatgcttgtggcggagacggtgggttagaaagaggatgaggagaagcatgcgaagattgaggaggtgatgatggatgtacaggtactaaagtttgaggaggcggagatggttggggatgagacgacgacggcgttggtggatcaaccaattcgacatccctttgaggccaaaggatgaaatttttgatggcttgtccaagtgtctcgattccttcgggcccagggatgtctagcatgtcgtcctcggatccttggacgaccgtcgtcacttctaccctgcaataatcatctggtatg

SEQ ID NO: 95375 - DNA, 608 bp, Zea Mays
gtcaggctctgacatagacgtgtggttcgaaatgacagcacatgagttggtatacgggctgtgacattagggatagtgtgaatgaccattctgggaaagacacgaacaagtgtgtgttgcctgtatggaagctaaccatggctaagaagtcaacctaatacatggtgtagaatacgacaaggcatagcatcatggcatgagggaatgtagtagcatgacagaggggacaacatcatcaagaggagtctatcggctcacatgaatcatggaagacgagtaataccacaaggctggccgcccccatccattccgtctaacccctaggttcatgtaacaggaccccattctcgttggtctataaaaggaaggggaggaccatgattgaaggcaatgggcaacaacttgtacaggtagccaacacctgttactgcaccgagcacctcactccacacgtactccacaacaaggcttgggcatcgacccctccattgaccaagtttgtaatccatccctgttaaagatatagtgcatggtgacacaagttacttgactagatgtatggactttcggcctaaaccagtattgtcgaggattagaccctcaaggtc

SEQ ID NO: 95376 - DNA, 613 bp, Zea Mays
gaccgcctcaacttgttccaccttgcttgggagcgcctccttctcattcaatgttatgagagtgatgggtttcggttcattgtagtggaggctcccattggtgatgttgtttatgtactttgcattcttgaacatcatttggtggctaacaaacttcccaacacctactcaggactcatttttgtatacatggggttctcgtgtactagggagacaaggataacatcaaaaacagtaaatgaccttaacataagtcttacaacttcatggtcggtccatcttgtgctcctatagttgcgaacttagttcaccagtgtcttgcgcctattgtacatttcttgtggtcctgcacccctcttcatcacaaacctcccaagtttaccctcgatgacctccatcttagtgattttggtcattaggttcccttcatgctcaattctcaacgtgtcccaaatttccttggcattttgtagtccattgaccatgttatattcttccctgcataaggatgctaacaagacagatgtagcttgggtatttttatgaattaattcctctacttcttcctcattgtaatttgcatcatctacactaggaatattcatgccatttt

SEQ ID NO: 95377 - DNA, 454 bp, Zea Mays
ctttctccttcgtttttttctgtttttttttgacgtaaccgaaggagaaaaacaaggaagcggcgttgactcggtttgatgtaaccgaaggagagaaacaaggaagatggttgcggcgcgctagggtttgatgtaaccgaaggagaaaaataaggaagatggttgcggcgcgttagggtttgatgtaaccgaaggagaaaaacaaggaaacaatgttgactcggtttgtggcgtgatcaaacgggagatgtggcggtgctagggtttgaatggtggaagaacacaatgcaaccagcaacaaatgacgaaaaagcacacaaattcaacaatgcagattattgaaagaaagtgcgaggctcaaaagggtgctgggataaggtctaacctgaatttttatgtggttttgtggactgtaggaaaaaaacactcgataaactcaccgatcaacctggaa

SEQ ID NO: 95378 - DNA, 357 bp, Zea Mays
gcttgttattgttttgtaggccaaaatacttattcaattgggctaaaatatttatggtagactccagtaagttctaggtagatattgtaattttctcagaatttttggagtccagtaagtgcctgttgctattctagcttgagtttaaaattgaattagttaggggttgttaatgcatgttactttctaagatgctttggtgtgcctttgaagcatgataccttgctggtgtaattgatgggtacatgttcttggatgatgttgactactttgcataagagctttgcacctactctgtgaaatgagagataaaagatgttcacccatatacatgcattcatgatcgtcatgcactcc

SEQ ID NO: 95379 - DNA, 678 bp, Zea Mays
atagtagcttcctcaccaggtgtaactcgaatttcacccctgctcacacagctcctggaaccgggccaagctacaagaacaaactaaaggcatgattcatatgaacagatgataaaataacatgtctgtctgtccaagcgagaaattaagattcagtttcaagcaaacatgagttataatctaccacaattttgttagctaccatgtctgcctggcagttgatatgccaaaaattctaattcagtctttaggttgacaatgccattgagttgatatgctagaatttccagttcaatcatttaagttgacaatgccatggagttgaggcaaatgcaggaacaagaaaatgattttactgaagtaccagacaacatacaaaacccatggtcatacgactgaccttctaagaagaggcttggggttgtaagggaacaaatccttcttttgcagatcttccaacgttctctttaataaataaagacattttttagcatcgaggaaaagcttccgtgaatcctcgacttctttatcacaaccagaaccattcttatactggttacttgaactggctctattgctatctttatccccagaaatcctctgccttttacagttaagcttttctatttttgttgagtaaactgaatcatcaacaaaagcatgccaagactgggaaac

SEQ ID NO: 95380 - DNA, 696 bp, Zea Mays
gactagatctcttgtgccgatatgctcggctaccacccgaaattctgtcacagcttgttggcatggcgaccccagctccatatggcacagcggcctagtcagcccgaagcttaagcttagagggctcagtactaaagtcttgagcttctctctcttcttctcatcagccttcacgtaaaaccactcattcttccaaccagttggccacttggtgcgatagctaactactggagtcttcgtatctttgcggtaggcgaaattgtaatcaccaaagttctcatgaagaccgtcttctctggctttcgtctgataatgaagctcgtgcactcggtagaaggcttcgacattcgagtctgttcctttggcttcggagagcccagatgaagacgctgagcctaacaatagcgttaggaatcagccgatgaagataaatctcatagttttccaaaacttctccaatcatttcgtgcaaaggaaacctcaatccagctctaaagaagctcctgaaaactaccacctcatctttttccggtgtcggagtggtttcttctctgccaaaacgaatcagcttcttctcagcctctctgaaatggtacatcagcttcagaaatggtagattttccaaagtccaagtgactgggtttggttggcatgagagtaccataatcttcttcttcttcatcaacaacatcctcc

SEQ ID NO: 95381 - DNA, 322 bp, Zea Mays
cttggagagggaacgacgaggcagaggagatggaatcggacattactcttgaatctcatcggaagcattgctgaactctaccacaaatgggttcctacgatgcaccatcttgaactagagttccgttgaagagatatgcaccgagtttttaatgagtgaggagtaagaaaatttcgggctctaatggctgaagaagtggctcaaggcttggaagagtgaagatgagagaagagagggggccttaaatagaggtttgaacaaggtggcccaaaactggttcaaccggtatggggggcggttcaaccgctcctgggcataaaat

SEQ ID NO: 95382 - DNA, 667 bp, Zea Mays
attttgcaaaaattcagactttagtaatcttgggaaacagcaaatccaatatcgtttgggttgagccatcgacgtcttgcccaaactctaatccttggaatcagatctggttccttaaacttcgtttgaaattctttcacgcttgtgttgcacgtgtctctctgtggcctgatgatgtgacgcgtgtggcaggtgctaaccgatgtctggacagcgcacaacctcttgccacatgaacgcgttgcttccgaaagtatcacaattgcgatgccgcatcgatctcgtgtatttatttcgcaaaatgtcgagtcttgtgtccgtttaaaatttatcgattaagcgaatacgagtttggaacctcgacccactcttgtgatttttgactcgagtaaactttattagaagctcgacgacaagagtgttgatgcgagattaaatttgaccgagataattagagtcgatattgagtattcataattaattcgtttccctgttcagactgcggataaaattattgggtttcaaatcaaatcaaattaagcacatacttaatatattgactcggatgtcatttggtttggtctgtgcgtttctcgtccagatctaaatattcgaaaataaataatgggtaaaaattcatctgactccagagtattcaccaaataaa

SEQ ID NO: 95383 - DNA, 513 bp, Zea Mays
aattctttgttcactttttttcttggcgtcttatctcttcccttctctgcctcgcttcgcttcctacccacgccacgcgtgtgttcttggcagccacccaatccccgcctcgcgaaatcagacgccaaatccccttatcttatcatcaaatcgatcgccaacgggcatgatctgatggctccctcatcatagcctctgctgctgcaccgcagcaaaatggccctggtttagtttagtcctcaagatcccgcctttctggtgctctgtttggctagtgtcgtgccgccgcgcgaggacccggagattcgattccggtccggtgtatctctaggctgcttggtttgggttaggatttagtgggcagggttgtgcagctggtgtctcgtggaggaagaatttcgtgggaggattttgaccgggtttgggcaaagagcgcgccgttcgggaggaggtgattctcgcgtggttgcgtgctttgctgggagtctgctgcggccaccgccggtatggcga

SEQ ID NO: 95384 - DNA, 387 bp, Zea Mays
ctctggagtccactgaattttgtccaccttcttgagcagtttatagaatgcatccccctctcaccgagtcttaagatgaagcgactcagtgctgccatgcaccctgtgagcttttgtacttttttctgtgatcgtgttggctccatccttagaatggattcaatcttctctgagttggcctcgattccttgatggctaatgatgaatccgagtagcttcctggctggtaccccgaatacacacttctctaggttaagcttccagcggtagcacctcaagctattcaagacttgctggaggtcttcgatgaagtcacctgggtttactgttttgattaccacatcatcgacataagctttcacgcgcttgccccagtggtcagctaag

SEQ ID NO: 95385 - DNA, 832 bp, Zea Mays
tttcaatgcaaaaacaaaggctccagcatttccagtatcagcaacagttagaatcaaatattataggaagcacaattttgttcgattttttttcataataggtcagaaattcccaataagtagtaacgtgtatgctgtgtgatacgtatccaccctgttgctagtaatgtgctggaaaacatatgaggatcaccatcaaaacatccaactcttgcacaattaatacaggagctttgccattgcttgtgttaagatcaactacaactacccccttgaagcatatgaaatatcaatggaccataagctacacgtgtttggactaagaagttgagctcagccatcatcaacattaacagccagatcgatcggcaaaggtggcattatatatctccccaaaccccccgatcatctattctgatgaccattggattaagcttcgcaacacaaatataaagcaacaggaacatataaatcttttttgaagtgtcatgaaggaaatcactcctgttgtcgacttatgcttaggcaatgtacaaggcttactgactacaaccacatcatagagaatgagacagagcaaattcgaacaaagaattcattcactgaaacaacattcaagagtaaacgtgcatcataagatgatttgagtaaaacctctctggctcgtttggtggagaagcgaacaatttgtgctagagccagcgccttcttggcagtcatctttaacccgccatagatcttctcttacgaagggaaggcgaaatggacaatctccttggcgtccaacctactcctccacgattggtggatagcctgggcacataggactttg

SEQ ID NO: 95386 - DNA, 344 bp, Zea Mays
gtgtgaagataattgcatgttgttctggaaggaatatgaagcggccacccattgtcagaaatgcggtaaatcaagatatgcggaggtactaaaagaggatggagctacttttgctacaaaagtggcagttaaacagcttcgatatatgcccatcactccaaggcttaaaacgtttgtttttaaccccagaaactgcaaagctaatgttgtggcataaggaaggagaccgtgatagccaagacccagacattatgatgcatccatcagatggcgatgcttggaaggctctgttttgacccagaatttgcaagagacgctaggagtgttcgtctaggcttgtccac

SEQ ID NO: 95387 - DNA, 677 bp, Zea Mays
aaataccacattttcaccgatcacaagagtctgaagtatatattcactcaaccggatctcaacctccattagcgaagatggttagagctgatcaaggattatgacctagaaattcattatcaccccaggaaggccaacgtggtagcagacgccctcagtcgaaaaccattcggaataaagggaaccaactttttagaggattggaagaaagaatcagctcaactaaatacatgtctgggaaacagcgatagtctcgaagtcaaaccaatgctggaagacctcatatgcaaggctcaacgtctagactcagagacagcaagacttgtggagaaagcccgcaaggaacaactcccggacctcaggacaaatgaccaaggaatcctttggttcaaaaatcgtctgtgtgtaccaaaaggggaggcccgagaagtcctgctcaaggaagctcacaactcggcctactccatccacccaggaactatcaagatgtacctatacctcaactccagatactggtggagagggatgaagaaagaaatagctcagtatgtggcccgatgtgacatctgccaacgaacgaaggccggacaccaaaaacctgcaggcctattgcaacccctcccgatacccgaatggaagtgggaagaaataggcatggactttgtaaccggactgcc

SEQ ID NO: 95388 - DNA, 276 bp, Zea Mays
cccaatttggctaaacacacgattaaggtgtacgtggcctctacggagctctacacccttttcaatttcttgcttagtcaccggaccaacaagatccttcgcttccttctccgtctccacaaaaaatatcccaagagtggttacctaggtccacaacgaaggcaagactcaaaatctgtctgtcaaaaccagtgacgtctttacgaataataggattcaaagtctagccttgaccaagcggccaaatcccatatgccaagtactctttaatcaaat

SEQ ID NO: 95389 - DNA, 442 bp, Zea Mays
gcaagagcgcaaaagtgactatgactcagctacctccgtgctggacggcgggtttattccaaagaatcctaggggctctttagcaaaagtgttcgactaaagcggtatcatgcgatcagggccgctcgatccaaaggcaacggttccgatcttatcacatcttcgaaggtatcgatccgaaacctcgatcttcggataccggatcaacgacccagaggtagccacacccggaaactacccctgaccagacgatcaaagatctatgatcctatcgtttaagcggggagaactacactagtatgaatccctgccgttcactatggatctaatagcccgcgactatgacccatcctggccatcggatggacgatccacgatccgagttcaatggacgaaagattaagaggccgatttaatcctaaccgttgttcgccgatctaat

SEQ ID NO: 95390 - DNA, 825 bp, Zea Mays
taacttattcctcaaaccaaacaccctattacttttgctgtagcctctggatccaaacaagcccttattaagatacatgaataataaaataaatacagactctggcagcctagtacatacttaggaaagctccgtacatattgcgtatgtgttgttcgatggtgtctgcaaagccatttgcgtcgcggagagcaaatgctactgctgcgctccacgagcactagcgcactagcacatactgtatgtattcttgtttttaatcacaaggtcattactgaattggcttggctttgggctgggcaagttgctagctgctagtgctaggttcagcacttgagccagcactccagcaggctgcacggcaagaagccaacaccaagacggaccgcaccctgcagtgcatgttggaataagtctcgtggtttgtgggaaggacaacatcagtctttttggtctttgctacaggacagcagccctgcaatctctttggtctttgctacaggacagcagtcctgcagtctgttggtccttgctataggacagcagtcctttggtctttgttgcagttggtccttactacaggacaacagtcctttggtctttgctgcagtatggacaacagcagtccttgctgcagtgtggtgtggacggcagttagcatctgcttttgtaaaggtgtaggacgctgcagcgtggacaacaacagtccttgctgcagtgtgttgtgtacaacagttagcatctgcttttgtaaaggtgtaggacaacatctagtgtagccatagtgtaggacagcacctcagaagcatatgctcggcacttcgg

SEQ ID NO: 95391 - DNA, 548 bp, Zea Mays
ctgatggccactccgcgtaggcggagcgggtagagaaggaatagtgcccccacgccatgtgcaggtacacagcaaggcaccccatgtcagcaccgagagccatgcaacgtggcagcccatgttgcacgatgtgatcttaagtccccgctgtagcagcactgtgctaccaactttgtactagggcttgctctcccctccttggactataaaatggggcagagtagagcacataaggcattcgaccccaacttttagccaacacattgaacactcctgagctcatccaagcttccaggacttagtttctagcatgatctagcactccactctcggcgtgcatccacctttctactcttacagaaatacaccatagaggacgtagggtattacaccatcaaggtgacctgaacctctctaaaccttctgtgtcctgcgtgagccatcagactcagcagtagcgtccatgccctatgctcccttctactctgcaggcacttacacggtacctaggtgttgccacgcgacaacacaagcagacaagatttcaa

SEQ ID NO: 95392 - DNA, 581 bp, Zea Mays
aaacaaacaacacggcgaaaacagtgcgtgcagcccaaaacagcaattaataaatttcagctcctatttacttcaagaattgccatgttctagagacttgaattattctaacactttaccatttgttagagttaaaacaatcaaatgaggaccaacaagtcgacttactaatttttatccaagtcattttgtattactagcttaatcatactacgcatataagtctattacaccttcttcgcccgaatgacaatcctcaagctcaatatttatcacacatatataatgtacttagatcacaatctcagcaccactaaatcatatgatgcgtctatttcatttttcatatacatccaattagcatatgcgatgggtatcacggcgaaggcataacacatctagacctgactcataaccagggggtgactacttggtcacgtcaccacttcactacccaagccgaaacaatttcctagacacatcaaccaaacttctaattgagtaaaacctacacctctttgtcacgaatacaaccatattgcggcatgaactcgagacacttgatccatgtagcgcaacca

SEQ ID NO: 95393 - DNA, 411 bp, Zea Mays
aaaatctcgaagaatccaggtggtacacccaatgtgtgtgcccaatgagtgtcttcccagtaaaagacgtctatcgcgttggcctgaaatagtaacttgatatgacggagaggtataatactctgcctgagcggttgacttgattccatccggtgtcgtgttacgcgaagcggcgccagacgcctgactcatttccaggcggtttgaattgctattgaagtcttgtgattgttcggtgagcgtgtaggaaatggacggtcgcctcccggcctctttaaatagcccggctgctttctccactcgttcttgttcactcgtcttctcctttttcttcacttcccctccctctgcatggaccatggccggcggcaagaaaggtcatcatcatactgacgagaagcggaagcgcct

SEQ ID NO: 95394 - DNA, 448 bp, Zea Mays
cgaaactttgggtttactttttcgcttattcagcacaacgaagcctagaattgtagggcgctcaatttcaataaagattgatggattatgttattggggtttccctttgattactggacgcaagaacatattcagaatgccattggatcctttggtagagttataatgtgggacgctgacagagaaaatctcacaaggcttttagtaagagcctgtgtcacttccctggaagaaatccaacaatttattgttttcagtgttgtagaaggcttttaaggtgtttcctggacagttcaatgcaaaaatcatttagcagaatatgttaggtggaatgcgtgaagatgaagaagaagttctgtcataccctcaaaaggtcatcaactaccagttgaatacatgggtctgggtcaacctgttgctcgtgttgggtttgatctcaacatcccgc

SEQ ID NO: 95395 - DNA, 745 bp, Zea Mays
gagcatgttgcatcgtcttaagtcactgccgacttaagctgattgctccattagtagggtatagtggtcaccctaagtcgagtaagcaagcagattgataataagtagttcgagtgcctttgagaatgaagtctttttattgatgacgtattttctgattacagaatacaatgctgccccgatagcttttgaaatctagctaagggtaaaacttcctgagatgctctatattccatgaattccctatttccgtgccatccatttgagtaagtcgatatgatcctggccgagtgacttctgctaccatgaatggcccttcccatagtggcgacaatttgtgccatccttcccccgttagaattcggcgaaggaccaagtctcccactgcgaaggatcgatgccgtatggccttatcatgatatcgcctcagggtttgctggtacctagctgactgaattactgtattcaatcgttcttcttccaatatatcaatatcctccagtatggtagcttctgcctcagctatgttttcgaagatcagccttggtgccccaaacctaagatcggcaggtagcactgcctcagaaccatagaccatgaataagggagtgtttccatgcaaagctcggctaggttgagttcttaggctctaaaccacatacggcaactctttgatccactttcctgcgaacttttcattcttgtcgaagactttcttcctgagtgcttccaatatcattccatt

SEQ ID NO: 95396 - DNA, 478 bp, Zea Mays
ctgggaaggatgtgaagcaattggtgatccagagatgacacaggctttgagggcctgtgagaggaagaggatgaagaacattatgacattccaatacgattggaatgatgaagttattgcttagttctattctaccctttggatcaagctggctgatgagaaaagtccttataactttccttatctcaatttctatattgaaggcagctggtataaggtgagctaccggaggtttgctcacatccttggattttctgatggagatattttaggcgacaagattaagattcatgactttcgtcctcccaccaaggatgaagccagggatcttcatatctctaagactgataaattttgggagtctaccaatctgcacaagttctacaaatacataaattctctttgcagaatgactctcattccaaaaggaggtaatcaaatgaatatcctgggagagagcaaggtcttgctctcattt

SEQ ID NO: 95397 - DNA, 302 bp, Zea Mays
gctgaagtgcgttgaaaatactagtgatgaattacttggagcatattccaagtccgaagataatgcactatctgcggccttcgggagccgaaagaagaaaagattaaatagggtttttgatggtattggatttgtgtaccctgactaccgctacccgccacggggcagaagagaaaaggcgcgacctctggaaaggttgccgctttggctgctccgagcgagcatgcgccgaagagtaaacagttgaaagtcctcacccaccggccccgctatattgaaccggccacagtgcccgagtttag

SEQ ID NO: 95398 - DNA, 602 bp, Zea Mays
ctccactgaaccttacagagtcttacttctgagttgcgggtctttcggactgctgagtcaagaatctttattggcttctcccggtactggagatctttttgaatctgaattgtctttgcctcgatgtggttctctggtacttgcaggcacttacggagctgggacacatgaaacacattgtgaatatccgacatggattctggtagttcaaggcggtatgctgcgggtcccactctgttaggggccgacgaaacgtggtgctagctttcctttcatttggaaccttttgaccccacgcatcggggagaccttgaggtatacgaagtctccttcctcaaatctaagttctcttcgtctgttgtctgcataacttttctagcgactctgagcttcaagtaacctcttgcggatcagggcaaccttctcttcggcctctttaataaagtcgggtccttccagtgtcctttcccctacattggaccacattaggggggtctggcactttcgtccatacaatgcttcgaacggtgacatcttgatactggcctgatggctgttgttatatgagaattcggcatacggcaaactggactcccaatttc

SEQ ID NO: 95399 - DNA, 305 bp, Zea Mays
aaaagttcttctggcaaaacattgtctgccaattcggagtcccgtccgaactcacagtcgacaacggcaaacagtttgacagccaggacttcagggatttctgttcctctatcggcaccaagcctgtcttcgcctcggtctaccacccgcaatccaacggcgtcatcgagcgcgccaacgacaaaatcttcactgccattaagaaacgactcctcgatgacaagaagggcaaatgggccgaccaactacctgaagtggtctgggccctaaacacgacaaaatgtcgggcaaccgtattcacacct

SEQ ID NO: 95400 - DNA, 363 bp, Zea Mays
gagaagtcggtggagaagggagtgagacccacctcctcgcacctccggaggtgccattagacttagcccaagttctggccaaccaaacccgactcattgaggtcctcaccagaagccttgagaaccagcgcctgaatggtggaaggcctcaggacaggatggcagatttctaaggctcaagcctcccacattcattggatccagcaatccgctcgacgatgatgactggctgcgcacaataaaaaggaagttagaagccatcggatgccctgagaaccagcatgttcatctggctgctcatcaactttctgggatggccctatcctggtgggataccttcagcgttgccgtcagagatgctac

SEQ ID NO: 95401 - DNA, 460 bp, Zea Mays
gatcaaacccacccgagatcgaatcggtacgcactaattcacccttggatctgggatctgcggtcagggtttaatggaggtaagtttcaatcacagcccctggttcagatcgtacggtgcagatttgctgacccgaaacgtttcctacttctaatctgagccatcgatcattcgatcgacgagccgcgatcagctccccaatcccaggctgtcccgacggcggcgccacataggggcgtggcggcgccacataggggcgtggcggcgccatcgccggccatccggagccctcggttctagcgccctaaacacgattctgttgggtgctacgcattagtaagggaggagcgaacgtggtgtggtgtttactcaccagagatgggagccgaatgaagccacccacgacgcacggcggatcttccaacctcggcgaggaatttctggtgactgcgcgcttctc

SEQ ID NO: 95402 - DNA, 545 bp, Zea Mays
ggtggtcaccggcgatatgcgctgccgtcagtggtgttgctgtgggaaacctctacctcaacgccatcaaaatttctcatcggaattcaacccagccgtggaggaacgcatcgctcgtgggcacagctgctgaagtcgtattcgcctctggtatggccttaaccatgttcgcggagctcacaagaacatgtagctccattcaaatagaaagctagggtcgtgtgtcgcgtgttccaatgtctccggcgggtttcgctgccgcggcacggggcggcgctgttgtgcgcgatcagagcgaggaacaagctacgccggccgttacatgcagagcgtatggctcagattaggtcggggtaattgtttgactagatccaatacccaccgttgatccctgtgtaggcggtcaggatctgatcttggcataccttttcgcgatattgaatcggggccgtagatccgcgatccggtggccgaggtcagttatgggttaagatgtgatctggtgcgtccatctcgaatcgggtggccgggatcaagtaccgttt

SEQ ID NO: 95403 - DNA, 720 bp, Zea Mays
cgaatactgcttttagagcgagtttcgggtaaatactcctcaagcaaaactatctgttgagatggctacaatccgcacaaccgctagattagctactcccacttattcagaggccctccaaagggaggagaatgcttcgaacaatgcgtcgatttccatggcgccgatttttgaagtcatggcttcgttagcaccgaaatccaagagcagttcgaaggcaacagaggttggacacgaagataggccatcaaatccaagctatatttagatggatcggtccattctgaaggacaaagatttgaaggcgatgaaagaacttggttattttggagacaaagtcaaggtatgactagttggtgatgagataaccccaaagacaaagagcaaggaggttgtgggtttcaaaagcttcttccgagccgaccttcagttgtcaatgtactggatgatagagaaggttttacagaaatatcatatttacatgcaccagctgataccaaacaccatactcaggttgagcgttttcatttgggctgcacgaagccaaggggtttgcacagaggttgatgccttttgcagagtgcatgacttgcactactagaccaaagccagagctttgaatggacttcataacaacttcgggtgcttgtgctacaccttcgcctatcgaaaggatacagttgtcccagtacatgcataccgaacaaaatggcatggcgg

SEQ ID NO: 95404 - DNA, 483 bp, Zea Mays
ggagaccatcacaacctccggcactagggggcaagcgcagacaaggggacatgcacgggaacccttactgcgcatcacggacggttcgatgcccagacgtggacggtccaaagcatcatcggacggtccgaaacattccagcggacaatccggcaacactcaggacccgcaacgaccgcgtaccttcaaaccacgacgaccagagataggtacgtagaaaactaatacatttaaagtggctggtcgactggtcaaatatggcccgaccttcaatcaattattatccaaatatgtaaaaaagaaggccagcccaagtgaccggccagcgaagcgacctcgctcacccactcaggagcgacaacagataagatcgattggaccacctcaccaatcggaaaagacagaagattatactgtccagttgagacctaacatgccagcattgacacctccactcccatatctacctatgccatatccata

SEQ ID NO: 95405 - DNA, 315 bp, Zea Mays
tagccaggtaatcactttagggtcagaatgcaaaatgggcccaatatgtctatcaaattcagcttgtctatatgctcttgcagcaggatacattcctctgtaactatttccatgaaatcttttgatgaaattttgcatcaaatgtctgaaacattctctcttatcagcttgtgggaaaactagttccacagcagtcgtcaaacccttgctggcatcagtacaaatagctagtttctccatattccctatggcccttcaaagctatgtcataaaccaaacccaattatccttgctctcagaatccatgaacccaaa

SEQ ID NO: 95406 - DNA, 333 bp, Zea Mays
tagtttcactctactaaaaactgaacccagaatttcagactgtcaagttttggtctaaagggtgaaatctaagatctgaccataatttgccaaaaatcaaaataccaaagtgttgaagccctaaatccatatggaatctgttagagaacttgacccaaaattcctatcctcaaatctgaattttcagacttcgtgataattctgggttctgaacttttatgcctaagccaactttgaagtccttttattattcagtccattgggttttagcttaggaccatgatatcaaaatggtagaggatctatgaatgtgcaactttgttgaagggagat

SEQ ID NO: 95407 - DNA, 793 bp, Zea Mays
cgcgaagtggcaagccatagtgcacctgggcaagagcgcgaggtggtaggccatagtgcacctggtcaagagcgagaggtggcaggccacaatacacttgagcaggagcgtgaggcgataggctcaagtggacctatgctagagcaggaccacaatgcatttgagcaagagcgcgaggcagcagaccacaatgcacctaggctggaggacgagctggcaggccaaggttcaccgatgcgtgatgatgattactatggggaggactacgatggagaggccgatggagaggccgatgatgaggttgttacaacgacacaggcaacgaacttcaggtatttttattttgacgatgagttctattttttgttggattgatattattaccagtgcataatttacaattttgtaggtttcggcggtcccttagagttccaccaacacaacccttggaccaacgtagggtcataaaccctgcagaagagaggagctaggtggaggtggcatggagtggcaaaggtcaccggacaccagttaacacagtgttgggatctatagctcgtttgcactatacaggggtggtacaattcaacgaggcagagataggggcgtatcactgggctcactggggcctcaaaccatatggacccaaccgtactcaccaagacgcattgtggtcatcgttttgggtgagtttattatgtcttttagatttacttaccgtgggcatctataaatgaatttaattgcttcttcattatgtaggaacaatttagattggacgaaacagcgaacg

SEQ ID NO: 95408 - DNA, 494 bp, Zea Mays
cgcggaccttcctctatatcctttccgtgagccctaccatactcgtgctcgaagaacaccatcgccgcccaccgcaacaaagtgaggggagctcgggatccaccgtgggagttggggccaacatcgtcgcttcgcctccgttcgttgctctgggatgtcggtcggtcgtcgcgagagctcgggtgggcgtaactggtgaatcggagcattactggcgcgacaattactcgccggagtccttgctttggccctgatccaccgcacgtcgttcggtgttcatctccagtaagtaaaccctaagccatgttcacttgtcacccacgattgcgtagcggccactagattggagtttaggatgttagagcacggatttcaggaacccagcgatggcgtccgtcgtggaacggcccgcgccaccgtgctccaccatcggaggtgggggatgtgctctgcgttgttggatctttaggtagcggctcagatcgatcctggag

SEQ ID NO: 95409 - DNA, 1286 bp, Zea Mays
ggtcgccccgaacaagcacatcagcagtccccgacgtagacgaaccaacgtccaaagacctcatcgacggagaccgcacttcgccctgcaggccctcaacaaataccaagctcaaaccaaggcctggcgcgaccatgcggtcgtcccaagagagttcaacgaaggagaccttgtactcgtctggaccacctggatagagtcacggggcaaactggagccgaagtgggagggtccattcatcatcaaatcgaaggcgtcccccagcgcgtataggctgacaacgccatccgacgaagacctaaagcattcctggaatattgacaatctccgtaaattttttgtttaaaccctcagggcccacacgcccttgtaatccaccaaacaatactattccggcccgcactcttttcctcccagggggtgaggtttttaacgaggcggagccatgtaatatacctgcaaaaatccccccgcaaaaactccgacgcaacatgtcaaaaaagaccgcatcgacggtcttcgacattcgaccactccgaagtcactgcaagaggcagcgtagactaccctcgtgtgcgacattccgcgcaaaagtcgtctaagggtgcagccggaatagcacaacaagtgcgttaatcgaagtcttttatctaaaagacactccatgcaaaagtcgcctaagggtgcagtcggaatagcacaacaagtgcgttaatcgaagtctctcattaaaaagacactccgtgcaaatttgcccacgggcgcagccagaccaacacaggcgtacgaatacggcaaacaggccacattaccatacaaattacaattacatacacacgacgagggcatcacatattacatcggctcaacctttgggatgatacccatctccctgtaattaaacagcattatcctcaattgctcacccttaaaaagcttccgaagatcccctcgcctatgctcgccccagtcggcgaggacaacaattctcgtttaccaacccggtctactcggagatggtcacgctccatccccatacgacggcgcctgccactccgcgaaaattcacccacactatgttttcccattacacttcgccgcctacacctagtactcgcactaggaagatccctggcaccctccacacgcggcgaagtctccgccgcagccacatccaacgcaacaaaataatccaagccttcatccaaggactcctctgtccaaggaaacgaactcccagattcaccatcggactcaaaacactcagacacagaaccaaacaaact

SEQ ID NO: 95410 - DNA, 634 bp, Zea Mays
tactgcagcccgacgcctataccggtatcttctctctcgctcactctctctttatgccatgtggggtccgtttgtaaggtcttcttctcccaacaccagaagttggacgctcgctcgtacgtctctatgtgccgtcggttctgttgccaccacgttgctgtcagcacagctcttggtgttgcgcctcctccccttcccgccactcgcatgctaagggtactgacgcgcactactgttgtcaccggaaactgttcgtctcctaataaaacgtcgacgccatcaatagacagtaacgtcgctggatctgtgtataaccttcccagcatcgccttggctcccctcgctcggttataaaacgtgccacactatgagctctccctcatttccctgctcgctcacctcgcggcttgttgctgctcatggtagcacacgtcgtgcactgctgcttcttgccatcgtcaccaggctctagtgccgcagctcaccggagtagtcgccctgctcgcgccgtcgccgacgttgtgcctgatctctgtcccagcgccagcccctgctctgcaactgcttcgccatggttatgcgcctcatcagaacccgttgtgcctcatcgtcaaaacctcgctactcgtggccg

SEQ ID NO: 95411 - DNA, 527 bp, Zea Mays
acccacaacctaccctcggatgaatgatctacggttcggttttaattcgcgaaggggtatgacaacttctaattacagccattcaaaatggatcgcacgacattggggccttcttccaccccgaaaactatgtgacgacggtggccgcgccctcacggtggcggacgtgagccgattctgccccttggcgccctaccacgaccctaatccgacccaaaactaagcagagaatcatatgaacacgtgagtagggcttttaccagagtcagagtggagacggtgctcgcccacgcaccagagcagatccgcggaggccaaaagctccgatgagcaattagtagatgataagccgctgattacgcccgtaatcgtcgcagacgacttcaccctggttttgtgtaggcttacggcacgaattttagcaccgagcgccgacagagatgaggatccgcgacggcgtaggtctcccaatcctgcacaccgatgcagtcgcacttttgccccacgactttggtggtgacccttcg

SEQ ID NO: 95412 - DNA, 592 bp, Zea Mays
ctgtagccttcggagagcgaggcaagaaaaggctaaacaaagtttttgatgttattggtttcgtctacccggattatagctatcccttgcgaaaacaaggaaagaaaaggaaagttgccacttcggccatctcagctatgccgaagggtaagaagattaaggttttaatgcactggcctagatacattgaaacgactacggtgctgaggcttgttaaaaggacttcttccaccactgagccagggcaccctgctcctgccggctcccagggagaatcggctgaaatgccaaaggttcctgcaatcaagtcggccgaagcgccgagacatgctgccgaagctgaaggaaaggcagccgaagaactagagcgagaggaaacggcagggccaccaaaaatcttgagtccgccatcggatctagaattgccgaagatatcgaaaactcctgcaataacccccaagaggaggaggatggcaagtgtgctggacaccgtcatggaatcgacaagggcatcaactcctacacctgcaaaggagactgccgaagctgctatagctcgcattgaaaccggagctgggccctcagttcccac

SEQ ID NO: 95413 - DNA, 320 bp, Zea Mays
aacaaggggagatcgagatgccatctctcttaccttcgctgatccttaatgtaagtaaatccaatgacatccagtccctcaaacaatacgtagatctacaagggactcagttgcaacaacgcattgggggatagaagacacacttaagaaactcacgcgtacgatagaaaatctattgtgtctaatttcccatcgcacgaggtcgcaatagagctaaatttgccaaaagcatcggctacaaatgggccctcacaaacccagccattatacgacatgccaatgaacttgtgcatgaccggaccatctaggcctgagctcag

SEQ ID NO: 95414 - DNA, 580 bp, Zea Mays
cttctcaagcttacacagtaacacgggtgccaatctttccaagtctgcaaccacggtccgagataactcttttcacaaagctgacggaagaaatagctcaactctgaaagcgctagccagacatgctcagggacatagcctcaaaccatcacaggaagaatccgttcaatccatatgtggaagtcatgactcttcatccctaagactcgcagagtagataagttcacccccctactcaggttagctgcatacccatcagggaacatcaacatcttgatccactgaagtactttctttctctgggtcctgcttaggacgaattcggccttaggccttctccatgtctttccaccacttggcggcttcatctcttggtttggtctgtcacataacgctgctagatccactcttgcctttatgttatcctttgacttatcaggaatgtccttaattgttgcccaaagtgcctcaacaacattcttttcagtgtgcatcacgtcaatgttgtgtggaaggaacaggtcatcataataggggagccgagtcaagcccgacttatgtgtccacatatgctactcac

SEQ ID NO: 95415 - DNA, 1169 bp, Zea Mays
cgtgaactcattgggtgtcatcccagagacacgaacctggttgaagagttttactgcctcttccccttgctcattctgtgtgtggccaaatatcatagcattccagatggccatgtccctgttttgcatcataaaaaacacagccttggcatcatccacaagggaagattttgaatatgcatcgattagagcacttcccacatagaggtcgactgaagttcctgatttgatgatgagaccatgaatctgcttactccattcaatagatgatagaagtgatgacatcccaaggagtgaaacaaaggttagtaggtttggccttatggagtaatatttcattttacggaatatatgaactgcttctgtaagatcaccttgccttgcatagccttcgatcatcgcattgtaagagactacgtcatcatgcgccaaggcatcaaatgccactcttgcagcagttaaatgggcacatttagcgtacatgtcaatgagagcattcttgacatactcatcattctccagattaacctttatggcatgggcatgtatctgtgttccttgtgaaatagcttccattgaaccacacgaattcaagatacttgtacaggcaaaagcatctggctgccatccagcctgacacatctgccagaacatctgtatggcttcagcatcaagtgaattctgcatataaccagcaatcattgtagtccaagacacgagattatgattcttcattcgatcaaatagcttacgagccactaacggtctggagcacttgcaatacaaatctatgagcgcgttgatcacggaagcatccacttctgctgcacttcgataagcgtagccatgtatttgcctgcctccctgtagaaaggcaagtgcagagcaggcactgacagcacttgctaacacaaacctgtcaggctggacgccttgagcgaccatcgtttgaaacaagcccagggctagttctccatggccaatccgagagtaaccagtgatgattgctgtccaagtaaccggattctttgttgggagagcatggaacacacgcatggccgcatccatgcaggcaaccttcgcatataggttgacgagtgcagtgccaacatagagattgacatccaggccaagattaatgatctttccatgcacttgctcgccaaaag

SEQ ID NO: 95416 - DNA, 369 bp, Zea Mays
cggggaccgactacaactcgcgctcgaggccggtaattactcatctctgctgtttgtatcgaccctcactatgcatagcatgtctcggttaggcttgtggggcagtgggcggcccacgggggctcgccggagttactccgccgtggggaagaattcgtcaccgtcgctcagccaggtagggggaggaagacctgatgcgcgctgttggatgtgtgttggacggctcggattagagtctcataccgattcagccgcgtctaaccacaaccgtagatcgtgaatccgatgggcgcaggacgatctcagttagagagaagaagtgaccgttaatatctgatcagagggtcagcgttgcttaccgcttcattt

SEQ ID NO: 95417 - DNA, 600 bp, Zea Mays
cttgatgttatgtgcaacgtcatgagaacttctctcccctggggctgagtttcttcaatgaaatggaccttatgttggttgtagtgcaaactttttttccctggcctctgagattccatcaccatctttattccaaatgaaccaacttgtgatagccacttataaattgactgattaacaagcatgacaagatcgaaaggcagagctccactttgttaaaaaaaggcatgacaaacatggtaaccaaggaatccacagtttttttacaaaatgaactacatgaatgtatgtgactcctaaccatgttcttttggagagattcttaaaatgtgtacatagacacgagctgttatttcttagacctttttttgttgctagagcattttacacatgcatgtaggcatgtacagataaaacttgggggatgtaactacattttattttttgttgcagagagtataatgatattacatagtgaattaaagcgccagaggaagctcgtgaaaaatctgaagaagaaatccttgtggtctaggaccttggaagaggtaaattttcaaccatactcactcagttgttttatagtttatactgtaactg

SEQ ID NO: 95418 - DNA, 554 bp, Zea Mays
ccgcgcgcgcgcccgcgctggtgtctttacagaaaggaccccgaagtttttactaactgagaacaggttatttcactgtttaaccaagtcactgacaatttgctgaagagccctccaacttctaattctttacacggagaagtccacgcggcggcagcgcgcggaggagctccggcgaggttctgtaccggccgattgaggctatggctgggttctccgagcggcggacatgaaatcggggctagtctgagtatttcccccaacctaattgcaactaggaccaactacatggctctggccacggtggccgtgagcatcgcggcaagacagccgtgttcccggcgatgggtggcggtctagttcaattaaaggggtcggggagcatcgcagatgcatgagaacgcttaaacaagggagcaggagacgggaactgaccggagtatggctggcgacggtgaagcttgtttcacggtggcggaaatcggatttgggggaaactccgaattcgcggaccttagcgaacgatcggggctaattcaaggtggctggttagc

SEQ ID NO: 95419 - DNA, 1814 bp, Zea Mays
gccggtatcatctctcaaacccatccttctcgtcatattccttcacatattgttgtcggtaatggtcatctcattcatgtcacttccactggcaccactcaccttccacataatctatcccttaataatgtccttgtctcaccgtccctcattaaggatttgatttcttttcatcaattcaccaccgataacaattgttctattgaatttgacctgcttggttgctctgtgaaggatcttcctacttggcgcgagatcctcagatgtgatagctctgggcccctatacccccttcggctcccggctaccacccttcatgcatcaacaacacctactacgtccctgtggcaccagcgtcttgggcaccctggtcatgttgtcttatcacatctagcccagtcgtcagtcatttcctgtaataagagtgccaccgctcctttatgccttgcttgtcaattaggacatcatgttcgtcttcctcttcatacatccacctccagggctactaagatttttcagttaatacactgtgatttgtggacctcccctttgactagtgtctctggtcataaatactatcttgccattttagatgattactcccattttctgtggacattccctttgcgcctcaaatccgacaccttgtccaccctcactactttctttgcctatgtccgcacccagttcggaatcaccattcagggtattcagtgcgacaacggccgtgagttcgacaacctacgtgcccgcacatttttctcctcgcacggcattcaccttcgtatgtcatgcccctacacctccgcctagaatggcaaagccgaacgcattatacgatccataaacaatgtcgttcattcccttcttttccacgctagtgttccccccgccttttgggtcgcagctctaggcactgccaccttgcgctggtgctgaacagggttggaggacatgtagacagaactgatgttgtcacagtatgctgacgtcttcactaaaggtctgtcgtcttcggtgttcactgattttcgatccagcctcaacgttcgctcaacggacgtatcgactgcgggggatgttagacagcaatactcattgccttgtatataggtgtgatgtctggcttccttaagcagccggccagccttgtatagcaggttaggatagagagagatttggggaagagtccaggatggtaaggatcaattagggtcctattgtttccttgtttaggaggtttccttttacctctggctcttcccctatatatgtaacagcactcttctctaccaatacacacacaattcctgcattctacttcacttacagcatccatggctacgccagctgctgagacgatgtggctgaggtaggaggcggatggggcatcgaaggagcacttagagcgctttagcaccagcaagttggccttcagcgtggtgaagacagcacagagatggtggagatgctcagactaggaggcggtgtagattaggatgtcgttgaagaagacgagcatgaagcggcgaagaaaagggcgtagcaccatgttcatgagtgcttggaacattggtggggcattggacaagccgaatggcatgaccaggaactcgtacaggccctcatgagtccggaacgcggtcttgtggatgtctttgatcgccatatggacctagtggtagcaagaacgaaagtcgagcttggtgaatatctttgccccaaggagttcgtcgaccatggggatggggaaggagtctttgatggtgcgcacgttgagggtgtgatagtcgacacagaagcgctaggaccca

SEQ ID NO: 95420 - DNA, 715 bp, Zea Mays
aagaaacccttcgagaatattacaaaaaagattctcttattgaaatcacagttgctttcggccgatgaccatatagccatccactatgcaatcagcggccttcgagtaggcattttatacagccaatgcataagggatccaccaaataacttgcaggagttgtaccagctctttgaaaagtatgcccggtcagaagagctccactagaggaaagttgagtcttagtgaaaacataaggagaccccgcaatctagtagaacatggatcaagacttagcacgccaagaccgtgttgagccctaggtacacaatattgcaaatcagtagcaactaggagataaccccctcatcgtcaagattacccccacaacaaggtcgcggtggcaacgcggccagggtcagagacaggggtcagggaccacaacaacagagaagattctattgtcttttccacgacgaagactcaacatacccaaccagagactgcctagagactaaagcaacaaaagaccgaatggctagggtcgtgccagctgacaaccaaagagtcgtcgctcacacctatcaaccccaacaatacaaccaacatcaatttcaaaacgaacaccactattacccccaacatcaaaaccccaacctctttccacatcaatggcgccttcaacaccaagaaattatagtgctgccacctccaccacctcagcatccaaactaac

SEQ ID NO: 95421 - DNA, 456 bp, Zea Mays
tgagtttgcatttttatctggtagttcatctcattgtggacttagcaaatttttggttgcccattattgcatcattaggggttattcaagaattatttggaaaatgccttattatcactttatatttattttccttacttaaaaagttgggctgaggtgttctttatttttgtagtggggctctggtggttgtaagtccactggatttttatgactcattttggttatagttttgctactttaataattaattttcactccaaataaggctaaacaaaacattttaaattaaactggtctgagttaatggtctctgtatttttcctaggttctctgttacataagcaaactaggaaaaataattttaatcactgttcattaatttctaatgcctttctgatttttcctaagttttgagcagaatagttttaaatgaataactacatcataatttct

SEQ ID NO: 95422 - DNA, 474 bp, Zea Mays
aatgagatccttggaaactatacaaagaaagaggatcaattgatgacagctacctttggtactcggaagaaacaaatgctaaattgggtaatggatgccctttggcttcgagtacctggactatgaaaggcgtgacaaagtagctggggagtgaagaaaaagaggattgtaagcattttgaaaaggaaagcaattcaatccattgaaaaagataagcagaggactgcttcaaagaaacaaaaaatttaagcggagccgaagctttcggctcccaagaagcgaaagtcctcgactatggcccctatcaaggtgaaggtacaagattcactagagaagattactggaacctcttcgtcctcttccatcagcgtaacataaattctaaaggtaatgactgaacccttcctgtttgctatgctaagtcctctagggtcaggtcttactagcttattgcagtgaaaggagaatgggttg

SEQ ID NO: 95423 - DNA, 455 bp, Zea Mays
caattgcagaagtaaatgtagtgtgatggttttgaaatttcttcgtatttcgcggggcatagaggtcgccctaagatgagtaattgcaaacgtgcttgtgttggattaagtaggcgtgagcacaccgtgtcgatttaagtcattaccgacttaaaccgattgctccgttagtagggtatagtggtcaccccgagttaagtaagcgtgagcatgtcacaccgtcttaagctgttgccgacttaagccgattgctccgttagtagggtatagtggtcaccccgagttaagcaagcgtgagcatgtcacaccgccttaagccgttgccgacttaagccgagtgctccgttagtagggtatagtggtcaccccgagttaagcaagcgtgagcatgtcacaccgccttaagccgttgctgacttaagccgattgctctgttagtagggtatagtggtcac

SEQ ID NO: 95424 - DNA, 510 bp, Zea Mays
gtgagactagctcagtcaccacttcttcacctagtggggacacaaacttaactgtcctcttatcacagccagggctgggcattcggttttacccgacaattcgggtcggttttttcgggttattaaaaattcgggttctaagaaggcggaaccgaaatacagttcgggtatctgataaccgaaaattcggttacccgaacttaggagtcgggtttcgggttctaaccgaataataaccagcagcccatactcataaaccgtgaacacaaacataacaagccaataagcggactcgcagaacacagacagaaggcaccaggcagccacgccacaaaggcacagacccacagttcacggcttcacgccacactacacactagacatttagacttgacagaatgacagacatcaagagttcaagacataggccattcggccagcatgcagcagcccagcaacagcaactcggcaagccagcatccagcagaccagcaccactcaacccaggcg

SEQ ID NO: 95425 - DNA, 589 bp, Zea Mays
taaggattagaagagatctcatagctcttatccttagatcagataagcatcagttgggatataaatacttgtaagaggtcatctatggaattaagcagaatcagattattctggcttccctgaggaagccaggaattcgaatcaatctctcttgctcgcgcagcctaggtcagccacgcgccctagtgccgctgcccccatctccctcccacagctgttcatccttataggctaagggagatcgctggtaggattcgcaatcctaccagatgaactgttctttgttacacattttgtgcgtggccttaaatttgacattcaaggtgtggtgcgagtatagatgccacaatagtggatcgggcaattgtcttggctcaaactcaacaggaggtgttggatcaggcaaaaggcaaaggctatcgtcagatgttttctaacaagcagcctatgggaaacaataagggtgatggaagtcaacttcaacggggagtggatttgtctaaagaacgtcatgtttgggagtttagaaggctcaatggtctatgttatgcctgtggggagaggtttgagccgagtcacattgcaaaat

SEQ ID NO: 95426 - DNA, 451 bp, Zea Mays
tccagattagatctagcggtgaagattggatctgacgtgttatgtgctggtgagcagcgaggaccattggataatggatcaacggtccaggtcacttttgaacgcgatctaatcctacacgtcggtaaatgatcgaacggtggagataggctctagtcaagttggccctatcttctaatcctggccactgataatgcaatctacggttcatgggttgtcttccaccaccgatagctgagcgcagcagatcccgcaccagcggcggccgcccccaacggcggagaccatcaccggtgctcccgtccagtcgagcaccagagctccattttcccctatgatttgtgctacttagagcggaccagcaagcgaaccaacggggtccagaatctcaccagggttcatgctgaggagaccctcaaccatggtgcagcgactcggtgatgaacatttg

SEQ ID NO: 95427 - DNA, 638 bp, Zea Mays
gggctgctaggagtaagtaccaccggtccgagagtgggagaggtgttacaacttgcaacaggtccgcaccgttttggaggagttcttatgcatactaatactatttataggaggcaaaactacttgaggtggaagcaccagatcaaaacccgaggcaaggttgcataatgcagagttggctgacacaccatacacttgagcactgatagaggtgcaaattttccaccaggcaaagatctagtttcgacacaaaagattctaccaaaactagaggtcttgtgttggcacctaatcctagccagactcgtgttacccttttatggctgaaggactccaaagaaaggtactcggtctaggtggaaaatagttgtgtaatatagaaatagtcaatataccataaataagttatagattagatgaaaaatgtaagttaggaagctcttatcgcttcaagcccatagggctatatatcataatagatataatcataataaacaaaaaccattcgttctccaagcaatgggtgcttctcatcctttcggcgcatcaccatccgttctccaagggttttccaaggtaagcgataggatgccctgatgcagtctttgatcatgtaagggtggcatggtgtcatcccc

SEQ ID NO: 95428 - DNA, 557 bp, Zea Mays
gaacgttccaccggaggttgcggcgatgggagctggtgcatcaggagcagctggcgaatgaccttatggggagttggatctctttggagcccctccttccatgaacatcacagatgattgttctcccgaagctagcagtggagcgggagcagccaaggacacggatgactagattaatgtagtagtaggttgtttccttatgtaatctaaataaggaaaagtgagttgtataagttgagtgtgtataattagaacaagtttggaataatgtaacagaggttgtgtaatcgtggcatgtaataatcaagtatgctttcttcttcagatgtcgtccagaactcgtgctgaggatggggctagaacttcccgtggtggggagtaaactccgaacccactgcctgtacctcccacgctggcagaggctatcgctgccttaattaatgccactgctgataacactcgtattcttcgagaaatggctaggaatcaaattcattagcagggaggcagaggtcaacaccaagcccctagagacactccgtacatggagttttaag

SEQ ID NO: 95429 - DNA, 595 bp, Zea Mays
cttcggagccaggggatggacccaaatgccaaagcattctgtcgagtgcatgagttggactatcaaacgaaggccagagctgacgggctacatgagaattttggctgctataactttgtgtatcacaaagatatgaaggctccagtcctcaactatcgtaccaagtggccaaccgactggaagagtgaatagttttatttcaaggccgatgataagaagagagagaagctgatgcaaatggtgatgagtccgttgactctaagcttcgaactgactaggcccctttgccgtatgacatcggggtcaccatgccaacgggctgtggcagaatttagggtggtggctgaacagatcagcactagagatctagttcaagaatacctggccaacagaacgtctctgacgttaagtgattttagcatgccgaagctaaaagggacgaagaagacacttgagcttgtgtgactgccttatcgctttaaatttgagaaacagttcaaggagccttgccaagagtggttggaaatgattgagacggtgtgcaatgaagttttgggaaattacaccaaaaaagaagatcaattgatgactgcag

SEQ ID NO: 95430 - DNA, 785 bp, Zea Mays
ttaatgtattccagacagacggcatgcaggacagacggcgccgttacgcggttggtttaatggcaaggcggtaaacatatggaagtggcgcggaattatagggaatagattccacatacaaacgtgcttactctgttacgtgggcgcggaatttacggatcttgcatggggtataatggcggcagttaaatataatgtcgaatgagatgttgaacgatatgaaataaaacagatacgctataaatgttgcatatatagtatataccgtttggcgtaaaatattgtgtcattgtgcgtaagtagtgtgttagggatatttgtattacatgtacatcgctataatatcggtacggtttcagaaataatggaaataccctggaaacgtggatgcggttacttgtatagcatctgtgatttcctttcattcgaaaaaacaccacaaaaaagactgcataactagttggcggtggagatggccggctctggacaatcgccggctatggtaggagatggcgttcgtctagatccagagacggagggagtagttgatggtaacttactggtcacaccacctcctgctctactgggtcctgtaatcgacgagatgagcataggggaagaaggagaagaaagggttcgacctccgatgtccaatattagctccagggagatggatacgcctcaaatactgcattcacatgtaagtccaattgttgtatttgattcttgattgattagattgttatgatcatattccgtcgtacaaacaacaatgtcaatgaatt

SEQ ID NO: 95431 - DNA, 291 bp, Zea Mays
gtctaagtaagcttcaacattataagaacccatgaacggtggaatagagaacttaatcttagcaaatggatcatggtatggttcaggattatgatgacggcgtctaccattacctcccataccttgtcgattacgtgcgaggcgttgttgcagcggtgcataaagatcgtcgtcatcgtccacaggagagtgagctggggctggagttggtggtgggggacgagcctccagtacgtccatgcgtgtaacaagttcagcaactcgtcgatcaagctgctcataggatgtcgc

SEQ ID NO: 95432 - DNA, 407 bp, Zea Mays
gtctagtagaaagtaaaggaagtcatcttcgtcgctccctccataaactaaggacccagggggtatttaagatcccttgcataatgttgcacttcggtaacttgttcctcggatagttgtttccccaaagcatggcgaacaatatattctgaatcaacttgggaaggtgctttgggagtaggcaatgttgtcttttcatgaagactttccttcgctagttctgctagcttggcctcgaagcttcagcctcagtgtaagtgggagaagcgcttgcagtgagtacttctctcgacccttcaacattgtctttgggagcttcgatagaagcaggagtttggaatatttgtagacttcaaaacaacatccaaaacactggccatcctccttttcttaggagtcattgttac

SEQ ID NO: 95433 - DNA, 829 bp, Zea Mays
agattatgcccctaaatacgtttaaacacctaactatcgagaaaatcataagacacgttccccaaggtcaagaaaggatcaatcacgattcgcccgagaccccgctagatggtcgctcaaaactccgcctcgcccgagcctaacctcgggtgaaggtagcactcagggaaatcctcggcttacccgatgtcccctcttcaccaaatagcggtttccacctcgtccaagcccatctcggacaggaggacagccccgtgcccagcctcagtcaaaggtcacgaaaaccgtggagacatgcgcatttaatgcgaatacctaccccacgtgatgccgcagtcaaacacagagcgatgggactgcggtcccatccactttcaccaactacgatgacgcaccccgagaataatggccactgctcccccacgccgactactgtgctcaaacaactctggatggcatggtctcacctcgggagggaactccacctcgcccaaagtcggccttaacctcgaagaaaactccgcttcgcccaagctcggcttcggccaactgccccggcaacaactccccgtgaattccgtaggtggccactccgacaactatgctaacccctccctgtaccactgcatgccccgaggcaggctcaaccaaggcctcaggaggaaccttggtcttgcccgagcctggcctttgcctagataacatcaaccaaatggcgccaccaactcctccacgagggatgctgacgacgggatggctacaggaccgatgtcaaatttgttttatgccatacgaggagaattaccatgcatttttcaccatacttatc

SEQ ID NO: 95434 - DNA, 560 bp, Zea Mays
gttggctaaggcagcggccagaggcgagaccttgccctccgatgtgttttaccacgtcattggcacaccagccgtccgcaacccagaaggcttacaagtaaccaacgacgctgagggccatcgcatcgtcaacctcattacgactgaagattggtgggccccaatgaccctgtttttgcaaggatattaccacccaagcgacgtcaatgaggccaagcgcctcaagcaccgaagccgggacttcatactaatcgggggccaactatataaaaaggggatcagccagcccatgctaaaatgcgtgaccgaaaccgaaggcattcaaatccttcatgaagtccacagcggaacttgcgggtctcactcagggcccagggccctcgctgccaaagtaatctgttaaggattttactagcccgcgataatctgtgccgcaaatcgagtcacgaggtcttgcgaagcatgccagaagttttctccccgctcgggcaacccttcacagttcaccaagttgatcgcccacacctggccacttcaacgctgggggctagatattgtcg

SEQ ID NO: 95435 - DNA, 271 bp, Zea Mays
cttcgttgggtgtttctatagttattagggttcaatactaatttttgttttgttgtctaccggtcatatactcactattgcagacaagtacataatctagactttggtgtttgatgtgagcattttagcgtaatttctatatttactaagcttatgttctcttgactttgtggagataagttgggtcttgagtggctatgatgatccttcttttgtggttttataggattgctttgggaggctgattgcaagtggacaaattcatggtttt

SEQ ID NO: 95436 - DNA, 496 bp, Zea Mays
tggatatctatattgagcttgccgatgagcctcttgagccagagtagttgacaaagatgtagtggatgttggtgccaaaggagttaacatagcccctcaagctcgatgatgacggtaagtcatcatggacatttataccgaagatgttaatgaaggctctctaggtgatgcagtgggtgaagatgatggtaaagcacatcttgctgaagatcctcccacaaatgtgtttggatgaggcaattttggtagagcttcgggcagactacatcatggtccaagctcttggcaggttgtctatgcagatcgatagcgaggtattctattggagcgtcttcgagcatcgtgagtttgggattcagtcaacaagctttaatcaacattgatttgtaccatgcgcaatgcatatgcttgcacaattgcttgggttagcaacaagtagagatatcctcacaagagttatcgggaggaagatatctaaaggccattgataattaag

SEQ ID NO: 95437 - DNA, 317 bp, Zea Mays
gcatggtccaacccgacacgagctcgatccaggcttgacacgacaaacatgagcacaccaaaaacgtttactttaatcatgccggtccaggtcgtccaatgtgtttagcactaggaccaagcacgacctggctggttcttaaccgtgttgtgccagcccaattacacgctagcatgtcagtgttgtgcagtctcatcggcctgctcagctcacaaacatagccaagatcagagatcgtagttacatcatagttcacagttgaaataacagattgcacatttgttcactaattaaaatctcatggcacaataaaaata

SEQ ID NO: 95438 - DNA, 527 bp, Zea Mays
taaaaatgcagctgagcatatcgccagacagtcggctcactacacactcattggggaaacactatacagaaggggcgcatcaggcatcttcatgaaatgcattatatcgtctactgggaagcaacttctggaggaggttcatgctggacaatgtggaatacacgcagcgtccaagacactagtcgggaaggtcttcaggtcgggattctattggccaacagcaaaaagtgatgccgccgagttagttcagaggtgcgaagcttgccagtacttgtcgaaacaacaacatctaccagcacagcaactgcagaccataccggtgacttggccctttgcgtgctgggggctagatatgatcggacctttcaagaaagctcaaggaggatacactcacgtgttggtagcaatcgacaaattcactaaatggatagagttcaaacccattgcttctttaacctcagctaaagccgtggaattcatacaagacataatattcaggtttggaataccgagcaacatcataaccg

SEQ ID NO: 95439 - DNA, 587 bp, Zea Mays
ctccaggggatggtagccacagaaaagtcgtcagggtcttcatagctgccgcctcggttgtgtcgtctgtcctaaatccaacagtctcggagtcaaggggacgccaacccggctgaagggtatgagcctctagagtcagccagactcagcaacatggcacccgatgctcctcgtacagctgcactgtgtacaaagggggcgtagggtaatcggcggagttgaacacttcccacaagatggaaggaaaaccatcgtgagaaaggaaatcagaactgaaacgagtgtctcctccattggcgggggtgggtgaagtcatctgtggaagagtatgagatgtaaagattatggtggaagaagaaaaataaaagagcctgggtggtttaaaaaagaagcgggttagatcaaattttttacttctttaatttctaatccttttagtttttataatgcatgcattctgaacataacgtctcctctccgaatcagaagggtgctttttagggcatcctttagaaatcctaagactggcccatagggcctacttaattagccacctatttctcccactattcctaaggcctttcgtc

SEQ ID NO: 95440 - DNA, 682 bp, Zea Mays
tgcgcatgccatcctagttgtcatgccacagaagtgttgttttttcatctccaatctccactcgggctaactctttataagattcctgaattttaagaatgtctctccactaaaatgagcctactagtttatctgaaggtagtgaattgctgtagtggttggcccagattatgttgatccacgaagtgtcaggtctgttgtaaaatctgtgaaggttcttcataaggagggctttgttttgtaattctagatttatgactcccagccccctgagcttttggtttgcagactgttttccatgctacttggggtagtttctttgcatttatatctgctcctctccaaagacagtgtcttctgaatttatcaatatgcttaatcaccatttttgggagcttgagggtgcacatgtaatatgttggtagagaggaaaaaaccgcgttaaccatttgcagtctgccagcctgagataaaaaaacagaagttgtcgcaagtattctctctatcttctaaatgagtggaaggaaggctcccaggttgggtctttttagtcccaacaggagccctaagtaggtgaacgacattgatccaatcttgcagtggaacgtatttgctagagtttccattttctggtctgagacattgatgggatatatattggatttgtgatagttgacatgga

SEQ ID NO: 95441 - DNA, 945 bp, Zea Mays
ggtgtttccatgcaaagcccggcttggctgggttcgcaagctccagaccacatatggtagttctctgatccattttcctgcgtgcttcaagtatcattctgttggctctttccacctgcccattagctcttgggtgtgccactgatgcatacttgatctggatgctcctttgctcgcagaaatcaaagaactctgagctagtgaagttagatcacaggtctgtgataatgctcttaggtatcccaaacctaaacattatttcttgaatgaattccaccccctttgctaaggtcaaagaggcgatgggctcgtattctatccattttgtgaacttatcaatggcgaccagtatgtgagtatatcccccttgagcttttttgaatgacccaatccacccccaacatgtgaaaggccaggttacaagaatagtcttcaactgttgggtaggcagatgttgttgttttgataagaactggcatgcttcgcacttctgaactaactctgcttcatcattcttcgttattggccagtagaacccggacctgaaagctttccctactaatgtccttaatgttggatgcacaccacattgccccacatgaatttcatccagcatctgccttctagtagccgagtgaacacacttcatggggactcctcctacacctcttctgtatagcagaccccctatgatggtataatgggacgactgtctcgcgatgcattatttggtggccttgtcatctagttcttcctcgtttttttatgtatttgataattgactccctccagtcgttgggatctgtttctgcctggtccaaaatgtggcactcctcagcctgctctgtggtgacgcttagctgctatacttcttagacaaaaaccccaggtggaacctaggctcggctagaccccagctttgacaatgcatctgctgctgcgttc

SEQ ID NO: 95442 - DNA, 450 bp, Zea Mays
cgaggttaacctccttcttgggcctgatttagtagaaacagatcttcagatgaggtagggtataggttagattggatataactagattagactggttaaagttagatatatctaccagggtaggatacatattactaggatatgttagaatctttcgagataagatggattatatgatgtaggtaagtcagaatatctgttaggttaaaacaaaggagttatgcaactatcggacggttaaggtaattgcatatggctaggttgttgtatgtggtctagtctaaattggaatctcagtccaacttggattaaaacatatttataagagtagggtccaatcttattttaccagtattatctaacatgtttgtacattaggttagatctgattagattagatgggaccagaattaaattgatgtaatcagattagactagataagatctagt

SEQ ID NO: 95443 - DNA, 701 bp, Zea Mays
cattgatcatcttccacatcacatcattgaacatggatctaagtctagcagcttgtctcctatctttatcccttaaagcaaagaacttgctcaggttcaagtatagggccgcttcatacagtttttgatccatttgattttcccatcttttttcaaagcatgatagtacatctacttgtaatcttggcttatctttcaatgactcctttatggtggcttttgcaacatccattgctgccatgatttatggggctgctggtgtctcatctccatcggcaatccttagagcaatgagtggttgtgaagcccttagacagtttccactttttctcaaaatggcatagaaagcacaattcttgtgatttgcctcccttcttcagtgttgggaaacttagttaggtgccactcatcactgacaaatatactctttagaccattcctatgcctaagcatgcccgccaatttcagaaatgaggtagcaaatcgagtcacacctggcctaacaagatcaccacctagcttctctctcattaggttgtgaattctaccatgcttgtagatgaacctcgacactttcttagccatattgatgcagctattgaagtccttgatctgtccaatgtcctctaatagcaaatccaagcaatgggcagcacaaggtgtccaaaacaaatgggggatcctatccatcaagattctcc

SEQ ID NO: 95444 - DNA, 566 bp, Zea Mays
ccgagggatgggtgcccgcttggcccacgggtttgcggcatttttctccatgtgccggaacattgctgcggatgtccatgaggtggctcgacgtcagagactgacgacaacctacgtcgtcaagcttcctctttgggtactccattcgccccccgctcgcctgacgtacctctccatcctcctcctccggagatcaacgagtggtaccagcaggcatacggggtgcctttcatgccagcagacgacatcgacgaagaagaagaagcttattttgatgatcgggagcagtttgtcccgcctccgtatcacggggatccgggccaatcgtcctcttaccctccgccccaggatccttctggcagtgctcctcccccggaccagtctggggaggaacactttgcctctcacctggcgcaccacctctttgctcctcatcatcctcctcccaactggtgatcattggattggcgtctctctctctctttttggttcttgttgccaaaaagggggagaaggtttattatggcagtaccctttatgcagtaccctttatttttgtaatgaac

SEQ ID NO: 95445 - DNA, 475 bp, Zea Mays
caaattttgtgagccagggtcagcctgctatcaccaggaattgggagaaagtgttgctccaagtcaggatgtcagtctaggaaattctgaactcgattcagtccctaaagctatgttccagtattttctgttagtattggagctgtttggtgtctgatccaaggagtttaaggctgaagtctttatgaagaattggtagagggttgtttaatagaccagttttagtaagtgtgctccccatgttacttcgggaaattgtgtgattgaagggggtgaaaagggagagatcagggttcaacaggtactaggagttgctacaaaaatctgaagaaagatcttcacatccctgctgtcctccgcccatgtgcacaaactgagttacgttggaatggacaacaaaggatattgaggtccagtccccgtgctgaaaatatctcagttggacttgtgtgtacctatccacaagtagagtaat

SEQ ID NO: 95446 - DNA, 297 bp, Zea Mays
gaacacactcaggataatgaacagtcagcaatgtgtacaggctgacaaatatctgaaaaaatactgcagcattgcactaccgtgaacacaattatgctatgcaaatggaaggtaaggcatccaattgtacacatcatatacccaagacaaactctaatgtccatgctacatctagaaaaggtgctctaccacctacatggcaacgttcaaggtttatcccacattcaccataaggcgtggcagtggcttctaaacaaagtgaattggaggcggagcttagttcagaccaaggtgggc

SEQ ID NO: 95447 - DNA, 734 bp, Zea Mays
aattcaacagtccaagtttatgagcatttccttggtgcagaaaattcagggcagccagcagatcttccttaataatgctccagcaggtcttgtaaaacctccctgtaaacccatcaggcccaggagccttgtcagaaggcaggtcagcaatcgcatccctcacctccttctccgagaaagggttatccagctcactgagatccgctgcaggcctatgacagcccaacaaatcaatagtaacagaccttggaaaatcagtgcctagaaggttggtaaagaaaccgtccagaactccttgaatatcctcatgatttgtgtacacccttccatcctcctctagattggaaatgaacttcctttttttacggtaaacagcctgtcggtgaaagaaatgagtattggcatctccttcttttaaaaattgaattctggaccgcaaacgtgcaatagttctttgcaaagacgccaaaactagacaatgttgtttcagctgcccccatagccaaagctcctccctggataaggatctgatatcttgcgccatctctagcctatgcaaaacctcacgggcaagtcccaactgggcattgacattccccacctctttgtgaccccaggactgcaaacacttagctaatcttttaaacttcagtgctatcttctcaaatggacaaaactcctgcagaggtagactccacgaggcagccaccacctccaaaaatcccgggattttt

SEQ ID NO: 95448 - DNA, 760 bp, Zea Mays
ttctcctgcttgtaagactgcaaatctatcttcatcttctccaggaaagtgactgggtaaaacctcctttcaaattgcctgataaaaacatcccaggtcaggattcccggtgaagacgagtgagctgtctgcacgcctctccaccaaatttgagccccccttcaatagttgcgtgccaaagcgaacacgatccccaaacactatctcaaaagcatccatcttatcttccacataagtcagccaatttgccgcctcaaccggagtaccactgccatcaaaagtgtccaacttcatgcccatccactgtatcagagagaccactgacgagaaggggcacctcagccccaccacctagagcagcacccgcaaggacagtgcccccaggaactcctccactaccggcaccctgagcacccgcgccctgagcagcaccagcaggagcaacaggaatggcttgcctcagaatgaacaacttctgctgcatggcctgcatcgcgactaacattgccgccggactcatagaatccccactatgatcttgcgggctgccacgagccctacgaggcggcataactgcagccacatgagtaaagaaataaataaataaataaataaaaatggcataacatcaacttcaagtaaatcaaacgagcactgacaattcataatatagtaatagtaaagcaagcaacccatcctatatgtgcagtgtgtcaatttatcatcatttccttgctaggacctacaacctatccctctg

SEQ ID NO: 95449 - DNA, 490 bp, Zea Mays
gcttgccgggttttacgaggccatggagaagagtaacacgattactgatgacatattggccagattgttggatgattccgaggatagcgagggttttgatttcgagagtgatgctgatgatgtcgaagagcgaccctggaaactaagccatgttaactttgggaaatcaactgtgaagagaggtcataatgaagccatgaaaggtaaatattttcacaatgtttccatagtgaggcctggtggggagagcactgttcctcttcctgaaaaaagacagtagttatttaccaaagctctttgaaggctgggttgtttccccttcacacaatgttggtcgaggttctaaaaaggttcgaaatataccttcatcagcttactcccgaagctctcattaaggttgggatttttatctaggcagtaaggagtcagggtttggagccaaatgctaactatttctgcaacatccacaagccattttatcaaagaaaag

SEQ ID NO: 95450 - DNA, 274 bp, Zea Mays
atatggaatatctgttgtttgtccagccggatccgtagttgaagttactgcgttgcaatctgttcctccatcactgttggatttgcagctgccagatctgttgtcaacgttgttaactgaatttgctatgttgtttgatcctccaacaggacttccaccttcacgtcattgtaatcatgctattcctctcattagtggggcttctccagtgaaggtacggccataccgttatcccccagccatcaaggacgaaattgaacgtcaagttactgtt

SEQ ID NO: 95451 - DNA, 959 bp, Zea Mays
cgagtgttcccctcgatcaatttcatagttcgagctctaaatcactctgtccatagagacagtgcaaactacgggtgaacagaagtgttcctagtgatctagcgcagtttagttcaattgaatgggtcgaggagcatcagtggcatgtaagagtgctaaaacaagagagcagaggacaagattggacctgaatcaagctagccacgacaaggaccttttcacggtggcggaaacccaatttgggggaaatgagcaattcgtggtctctggtgaacaattggaggcaagtgctggtgctttggatgggtaattaccctatggagctcatggcgtgctcaatttatagagactgggagcggtggtgtttaatttggaagaattgtgctggcggccgagaggggggaatgagttacggcgacgatctaccgtggcaactgcaaagcgactgaactacgacggtggatggtcactacggctcataccgacgcgataaacttcctaaggcgtggctccctcatggtgaatggcgaacacaccggtgacagccgctcggccatgtcgccggtgtgcactaatgaaccatcatgcacacagtacttccaagctcatccgaggcaagatctttcaccccgtgatcgttatccgcatttaattcgggcgtgaatcgcgtcgatagcatgaatccgcgcgcgtggtcaccgacggtgaggcacatgaacatggcgatctgatcctaacactgtaccatcgcaaatactattcagttgatctgacaggacgatttgtagtgcttcgttctccaaattttgcataacaacttgatcttcgtctagcagggaaattgttgccctataatccctttctaactttgttatggtgtccaccagcaaatagccacagaatcttactcaaaaccgagctccaagttcatccaacttcactgctaatgagaattcagt

SEQ ID NO: 95452 - DNA, 1198 bp, Zea Mays
tcgtcacctaggcatccagtatagttttcacgctgatcatcagcctcgccacgaccaattggggtatggcatccgccttgcgacaaaagaaattgcctaggcacaatttggtgctgtttaaggcacaagtgacctgatgcgaacaccgcacgagcttgggcgcaggggattaggtgtgggcacaagagaggagctgcatgcacggaaaatgggcgcaaatgtgggagatttgtgtgcgaaggagaccaactggatccgcgcacccacaggctccacaaggccataacccacctctccatacgccaattgacagggcatggaaacggaagagggtgcacacctggttcttggcattgcgccactagaatcttgccactctgcctcttctgttccatcaattaatgcctctttgacaatttgagcctcccttcctcttctccactggtttgcgaccctgatttgtgcctcctctggtcctccctcttctctgctggttcccatcttcttcagcccagcatcgcaagatcgtgggacaggtatgtaagcatctcttcctctcccttgggcttctctcctcttggatgtgcactgtctctgctctttacttggatatgctctgcagtcggcagtatgcagtctgcagtgctgcttctgtttctggatggatgtaaagttgtaaactgctctgtcttcatgtgtttgactgctagatgctcagagtttgtgattgtggtctattttgcactagtagcactgctcataaagttatattatgttaatagagactaatttattgctactgagagatgagagagctattttgctactttatgttgtgtgctagcactctagtagcactacttattatggtattatgctaaaaattagcaatataaggcacgattttcttctgaattttactggcattattgtattaagatgtccatatggagtcacctcaccatgcgccctaaatgcctggtggactcaaatgggcccattgttgcagctcgacttaccaccattaataaacatggacataccaaattacaaacaaaaacacagaaacaaccatccatgagacaataatgcagactatacagacatgagcatctaattactaatgccttgggtatcagacctttaggacatgtttggaagcaaggggaatgaagtggattagaggggctaaaatcgc

SEQ ID NO: 95453 - DNA, 273 bp, Zea Mays
cagataattcttaagttccagcagataaggattagctaaataatagctaggttgttagctagataatagcagggagttgttagctaaataatagcagggagttgttaagcaagtttatctcttattagttggtgccgaccctggtctataaaggggaagcagtagcgtgtaactaggcattgaaggaaatacaatctccctgtggagcgattacctcggtcaccctggccgacggtgatcttgctcctgcttcttcctctcactcttctccac

SEQ ID NO: 95454 - DNA, 581 bp, Zea Mays
atgtactctaaagtgtatgggggccacaaacctttcttgccgtccatttctttcaggaacatataactgtttgtctctagaataagcacttccttaggcttttcagtagatggtgaaaccattctatttttggtactattattgagactcgatccttgaggtgctgcctttttagacttgtgttacggtgattggtgccacagaatactgaagcttcttctgtctagtggcttcatcacatggaagcatgcacctaggttcatacatttggaaagtgcctcttcgtcgtcacaagaacacattgctatcaacaaggaggaataaccctagaacagtgagtttgaataggtgagaaatccttaaaataatagagctctaaatataaacacttaatgacaagagagactcgaagttcattcagtatgtgatgaaacagaccagagtttgccgaagtgcctagtgccatattgttaaaattaacctccaccaacatcaaacaaggtctgtttctttagcagccccacatttattcaaatccagggccacttgtgctgtttggaatgaataaactaagcagctgg

SEQ ID NO: 95455 - DNA, 461 bp, Zea Mays
aggtgcatccacctctccatgctcgcgctacactagatagtttggcttaaagccatatttgcaaatatgaatggagaggtcaaacttgtccagtcagattaggtttcgacacctagtgcacgggcatttcacctcacgaggctcgccagcaaatgtgtgcgccacgaatttgtcagcaaccttaacctatgcatcagagtgccctagggtgtcactgttgaaaccatcgtacatagcccttcttcgatcgtcacccattttcaaagctaatgggaaaatgcagatcataatcatgcatgacaaacatgtgtagtgttattaactaattcacaagtacaaaccctattaggaagaggataggtcctaaacccaccaaaaaatgccagtcgttgcgtgttatttggtctaactcatgtacctttcgctcgtgatttcagcaccataacccctatgttctccga

SEQ ID NO: 95456 - DNA, 472 bp, Zea Mays
tctatcgcatgcacatggagacacaagctaggatcgatcacgagctttgcgcctttgcccaccagctatgtaacacgatacacatgcacggtcacacttctcctcctcttctacaagcttgccactagaaaacgattgtgccctgccctgctgatttgggtggttctaagattagtggcaacggtgcccgctatcagtctcctcccctaatactgtaggtacgataggggatacagtgtcactctatcgctcgcatcgtcgcccccttcgtccacccctacggtgttgtgagcttctctctccctagatgaagagctaccctttgagtcccccaacggtggcttctcgcgtacgcaaccactcgcgcgcgcgggtggaaacatcatcttccgctcccgttggcttgggcggaagtgaggagtcacgtagaattcctgccatctcccgagcttgacaccgtcggaaggtcgat

SEQ ID NO: 95457 - DNA, 284 bp, Zea Mays
tatggatctatcatacgtactttgggatgcttggaacatataaatatgttgcattgttcttctaattttgctagacacatacggggtgacagcccccaatagtttcagtgtttcacgatgaacgttaacacgtactacatggatactaccttgctaacggtatttagcttgattggttatctttcgtctaaatggtgtgcatatggataccttgctaacatgggatacatttacttactatataacaaagccggttcgaaacggtgtatatgggcctatccacg

SEQ ID NO: 95458 - DNA, 606 bp, Zea Mays
tccaatctagtcgcctggattccccgtacctatagccgttgtcgggttcgctaatagccgcgtcatagggctgggggcggtagttcgccgccgcggataccgggtgcggtcaccgtcgaccttatttggggaatggagtgttctgggatgttcgtcttgatccctgctacgtgtagtgaccaccaattgggcaaacctcacgcgaattgggttgatgggggatcttgccggcgagctgtgccgtgcggtgggggcaccgccactacctgggcacgaagaaggacaaaggcgtcggaaccgtggatgtcgcgatgaatggtcgtgattagatggagagtagtgcaagtgtcagtcgtcggatcgcgatcgtgtggatcagatcggttatcgcgtaacccttcggcgggagtaatgataggcgtcgatctcagatcatgtggacgcagggtgatcccgattcattaaatcgcggttgaaattagatccggcgactgctatgccttaccagttcgggggcagcatagtctaatctgggctgtgtgtttcacatccgacagcccagaactcaccataccctttcgcttagctcatcttgcaaaagagtcc

SEQ ID NO: 95459 - DNA, 283 bp, Zea Mays
ctttatgtttggtgtaatgttgccataatatgtctgttgaattatttatctattctaatgatgcatgcttaactttaatgccaacttgttgaccaattaactatataataatggttgcatctgttggtgtttccgattttaattaccagttttcaaccattttcgatgtgtttccgatcgtttatatcgtttcccgtcattccgttaatcccggtttcgttttcccgatcggcattaccgtttccgatcctggtttcgtttttaaatatggatttgaaagtgg

SEQ ID NO: 95460 - DNA, 475 bp, Zea Mays
gacgagcggccaatattggcttggacttgcagtcgcatgttttttttctttccttcactgcaccagccacatggccccatgtgtcaggtttctatttcccttcctagtgttcagttcgatcggcagtcggcacatgctggtttcgcaggtgtggcagccgcccttcgtcctcacgtcgtgccacactgactcttcgcctcttcgtcccgtcgccacgatatgccgctccagtctatgcgcaacggttcttctcctcccccacatcaaagttcattctgcagtgatttctcataatcttggcaagcgttaccaccattaatagccttcaatctccttcaaactggctgtatttctcccttccctctccagctataaaagtcgaggtgcgctcacctccttctcctcgcccctgctcttttctccctgccgcaatctttctctccctctcgctcctccatgcacgcgcgtgctccac

SEQ ID NO: 95461 - DNA, 736 bp, Zea Mays
cataaagttcaccttggaaagatggattaaggtccaatgaggcccgaaggtgtggctttgctgttttcaagactcatctcgtgaaagtggtgactttaatttggtagtagggacaacaagcttcagttcaggaaagtttgggtaccctggcagagacgcagagtccgccagtaaagcaatctggtgtccatattcagccaaatatttatatgcacgattcataaaaagcaagacattttcgttcagattccatgccatgcgaagcttgacttcactttatgttacaagagctagactagatgtggttgactgatttttactgaagttcccttccaaacacggacagatacctgggatatggatgaaaccagacagtgagggttacagccagtgcattgaacggccgaagaatcaccgcagtaatttacccccgctcatcgtttgatttgcttcctttcatgttcagattcagctgcattttcttaatcaggacacgcttgcttcagggaaaaacaatgcatctgtcggttacctggtcgttgatgcaaacggtggcctaaaccagatgagaatgggagtacgtatacacttgtgctagtgtcgtggcaacgtctttcagctaactgtcattaattccttggcaactattcttacagataagtgatatggttgcagtggcgaagatcatgaacgcatcgctggtgatccctactctggatcatcagtcattctggac

SEQ ID NO: 95462 - DNA, 577 bp, Zea Mays
gtagcccctgccactgctcacatcgtcgccctgtttcgacctccattcacagatgggtagtggtgttctctagcagatttcactccagcagcgaagtttctatatgagctcatgaggtgtacgctgctaccgaggatgggctacaaagaggctaccactcatatccagctctagctactcggtgccttgatcactcactctgagtttgacgtggtcgacttccttatttgtgagattgaggatacagttttggatggtcttcggggttggcgtcagctgccttatgcacactatctctgccacatttttgcttagctgatctggcctcctcagttccaggccacccttgaggcctccagactacagtttggtttctaccgccgagctcttgaagacaaaactcttgttccagttaatccactggcaccagatatcagggttgaggacgagaccatcagacagtttgaggatcagggtgcagctgatgatacttcttctgacgatgatgaagatctggggattctaccaccacctcctatgctacctcgttcccatgatcacgaggctggtggctcca

SEQ ID NO: 95463 - DNA, 722 bp, Zea Mays
gacgtggaagacctgtctaagactgctaagctttaggtagtaggggctacttctactgcatttttctatcacaggatgtgtaccgtgtgtaggctctactgctgataggatcaggatcatgctctcagtgtccttccatcagaaatttgtctcagagactgtctttggttcaattaaaccgaaggaagatttaactatttagaatttgactaactaaattcgaaaattggagcctaccgaagcagaacggcatttaggaactaccaaatgccaccaaattcaggctgtcgattcagctagaaggttcgtgtgttttttaataaattcggccaaattttaactgcaatctacagttttttttctctccctgtgctcgcaagacacctgtgaggctgtgagtgcgacttctccgtgtcctgcgtcgaactacgcgtactcgaactggttggtgccatttttcttctttgtgagagaccgagagtgacatttttccttatgttcttacgcaactttttcaacagggtgagaaccaaccgtgttaattcggcaaatcttaatgaccttaattccacaacagcaccaacagtgaacagtcaatcgttgccctccaacggcagatcttaatgctaattccacaacagcaccagtgattgtgtgtctgggtgaagtatctgcggtttttagtggtggttgataactatttgctttcttcaggttattag

SEQ ID NO: 95464 - DNA, 296 bp, Zea Mays
ttcgtatttgcaagctaaatttagtaccacatcggccactcaactgtgtacacacctgtttataagttgcagtgcgtatacaacttgtgtagtcttggttggtcatggctgtgaccccacacagataactttttttggtaaaatttggtcatatacgcggagcgaaacagagaaggagaaggtatgggaatgggaaacgcggcacagaggtgtgggaatgggaaaacagagaagaggccacagttgtgggacccgcctgtcagacgatacagcagcagagaaggtatgggaatggg

SEQ ID NO: 95465 - DNA, 867 bp, Zea Mays
tcgcccgcttgtctctgggcacttgtggcatctgaacttgcacttgaggctgaggtgggggtggctgctgctgcacctgctgcattgctgctagggtctaaccaatttcttggattgcctgagtttgcatcatgaatatctgctcaactgtcatagggggtggtggtggcaactgctcctgcggagctgcctcctcctggggtgcctgttgttccggctaagcacgccttgcacctgtgtgcctattctcagacatctgtagaaagcacacacacatcagatctgactccgcagtctttcagcataagaaaatatatacggaaatcttcataacactgaacaaatgatcatcttcactggcagactctcagataaagaggaaagtggaaataaagggattacccaactaaataactgactttattaataactaaaccaagttgcaggggatacccacaccttcatgacaatctttacaaagacccaacttcattacatgttcatcacgacatgcataaaacaaatgataagcaaactacctctaactaagactgactaagactaaggtactgaattaatcattattacagactctgactctgtcgatctatggatccaaatctatccgggtcctgaagtcaggggtaccatagtcgaagcgaccacggggcggtgagcggtaagggtgctgaatcccgacaggggcgcgagaaccaccattcagatagtggcgtgttgcgcactcagcacacaattccgcaacctccgcccgaaccttacccaacacgtcaagggcgtggtccagctcgatgttgagcacggcggccaggtagaccatgttgttcagcctgggatttccttcaccaa

SEQ ID NO: 95466 - DNA, 273 bp, Zea Mays
gacatctctgaacaggctaagcatgaacaccatgaggggggcagttcatgttgttcctgatcgacttagaaactcgccgctcatctctcttcttcctaaagcaaaaatcggccagatgcccatccctctcacaatacctacaattgaacctcacctctctcttaggtggaatttgtttgtgggagggggctttctttttggatggttgagaggctctaggaaggggatcactagagatgttgggaagcgtatcaagtgtgttcctaaaatgat

SEQ ID NO: 95467 - DNA, 421 bp, Zea Mays
aagaattcaaattcgaaatggtaatttcaaatgaatttggaaaatagaaagcagaaaaaaagaaagaaaacaaatctgtgttgggcccaatcctcgcgctggcccatttccttctcatctgcgcaagcccactccttccccttttcttttctttcgcgctagctgacaggtgggacccccagcttagtctcttcaacgcgacgcggactcatctcttgtcgcctgaaccgtggggtcagctggtcagggtgttcttcctcctctatgacgaattccgccccgctccaccattgccatcgccgtgtagacccatgccgcatgcacctctgctcaacccaccgcgccctcaccaaccactgttgggtaggaccagagcgtcagctctttcccctccgctgaaaccaaacaaagccgaagcagc

SEQ ID NO: 95468 - DNA, 600 bp, Zea Mays
tttgttgttgacttgaacttgccggtttcccgctgagagccgaggctgaggctgtgggttcggcttcacgtccgagcccccccggggggggggggagtatcccataccatagtggttgtaacagggcttcgatatggggaaaagcctgtttatgagatgtgtcagcgcttctatgttggatgatgccgggatgtcctttgctgtagatgtcaaggtcggagccgagctcgggccaggcagaagtcttcccgaggtgatggctgaatccttcctaatgtgtgccatagtcgatggagttgcctcctacgggattcgcagtggagcaggtagccaagggcgaggcgaaaacagtgtctaaggtcgagctcagtgtcaggcgaggcggagttggcgcccaagggtcggtctgtcgtattagatgtcctatcaggggatggcaggcgcgtgcgtgcaaagtggcgcatgcgtaatcatgctgttggcattggacaagacagcggtcttgttgctgctgtgcacctatagcgccatgtagggtaggtatgtgcattgaatgcaggtgtcccccgttggccctcggtcacgccttgtcttcgtcgc

SEQ ID NO: 95469 - DNA, 534 bp, Zea Mays
atctctcctgaacgtggctttgaccacctccaagtgctagagacagccaggttccagcagtggtggatctaggaacgaattaaaggaggagctactaagggtgcatttggttcaactttctaaaccagattcgctgccaaaactctagaatctctgcagaatagattcctctagttcaattcaaaatcatctcctagcccagattttctagattcctgtgattcatgttattacttttgatctttaccaagggcactaatggctctatctttccaaagaggttcgagatgaacctcccaatgtaattgatcttgctaatcaggccatgtagctcaaccttgtaagtgggatggaccatcgtcattatagcgtccttgctcttatcttcgatttcaatcccccgctcgtgcaccatgaagctaaggaattggatcatggttagcctgaatgcacacttctaggggttcaacttcaaaccatggagcttgttcctctggagcacttggcgtagactatgtgagttgcttgaagagc

SEQ ID NO: 95470 - DNA, 354 bp, Zea Mays
gtttgagagtggcaagatgaggctcccatggatcatgcatatggagacagacttgctgaagcgcataagagatatctggtctagtaaaggtaatatattgaagagcgtccgctagattgtgaaattctgtagatttggtgcgccttccgctagatattgaagagcgtccagcatggagcagagcttgcagtcagccatgtcagcatgttcatggatctcaatcatatctaccattgagagagaaagagaccagagcctgtgtgctagatgtgcatccttagaaaatgatgaagagcacccaaatccttcatgcagaactcccgctaaagggcagcaataatacaccaaagtgtg

SEQ ID NO: 95471 - DNA, 286 bp, Zea Mays
gactcagcagccacgaataatggaggggaggacctgcggatatttttcagccgtacgtgtaggctgttttatttttaattctcttgttgccacgaataatgccttgtctgatgtggctgaggcaccttgccttgcctgcttgtcaaggtatatacgaggcaatgatacagcgctgactcaagttgcttctctaaaagagaagttagtgaaaggcacgcaataatgcacataaccatgcacagcgttgtcgctgctcgtatatattggcccatttgcacggtgggtg

SEQ ID NO: 95472 - DNA, 490 bp, Zea Mays
gtttgaccaggaaatcaataataagttcaaagaattaatcccttgtaataccaagtgagtttaggagtagttttgcaagtaaaatttgcaaatcataaaaattgctacaacttggtagcctaagaggattagttgagttaatcttaaatgattatctagataggaagtcttgatagctgataaacattgtgaaggaaagttgtattcaagacacttcttactaccttcttgttacaaacttgcatatccatgacatagcataagcattcaagtatgtattattttgtatagaacacgaagaagagtctatagtaaaagaagttgttcctctgactgagaatcctcccatggtaaaataacttttatttcgatatttgtggtgaagaagcagctactcctgcaacatatggcaagccccggtgcatttacctttccttgtattgtaaagttttatcaactatgaatgttgtattaggtgataggaaatgtg

SEQ ID NO: 95473 - DNA, 342 bp, Zea Mays
gaacgctagacctaggatgaaagaccttaggaatagtggggaaaacaggtggctaatgaggtaggccatatgggccagttttaaaattgtaaggatgccctaaaggcacccttctgatcggtgaggagacgttcttttcatcatgcatgcattataaaacatgaaggattagaaattaaaggaaagatgcatctaagcatgaatgtagccaatagggataatgataaataacataaggagtgaaatcaaatctaactcacctccttttaacaacccaggaacatgtttttcctttccactaccgtaacgtttacatctaatcctcttccacatatgacttca

SEQ ID NO: 95474 - DNA, 679 bp, Zea Mays
cgagtactgatttgttcggcgacaactctaaaatgcacttcaaccatttggtacggggagcctattttcataaaacacagaggccttgttacaccgaagcttaacttcgtagggctcatcactatattcttaaatttctccctgcccttgttgtcatctttcatgtaaaaccacttgttggtctagccagtcggccattttgtacgatacccttgcacaggggccttcgtatccttcctgtatgcaaaattgtagcacccgaagttcttatggagaccatctgctctggccttcgtctgatagtgcaactcattaactctgcagaaaccttcggaatttgcgctcatgccctggcttcgaagggcccaaatgtagacattaagactaactattgcattcagtgtcaagtggtgaagatatatctcaaaattttcagcacttcagcaatcatttcatgcatcgggaaccaaagcccttcacggaagaaactcttgaataccacgacttcgtcgtccttcggttctggaataacttcatcaccaacaaacctaaccaagtcagcatcattctttccattatacccaagtttctttattgttggggcgaaggtgcaaccccctcgctcgatcgactacacgacaaaaagcggaacatgtcggaaggtattcaagcgaagact

SEQ ID NO: 95475 - DNA, 356 bp, Zea Mays
tttcagtggactgtcattcaagccagcaaaacattaactgaaacttcccttggtcacaagcctaattactctgtagctcaacattacacaactcgtcatgctagctctgaaacagaatcttaatgactctgaaagcaacgcaccaagattctcacatggaaaaaataacaatacagaagttagtttcataatgtaaatctatctaatgatcctgccacgcacaccgtctgaactgagacactacgcctttttttgggcatgggaatcacaaggtgccgtttggtggacagaaaagactgaagtggaccaacatgtctgtaggttatagagcaattgcaatcaatctgtacagagaa

SEQ ID NO: 95476 - DNA, 444 bp, Zea Mays
tgtttttgtaaatatgtctcgatttgggcatagtgttgttgactgtgcgagcttcggactcttctcgtgtgtcgcgctgttgctgcgcttggtgatgcccttctggctactgattgtgaatcaaggttggagccataggtggtggtggtggtggctgagcccatgcagctggagagtgacttgccgaagcaactgatgctatgggttgctgactgcccacataccgaggaatgtatggagaacaacatgaagcagtgtgcaggacttgctttggttgattctgacgtgctttggctccaactatttctttttgcttctggatcttgacttggcacatcctttttgtatgtcccttatcctctccacagaatagacaaaataatcttttgggttgggaactgaaccttcctccgaagcttcttcctcctctacccttggagctgg

SEQ ID NO: 95477 - DNA, 297 bp, Zea Mays
cggggatagtggtttgggccttagagtgcggccctctcccgaggaggttgaggctttggttgcttcgcttggtggaatccctaatgacgagaggtaggttcactttgagatgcctactagcctgagcgacgcagaaataagtgtcatgctggatatgttggctgaggattcctctgactcggctcctgctaaaacactagctgtagaactcatcccagagtctggaaaaacattggacattcagagacctgatactattcgcccgaaacgtctccaccaagctagtcatccaacttc

SEQ ID NO: 95478 - DNA, 516 bp, Zea Mays
tataatagaatagagttatgctcttaccactatataatccaatagtttaaactttgcaaaagtcacacaaccaaatcaccccatactcattatcccactaaattcaccaaacatattgtactcaaacttaacacactatcaaaatcaatggtccagatagttggataactcatcttccttccccatgaactactttatttgaatcatcccttcccttcccttccccctctcctcacttgcgccaccgccatcatcgatcatctcctcgagatcgtgtgtaacttatgctatatagtagtcatatgaaagtttagggttgtttcacttaatttaggcactgttgaattcggagcgttgtttcgtggaagtacaggtgatgaggggaggggggaccgaccgggaaaataataataaaaaaacttgcgttaaatatagaatggtatgtatgttaaagatagaaagttagatataaagttgtatacgttaaagatagaaagttacatatatttatataat

SEQ ID NO: 95479 - DNA, 1165 bp, Zea Mays
tcccgaatgtccacccaaagctgaatcgtggagggctgatatgaccttattttgcagctgcacattagtgcccaaccaaatacgacctttatatcggataattccatcctttaaggtgaaatccgagttagctatttgtgaagtcaccgccagttgactcaacagctgttgagctgaatcatcttgttcatagccttgcacaacctcctgtatacagattggtgtgcagtgagacacatgaaacaattgtccctgggtatgaggatatcgtgagagagcatctgcagcagtgttctctgatcctttcttatagatgattctatattgtaaaccagctaacttgtaaatcaagaggtaacaatttggcattcaagaacgtgtgcgaagagccagaatcaattaacaccaacaattcctgattctgcaacattccctgcatccgaaatgtgctaggactatccagactgacccaagcagccatagataaaaccatcattatttgttgttcaggttcaaaaacttcttcagttatttcttctgaacccaatagttcccagacttcctcatttgcatgcaattgcaccgtagtagcacatctgtgaccatgagaccatttctctgcacatcgatcacataagccccttgctcttcgataacatttgagtgaagctacccgatcaagcatcgaagtgtgtcaagctgtatcagaagttgctttgtccattactgctgcctgaattggtatccgttctgtccgagctgtctctgcagatgctgatcccgatttccaaaccttgctggctgatggttcaaagcgtcgacgccgactggattccacagcctcctcctgcacaatagcgagagaacaagcagtatccaagttgtgtggtctctaaaccataacaactgttttgatttcgtccctagaccgtctacaaaacgcatcacataataaagtggatcggtatgggactcataagcagctaactcgtccaccagagatgtgaattgttccacatattcagagacagggccattctgcctgatatgaaaaagcttacgaatcagggactcatgttgttctcgtccgaaccgatcatgaactaatccacaaaattcctcccaaccgaactggcgcaaccgcttttctaccgactgcaaccag

SEQ ID NO: 95480 - DNA, 475 bp, Zea Mays
cttacccttgtcacatctatatgttaccatgaagcttatattatatctgtcttctaaaaccttctctcttccttctcaattttagagttgtattttacctattttctcttggtcgtatcctcttcctcgtcgcttgcgagtttccaactccattctttgttgtgcttctgtttactgttgcctttacctttcccacctctcgaccataccttggtgattacgttatgtctgttatctaaaatctccaatctcttatcccaatttgagagtagtgttttacttatctcacccttggcaacatcctcttctttaccgcgtgtaagcctggacgtaactccattctttgttgtactcataccactggatcttcattgccttcatcttttctctcatatccttgtctgttattgcctttgacccttgcgatattgaggtcttctacctaaatgcttaccctgaatttatcctttaaaag

SEQ ID NO: 95481 - DNA, 610 bp, Zea Mays
aaaggttacatgagctgacacataaaactgaaaggtatacctttcataaaactgacaaaaggacacatgtttagccgtataccgtattacatgagctgggaattacacaaaaaatcgacattttaaaactgacaattacgcaaagatcaagccaagcggcaacatgtcccatggttttgttcaacactgacaattacacaagattgacatgataaaattgcacaagtgaatctgaaattacaccaatatgaaattacacgtctaaaattacaccaatatgcttcagtaaattgctaaactaagataaaagaaaactagaaatcaaacgtaatttcatataatccatctcctcacagaattagttgtcactggagcatcctagccacaaataagataaaagaaaaatggcagttgtgtattccgcatacgtctaaaatcacagctgaaacattcatattagccaaacagaactattacacagaactattgtgtaatgaactattgtctaaaataagataataaaccaaacagaactattacacagaactattgtgtaatgaagtagaatgcatagaaacattcatagataaaagaaaactggaaatcaaac

SEQ ID NO: 95482 - DNA, 1080 bp, Zea Mays
atgggatcagtagagtgagcaaagactgggggatagcccctcatgaactctgcccgcttgtctctgggcacttgaggcatctggacttgcactagaggttgaggcggtggtggctgctgctgcacctgctgcatggctgctaaggtctgaccaattgcttggactgcttgggtctgcatcaagaacatcttctcgatagtcatcaggggtggtggtggcaaatgctgttgcggggcttcttcctcttggggtgcctgctgttcaggctgagcacgcctcgcacctctgcgcctattcttagacatatttagaaatcacacacatatatcaaatatgactctacagtctttcagcataagaaaagatgtatagaagatcttcatagaactgaacaattgaccaacttcactgacagcttctcagataaagaggaaagtggaaacaaatggattacccaactaaataactaactttattaataactacaccaagttgtaggggatacccacaccttggtgacaatcattacaaagatccaacttcagtacatgtccatcataataagcatccaactaaaataagcaaactaactctaactaagactgaatggactaagacactgaactaagcattattacagactccaactctatagatctaaggatccaaatctatccgggtcctgcaatctagggtaccatagtcgaagcgaccatggggcggtgaacggtaagggtgctgaatcccgacaggggcaggagaaccaccatccaaatagtggcgtgctgcgcacttagcacgcaattccgcaacttctgccctaaccttgcccaactcgtcgagggcgtggtccaactctgtgttgagcacgacaaacatgttgaccatgttgttcagcctgggattgccctcaccaactggcgaggcaatcacacctccaacactgccggccgaacagcgtgggtagtactttaggtcgaggccatcaggtaccccgctgaacaacgagcaatactgagaaagtgcccgtcgtgctacatattacatggctgtcttggcagtatccctctcagtaataga

SEQ ID NO: 95483 - DNA, 350 bp, Zea Mays
gaaggcatttcttaagttgggatacgtggaatacattatgtatgaccgaaagatgtttggacagcttcactttgtaagctatgggtccacactgtgctagtatttcaaaaggaccaacatatcgtggtgccagctttcccttgatgccaaaacgatttactcctttcataggtgaaacctttagatatacaaaatcgccaacttggaaaaacaagggtcatcttcgcttgtctgcataatgtttgtgacgatgttgtgcaatcttcaaacggtgttgaataagtttcactttctcttctgcctcttttactaaatctggcccaaagaaaaaccattcaccggaccctgac

SEQ ID NO: 95484 - DNA, 447 bp, Zea Mays
gggctttggacccctaaaatccgggtgtgacaatatgtgaactatgtcatggggacgacgagcaatctcatgacagatcttcgtaagggtgttgaaaggatgtttgattcaaatactgctgcaatagcactccaagagtatgacttcttcaagaggaagattggagacttctcgagtgatcttgcaaggagaatggccgttgaccgtgggacttctccttcgagttggtggtccatgtttggatcaaatacgccaacacttcaatgtgttgctaagcggctgctatcacagtgtgtctcgtcgagtgggtgtgagcgcaactggagtactttcgcattcatccacacaaagctccgcaacaaacttggctacttgaaattgcatgagcttgtgttcattaactacaaccttcatcttcgcatccaacgagcaactagtacaccagag

SEQ ID NO: 95485 - DNA, 906 bp, Zea Mays
cggacggcagagaagtggctccggtgagcctataccggccggaaaatgcaatgaccggcgctcaggtgtggccaacacctaattccaccctcaataacactaatccctcgagcaattgcaaagttctagctcaaaaactctctatccacggcgatggcgcacaccgaggacaatctgaggtgttcccggtgatccaacacgagctagttcaattggctgggccgataagcatctatagcacagaggggtgttgaaacgagagcgaggagggcgtgaacggacctgcggagagctagccacggcgcagcgttcacggtggcgcagaaacccgatttgggggaagagagaaattgggagactatggtggctaatcggaggcaggagcgggggctctagcttcgtgattacctaatggagctagcggtatgctcaatttatagtgtccaagggcggtggctcctaattttggaatggcgtgttggaggccggagagaaggaaggttactagcgcaggtgatatcgtggctctcaccgtggcaaggcctctggcgatggatgggcttgcaacataggtttactgcgacgtgttaaacctctcaggcatgtggcacacgatcggtaagcggccaacgccggcgaggaccatttcggccaaccgcagccctagtgggtacggcgaactcaccatcgaccgggtccgagcttatctggtgccaagatctttactccgccacgattatcttcacgccagagagcacgaatcgtaacaccggcacggatcacagcgcgagggtcaccggcggtgatgggtgatgtacctgaagatcttcttcagttcacagctcaatgggaaaccccattcaaagtgtttgacagatcattttgctaggctttgatctctgattt

SEQ ID NO: 95486 - DNA, 490 bp, Zea Mays
ctaactcaggtgtaagcaggagactttttgagagtcgagactataattgagaccctaccccttagttaccctcgttcggattggggagaggacatgctcaacaaggcatattagagacatttctcctagtttgtctcacctttttgccttgaatgctcgcaattgtttggttcccacttgtttgaacccaacatttggtgcccactatgaccgctctaaaaaccaagcccacgatgcctcctaagaagaacacctaatcgtagcttggccccaagtctgcaatgacgaaggcagtatccatcgacaatgcaggaaaagtgaaagtggccttggccaatcaaactccatcagcccatgcaaaggtagcccccatcatccctaacaagccaacaagagtgaggtcccctttcccccaccacaaagagccatccatcgaccccattctgaagtggagtttccacaccaacagctcagagacccctcgccacac

SEQ ID NO: 95487 - DNA, 667 bp, Zea Mays
cactcacacatagtcgtagtgggaggatcccagatgcaaggattggacttaaactcagtgaacaactatgtaggcaatcccttggtcatgatgttcgcatactggtgcgaagacgggacgcgaagcacctaaacatgtcccaaagccaccttctagacaaattgtatgtcaatctcgatgtgcttggtgcatcggtgatgaattggattggctgtcgcgtacacaacactgacattatcataatagataatggacacactagcaaacgggacgtgaagctcatagacaagctaccagagccaacaacactcggccacaacatgggcgacatcacattactctgccttagttctggagtaggagacaatggtctatcacttggacgaccaggagactaagttctcgttgaaatagacacaatatccgcctagagtctgggcgtcctatccaatcagcatctgagtatgtcatcaacaagttgatgggaactgatgtcgatgtggagaccaaaggaggggctcacagggatcatgcatgaagagaatcttgcttaatcatgtatgagaagtcagggcaggtcagcatcaggtactgatgggcactagcgagactcatgtaatcagaggcatcgacaatgagagcaccatctgaagcagagagcttggcc

SEQ ID NO: 95488 - DNA, 393 bp, Zea Mays
tatctgtatcgaggcctagctgattcaacccgggtgaccaacagaagaattcctgctgtggacttggtgagctggctcgagatgatactcagaggcaaggttcgaacatcagtgctcctgttgcatactcggcctggaatctgcctccttccaaggcctttaccagttttgtgtcaaatcctcctggtggtgatagcggtttgggccttagagtgtgaccctctcccgaagaagttagtgctttggttgcctcacttgaagaaattcttgacgatgagaggcaggttcattttgaggtgcctttgaatccaagtgacgcggagataagtgccatgctggatatgttagctgaggattcttctgatgccgctcctgctgaaacactagtggtgg

SEQ ID NO: 95489 - DNA, 430 bp, Zea Mays
gtctgaccttcatagccgaactgttcgcggatgtcctggactgtccgaccttactgcccagatcgtccggcgtacacacgacatgtgatagtgatcgggtgtcctatcgtgcttgccccggtgccttcggtctttcatttgtccagagccttccgagtaaccaccctgtgacatatatggcgtgcgaggatcaccaatgatgatatttttacctttgcctttatcggccacacatggccgaaccaagacttttttgctcaccggctaatgtgctgataaggacgggtagcttgtcgatcttcatctcttgaaatctcaaccgaccttcatttatagtcgattgtattttccgacagaagacattacaatcattggtattatgaagaaaagagtcatgccatttacattacacataccctttcaatttttc

SEQ ID NO: 95490 - DNA, 1019 bp, Zea Mays
gttggatggagaagaagaagaagaagggtagaacacggcacaaggacaaagaagagacatttggcgactgggataaggtattcggttcttcgttattcactttagtgttcagaagtcacatataatgtagtgctaagactcctattacatggcccaagtaggcccatggtatttcgtattgggattcttttcccacctcggcttgttcacttaagctcccgccacccgcatctgtttgtcatgcttcagaacgcccttgtcatcctgattcagagcaccgacatcatcaacttcttcagtaggcaccgccacttcgtccacataccccctccttggacagttgtttgcccccaagcgggcgcttctggaacctggaatggagagcctcaacaccatcccaagtggctaatgctacatccgtacctgaccaaagcactttaacctatgaaacaagctcaccttcatgttcaatcattcgacgttgcactatcttgtgggggcacttgaaccggtgtagtatcctcgggtagagagtgaaccaagacttgattctgacccaccgctttcttcaattgcgatatgtgtatgactagatgagtggaactggaaggtggcaattgtaaacgataagctattgatcccactttatccacaattttatatggtccaaagaatttgaatgccagcttttgattatcacgtgtagccaccgaggactgaatatagggttgtaacttcaaatacacccagtcacctataacgaaatgcatctttgcacggtgcttatcagcctgcttcttcattctaccttgtgcacgagtcagatgccacttgatcactcgagttatcagctctctttcctttaaccattgctccaactctagctgaggtactactgcctctaaacatatcccaaaatgtctgggagcatacccatacaaaacttcgaatggagaatgaccaattgttgagtggaaagaagtgttataccaatactctgcaactgacagccatttgga

SEQ ID NO: 95491 - DNA, 359 bp, Zea Mays
gctactatgaatggtccttcccatagaggtgacaacttatgtcgtccctcccccgttagaatttggcggaggacgagatctcccactgcaaaggatcgacatcgcatggccttatcgtggtaacgcctcaaagtttgctggtaccgcgctgattgaattactgtgtttagtcgttcttcttcgagtatatcaatatcctctagcctagtagcctcggcttctgctatgctttcaaagaccaaccttggcgccccaaacttgaggtcagcaggtagtactgcctctgacccatagaccatgaagaaaggagtatttccatgcagagctcgactaggttgagttcttaggctccaaacgac

SEQ ID NO: 95492 - DNA, 465 bp, Zea Mays
gccctccactttctaattcttcacatcacgtgatccctaacggtggacggccacggaccgagctccggcgagctcgtactggccagaaagggcaacgactagggctctagcttggcggacacttaatttaactcctaaccaccattccccctcaactaatttcaagattcaaggcctcattctccctgcccacggtgacagcgtgatcaacggataacaagaagtgttcccgacgatcttatgggtcctagattaattggatgggtcagggagtatcaagagcacctaaggatactgaaacgaggaaccagaggacatgaacggacctgtagcacgctggccacggcgaggtcacttcgcgcggtgctctggaccgatttgggggaagtttcaaattggcgagctctggtggatgatttgaggcacgagttgatggattgggtgcttgactacctagcgaagccg

SEQ ID NO: 95493 - DNA, 286 bp, Zea Mays
tttggggcaccaaggttaatctttgaaaacatagcagaagatgaagctactagactggaggacgtcgatatactagaagaagaacgattgaatacagtgattcagtcggcccgatatcagcaaactctgaggcgctatcatgacaaggccataaggcatcgatccttcacagtgggagacctcgtcctccgccgaattctaacgggggagggacggcacaaactgtcgcctctatgggaaggaccattcatggtagcggaagtcactcggcctggatcatatcgtc

SEQ ID NO: 95494 - DNA, 277 bp, Zea Mays
gtggttagcaaatcctgttcttgtactcaaaaagaataaagtggattggcgcatgtgcgtcgactatacggatctcaacaaacactgtccgaaggatcccttcggacttcctagaatagatcaggtggtagattcaactgccagatgttctatactgtcattcttggactgctactcaagataccatcaaatcagcttggcaaaagaagacgaggaaaaaacagcattcattaccccgtttggagctttctgctatacctccatgccgttcggcctc

SEQ ID NO: 95495 - DNA, 531 bp, Zea Mays
atcatgtgtaacctgcatcgtggagcctagttatactggtatacgacaaccaatcatcactaaaattgttcgcgctagcttttcgaaactttttttaacgagttacctataagagtttcccttgttatcaataatggttatggaagaataaacctttgttttggtgtattttggtgtgtcattacgagtggttatagattattccactctttttagtagaggtattgtttcttctcaatctaggaaaggccaaagttatcattatagttttagttgttttttactggcaagtgtatagcatacacaggaaaattaaatgttggtagaaagatgttggagcaataatgtattaggtggaaattagaactgtgttgttggtagctaaaattgctcgggcgaaggatgcagcgataggaacctatagaatagattatgttgacatagttataccacgatatatcaatataattcagacacccaccatggaagggttttttgttcaggcgtattttattctattgtcactttttc

SEQ ID NO: 95496 - DNA, 377 bp, Zea Mays
ttcagccactaccctgaattctaccttggccagctggcatgctgaccctagctgcatgttgcacaggggtctggtcattccgaagcttaaagtcaacgggcacatgaccatcgtcatcagttttcccctcttcttctcatcggccttgatataaaaccattcacctttccagccggttggccatttggtgcggtagctaagaactggagccttcgtatccttgcgatatacaaaattgtagcaaccaaaattttcatgcagaccgtctgccctggccttcgtttggtaatgcaactcatgcactcggcagaatacttcggcatctgggctcatcccttggcttcggagggcccaaatgaagacaataagcctaacaa

SEQ ID NO: 95497 - DNA, 522 bp, Zea Mays
aacttgtttgaaatttttgcctagtgaatgcactctaggtgtatcaaacatatgcaatgctaatgcttatgatgccatgctcaagttttagttatagtaacaccaggggtgttacactgcgcgcggacatgtgcgtcgccgagtcggtagttgattcagcctggtcctcagtcctccgctgcggggagccatggttctggttgtagtcttcatggcacctcatctcttcttcgtgtcatcgggcgcgtgaggagtcaatgtcacttcacgcagcgtgtcagtcgttgagacaatgacgtagatctcctttcaagtgagctagcgggaggagatggttggccgctcgggtgacaatgtgcttgtacccttccccttcgtgcgttggctgcagctcacacgcaaggagagcgctcccccgacttggcttaagggtttggattgcctggatgaactcgggctgcaggttgcgagggatgggcaaatgatcgcgtaggggccgtgagtggtgccctgctagctcgc

SEQ ID NO: 95498 - DNA, 651 bp, Zea Mays
tccagtgttgtcacaacgaagaagtgtaggcgagtcacaagaaacgcctagatcagccaagagccaacgaatccagataatctcagcagtagtagtagcgagggctcgaagttctgcttcagtactagatctggatacaacaacttgcttcttggatttccaagcaacaggggatgatccaagaagaatacaataatcagtaatggagcgacgatctgtaggatcactggcctaggtagcatcagagtaagcatgaagctgaagtggggaatttgagtcataaaataaacattgtgtttttgtcccccgtaaatatctaagcacacgaagtaagtgcccataatgaactgatgtaggagcagagacaaactgactcaagatctgaaccgcatgagcaataactggcctggtcacagtaaggtaaactaagctgccaacaagatgtctatatcaagatggatcctccaaaggtgtcccatcagtcggacgaagagataagtgaagatccataggcgtcaggcgtggcaacagtgcgagtatcactaagaccagaacgatcaagaaggtcttgtatgtacttggcctgagaaagataaataccattttgagtctgcaaaacctcaatgcccaaaaaataactgagtgccccca

SEQ ID NO: 95499 - DNA, 366 bp, Zea Mays
aaaatgggcccagctgttgctggcttggacggtccgcgctcacgtgcggacggtccggtcatgtgcatatcggttaatttattgccgatgtgcttaggaggttgtggttgcctagggcatgtgtctatcggcataccataaaggggttgtaattggtcgtgacaacttgtagctgatgaattacgcgtgttttcccccaattcaacctcgtgcgaaggaaaatttgcaacagtagatttatcgaacgcatgtactagcctcctataatcattttgcataccccctatgatattttgcatttgttctcgttgttcatctacataatttttaaaagattgtagctcgtttgtgttgcttacctcgagg

SEQ ID NO: 95500 - DNA, 446 bp, Zea Mays
gcgatgaggtgttctgtgcattatacacatgtagggttccaacacttgccacttagttgtcttatcaaggcattctgtactatgacttgtggatctccacaaactgcttatcttttaatactaactatgtgttgctgttgagttacatgtttgttgtcaaactatgaacccttagagttagaggcagtgttggtgaaagagtttgcactcaccggatgagagatattatgatagtctcggggcaccttgcatctgccaattgcattagctaacaaggtcaatcgagcttcttctatagaagtattatctatgccctggtggccgatggatttcgtaagttgacttaccaaattaacttgtggcgtgctattaattttcaagaatagttatctcaactggagggttcatgtaactttgttcctgtggttttgtaaatggtagttgaa

SEQ ID NO: 95501 - DNA, 532 bp, Zea Mays
tggaagcatatggataagcgggagattatcgaggatggtataaaaagttatattgctatatgtcactattgtaaaaatgagttgagtgcagattctgctggtggcactgggcatttgaatcgacacttcaaagcttgtttaaaaaaggcagggcaaacttttggtgcaggtatgcaaactcaactaaactttgctgcggacggcattgtaagtacttgggtttacaatccacaattagctcgtgaagaaattattgctcagtatcagaaacaacttgttgttcttaaagaaaattttaaaaaagttcagttttcgtttgctttaacttcagatatttggacttcatcacatcaaaagactagttacatttctgttgttgcacactatttggataattcatattgtcttcataagagtgttataggttttagagtgatgtatgattcacatactagtactgcaattgctaatcatattcttgaggtggttaatgattttaacataaggaataagattatgtctattactcttg

SEQ ID NO: 95502 - DNA, 460 bp, Zea Mays
tggaggtgcattaccatcccggcaaggccaatgttgtggcagatgccttgagcagaaaggcccagtgcaattgtatgagcatggatgcgagagttaccaccctgtgtgatgaattgtgcaagctgaacctggaagttgtttcttcaggtgatttaaattatatctcggtggagcccacattacaagagcaaatagtcaaggcccagattgaagacaagggtgttcaggttatcaaggaaatgatcaagcagaaggcagagaaatacaagtgcttccgtcaggacagcaagagaattctatggtttggagatcgactggttgttcccaaggaccctgagctcagaaagaagatattgaatgaagctcacctttcaaaattctccatgcacctaggcagcaacatgatgtatcacgatctcagatccttatactggtggaccagaatgaaaagggaaattgc

SEQ ID NO: 95503 - DNA, 598 bp, Zea Mays
ctgagatcgcttacaatgtatttcattcttcacaaggctcttttatagcttctctctgtgtgtttggcacaatgtgttaatccagctaggtgaagtaacacttataattttgagactgtttgtcataaccagatttgttttcttcctgtagcaggcggctatacctatctctaccatcatgaagagagagagagagagagagagaggaattctattgagagcttaatgattgttatcaaagaaatcgggtttgtctaagtgctgaaagtgcaaactctgatttccatcagctcttgaccatgtcaccaaggttccattgttatagcgctaccaggcggccttccttctccttttgtgcaacacatcgttgccatgtttgaggatgatcttggctgctgctgcaaattgattctagaactagaacaacttgcccaaatgaaggatggcaaggcctttgctgaatcattggactgtctgtcaaatgttatgtgtaatgttcatgactatctaatccatgtggcattaaggtaaatcttacacataatggataataaccatcacagctactccagaacttaacacggcatgcatttttttt

SEQ ID NO: 95504 - DNA, 596 bp, Zea Mays
agcaaatccatggtttcctcagagactcaggggatagactcaccaagtttgtcgcacgtcctcgatagtagaagaacctctggggagcacttgggctccaccaaaggctcgggggctactgttgagatcgaatatcatatgtatagaatagactagggtaatcctagaacagatccactcctcgcttcaccgaaccttgagtctctcgaggggtcaagacgtaaaagcaccctccaaaaaggttcgctttgcctgatcctgtggttggaatgggccacacccaagttccctagtctagagccttcaaagttgtactagagaccattttgaaaatgagtatgtgtggatcatactctagtacaaaaggagatatgcctgaacaaaggtgttgcctatcacaacacgagcactagaaccagaccaaccactccatcgtcaaaaagtcaacaaagaatgacaggtaaaccagatgtgagataagacgacacctaacgatggttgtagtgttgccatagaaccttagaagaaggaagagtcatctatcggagttcacccgtcagcaagaacatcgaaggacatgaagcatatgataatgc

SEQ ID NO: 95505 - DNA, 410 bp, Zea Mays
agtctactttatattgtccatctacttcatacgaatgtgatattgattaccaaaacaagcacatactgcatcgcagagaagagaccaagagccgaacctgccccctaagctcaactgatggcaaccaagtagcacaaccccttcaaagttcagcgcagcaaaatcttggcttcagagtatcgctgatggtgtacacttcaaagtagatcttgcagtggccgttccacaagcgaggatcatcaccactgcaattggggaaatgcaatttgggcatcagaaaacgtgatgaatgagaatacagtctgaaatggaaatccatgcgtagaggatttggtgttaaataccgtctctaatacagctagaaatagagatatttctagaaacatcaattctagaaaacgaattccaac

SEQ ID NO: 95506 - DNA, 328 bp, Zea Mays
tcggacctcatatcacgcaacatttataatttactatctcaaatacaaccatatcacgacatgtacttgggacacttcggttcaacttacgccatcactactacaacgcacttcggcacatatgtttgataacacacctttctaaattaacctatctcatcttccaaacaccaattatatgtcacgtttacatttttcacctaatttaacctacaccaacgatgaatacataaatataattatcctagaccaactcattagccgagtgtggaagtcaccgagcatgctttagaatttaccaaatttttgccgtactaacatattttag

SEQ ID NO: 95507 - DNA, 513 bp, Zea Mays
agaggcaaccagtgatgagcaactacttggagcctacttgaaggcagaggacaaggccatgactgttgccttcggcgctcgagtgaaaagaagactgaatagggtttttgatgtaattgggtttgtttatcctaattagtgttttcctacccgaaggcaaggaggaaaaaggaaagttgcaactttgaccttttctggtgcgctgaagccaaagacggccaaggtcctgacacgtaggccgaagcctattgggatgaccgtggtgccgatgcttattgaaagtgccgaggctggcccctcaggtacataatcagctcctaccatgtcaaccgagggtagtgtaaatccggtaaaagtgcatgaatcagaaaagatagcagaacaaccaaaggtgctgagccctccaactgtaacagggttgtcgaagctatcaactactacaacagcgactccaaggaagagaagaatggctagcgttttagatgttgttctagaatccgtgaaagcgccaac

SEQ ID NO: 95508 - DNA, 561 bp, Zea Mays
ctgctgctgtaggtgcgagccgtagctactggcctgccgtagctactgtaggcggcgacactgctgtaggtgcgcccgcgacaattgcattcttacaattgcctctgattattgacaacgctctgcagatcagtttcctcttgcaatataacaaagttcaatcctggtagatgcacgaaaagacactccgcagaggaaatttaccatgaaactcaaacccgaacagcctccatgtatcctcacagcaagaaagatatctagatttcatatattcagcaatttcatcgataccatcagagctagtcttttcttgatctactgtaccgtcaccctttgtagattctgaagcagatgactcacgattcttgaacctcattctatgcacagtcaaatcctttgttgacatacttaatagacacttgatcagataggtttggttacaggcctcaacatcaatatgtgcctggcatttcttgagcacagtgcacagatagactatgtggcacaacccatagactatctacttgtacattccctttccaggcaagaataccatttttc

SEQ ID NO: 95509 - DNA, 833 bp, Zea Mays
ggaatatagaaacttcgaatggcttatggcaaaaaattattgccagtaaatatattaagggaaaaccccttattttgattaagcaaaaacaaggtgattctcatttctggaaaaaaaattctgagtatgcgtgataatttttacaaattttgtaaatctgttgtggataatggtctgaagactagtttttggaaaagtatatggattggtaatctgtctttgtctgttcagtttcttgttctttttgacttggcttatgacaaagatataacggttaatgttgcattaacatctaattttgaggctctcacttttagaagaaggattgttggtaatttgagggtcttattggatgagctggtgagttgttgtaaacatgtgattttgtctgaccaggaggcaggaggacaaaaatgtgtggaatctgggaaaaaaggcttctctgttaattctatttacaaaaagaaaatggaagatcaagttttgattccatataagtttttgtggaaatctaaattgcctcagaaaatcaagattttcttttggttggttgtgagaaataaaattcttactaaggacaacctgaagaaaaggaactggaatggttctttggaatgttgtttctgtggagttgatgaatctattgatcatttgttctttcattgccccattgcgaaatatatgtggagagtgattcaagtggccttgaatttgagactgattccgagtagcatcagccaaccttttataacaactggttatgtaaaccaaaagacaaaactgctaatctggttttgtttggttgtggagctttattctgggctatttggcgc

SEQ ID NO: 95510 - DNA, 469 bp, Zea Mays
cgcggcaaacattaacctccttactgtcgggcagacagtagaggaagtcgtcttcgtcatttcctctgtataccaaggaccctcgggggtatttcaagtccttggcatagtgttgcacttcggcaatttgttccaatgttaactgctagtgtgtcgaacaatgtattccaaatcaccatggagaggtgcttcaggagaaggagatgtagaattttcaggaagactctcttccatcagtcttactggcgcagctctcgaaggtccggcttcggtgagagcagtagtcgcgcttgcagtagtcacttctcttgcatcttcagattttttgctagatgcttcagaagaagcgagagttggcactttcatggattctaaaacaacatctaaaacaatagccattcttctcttccttggagtcgctgctgcagtagtcgatagcatcgacatccctgttatagctggagggctc

SEQ ID NO: 95511 - DNA, 527 bp, Zea Mays
cgttaatcgtgtgctctacgactaatcgtagatagatggatttgcccaatccaaagggttcttggggatctttttagggaatcctgctcctgcctagttgtgtgattgtgtccattgatgatttggttaaatcatagggttactgggattaactgagcgtgcttgctgtttcaataaattgttgtagatatccatcactcttagttatcatgctgctgcactcgttctacgacgctgcagatgctgtacattttttgtttggcgattccaaaacgatgtacattcttgtaccgttgcacgtgttgatgaatatgtatactgatgcgcagaggatcctcccctgcccaggatggtcatgccgcgaaattgcagtccaagagcggcgccgtgcatgcgtccgacagaacttgcggaaacaacaacgcgcaagtcgcagtccgacaggtacgtgggacgattgcgcaaatattttaggtctcacctcccgtagccctaggctatggcctccggcgtcacgtaaggaggag

SEQ ID NO: 95512 - DNA, 721 bp, Zea Mays
ctcaatttggtcacggcgtgctggcgaccagagatagagaagaacacgggtggctgtgaccgtggcgttcaccggtgcaacggctcaaggattatactcctaagggtgccacgattactatcgcatagtaacaagctacggcgtagcgcaaccaaggtcactggagcttccatggcgactctggcggtccggccacgtcgcaacgactacaggcacggtgataaacatcaatccgcgatcaaatccattccccgtcagatcttttaccttcctgtggatatcctctgcatgccaagcacgaatcacggtgaccagcgcaaatccggacgcgcagatcgccggtggcgagcttactgagctggcaatccgatccagtcactgtaccattagaacctctattcagtcagcctgacagatcaagtgtggtctggattttctcctgattctacatggcaacaaggccatcattctatagcaaagttgtagcctaatgatccagctaaaatcttactatacagcaaccatagccaattactgactggattataatcgaatccaagctcaaagatggctcaaactcactatcagtctgaattcagacttaagacagcctgacagatcaactttgagtccaattttcttaaaacttttcatagtaccaagacttgatctctatagcaaaattgttccccttttgtatctctacaaacttgatgtggtg

SEQ ID NO: 95513 - DNA, 432 bp, Zea Mays
ggcagcccgcaagcccctagtgggaattctatgagtccggcggcaatgttagccgcgatgcaggccatgcagcatgagttggccattctgaggcaggctattcctgttgctcctgcgggtgctgctcagggtgctagtggtggaggagtgcccgagggcgctgttcccgcgggtgctgcttcaggtggcggggctgaggagcctcttcccgtcagtggtctttctctgatgcagtggatgggcatgaagttggatgcttttgatggcagtggtactccggtcgaggcggcagattggctaacttacgtggaggataagatgaatgtcttcgagattgtgtatggggatcgtgttcactttggcacacagctgctaaagggagaggctcaaatttggtggagaggcgtgcaggcagctcactcctcttcacca

SEQ ID NO: 95514 - DNA, 496 bp, Zea Mays
actagaaaaacaaatacatgactcttggttaaggaccgatcctggctcagcactccgagcgatagaaacgacaatgtatctccggtgtatgatggggcagcatgtccaccgattcattgccacaagcgatggttttcctcgtcaaatcctctcaccgatttatcaactataattcaatgcaaacaatcaggatgcattcgaatgcaagcatcatcgtggcatgcgagagcgcgacgacccgatgaattgggcacacggcgtcgacggtgacaaagctatagaagggcatttgggtcatatccactcacggggtccactcgtcagtcgtaaaaaaacaggtaagacatttttacaaagccaaatgattggagctacccatttttgagtttaacgagacgctgcctatttcggagagcggtaaagaagagtgtgacaaattcctcttacgtccaacgtggttgcactgccaggtggatgtgtgcagtgtgattgtaag

SEQ ID NO: 95515 - DNA, 356 bp, Zea Mays
gacgaacatcttatgtagtaggaaacgaagtccagctttcatgaagcttctgaaaactaccacctcattagcttcgggaagaggaacggtattctcccctccgaccctcataatagaaatatcacacaagtatctgcctttcatcgctttgatctgcccttacttaacagatgactttccaaaaacaacatgactaggcctccacgaccgatcttcaacttcctcattcccgctctcaacatcgaaactctcattgtcgctggaattctcagacaacctagccaacatctcattggtgatttttttatattggtcttttccatagcttcgtaaaaaccagtcattgcagggtcagt

SEQ ID NO: 95516 - DNA, 292 bp, Zea Mays
gcaacccacggacatgccagacgttcctagagagctggtcgagcacaaactgaaggtgtatcctcaagcaaagctgcaccactttacacttgacaaaaagacgacatacaggctaagttagctctcctagtagtagtaggtttcattagagaagtaatgcatcccgagtggcctgtgaacccagttcttgtacacaaaaagaataaagttgatttgtgcatatgcgtcgactctatggatctcaacaaacactgctctaagaacccctttgggctccctagaatagatcaag

SEQ ID NO: 95517 - DNA, 352 bp, Zea Mays
agagaaacgtaccaatatcgtgagaacgaagtagtggaagctggggggggggggggaagcagcacaaacgtttaaggatagaatgctaagcgagaggccttgggaagaagatgcagacttcatgtggctaaagatggcaacatgtgttcaaaagttggtttcagaagtgtttggtgtgagtagaggaggcaaacaggaagcggaagacacctgttggtggaatgataggtgcaaagggctattaaggaaaatgagtgtttcaagcgtgtaaggaaaatggaactcaggctatttgactaagtaattttggtgtttgatgatcaatataaccttgtggactaatgtgtttgct

SEQ ID NO: 95518 - DNA, 787 bp, Zea Mays
tttttccaccaacatttcaaatgttggcaaactactttttccccagtcctgacgcttcaatagacggattcctcacttcatcaagagagatggagaagtcagacttactgacagcctaaacatgatcacaactagctttttcaaggaccgaagcaatgttttgggcattgatccatgaagaatagtcgtctttagctaaaaggatccctttaaacgcgtcaacttctccatcaatccatgcaacggcaccagcagcatcaccatcaatatagcttttcacgcttgtgctggcaccaatagaagcgaataagtctttcagctatttccaagcgcccctcttcctcagtaattccctaacaatttttccccaacaactttttcgaaacgctactcattagcacatttcttttgagctttgtaattccccaacaattttttccatgcacgccttttcctcagtaaggatctatttcttaaccttttctaattcgaagttcactcttgcttcaactcattcctcctccaaattttcaacttcagcctgatgtgttgcaagattgttcttcatctcgtctttgagctcttcaaggcgcttagcctatttctcccttatgttttcaagctctaatattttagcatctttgtatttttagcttccaaaatagtgttttcttttcaattgtttttttaagttcacttcggctttcaattaagtattcttctaaaatcttaagcatcttctccttctcggtactatcgaaatgaagctcaatgacctttgaccgaa

SEQ ID NO: 95519 - DNA, 374 bp, Zea Mays
ggatcagcgaaggctcacagtttcatacaagttacggttacatacatacagcgagggcatcacactttacattggttcaaccttcgggatgatacccatctccctgtagttgaacaacattatcctcaactcctcaccctcaaaaagatttcacaactccccctcacctacactcgccccaaccggcgaggacaacaattcccgcttgctagccccgtccacatgaagacgaccaccctccacctcactcactctccgcttcgccaccgcccttcgccgcctacgcccagcacttggaccaggaagaacttcaacatccatcacacgcagagaagcctccgccgcagccacatccaagaccgcaaaataatcca

SEQ ID NO: 95520 - DNA, 447 bp, Zea Mays
atcagagcgctaatgtatctagcaaatagcacgagaccagatattgcatttgccgtgaatctgttagcaagatacagtgcagaacccaccaaaaggcattggaaagggatcaaggacatcttccgttacctacaaggaagtaaggtcttggtttgttttatcgaaaaaatcaagatctgaatcttatcaggtacgctgatgctggatacctgtctgatccacattcaggcaaatctgaaactggatatgtatttctttgtggaggaactgcaatttcatggaagtcatcaaaacaaactttggtctcgacttcaacgaaccactcaaaaattattgcattatatgaagcctcgcgtgaatgtgcatggcttcgaagaatgatcaaccatatccaatctgcatgtgggttgaatattgagcaaacacccacaatcatttatgaagata

SEQ ID NO: 95521 - DNA, 1369 bp, Zea Mays
gcctaggcatgtgagcccacgtcgcagcgcctaaaggctggaaggcgacgccatacaagcacgggaaaccgcgtgggagcgtggcagcgcgcgaaagctcgagaaatgcacgcgccaatacgtagcacgggtgtagcagctagggaaaatcacacgacagaagaaagggcaagacgcaaagagagagccaaagaggacctaggcgcctggcgatggcgaacttagctgtcggtttaggttctggcgacgacaaacctaggcgtctggcagcggcggacctaggcatcaggtggcttgctcgccgtctccctcggtcctcagctcaggtacctcctcgacttccccatcctctgctatcttcctctcggactctcccggctggcatgctcccttttctctactccctttgttcttgtccttgtgtagtgtgtagttgtgtattgctgctatgatgtgctctgatctcagtatcattcacatggtttagtattgttatgactatgatgtgttgtgatgctcaaggcttaattaattgatccatgttgctcccttcctctgatctcaatctcattaattgatccatactgctactctatgactagtaaacaatgtctttggatctttgctagtaaacaacatattgtttactgcccagcaagtaaacaatatggcaatatgcccactgcactatctagcacccactgatggtttaattgtctttggatcttcgcatgaaccagtcaacaagaaaagatgttgaatccaaatccaccttctggcaacggcgaatatgatctgaggactgatccatctaggaagcccaaaaggtccaatgacccaggttggaagtttgcatattgggcgaacctttagaaccgagatcaggtgacatgaagtttatgtgccacgacgattcatggtgggataaaaggcttaagcaacatttggcttgtggatatggaaaagttctaatgtgtagcaaaactaccactgaaatcggaaaagagatgacatagtacatggaatcacataagagggcacgttcaatgtacttaagtgatgatgagccagtggaggatgaagcagcagatgtggtggaggtagagggaggtgctcctgggaatgaagttgaaccccaagcatcgaaggtgcaactaagttcaggaacgacagctaaaaaaggtgtgccacctactcagtgaagggtgcagcagtaggcaaggaaaaaccaaagggaaacaagacaattctggaaatgcttagaaagacacctgaaaaaatagttgatgagcggcaaaagggttcttttcagcccccaattcagtccagtataaagaccaaggagcagcaacattatgtggatatgcaa

SEQ ID NO: 95522 - DNA, 562 bp, Zea Mays
ctgacaatcacacataggtccctcggcttttgtttcttctccaatcagacccatggccacggcgcgctcgccgtcgatcaccccccgacttgtactggccatgaccggcggcgactatcccaattagctacggggtgagcatttccaacccaagatgactcaggaacaaccttcaattttggtttgtacacttagagaacgtcctacccacgcgcacggcgggaaccgtgacgtcgagcccgcgttcccattcaatcacgcctgaattggtcaaatggctgctacgatgagcttcacgggtatacagagatgctaaaacaacactcgagaagtgcagagccataccagagtggtccggccatggagcgcggagaacttgtgctcgctggtgacagagaagggggaaaatggcgccgcgacggctctgggtggaattgggaggtgagattggggctacacggccgtaaagaactatagtttcaccgtgcacactcaatttgggaagaggtggcagaggcagtgcgagttttgggcttcaatcaaactcactggtggagatgtg

SEQ ID NO: 95523 - DNA, 316 bp, Zea Mays
atcgatgcaaagatctggctagggggtcgtcccatctttttattttactctccctcgtgcatcccattcgtggtgatgaggggaggtgagtcgaaccacactttactcaatgagctagcaatggcacttggtgaattgcaaatgggtcatctgagtgaggctctggttccttccgcaggatccaagcgcggtttccgctaggggaccatcctgatactcctaggcaccgactcatatagttgtcgactctgttcgaccggacccaacggctcgctgcctctctccatgataaaccatgagtcagaccttcctagaa

SEQ ID NO: 95524 - DNA, 729 bp, Zea Mays
ctcgtaggcccacttgtctattcttccaatggcttctttgttatggagaatatcccctattggaaacctggtgactactatgactttgtggtcgtcaaagtagtgacggagcttgcgtgcagttagaagtactgcgtacaatagtttttgaacttggggatacttctttttagagggtcccaggacttcactgatgaaataaacgggatgctgtactgggtatgcatgtccttccgctgcccgctcgactactaacgcggtgctcaccacatgagtcgtgcaggagatgtataacaacagatcttctgtcggctggtctagcatggctcggcgtggcggctttagcactggcgatgtagtcaagaacttattcagtgcatcaagagcttcctgagcctctaaggtccactggaacttgtccaacttcttgagcaatttatagaatggtaggcctttttctcctaaccttgatatgaacctgcttaaagctgccatgcatccagtaagcctctgcactttcttttgtgatcatggtgcttccatcctcatgatagctttgattttttccgggttagcttcaattcctcggtggctaacaatgaatccgagcaatttcccacctggcactgcaaagacacatttttctggattgagcttccaccggtaccgcctcaggctattgaagaccagctgcagatcctcgatgaagttttctgagttatctgtttt

SEQ ID NO: 95525 - DNA, 2747 bp, Zea Mays
cagctctgtataagagtcaagaaacaatgtcatgaagttcaggaatttaagcaacaaaccttcttacagtatcactaaattgtttgatcttttcatctgcatcactgacttccttatttaactcttcatttgtttccagagcattagcatgcgctttcttcattttatcattctcctctcgttcagctactagcagaacctgtaataatagcatgcacacattgtcaatcattcttagcaatgcctaacatgctaagtttagggtacaacttaattaaattctaagagaaatgttatgttcgcatactattaagtgtatgaacttaagattatccatttgataaaacagaaaagattggtccttgtttgaatccttctgcttgtagatcagttgcaacaaagcagaatattatagatgaagaacatgcctttaggccctcaatttcagtagtcaataaactgatcttttctctttcttgagctagagcttcttcaacagccttttttgctgattcttgttcctgcatcgctttcacttcttctactcgctgctccatctcatgaagagcttctttcaatttggaaacttcatctgctttagacttctccaaatcagcctgtaaattgaatacacacaagtatgatccatagatgctatgtctataagcatgaaaactgcagttgcaccatgtgccaatacaggatgcaacatgatgtacttctgggttaaaagaataggcacacataacaagtatttaaatattgttcaagaccaagtattgacccttagtttcttttcgcggtccaggcgacttgttagctcttccacacgttcctcaagtttctctttggccacctttagagcctgtgtatctcttgcagcctaaaaagcatgcatcccataacaaacttagaagaaattttacagaatgaatactataatagttggtcaagtaccagtttgagcttcctcagctccttcctagcaacccttcttcgccaagcacactgatatgttagtgcggctctcttcaaattcatataatttgagtaatctcggtggcatcgccactgggactgcaggaaaggaatctcatattgatggttcaaacagaataaaaaaaattgagaacacataatagcgacttctgacaggagattaatatccatctgcagtataataagtgaaaatagcagtgaattgctataagtgctaacctacctggatatggactgaagctttatttttctttctaaaggtgaactcattacgagctgccatggaccttagcccggcctgcaatgtaatggctgacaatcgtagttggtaataagttttccaggcaaaataccatcgtgcatttttctgaattctcaaagctgctgcttgttgtctcaggaattcatgttgcttacatgccaatctggctgtaattgaaaataaagatcttagtatatgtacaaggctccactatgactccataagcatgcattttacacccagggctatacggaaagagtttacctctaacgaaagattgcaaataaatagatgtgtcccgtagtactaggaactgctcacgagcaacatgagtacggaattgactctgaacgccttttgctgcattgtttcgcatctctgttcttctggcatccagatcagccatttgaccagccctcaggaataccttagttcttcctatctgttgctcagaacatattttacggaatgagagcaatgagtatataaaattaacatacaattttatatgaaactaagataaaatcttttgtgactcaaatgtatgaagaaataatcttaaacaaaaagtgattaaccaggattttaagttccacccgttccagtgaactcactgccttattctttgaacctttttggtaattcatgtggtctacatacaactaaaataaaatggcttttaactcgaatcaattgaacttgccagcttagaacataacataccctagagccctactgaaacccaaaaattatgccgatctgtcatatgacctgcccattcgttctcctaactgttagactgtttattatggcacattttttttttctcgaaagcgcaggagaactacgcctcataatatattaagaagagataaaaagggggccaagaaaggcagtataaaacagcctccttacggaggccagtaagaagcatacataaaagaatccattagactctccttagctctcagctaaaggtacagctagatggcagagccccttggcaccagcaatctcccattgcatcatttcctcattagcagctctaagactcatggcaacactggagttgcagccatcaaaaacgcatttgtttctatgtttccacaaggtccaggctcccagaatgataagggaatcaagcccttttctagtgagcccagcagcaatattccccactgattcccaccagcctagatatgagccaacatcaggttgagaagccaaagaatgcagaccaaaattccgtaacaacaggtaccagaattccctggagaaggaacaggtaacaaggagatgatcaatagtttcatcttcttgatcacaaaaggggcacttctcaggatgactcagctctcttttagcaagtctatccgttgtccagagacgattttgtgcaaccagccagatgaagaaacggcattttggcaaggcccaagttttccaaattttctggtaatgagggaaaaatacagaccccaaaaag

SEQ ID NO: 95526 - DNA, 599 bp, Zea Mays
tgagtggtgaagtgttgtgctccctcttcccccttgaaggccccgagctcttccttttatagtcacaaggaggaaacctaggtgtacaaaggttgttacgttattgtcatagtcaccggaggtgcgccagtgccctatagaagcatggtagtaggaatggccttcgaagggggcgcgtccgggccctgtagtggcatggccggcaggacggccctggtactttgtgttgtcttttgtgagatagagagtcgaggctgggtcgggagcacgagcaggcgtccgagcccatcgtagacaagacgtttgtcaaatcatagttgcttaaaacagtgctcgacatggcggaagagtgtggtgatctggtcctggcgtcatccgagatggcggagagtagattggacaccggtcttgttgttcctattgccatcctatcctcagcgaggttggcggtagagcacgcgacatcgcgcttttctccgttggtgcagttggcgaggcctagctcgggcgagatagagatttctcccgaggtcgaggccaggtcagaacactggtatgcaatcacgattggagtggttggaacaatgatcggagtgggg

SEQ ID NO: 95527 - DNA, 362 bp, Zea Mays
gcgggtatcagagcaaagcccgtctcttaagacattacgtagtacttcaaaagaatttttaaacacttaccttaaaatattctttcattcttgtcttaccactttctggtagtaacttacctcttaagttgggtaatagagtgcagtatatgaggaagtaagcgatcgacaaaagattgatcccataattattagtttatgcatgcatcatgtttaaactatattaaataaaatttcccctcttaaggagatatggcgcgcactaaaactacccagcgcaaatcaactggacctcagggtgtgccttgacatcagctagcctcccagcatgaaggaagcagcattggaagtaacgaccccat

SEQ ID NO: 95528 - DNA, 352 bp, Zea Mays
gcacatggcttgccaaaactcttttggaatttgaagcggtaggggagccatacaagttcatattttccccttcttccttcttcttcggcatcccccatcctctagaagttggaaatgttttatttgccaagtattcttgcactaagtccttagtgctaatattgtcttccacaactctgaattccacctcggccagctggcaggggatcccatctgcatgtttcataagggtcaagtcatactgaagctcaattttaagggactcatcaccatactcataagcttctccctcttcttctcgtcagccttcacgtaaaaccattcatttgtccactcggtcggccacttagtg

SEQ ID NO: 95529 - DNA, 593 bp, Zea Mays
ttacaatactatatacaacaagaattagagcctacaattcttcttcgaggaatgaacttacaataattggttctgcatgtcttcatggaactccattttttcttgtatgtgtcttgatatagacctcatctcttcttggagaacgccatagtttattagcctgcaagttttgcaaatttcagcactgagatatctacaaactaatgttttaaaaagttcatggaaagtttcacatactagttatgcgcagaacaagcaaagctcttgctgccagaagtgtgatgatttcccacctttgaacgacattcttttgctatttctaagcgagtctgagtacaaggtacatagtgcaattaactattgaagagcaaataatgtgatctcaatgggaatattagtttatacttacttcagattcagatgacctccaatattctatgagaaacttccaattatcatcattaactctgcctttatgtgtttcctttagatctgcatctgatatgttttcatcaaaaaattgatgctttaatgttgagttaaaatccttccattttccttccggcgctatccataaaccaactgaaggcagc

SEQ ID NO: 95530 - DNA, 344 bp, Zea Mays
agcagaacgacagatggcagcggcggtggacggcggcgctcacgcgcgtagggtagaaaaaaatgagattaggccctaaccctaacctgcttgggtatcatgttactaaacttggattagagagagagcaattagtccttaggacttggcagaatatataagcagaactaatatgggctacatgggccttaacaggatcatctcctattgcttggaaatccaaaaggcagtttgttgtatctagatctagtactgaagcagaacttcgtgcacttgccactgctactgctgagataatttagctctgatggctcttggctgatctaggtgtctgttgtgacact

SEQ ID NO: 95531 - DNA, 442 bp, Zea Mays
ggtacgccacggtgatcgtaggatcctagatcagcggtcagcatttagtatgctaggatctaatcccagccgcccgaaacaggatcaatgacccatatgcatatcagacccgatctaatcttcttcgtccgatacgaatccgatgacaatgcgccacccaccccaacctaggtcgagcaacgccagcggcgcttgcgcctacacggtggtgccatcgccagcgaccaacagatcagcgccccagtagaccaaatcacaccccgctaggtggcacacgtagataagggcccggagaacttcagtgtggcactaaccgtggaaggaagacgacagcgagggcatacctcgatgaatggcagcacaggtggcgattcttgacctcggtgaggaattgcgagaacctcggtcaccacccgccaagccacaactgtcgacgtgttcc

SEQ ID NO: 95532 - DNA, 489 bp, Zea Mays
gcgacttgtaatattttctggttttgtaagatacttttgggaagtattaatctaatagtgacagaacttatctgtatgctatttgtctttgctgtgtgcgtcgttaccaacttctccctggtacttggcccccctgggatgtaggctcgacgtgtcgaggctggatgccaatatacttaagaaagaattggtgacctggcccccaggaggtagtcttgactaggacctggacttacacacaaccttggctaggaagctttagtagtgcacccatagggcccactaactggtatattttatcctttgattcacgcaacaggacctgcaggatttagtccgggaagccaatctgtgtgtcaggaccccctggatcacagctcccaatactagggcacccgtcgcagagtggtggagcgtgtaggcttagggtacgggtccaggctaagcggctacacagctccagaccaccccaggggacgtgtgtccgtt

SEQ ID NO: 95533 - DNA, 730 bp, Zea Mays
gagccactcttccaaaaccacccagatgccctcatttcttgcgggctcctccgcgagggacactacctgctccctggctctaaagatgtttcagttctgctagcgggcttcgtggtttcgtttgtgcacttccattagcgtggcttcgcaatgcctcctcatcccttcttggtggggctacttcaccgttagaagatttagctacatcatctgaaccctaacagggttcagcgcatggccgcttttgttgccctgtgtgaaggatatctcaggatgtccccccatttctgcctttggtgctaccttttctcgaccgagttgccccgcaattggtagacgctagacgccctggcgagggtgacccaaatcggatgtgcgaccatccatatgcgtggggcacaatccagggggtacatgtcgttgcgactatgttcatccaacaagggctggcatggctagtggttctatttgcacaaccacgggactccatccgccgcctatcatggcctcccttcccagggtgcccctgggaccctcaaagttaggtatgggtgtcccaaggatgaggagaaaagaatggtcagagctattgcagcgatgtcggttcttcatgatcatggggtcacgctggcggcgtgatctagaattacctccgcgccgagcgtggctcctctcatggccaggcggctaccgctactcaggatgaccgccgaggctccatcagaggcac

SEQ ID NO: 95534 - DNA, 960 bp, Zea Mays
gagccaccagccaaaggaagaaccgacacttaggaggtgcccaagatttctagaccattttgtaatgctcaaaaccaacagagccagtgaagaaacccttataagccgagcttgcataatactgcccattagaagcaattgaaaagatatgcttatcctcagaattagattgcatcacaacatcagttatggcattccagagatgtaggtaatctaccagagctccccaggtcaaggcacctttaatatcagagacccatcttctattagttagggcctcgcgaacagttcttttagaaacaattctttttggaacagtcaagaggagccttggagcaatatcagatacacttctggcattaatccacttgtcactccaaaagtaagtgttagcaccatcaccaatttcggtgacaagcacagaagagaagaaggctttagctttgcttgggacatgaaccggaagattattccagggacgggtagggtcggtcctttgcagccatagccatctcatcctaagtgcccagcagagctcaaggaggctggaaattcccaaacctccaaagttcaagggtctacacacttttccccaagccaccatgcaatgccctcctttaacctctcttctgcctctccataagaaacctttccttatcttgtcaatttccttaatgacccacatagggaaatcaatagccatagcagtataaacacacatcccagtgagaacatgttgcactagaattcttctccctgccctatttaataagtccgccttccagttaggtaatctatcagcaatcttatccaccaggggccaaagttggttggataatctatgaagggatagagggagtcccagatatttgcaggggaaggaggcaatatcacatggcaacatatgctggacatccaagatagtctcctcagagcaccttgtagggtagatagggagat

SEQ ID NO: 95535 - DNA, 491 bp, Zea Mays
attagaaccagttgttgccgaccaattaagcaagggcatatgatgctttgactagtgttacaccaaacacgtctagggttaaagacattctcgagttgttgtgcaacctttctaagtatcttatctggtggggtatctggtagcacaccggacaaatctggtaccttgtggatattcctaaacacaccgtagacttctttgagtgttgtttttggtgccccatatgatatgatatctggtgcatacctatatgtcaatgtactctttctctatatccctttctttgttatagtgcaacttctatccgatgttttatttggtggttcaccggacatgcccgatgttgttgagcaacatgtttttctttgtttctttgcgtctctctccgtttatgattatgtcatcttatgtattggacacatgcatgatcttgtaggtcttcaataaatcttctaatgtcatttttaagacattgatcatcttaattccca

SEQ ID NO: 95536 - DNA, 806 bp, Zea Mays
aagctcggcttggctgggttcgcaagctccagactacatatgacagttccctgatccatttccctgtgagcttcgcgctcttgtcgaacaccttttcctgagtgcatcaagtatcatctcgttggctctttccacctgcccattagctcttaggtgtgccactgatgcatacttgatctagatgctcctctgctcgcagaagtcaaagaactccgaactagtgaagttagatcctaggtcggtgatgatgctgttaggtattccaaacctgaaaattatttcctgaatgaactccactgcctttgctgaggtcaaagaagcgattggcttgtattctatccactttgtaaatttgtcgatggcaaccagtatgtgagtatatcctccttgagctttcttgaagggctcgatcatgtctagcccccagcatgcaaacagccaggtcataataatagtctgcaactattgtgcaggtagatgctgctactttgatagaaattggcacgcctcgcacttctagactaactcggctgcatcattcttcgctatcggccagtagaaaccggatctgaaagcctttcccaccagaatctgtgacgctgcatgtacaccacattgcccaacatgaatctcatctaacagctgcctcctagtagctgagtggatgcactccatggggaccccacctgcacctcttctgtatagcaggccccctatgatggtatagtggcccgactgtctcgtgaagcgtcctgccgcagctttgttatctgattcttcctcgtttcttatgtatatgatgattg

SEQ ID NO: 95537 - DNA, 415 bp, Zea Mays
tccgtcttaaggttagggattttgaatgtagctttcaaaattattgttaatatgacgtggcagcattgcatgattcttcacctgaaatgtcaacagatttgtgtgtgaaggactgaaacgtctgtttctgaatgatatgaaaatgtgctgttcccgttccttgcgtaaatactggattctggccttctgtagtgagcagtgacttattagtgattagctgatgaaagttctaccgaacaaattcagcccctagttttctcaacaataaaaagtactagtgtccaattgaattgcattccttccttcctaaattctgttttcgtagaatgtcacaagtactaccagaaatagaaacaacgttatagtcaaatttcaaggagtttgtaagtgtaaaaatatattttttgaagctgtg

SEQ ID NO: 95538 - DNA, 272 bp, Zea Mays
ggtcggttgtccggtgcaccacctgacagtctggtgcccatagagcagctacacctttttctacttagtgtttttctagaccattttcaactccaattcttgtgtgagcttttgagtgacacttagaactagttttgtgtgcgtgcatgcagcgacactatgctagacaccttttgattcgccttttccagccgttgcttcaagttccacctgggggattgttttcacctgttggagcataattcccggcatttgtgacctaacttatcata

SEQ ID NO: 95539 - DNA, 355 bp, Zea Mays
atggcttcttcctcaagttgagatccctcaggctgtatggctggatgctccagttggtgcccagcgaggactcgactagtgtttcgttcaacatctggaaaggagatgaggacgttgtggcccttggtttctgcagaacaagtgtagcagcacctatgacctcctctatcatcatgccagacctcatagacctgtggttctatgtccctgttagagccttgtgtaagagtagaaatggaagcatctgtgacagcctcggctgggagtgcctcccttcgctacacaaaatcgatgcagttgtcgacagtaagggcgcctatatcggcgatgtgaagaaggtcgaggctgagatgag

SEQ ID NO: 95540 - DNA, 553 bp, Zea Mays
accaaccctcccgtgaatcccgcaggagacaactccgactgctattccaatcactctagtcatgactatgtatctgtatgccgacccggtctcggcctcgggggaaatctctgtctcgcctgagcccagcctcggccaacaacaccaacagagatacgcacgccaccgccgaccctcctacgaacccctctaaagacgggatggctacaaaaaccgcaaggccgatgtccaaccagcttttcgccatcccggataacgcacgggccaaattaccacgcactttttaccatgtcgagtgacatttcaaccactacgactcgacaaacttataaacgtctcatctgcgcccctcacaagacaggcttgggtacgcatctatacgatcaaagcgcaggttacagggatcaaacatccttctcctgatcaaatacaacgcccaggacaagggacatcccgtcgaccatactgctacaagggctcggactcgtatcctcttatcacaagagcagcgcaacaacccttgtaactcatggcttcccctttgcgactataa

SEQ ID NO: 95541 - DNA, 1074 bp, Zea Mays
gccttttcttcttcctgctgcccctgcctgtgcctgccatcgcctactacgattggaggctgcaattacatcggctgctgctgctttccttgttctccggcagacggtagattggaggctgcaattacattatacgcatcaaactggattgttttcagtcttgtttttcagtcttgtttttccagcagaaccacaggctgagtaatctattttttctgtcaaactttggaccggttcctgctttccttgtttttcagtcttgtttttctgtcttgtttttctgaacatctccagcagcgcaggaaggaaacacacacacaaaaaaaattatatgcagcagaaccacaggctgagtaatcttctttcttaggacacaacagaattaagccagtggcaggcatgatcatggtcatctaataggaactaacctgtttcaggaaaccagctccaaacgctgtcgtcaaattttgttctgttctgaagggatttatttgagaatgcaaattctgttcatttgacgatgatcagaacagaacaaaatggatagctgtaaacctgtaacatagcataattacggctgagtgcttattgaaaagtcctgaaaaagattttggcacaaagcctaagggagcaacatcactattggcttggttgtgaaggctgtgtagttgtcacaatttcatctccaagtcgaccccgatgcatagtactttagatgcatttctttattgattctgggtatttgtgttgtcgaaccatatgcaactgtacgctgtctcttgggtacatctgcaacaagttttcttgctattgaaatattgagtaccatggccctttaaattcgtggcttgataggttactagtttcatttggtggattatcctagacacttcattcaggttacagctatccatttaattgctgaaaacacagtaattctgttctgttctgaacacaataattttgtcaactaaattctgttctgttctgttctgttctgaacacagtaattctgtcaaccaaattaaatcagtcaactaaattctgttttgttctgttctgaacacagtaatt

SEQ ID NO: 95542 - DNA, 928 bp, Zea Mays
atccttcacaacctctagagcaccgccagcaatgtcctctgacaggtcaccaacaccgcaaagctcgaagcctgactagaactagacgaaagctagagcatcggcagcaccgcgatgggcaccacgatgaacagcttgaagaacccagttcgaggcatcgagaagacgctcttctcggtcggcaccttgggcatgaacaagggcaacgaccctatctgcaccctcttggagacccgacacctccaactctagctctgggtaaaacatagaaaaggagggacagtcagaataactaagagaaatctcaataagaggaaaagatgtcactaacctgcaccacgacggtctgcctcctccaagtgggcacgaagactgaccacctcaccatcagcagcctcaagacaggtatggctggtggccaaactctcccaaagatctaatggggtctgcgtcaagagaatgggaaccccaccttggcaaaaagacatctcaaaatctttcctttggctcatcgagatcacctggctactcaaggcatgaaaagtgaaaggtagaatcaggatcatgaggaccccgcgacgaaaaaggaagaaccatatttgaaatcaatcatctgttgcataagaggtcttagcaccgagggacggccccccactggatgttttcctagatcccgaggagttgagaggagaccgccttacttttgatagaaaggacagagcaaggtacgacaaggccacccaggaagagcaatttataaagagactctaggcactgcagagaggcacgactgccgatgccatgcatagggatgaggcgatggttcaacgcctaatgtgtaaaaccacagaagtttgcattaatacaatgggtgacggacctgatgcgctctgaagcatgccgatcagaaaatgacacaggaaaacac

SEQ ID NO: 95543 - DNA, 1099 bp, Zea Mays
gtaaccagttcctatctatgaagcttgaccattcagttcaatacttcaattactatttgcaaaaaattgaacttaaactaatatttttgacaggcttacgggcctttcttccatttatgactggggtatctgtgtgcctaaataggggagacatagatccaaaagctcaacaggtttacttctgtgtgcttttgatattgtgttgtctgcagtaagatagattatgcctatatccttattccattttctttccttattactctacttgtctgccagcttgcagaagcagcaggatcttcattggtgtccattatcgtagatcacatattcctctatattaaagatactggttagtagtagtgccaaacaatttcagatatcaacctttttgtcctgctacggtgacttgtttattaaatcattggtgcaaacagagtttcaacttgaacttctcatgcggtctttgttcttctcacgggtaattttctccaagacttcaactgctgttatactttacagtttgatttgttcactgttagtactgtccgctgatgatatgcttgatttagaatgcatgacctcgtagaggatttaattacaagtttttctttatcttaaaggcaagcatttcagacggcgaatgctcaaagaacttatcttgcatcaaggtcggcgggatgtttctgaggtactatatctgtccttgttactcaagactacacaagtcctgatggttgtgtcattcacttacaaattgaggcattgtgacccctcacgcctaaagtattgaatgacattagaccaatattattttggttaaggcataactgaggttcctgacggttctgaatataggatattgtgactgtccgtgtcaaaagtatcaaatgtcatataactgtcattaacaatgaacttggctgacattgccccctcagtgtctgattcacgttttttttcctggtgggcacgctctatcaagctggtgcccaaaataattcggaaggtgtttctcttacaatgtttggaattgtgattttattatacttctttatactgctgaggttgtgcatgttgcccgaatttcagttaaaacttc

SEQ ID NO: 95544 - DNA, 584 bp, Zea Mays
aggaagagcccttgaattcattctaagataagcaagcatatcctttgacaccaattccggaactcttgcacatttagttgtgtcaccaaatccaccagcaaggtgctgtttgaaccgctttattcctacagggactatcttctgatagaaaatacattgcacaaaatatttctttgtgggatctggccaccatccataattccatccagggtcttgtgatcgggccttccttttagaatcaacagcttgtgcagccagagcagggggcagtgctgcaatagccttttcagtgagagaggcagcatctggagcaaccgatgaagcagtaccaccagcaccagtactaccaccagcagatgctatcgtggctaggatagcagccacatcaccaccaccagtgctctcttctctaatgtatgagtctcccatgatcacctcaacagctgctgcacgttcacggcgccaaccccctctacacattcagaaataacaaaagaaattgaaggaagatgagaggaattcaagagttccacatcgaaacacagtagacaacagatcaatgcatcaatgcatgtaccgacgga

SEQ ID NO: 95545 - DNA, 307 bp, Zea Mays
catagatcctgtcccaaaacttcataacatttctattgatcatcctagccgatcctgtttgcctacctctcctttcgcatggatctggtgatctctttcctttgaatcatttgtggctttatcatccgaatccctggatcctttaatgattctgcctcgttatctggttatctgctataacccgttctcaagtatcggatgttgatcttgcctaaatctctcaattctggtcgatctcatgctcttcctccaaggatcatgacgtcattttatcaacttatctctaatcagtgtatccattgagttc

SEQ ID NO: 95546 - DNA, 1013 bp, Zea Mays
ctttctctgctgccccctctgattccaaatataaatcattttaggattctggtcggtcaaacttatttgacttggacaattggactatcaatatatgtaaggtagcatagattcataacacatggttgatgttactagattcaacatggaaaagtactttggtaatatttatccttttctatttaaagcagtatacttttacaacaaaaaatgcaagtcaaaatgtcatatcggagacagtatcacaaccctaaacaatctaagtttggggtcagagggagtgtatggccttcatgttatcctctacctccattaaaccaatggtgttgcaacatatattaagaaacataaggaacacatcaatctgtcctgaccagttgcttgtgtgcgtcctgcttgtataggtattggcaattaatatcacacctttctttcaccttggccctccagtcttcatgtggtatttctgagtagtgcaagagtacatatattttagcaaaaacatcaattaagtgttgcaactccttgccttcaagatgtgaattgttagattattacatgtgcccattagaccatggaactgttgtgagacaacctatatgaatttatgtttcctgaaataaacggaagagctacctgccccatgttcgttaggtgaacacatgtttgtggaatagaatcagagcactccacgcgtgttcagtgactgtgcagctgcaaaacatatgaatgatatccttctcttgatttcttcagttagaactcacatctcttggctcttgctcccattgcctcttcttcccaagaagaaatagtaacaatagccttcctgttaaccttctacataaagtttcatctggatgcctgagacatcaccattttttgcaacaagaatttatctaaaacttcatctctatcttaatatgtagaaatgtgtcgtttttgtacctgaaaatgaacatgctgttaatacagagttatcatgctattgttcccctgaagctattttttag

SEQ ID NO: 95547 - DNA, 695 bp, Zea Mays
aggaaaacgaagataggaagaacaagcttgttgtcagtaactcggaagaaaaagtgaaagaacttgaaaatcttctggaagaaaaagactctaagattaaaattgccgaagcagacctaatcgaagctcaccttcgaattgaaaatcaatctactcaaatttctgatcaagacaaacagctgaaaagactgaacatagagcttgaaaaagtaaatttaaatttaaaagaagctgggattcgctatgagcatgaaattaaagatctaaaggatgaagtcaaagccgaagcggataaaagttctaagttatacgaagccctcaaaatgcttcgggacacctgctccagcttcacaactcggtgctcccttcggctgcgtgaaattttcaactcgaatggggcaatgtcaggagaagcgaactattctgccgacgatattctgaaggtgcttgagtttgtcgagaaagaagtcaatgaatttgacaaagtgatggtggggcatggagatttttgcaccctagtggctgcccgaggaactgctactatatttgcaaaagctgggtgtaaacatttgaaaatgttaacaagcccaccttcactatctgggtaacataaaaaaaaaccaaatttggacgaagggtggccgagaactagctggaaacgaagctcgggctctccttaatgaagtatgaaaaac

SEQ ID NO: 95548 - DNA, 366 bp, Zea Mays
ggaatttgtagcagtagtactcacgcatcgtaacatagagttggccattcgaatctattatacaataaaaaaatagagaagacattaaagaacattatggccaaagcaacaccttagtaaaaggtattgaacacgggcaactaacctgggttgtcggaatctgtggattgtcgtccatcaattctagcagtgttgacaccgaccttgggtatgcctgaatgccaaccgagctcccctcttgggaagaaaagaggataagccaatggatcatagaacccatggtgaggctttatcgaataaaatgcattgtcatttccgtacagggtaactccgcgttcgaattgacggtgtaactcagtcccctcg

SEQ ID NO: 95549 - DNA, 595 bp, Zea Mays
gagactatgagaatcgatagctgttgacatggaagccaaaacatactttgtctgtcctagagaagctactagagtagactaagacaagctagctaaaccctgtggcacatcccaatctggtctagtgaaggcatgtggggacttctttaacggagacacaaattgttgttaaatgaaaccatcctatccaagaagttcattggacgctagaactacaagtgtttggagtggagcaattggagcctgctacatagaaggaaccaaggaggcgttggagtaagaattgtgtagtttgtctctcctaagctagttgtgcctagaactggccatgatgagctgagtctagagatcaaggctatcatctactcatgtgctgctacctaggcctctagctatcactttgggctattgctagcgcctaaacatctcctgtatccactgatctcaagaggagtctgctacaaaaccggagctaccagcctatgcattgccttagtctaagcccccagcctctgtgttgtgtgctctaggaggcagtggaggtgtaggaactttgaagtccttatcggagctatcactagaaggaaggtcctca

SEQ ID NO: 95550 - DNA, 357 bp, Zea Mays
gaggaaggtaaaggcaacaacaaacggaagcacaaagaaggatggagttaaaaactcgcaatcaacaaagaagaggatacaactaagggaaaaataggtaaagtgcaacgctcagattgagatggaagacaggagatttcaaatgacaggtataagataaaccatcaatgaaagatatagaggtgtcaagggtaaatatgataataacgaagagcatagcaaaggatagagttaaggcaagactcgcgaagttatatagtggagaaaataatcaagggtacgataggtaaggttccaataggagggtttaggtaaaaattcattaccgaaggaagttatatggaaacaacgagatca

SEQ ID NO: 95551 - DNA, 697 bp, Zea Mays
gccagtttcaagctttggaaatcccatacttttggctatctcccagcaaatgaatatttctttgttgtctgggagacagtacaggaaatcatcttcgttcgtgccattgaacactaaggcccccttcggatattttagtttctgggcatagtgtctggcttctaagatttctttttcggataatcttttccctgaagcatgtcgaataatgtaatcaacatcttcggacggagcttcgggggcaggagatttagctttttctaccatgtctcgccccactgccatgccggtatccgaagtttgttgctcagctatatcctcaggtgcggcaggcttcgtctcaatgggcactgaaggcccagcttcgacttcagccttgactgtgacagctttggcaactttcttagtaggagcaggggtcaaggcttttgtggtctccataacagcgtctagcacgctggccatcctcctcctgggagttgtggcaggagcctttgtcaccttcggaaaaactgactctatcggtgggctcaaaatttttggcatcatcgctgttttttccaattttggctctttggccgcatcatctttggcttcggctggctcgactgtaggcaccttcagcactacaatagacccttcaacgctccaagcggtgggagcggcttgttctgcttcggcagtggaggaggtcccc

SEQ ID NO: 95552 - DNA, 463 bp, Zea Mays
gttaagtaagaatgtaagtcaaccgtaaacaaattgagtatccttgaaaccttttctttattgataacatatttccactttacagagtacaccatcattatcccagcagttttgaggtacggctaaggataaaactttctcaagtgttctatgttccaagagttcccgacttccgtgccatccatctgagtgaggcggtatgatccgggccgagtgacttctgctactatgaagggtccttcccataaaggtgataacttgtgtcgtccttctcccgttagaattcggcgaaggacgagctcccctactgaaaaggatcgttgccgcacagccttgtcgtgatagcgccttagagtctgctggtatcttgctgattggattactgtgtttaaccgttcttcctcgagtacgtctatgtcctccagtctggtagtctcagcttctgctatactctcaaatatca

SEQ ID NO: 95553 - DNA, 438 bp, Zea Mays
tgggaagcggttctcaccagaatcgatgtcgtcgcggagtctgtacatggtgaggtgtggctctgcggcggagttggattccggcgaggaattcccggagttctaccaccacatccatcgttccggtggtagcagaagattccatgcgactcgacgatgttctcggctacttcaattcacccaaatgtctgtgtaaacgaatcacccacctctcccttccgctttctgctctctctttctcctctagtttgcgctgcccgcacgatagagccatgtccggctgcgagacggggctatttttgtcctagatcaaggcatgcagtggccggttggttggagacctcggttatctcatgtggtgggtgagagtttgttgggatttgagagtcgcggcgcgacaggattacagtggggttcggtaagaaggcgaagatgaca

SEQ ID NO: 95554 - DNA, 433 bp, Zea Mays
tgattccacctttaagagttaattcagttgggggaaaagttcagtccgataagatgtgtccgaatctaaggattgaaataagggggatagacttccacgctaacctagtagtaatgggtactcaagggttagatgtcatcctaggaatgaattggctgcacagaaactaagccaccgtcagttgtgacaagaggacagtaaagttagtgtccccatctgaaaaaagtagtaactgaactgttcatgcctgaattagaaggagcctgtcaccatttgtctgtagatggcaaggaggccaacctgcttgaggatattagaattgtgtcggagttccccgacgtgttccctaaggaattaccaggcatgccacacaagcgtaaagttgagtttgccatagatcttatcccaggcaccgcccctatttccaagagag

SEQ ID NO: 95555 - DNA, 792 bp, Zea Mays
gaggtgagcacgtattagtcacatagtcataagtatatgaaatgtgaataaatacatacacaagagaaatatggcacaggaaacacaagatgagacgatcgagaggtcaaacgacgtgaaaacgacgtttgaaagataaaaagtgccataggaggtttggaatttgaattgaggcatgaaacgatatggaattgagccgatacttcacgaataggtttatgtagatgaatatgagtgaagtgtgtgcttggtttgaatttaggcgaagaaaaagagatttgtgcactcggctcgtaaacgatcgctcgaaacggggaatttggtgaaatttaagcctggaatctcggattggcgtgaaatttgacaagagtgttactggaagtgttgggaaggtgcctgaaaaatttgggtttgattggagcatttttggctggtttgggcatttcaccgagcacgtggcgtgcgaggaattaggttttcggtgaaatggccttttgaggtgggaaaaccctcccgaaggagctaagaacctgcaggagtgttcaaggaatacaggggaacacaatacacaacttggttgcactggatttcacaggaattcacaagattttggaagagatgcacaagggggtggcacagtccaaagaaacagagagaaagagagaagcagaggggaggaaagagggagccagagctgctcaccgaggagggaaggagaggggcacgaggacgccgtgggatcgccggtggtcgccggagagggggaggtcgccggcgagtgctgggaatcgc

SEQ ID NO: 95556 - DNA, 622 bp, Zea Mays
agcctctgggataggtgctacagccagtgtttcagtaggggctgcattagaggaatcttcagccaacatatccagcatggcacttatctctgcatcacttggattcaaaggtacctcaaaatgaacctgcctctcgtcgtcagggattttgccaattgaggcaaccaaagcactaacctcttcgggagagggtcgcactctaaggcccaaaccactatcaccagcaggaggatttgacacaaaaccggtaaatgccttggaaggaggcagattccaggctgagtatgcaacaggagcaccgatgttcgacaccttgcctctgagtatcatctcgagccggctcaccaaatccacaacaggaatccttctgttggtaacccaggttgaatcagcgaggcctcgatacagataagccgggtatgctctgtcttttagtggctgaatgttcttgaaaatgaaatcggcaaccacagcttctgcagtcagacccctctctttcaataacccaacctcagcaagcagagcccctgcctcagccacctccaggtctgtgggggattcggtccaactcagagtgcaaacatctggctgtctccctgactgtggggggagggaattcccg

SEQ ID NO: 95557 - DNA, 847 bp, Zea Mays
caacaacacttgatcgaatgaaaccgagtgagatgagtacgagaaggcagaagagaaattctaagtgcgagtgagctcaaacatccccctctacatttataaggtggctttagttttttatttttttatttcttaaggtttttaaaactaaatcggagaaaatagcactaatgaatcagttagtgccacatcagcaacatacaggtgtcggtgtttcttacctcgctttgataactaaatttattgtgcgcattacaagctctagagggcgaagggcgcaagatttatactggttcaggcagagcgttcctacatctagtcatcagtggcttgcgctaccgacaccattgatgatcaaacttgtagtaggggtaacaagcagtggagagagggaggagaggcacccagatctcttatcgaggtggaagtagagcttagaagatgtgaggtggagtcctggctaagtcttggattggcggggctctgaacttctggtccttgtccacgctcctccttctgttcgtccttgtgggcttgtctccgtctattgatccatttgtcaacctctcttgccttgaggccagcccctcccttttataggctaggagaggggtcagccagtggtggcttccccgagaaggatccaagggtaaaaccagtgttttacctcgggcgagtccacacgtactcgtggggcttggggctgcctcactgccacgtaattattgcgagggtggcgatggtcccaggcaccatcattccggctttgtcgaccctaggctcctgtaccctagggcttggtgcagtctgtcatgtagtgccatgcgggaggcctacgcactcaggc

SEQ ID NO: 95558 - DNA, 314 bp, Zea Mays
tccctacaaattgagccctccaccagttctgcaaggtcatcaactacccagccaccaagaattgctagcaatcgatcaccagtgtgcccgaatttcttgttcccccaaatcaagtttccgccaccgtagaaccaagctcgccgtggccagccctccacaggtctgttcataccctccccgtccctgttctagcatctttgcatgctggtgatgcccctcgacccctttaattgaactggaccgccagggatcaccgggaacgcactcatctgtccgccaccccctcggttcacgtggacagagcttgatagctc

SEQ ID NO: 95559 - DNA, 394 bp, Zea Mays
accacaagctctggtccaaagcgccacgtacgtgctttctttctctgtcatctcagttgtgtgccaacgtgaacctatgtacatcagcgttcgtgtcgagctacgcaggggcgcgcggcaacctcctttattttccaactccctttgaccggttttcatcggatcggtagtgccagatgcatgcatgcggaagagggagtgtgtgtgatggcagagagcgaccgaattggacgttcactgaaccaacgtatggaaaataacccatcgatctcatctggctagtgcgttggtctatatgatcaagctctgaaaacagtgacaaagtatgaaaactacattgtcttttgtatgcggatgcattcccatgtcgatgcatgtagcatatatgcaattg

SEQ ID NO: 95560 - DNA, 564 bp, Zea Mays
gaataggtttatataggtcaatatgagtgaagtgtgtgcttggtttgaatttaggcgaagaaatagggatttgggcactcggctcggaaacgatcgctcaaaacgggaattttggtgaaatttaagcctgggatctcggattggcgtgaaatttggcaagaatgttgctggaagtgttgtggaggtgcctgaaaaatttgggttcaattggagcaagtttggctggtttgggcatttcaccgagcacgtggtgtgcggggatttagggttttggtgaaacggtattttgaggtgggaaaaccctcccgaaggagctaggaacctgcaaggatgcttaaggcacacaggggaacacatttcacaaagggaaatcaccagaattcacaggatttagagttgttgcacaaagggaagaggtgggaggctctgctcaccagaacagagaagaactgagggagtgagagagcaagagttgctcaccgaggagaggagaggaggggagcccaaggtcaccagagcaccgccggagagggtggccgccagaggagatcgccggcggggggg

SEQ ID NO: 95561 - DNA, 545 bp, Zea Mays
gctccgccgccctgcgacaagtgtcctagtatctagaaccgcgacccaagggggttcggacacgcaacttggccacccggactaaaacctgcgagtcccgagcatgtatcaaaggacgactaatgtcagacggagaaccctatgaggtgtactactaatgcttcctagctaaaagttgtgtacagatccagatcccggcgagtttgcctcccgaggattgttgacaaccttttcagaaacgctggtatccaacctcaacacatcaagcctgcatcccaggcggggggccaggtaccgaggaggagtcaacaatatcgcacacagcaggaacaagttgaaaatagataagtgctaatactgcttaacaaatagtactcttgagtaccttacaaaaagcgaaagtattacatctgttttcaagtggagccctagttccatttctactctgcaggtatgaactacctccacaccattaagggccgcgggatagctagcttcgagcggatcgccggcggaggcgaccacatcagcaccgacggcggcgg

SEQ ID NO: 95562 - DNA, 538 bp, Zea Mays
cgacaggcgaggatggctcgcacatggctacagtttcctgacggaagggggagacatcatccacggtgtcgttcgactggcagggatcttggaggacaacgaactacatgacaacgcccgaccttagactcttgtaatagggctccgctctcaccttggcctataaaaggatgggataagcccacgctcaggatatggtcaatcgaacagtcgaacgccacaacacttgtaagcactagaacactaacacatttgcacacgagtagcaataaatggatgtagggacatttagaccaaactagtataaacccttgtgtcctcgttgcacaccatccgttttgagatgcacaaagcatgattagtactgaccggtgatccgaaacaccgaaacgtttttattgctaattcaccattttgatgcaaaggtgtgagcatgtttagatggactcattgaattttttgcacagaaaattatgctatagttgtcaaatgactcatttctactctttagtgtagtcctatcatgaacagtcctgat

SEQ ID NO: 95563 - DNA, 391 bp, Zea Mays
ctccggaagtgatctaaggaacttatgagtgaaatccacatccggtacattaaaaccgagtcccttgagttcattcactatctcatttaatcggttgaacatatcggatacactctcatcttctttcgtaataaattgctcaaactttcctttgcacacatatagcttggcactcttcacaattgtagttccttcatgaatttccattagcttaatccaaatctcatgagcggttgtgagattcttgatacgattgaactcatttatatcaagagcatcatagaatacattcatggcttgatcatttgtaaggatattctcattgtcactaacggatggttcatcttctttcaacacaacaaatccatccttgacaattggccaatttttt

SEQ ID NO: 95564 - DNA, 1277 bp, Zea Mays
agcgcgagcatgttgcaccgtcttaagtcgtcgccgacttaagccgattgctccgttagaagggcatagtggtcaccctgggtgaagtaagcgcgagcatgttgcaccgtcttaagtcgtcaccgacttaagccgattgctccgttagaagggcatagtggtcaccctgagttgagtaagaatgcacgtccatcatgagcaaactgagtattcttgaagccttttttattgatgacatatttcccattttacagagtacattgtcgtcccggtagcttttgaaattcagctaggggtaaaacttcctgaggtgttctatattccaggagttcctgatttctgtgtcgtccatctgagtgagacgatatgaccccggccgagtgacttctgctactatgaatggtccttcccataagggcaacaacttgtgtcgtccctcccccgttagaattcggcggaggacgagatctcccactgagaaggatcgttgtcgcacgaccttgtcgtgatagcgtctcagagtctgctggtatcgtgctgattgaattactgcattcagccgttcttcttcgagtacatcgatgtcctacagcctagtagcttcggcttctgctatgctttcgaagaccaacctcggcgccccgaacttgagatcggcgggtaatactgcctctgacccatagaccatgaagaaaggagtgtttccatgtagagcttggctaggttgggttcttaggctccaaacgacgtagggcaattcccttatccactttcctgtgaacttttcattcttttcgaagacccttttcctgagtgcctccaatatcatcctgttagttcgttcgacctgcccgttggccctcgggtgcgctaccgaagcatacttgatctgaatgctcttttgctcacagaaatcgaagaattctgaacttgtgaagttggatcctaagtcagttatgatattgtttggtattccgaatctgaatattatgtcttgtatgaattccacggccttggctgaggttaaagaagcaatgggtttgaattctatccatttggtgaacttgtcgactgctaccagtatatgagtgtatcctccttgagctttcttgaaaggtccaatcatatccagtccccagcatgcgaacgaccacgttactggtatggtctgcaattgctgtgctggtagatgttgttgctttgacaagtactggcaagcttcgcacctctgaactaactcggctgcatcgcttttcgctgttggccaatagaatcct

SEQ ID NO: 95565 - DNA, 403 bp, Zea Mays
ggtaggaagaactacctcgactccataagccatgaagcatggtgtgtaccgagtcgaacggtttggggtcgtcctcaagctctagagaatcgtgatcaactcctagggccactgtcggccgagtcgcttgaggcgggcaaaaactcaaggcttaaggccttgcaggatcatgtcattagctcgcttgacctgtccatttgcacggggtgggccacaatggcccaatcaacacggatgtggtattcattgtaaaattcctggaatttgttccctgtgaactgtgtactgttgtccatgataatcgagtttggcacctccaagcgatggatgatgttggtgacaaacctgatggcttggtcggaggtgatctttgtaatatgccattgtaaaccctaaaaatgtt

SEQ ID NO: 95566 - DNA, 750 bp, Zea Mays
cgtcgaaggtgagtggtatatgggaccactttgtctgaacgaccggcccggtgagggctacatgattgactcttcggtagtggtctttcttctaccgttttgtgtcaaagtcggtgctcgatccaccggtaatcatatgaatgacccctcggaagggttgctcggcgaagtccacttgtttgggtgctggtggtggtggtggattttggtgatgtggtggtggcggcggtaggggttggatttcttggtgttgctggtacatgtggttttgctggtggggatggtaatgttcattgtgcaattggtgctggtgatattgctggggatggtaggtgtgggcgacaactctttggttgtcagctggttgatttctggccatcctatctttggtggccttggtttcagggcaatccctagtgggatgtgccgagtcttcaccatggaaaagacattagaaccttcgctattgtaacattcagcctttgcctctccctctagtgttgctgccacgaccctgttgcgtgcggtactcatggcgacgagcggtgtctccagtctgctgctgattagcgatggtgtgcacatgggactggttactgtttggccagcctgagtctgactgcacaggcctgacccatgtcttgctagactgtggaatgtcctcgggtttccgctgtgactcgacttttctctggtggagctcttcggaccaggcatattttttgaatagctgatataactcttgcaagt

SEQ ID NO: 95567 - DNA, 773 bp, Zea Mays
gatgaagtggctccgacacctacctcgacactacatcgatgaatggggtgacttcagtcaccagtttatcgcaaacttccaatctctctccgataaaccggcgcagccatgggacctcaaatccattaggcgctagaatgatgagactcttcgatcgttcctcaaatggtttcaaacgatgaggaaccacatcctggaaattgctgaggtggctatgattgatgacttctatcgaggatccaacgactcagccttcgaccgagccatacttcaaaaggcgtcagccacctccgaacaattgttcagggaagcggacatttacatcaccgcggatgagcgggcccaaaacctcatcagaggcacaaaatccgcaccgcccgcatcgcggcgtgatatgaactagcaaccagacaaacgctgggaaaagaggccccgcgaggaggtgcacaccaccgggacacctgtcgctcgagcccgcggaggagtacgaacactggatgagatccttgactcccagtgttcatatcacaaggacatgcaccacaccctgcggaattacagagacttcaaacactcagtcggacatggccgaccgttctagccactaccaccaccccctccctgaggagagcctggcgatcctaggcaacctcagcagcagaaagaggagagaggtggagctttcccgcacgttgacagcaaggtcaacgtcatattcggaggccatggggcacaagaaagcagaaggcaacaaaagctcaacgatcggcagg

SEQ ID NO: 95568 - DNA, 628 bp, Zea Mays
gaacttaacaagcattattaataatgaataacaaattgggttggagtagataaatctaatttaacccaccttcttttaacaacccgggcacacgtttctccttaccactaccatgacacttacatctaaccctttttcacagatgacttcacccaccccccatcaacggaggagacactcgtttcagttttgactacctttctcacgagggttttccctccatgttgtgggaagttctctgctctgcctgttaccctacaccccctctgtatatggtgcagttgtacgaggagcatcaggtgccacgttgcagggtttggctgaccctggagtctcaccctctgcagcctggatggcattcccttgattccgagactatcgggttcagggcggacgacaccactgaggtcgcagcggtaaaagccctaacaaccttctatggataccatcccctggagatggtgatgcacccacggcgactcttccatgctgagaagagggatgaccccatgtggtgcaaccgagtgagccacgtaaaggacgtgtgggccatgcatcccaaccaggttggaaggatcactgttcagtgtatgagcgtgttgtaccgcctacaagctctgcagagcga

SEQ ID NO: 95569 - DNA, 800 bp, Zea Mays
cgattagaggtcttatatgagcgttatcgcagcccaataattattggaagcatgtagcattcataagtcagtcctggttaaaatttggagaacaattcgatagcatatgcacataagtgctttaggtccctcagtatccaatgtaagtcttacggagttttatgccaggtgttaatgcctctatgttagaccccctaaaatatggtgttttaagtgacttgtgtgttgtccagtttaagttgagaaaaggttaagaaacattaattaacttgctcacacccatgttttgagttgcaatgtctaaatggttcgctaagtcttctactgtgattagccaactcatgttaaataggagtcgatttcgttaagtgtttgttatatatatatgttgtgtctcggattgcgatagtaataggcaagccgacatgtatgccgtcgagcggaccgtgtcgttgctctagttagccaaattgttcgatggcttgggttaagctcgtagttacgatgaattacttgttgtagtctaaatatgtatggttatgatcgcgggtaaaaattagtagtgctcaagtgatgtctaagttaaaatacaaactagtgtgtaaggggcgcatcgatacatgtatatgtaccgggtcaattattgtggtggatgtgtttgtaaaattgtgtgtggtgattctagcgtacaaagtaactcggataaaaattggtaatttgacatgttggttatcatttgattaaatttaactctaacaaatggtaacgtgttagaatagttcaagtctctagagcgcggc

SEQ ID NO: 95570 - DNA, 447 bp, Zea Mays
cttgggttactttgcaaggtgtctggggtaaaacaggtggaagctgcacaatagccatagaatctggtacattttcacaactgtgagaaaaccatccatctgttggatcgctgagaccagaacatcattattagcatcctttgcgaagccctccacttgaatcaaagttggagacattattaccagagaagcagcagcagacgaagagacaagatgggacccaggcgcctccagctcaacatcccaagttgggagagcaaggccatcaactggagtaacagtcaccacccttcccgccagattcaaacttggagactttactacggctgacggctcagcagacagaatcctcgcagaatgtgctccgccgtctccatcccccatagatgagcaagaataccctaaagattaatatccagcagcgccaccaccggataccattgcctg

SEQ ID NO: 95571 - DNA, 371 bp, Zea Mays
atgttggtgcatcataacaacagtgtggtttatcttgctggattgaatttcttgaacttactctgtttctgactttctgttacttccctttgctacttcatttccatacatgtagcatattttaagtcgtagctttagttgagtgcatttttttgtgacgaagcttttttatctgtcaccatcctacacaatagtgaaccaatatcataataaggcaaactaaaaataaccaaatttcagatctgaggtagtgtgatactagttagtagttactgcctttttgtgctctctttgttgcatgggtgttgtttcttcatttgaattcagaagttgcagatgtcctaaagtaagaataggaagaaaaaacttgc

SEQ ID NO: 95572 - DNA, 987 bp, Zea Mays
gactgatcaatgcgatcttcctcatgggtatgcccttgaggtttcttgagccagcttctctctaaggtatgccttagagagaggtgcttgacgggaataagggtatgcccttgaggtttcttgagccagcttctctctaaggtatgccttagagagaggtgcttgacggggaatttcttgccgatggagcgtgcaaatatattttttgaacattatttaacatggaatttcaatttccacatacaacttactgcatatattcacgataatttatacatgtgtgtggagtacaattattttcggcacgatgtcgactttagcatttgttcctgatttcgtatcaacaacacgagtcgaagaacatagtttttccacgatggcaaagaagacaaggaatactgcagtaacatggggccggttcttaccttgcaatagacctttccgatgggctacaacgatatatatgatcgtgcagcatgatctgtcttaagggtatgcccttaagactgtgtatgaccgaatgacgcgatattcctcaagggtatgcccttgaggtctttagaaccagtttctctctaaggtatgccttagagagaggtgcttgatgaagaatttgttgtcgatgaaacgctacagcaggttgatggagctcttcccgcgatgcagcctgacggtgtttggtgcagcggagaggcagcttgacgttggtttcggctacatggtgagcgaggagcagcctcgcggcactactattgtttttttttgcctgtagcgtctaactctatatttatagagccaacagggtagcagttctggcaacaatttggcacttttctcatttgattttcttttggaccgatatcagaaccacgtcgccacgacttatgacatgcagaacgtggagaatttgaatgccgtacagaacgtggagaatttgaatgccgtacgcgcgatggttggctttggccagttacgcatgacttcgtc

SEQ ID NO: 95573 - DNA, 328 bp, Zea Mays
aacaaagaacacaaactcttcggcggaaaggtcgccgagaggagagaccccaacacaagtcctcccggcaaataccggcgcattccatccaagcaggcggtataccatttcgagcactcactcagtctgggcgcgctcgggatgaagtcacaaggccatggcaaactacggcaacgcaaagcagaaaccttgaaggcaaaggggcatagagagctcgaagatgaaagggcgccgcgagtgggagagaagcaagacatggctgctatctgaggggtgaacccatttttaaaggcaaatttccccgctcgtgccccgaagcgtcacaggc

SEQ ID NO: 95574 - DNA, 559 bp, Zea Mays
gtgactgataggccgaattgcaatgcctaaatctcgaatttttgtgcaacaacttgtccatacatctgcagcaaacttgtagccctttctatcagctacaattatgctatagcaactaccctcaatcgagcaatagatcttactttaattcgacccaaaagtctggccaatgtcactagtgaccaaaattcagtcagtagagtgactgacagcacaactttgagcttatttttctccaaactttgtatgtgatcaaagcttagttacttaagcaaagttgttctcctactatagctctagacttttgatgtgttgaccctaggcaaattctttatatttttagaactacagagctccaaagtcaggcatgctcactgatttttagacttagccacatgagaggtgtagagtgactttttgcaaataagcccaaatcacatcttttgacttggaaatcctcaaatgtgtgaaccttatgctttagggtaccctaattccatggtttttgcacttgggtccaaaagtgtgcaaaatttacatataaccccctagggtttca

SEQ ID NO: 95575 - DNA, 604 bp, Zea Mays
aagcattaggccttctacatgtctttccaccactaggcggtttcatctcttggtttggtctatcacataacgctgctagatccaatcttacctttacattatcctttgacttatcagaaatgcccatgattggtacccaaagtgatggaaagagagaaagtataagactgatttcatccccagcagggcccacaacaagaaaattctgcagttcgtgacagccatggaggatgacaaggcggtgcctatcggccaaacgcccaacttcctggtccaccatcaccactaggcctaggcaaaaaaacccgtaacccgatatccaaactcggaattcccgaacccaaaccataatattgggtacctgagttttatttgggaatttcgggtaccaacttatgaaacccgaaattattctaggtaattcaggtatcacctgccggtacctgaataacccgaacccggaaatattaagccagctacaggggcctatagctaacagcctacatgcgtacaacccattagcccaagtgctaacccaactcacatctcacacggtcacacgagcctacccactaagtcactaaaccaactacccaaactcaag

SEQ ID NO: 95576 - DNA, 371 bp, Zea Mays
gcattccttattataaatctctagctggtaactgcaacagcggcgccatttgtttgttaaagtaaagtaatcggtctgcacttgcttgcgcgtcaggcaaggagtgggcggggcacttttttagctggtgatgtgaggtttgctggtggtggcctgaagcgacagggagacattccatgtcttgagatcttcccaaacaaatgcaccaattacactactcctttgtgttctgtttcctaaagagaaattaatggcgacatgcaaacaattgtatacataatctgaaacgttcatgtatatagagttgtcagatgtgtattacactaatctcataatcatataattttatttatcacaggtgctttgtatat

SEQ ID NO: 95577 - DNA, 1298 bp, Zea Mays
catattagtattgggttcagatacccaatccttttaccggcattagcatcgggcttggtaccgtacaggatctcttgttggtcatgttgcattctacaagtcacacatgcatgtgttatatattgaaaattaataacacatagatgtggaaatatgagcgacacttacagtgcaaacagagtcacaagttgcacgtcgagtttctgaaggttcatcattaaccacatatcctcgaatgaaagaaaggccttttggtccgaaccaataaaagcatggtctggtatatgcacactaatggcgttaatgccaactgatgatgcacgcatgtaccagtcatgcaaccttttaataccagcagggaccttcctcagtttctcaagagttagtagaggtctggcctgcacataaagtttaggcacatttttataatctgtcttagtcgggatctttatctttgcggccattgccttagccttttctgcagactcctcgtgctcggccaaatcaacagtacgtgacgtgaggtcccgtccaatccctttcaaaaattgagttgtgccagcagtagtagctttactcttctttttctcgaatgtggacaccaattttggtagagggaatttagatttctttgattatcgtgaatcccttgatggttgtggagaaggtggtggtgtcctaaatgttgatgcttgtggcggagatggtggattagaaagaggatgaggagcagcatgggaagattgtggaggtgatgatggatgtaaaggtactaaagtttgaggaggcggagatggttggggatgagatgacgacggagttggtggatcaaccaattcaacatcccttagaggccaaaggatgaaattttttatggcttgtccaagtgtctcgattccttcgggcccagggatgtctagcatgtcgtcctcagatccttggacgaccatcgtcacttctaccatgcaataatcttctggtatgtcggttccatgaaacttacgtcctgggatcgtaatgcatgttcctactttcttcgtgcgattattgttaataccatatcttataaccagtgtgcacgtcactggccttgttatgtcatcaactggataacagaccttattacccgttgacgcgacagagcttgggacggttgtacaatcggtgcaagcctgcggttgagctgctggaattatttgcagctgtggagtggtcatctgttgaacagacatcgcacttgccaactgctgcatcaattatggtggaggatttgatgcatttgagacatcaagtctttg

SEQ ID NO: 95578 - DNA, 797 bp, Zea Mays
ttcagcatggcgatcacctctagcatataatccaccttcagtttctatttggctccacaccatagttccatttggcgctagacaccagaaccaggctagtaaatgttggcatgctaccctcaaggttcctaacgtagaaccagacgccctcgtaaccgcgaacggaggacgagagagggaccttgaggtaggccgactgccacgtgctgcgcagctggatggagaagcagccgacaaatgactggccaccacggccagtggtcagccgcgggctaaaaatatgcctccacaattgccagtgggctccatgccaatataggcctcgcacagcctgatgaaacacactatgagcaggaacaagttggggtgaagattctagagctccaacttgtagaagaagagtagcccctgcacaaaggggtgcctcggtagcccaaacccacgctcgtagaaagacacgagcacgaacacctcgtcgtcctgtggccgcgacaccacaccctagtcttccaactgccatcctaaggtctccacagggggagaacccctttttctccaggtcgaggacacgactttgacgaagcgagcaaactaggaaggaggccatggatgtagggagaaggagagcaggcaggggatttgaacaggcaaaaagctcggaggcaggacaactttaggataagaattgaggtaaggacacaacaaaacagtaagtgtaaccgaccccaggaaccatttccctctatttatatgcacagtcatagggagacaaagcatcactagaaaaacaggcctag

SEQ ID NO: 95579 - DNA, 704 bp, Zea Mays
ctcggatatctataaggcagtatactcaatgtcagagatagtacttgtcggtgttttgacccgagggtcctaaccaacgagtgaatttgtgctatgtgtccccgttcagatgggtgatgcaagaagacataagattgatcctggttcgagtaagagaaggcctacttccaacgagtggggatgagacttatattttcttgcacctagatgctcatagtactggtcgagagagggtgtgagtcccaagtctctgaaagtgatagaggcgagtgccaatatcgagggtgaagaaggaaacgatgaagtcttgcctcccccctttggggaccctggactcctccttttatagtcacaagggggaagcccataaatataagggttgtcgtattgctgttgtgtttagaggagacgaactcgagcccctgtagaagtatgggcgacgggatggcccttgtcctggtcgttgtctttgatcaggagaagaacgtttgatccttgtaaccggcgctttcaccgggtagagagccaagaccaaggtcgagggctcggacgcatacccgagcctgtcttgtgaggggcacgaatgagacgtttgtaagtatgtcaagtcgtagtggttgaaatagcgttcggcatggtaaaaagtgcatggtaatccagctcgtgcgtcaatcgggatggtagaaaacagattggacaccggc

SEQ ID NO: 95580 - DNA, 611 bp, Zea Mays
gtcatatactcatattatttacttgtcagcaatgcgttaaacactaacaaatattgaaatagtattcaaaattttcactatatattaccttgatgtgtgatgtaggaccttttacaaatgttaatcatttgaataccgtcgaaatgtcgttctgaaatcaataaacagagaggtttgctattgaaaaatacataaatgagctagagaaatggtagatctcacacacatgaagttatcaagcaacaatacctattgatgtatgcattcacgatttacggaatatcagtataaccttatgtggtgacgtaacataaagcagacttagttggagtggttaagtgctagcgcctgtagagaattagtcacggttcgatccctacatgcctcatatttttgccgcgtgagagggacagccacggtgggtggcagaacagccagaggcaggctacccttgcagtcttaataagtagtatagattagagatctatcgagaaataaagtctccttgtagttgggtgggactatcccggtcatcgtggctcagcaagctgccagccacggtgacgaagcccgccaaactagccaccgttcctacccctgagatatgcggc

SEQ ID NO: 95581 - DNA, 862 bp, Zea Mays
gctcaggggaagatggtcccttgcagactaggttttaggagccctcgggagaaggaagaccgatcagtcggcgcttcactaacccgaaaaatttcattgtccacctcgcccactaaggagtggacacggatcactcggaagaaggaagtaaacatcccaagtcagggaaggagagcacgtcaatccacctttccgatacctttgccctcaaaggaggataggaggaagaacactgtcgtgccggctcctttctaccctgacatcctcttcatataggggacattggagtcagtgcccatctccgacgatgagcctaccatgcaaggggaggaacctccccagcgtgatgcccggcgacgaagaaacagacgtcggaacatgcggtgacatcatgaagccggggaacaggatccagtgcagcccgtgtcctaggacgaagccttggaagtgggagaaactctcgacgaacgagtacaccggaaaagacgtaactcccgccgccgtgatcgccgtcaggctcaagatcgggagcgagagctagccgaacaagatgctaggctctggcaagagaaccctctcctcgctcgaaacctgtaccccgatttcgcttgagcactaaacacaccgagtgaagttggaggagtactagcacaggtagctgacagccttctgcgaaccccagatgcagaaggttaccagtggctacttactcaggtggcaaatcatcttctacccctcgctcatcttgcgaatgacctgtgtcacgccattaacagccgacgagacgtgcggagcaccatcagcgcatcgcgtgaccggcgacatgaaaatgagataaggcgtcgagaggagtacgaccgag

SEQ ID NO: 95582 - DNA, 452 bp, Zea Mays
cgcgaggggaagtcgctcgtccatgggcggtcgtggtgctaccggtggtgtggtggccaccatggtcggtttcgacgaaaggttattgattggtctggggccgtggatcggctcacggatggctcagattgggtgcgcacactctttcacacagccaagattcgaaccgttagatcacgatccaaggggggaatggaaacacgttttagatcatatctaatctgaaccctagagcgcccatccggcggctgtcctcgcataatgctgcaaggcgtgcgtggttttaatctggagcatagaatgttgatcggacgaccgatatccatgtataccccttcgactagcgcaaattgtaaaagagaccctgagcttaactattatcaacccgcagtccaccccggttgtagcctatgtcctgagaattttatagtttagcccccgagctttccaga

SEQ ID NO: 95583 - DNA, 610 bp, Zea Mays
gtcccttaaatccgggtgtgacatagctggatgccactcggccgttaacttcaatgcctctatagattagacttgtgcttggtgaccgcatctagacttcctcccatttcagccgatcttcccctttggtcgtggtatattcattgcatatatttgcaggtctcaccgctttagaaaatcttagagaatctgggcgggacacccaatgggtgtgcccaacgggtgtctgcccagtaaaagatgtccatcgtgtagtcctgaaatagtaacttgatacgacagagaggtgtaatactccacttgagcggttgactttgattccatccggtgtcgtgttatgcgaagcggcgccagacgcctaactcattttaggaggtttgaatcattattgaattcttgtgactgttcggtgagcgggtaggaagcgaacggtcatctcccggccactttaaatagcccgctcgcctaggctactctccccacttgttctcgttcattcgcgttcttcttcttccctgcttcttctccttcggagtgagccatggccagaggaaaaaatggcaagaaagggtgccaccccaccgatgggaagcacaagcgcccccccgag

SEQ ID NO: 95584 - DNA, 689 bp, Zea Mays
tttgcctgatgagatggacgaacacaaaaacacaaatggatttagattgcttcgggccgacggagcgtaatacgctactccactgtgagttgtattactgagagcttgagaaagtctgggtctggatggagatgtccctaagggagtttgagtgtgcatgtccccttgcattgtactgcatgtgctctcacttttatagtccaaggggagcacgtacaagggagctggaccccaacaagtgggaccagtgttctagtattaaatatatacaacatggagccataagtgcaacggtgggctgagatctcctcttcatttagcgtgtgtttcctccgaccaggtatgttctccacctcgtttgcccgccctgtgcccgtcgcggtatgtacctggtatgctgacgtcgttggggctaagcacgctgacgtgcacatgagttgatgcgatacctcggtgttctcaccttcaccctacactgtagcagacacatcgccgactgagcgacgcttcatgatgtcgtcgtccacacgtgagagataaccgcctcggtaacttgtgttatcctgagcgggcattaaatgagcatggcgcaaccacgacattgtgtgcctcggtaacacacggagcagtcttgttgccatgtacgacctatcagatgcccatcgttctccgcacgtggcaaagcacgc

SEQ ID NO: 95585 - DNA, 579 bp, Zea Mays
ctcatcttcacagcatgtgctatggcacctctgaccctcctcgtcgccctcacggcggagttgctcctggtacagctcacatcacggctttgttccgaccgcccttctcagatgggtcgcgacgttctccgacagatttcaccacagcggccaggtttctatatcagctcatgagacagacgcttctgccacggatgggttacagggaggctgccactcatattcagcttttggctccttggtgccctagtttctcactcagagtttgatgtcatggattttctcatttgagagatcgaggacaccatactggatggtctccgtgctcgtcgatagctgccttatgctcactatctgtgtcacatctttgctcagctgattcggccccctcagttccaaggtactcttgaggcctctcgcctcatctttgggtcgtaccgtccagctccagaggatcctgtgccgacacctgctccagtgattgatactcaggccgaggatagcacttttcaccagtttgagactcaggacacagcagtccatgatgatgatgatgatgactttggggttccacctccg

SEQ ID NO: 95586 - DNA, 458 bp, Zea Mays
tagcgtgcaatttcaattttcatctttgtccaccagtagtgttgctttagatcatgatacatattagtgcttcccggatgaatagaatagcgactaagatgcgcttcatctaagatttgctggcggagctcttcattcttcggcatcactatgcggttattgaaccataccacaccttgatcgtcttctttgaaacatttggctgttccagcccttatcttctcacgtatgtgcttcatacccacatcatctttttgtgcgtcaattattctttgtaagatgactgactccagcttcaaatgatttgaagtcccatgttgaatcattcccagatttaatttctccatctcctggcataatgtaatgtcagaagtcctcactgttagacaatggcaggaagccttacgactgagtgcatctgccactacatttgcttttcctgggtgataatggatttc

SEQ ID NO: 95587 - DNA, 883 bp, Zea Mays
cgggaaactaacaaatatggtataaatgaattagatgtttagtaaactactaataataatatagaaaaacaacgaggcgatgtactcatacctttatttgcggcgtcacatcaaatatcggcgcggaagattctgtatgtggtgttgctttaggagtgacgtttgtgttggtcggcatgttcttgccactgtcaccatgtttaccctgaaaaaattgtaatggttatatgctatttaaagaaaacgatgaatagaaaccctccaatgaacaatacaagtaataataaaaacattaccactagggttgtaggtgttttgttctgtttcattaaatttgtatgaaccagtggatcaatatcagcttcatcgggacaactttctaatagtacacgaatatgttgttgcattaacagtaattcgtgtacctgcgtgtctgtcaattgcgtatcctgctgggatgctggagtagacatatcggatacagtttggggggcggacacgtacatccttctttacgtatcatgtaaaacaaaaaaacactgtttaaaataatggcatcaaaaggatatcgacaaatgtttgaatggattttttatattgacgtaaaaaccataaaactgactaacctgcagtatgggaaagaatatcatatgattttgtagttgttttctgcacatcataaccatcttcattgtcccccgactcagcacggaggacctcatcaattaactcgccaaaaacatcagatagattgtattgtttctcaacaatctgctgaagagtctgtttaataactgaacacgccttaccaacctccgtatcataatgtgacaacttctctatgaaacccaggcggtggcgggatggaagctgattcagcttt

SEQ ID NO: 95588 - DNA, 671 bp, Zea Mays
ggaaggcagtggagtagacatattctgacccaagtgtctggagagtaccaattatcaggtacatcaaaaacgaggaggagctcgatgacaaagctactgctaagcgcattgcgaggcagtcagcccattatgctatcataggagacgtgttgtacaagagaggggttgctagagtactcatgaaatgcatcgactaaggtgttgagaagcctttgctgcaagaaattcatgcagggcagtgtggagtacatgcaacatcgaggactcttgtggggaaggccttcaaagcaggcttctattggccaacaatgaacaaagatgcaactgacctagtccaaagatgtgaagcatgccaattcctggctaggcagcaacacttgccagcacaacaattgcaaactattctggtcacctggcccttcgcatgctggggggttagatatgatcgggccattcaaagaagctcagggagcatacacccatgtgcttgtggctatcgataaatttatgaagtggatagagtacaagctgattgcaaccctaacctcatccaaggcagtggagttcatctagcagattcgggatacccaacagcatcatcacatacctgggatcgaacctcaccagtgcagaactcttcgacttctgtgagcaaaaatgtatccaagtca

SEQ ID NO: 95589 - DNA, 450 bp, Zea Mays
ggaaaaagaaagcaaggtacactaaaccctcgaagtcagaatcgctgaagaagggaagactggaaataacaaagcaaggtgtaccgcaatgaaccaaaaaaccaaagcaacataacaaagcgaggaccggtggaacgattacctcaaatcgctgaagaagggacgactggacgatttcgtgaccggtggttgttcgccaggtatccaatgcggcagatctacacgagcggcatgaacgatgagcacatgaatccggtgccgaaacggaaatcaatcgaaacaaaagaaacagggatcccaagaagaggaacggacggcggcgacggagtcgacgagaagaaaggagcggttgcagttagggggaaaaggaagacaacacagcagaggggcttcatataagagattgggagaaagcagcggcatgggcgctgcggtggaaggacagggcac

SEQ ID NO: 95590 - DNA, 380 bp, Zea Mays
accagaggctactccgtgcaattaagtgggtcgatgggcatcacaggcatacgagagcacttaaacaaggtttgaattgggcagagttttaccaacacaggctggccacggtgaacttggtttcacggtgttcttcgactgatttggggggaatatgaaattggagcttgctggtgatcagctgggagcaatactaggtgtgggggtgcgcaatgatgttgcaaagctagttacgggctcaatttataggcagcttcgtcggtggcactcaatttgatcgaacaacgcggcggccggagataagaaaggactctggcacggtgaatacgtgttcaatgtcgtggcagtaattccggtggtcgacgggaagctagagggag

SEQ ID NO: 95591 - DNA, 303 bp, Zea Mays
ctgcccctgggtaatggccttcctcttcaaatctcccaattgaacacgcttgtgttcaatagcaagagccttatccagcagtctctgaaatgatgggaatgtgtgagcaaccagtgcatattgtaggggcccaatgagtccttctgtgaagtgctcttgttttctttcatcatctaccacctcatcaggagcatatcttgacaactagatgaacttgtcacggtactcgctgacagacatgttgccttgcttcaatgacagaaactccttcttcttgatcttcatcaatccagcaggaatatg

SEQ ID NO: 95592 - DNA, 550 bp, Zea Mays
ataatatactacaataaaaaacatgggtcaatcatttggtcctaacagatggggcaatcatttggtcctaacgcacgggcaaaaatcagtgtaatttcacaacagattgttgttagggagtccacacaccttatgggaggagagtagtagggattctgtgttccaaagtgacaaacacagacagagctgctctacaatctgaatctgaaaaaaaaacaataacaattctgatcagtatgactgcaagctgaaaaaattggtacagtaaattgttagaaactcagtcagttgaaaagcaatattatcagtcttggacagcttgaggaggctggttgtgatgggagactgaatatttatgatgcagacaacaacttgttagtatgtgctccacgtactgacaacagattgtatacagtaaagctaggcataggttctccagtatgtctgatgacaaagttaggggatactgcctggagatggcatgctaggtatggacatctgaatttcagagctcttcgggatcttggtctaaagatgaagcactatttta

SEQ ID NO: 95593 - DNA, 467 bp, Zea Mays
gattaatttaactatcaagcacaaaatgtaaacaccaaaatgtactagcaaataaaatatcaatgacactagaacaaaacagatctagaacaactcataaaaattaacgcacaaaaggtaaaccaacaacggatctatccataagaccgtcatcgcgataaacataaaatgtagatttatttacggtgcttcctagagggacggtgaggaatacgagcgggcgttcgcaaagaactgcatagaaactggattcgccagcacccaggcaaagtcttcgacgtaggttcggagataccgatctccctagatctgctgcacgacagatgcagggacgacagggcaaagaaacaatggcatagagaattgagaaggagaagacgagttggtcgtgttgctatatgccttcaatctcaaggtgtctcccctttattgagtggtcgcaacaacatcctagattcagtctgcta

SEQ ID NO: 95594 - DNA, 332 bp, Zea Mays
taatttcatgcgagggaaaactcagggcaatagatttttcatacgaacgtgtccaccctttaatagattcatctacatactgctttaactgatctcctcgttgttctaataatgccttaagagatggatttgtaatacttacaataggagcctaaggcaaaggtaggagagatgtcatatcgatctccctttgatggatgatcttctagtggtgatccaccatgaagtatgatagatacttttctgccgcctttttgtgtcattccttgagctgtcgcaacacctcctcctcctatttgttgcgccattcggtgagttgtcgaagcacctcc

SEQ ID NO: 95595 - DNA, 450 bp, Zea Mays
ctggatgtagtcctagatacggccacataaagttgtccatgagtgaagaccggtttcttgaggtaaagcccaaccttggacaaggtttgtccttggctcttattaattgtcattgcgtagcatactcgtactgggaattgccttctctggagtgtgaacggccattttacatcagtagtattgagggttattcttggtattaaaaccgcagcacccacattagagcctgtgagagcaatgcatctcaatatacgctgtccaggctcggtaacgagtagtcgtgtaccattgcagaggcccatgctttgattaaggtttcttaacaacataattatgacaccctttttcagcataagctcgtgagatgggaaattgtttgcattaatcgaatttaagaattcagtaggatacaacacatcgaaatctggtattctttctgatgattttgat

SEQ ID NO: 95596 - DNA, 394 bp, Zea Mays
gttaaattctggggctaatctagcttgtctccacttataaatttctctaaatgatggctcatgctttagtttccgatcaaaatggctaaattcccatgtcccatttagcattccatttgtccgtctgtttttcttcttttctgtgtggctcaaaagcttttgaataacaatcgaaatctcaataaaacctttaaagacaagccatgcatagaaatgaaaacttcttatcagaaaagatcaccattaaatgagtgtagtgcagattggatttgaggatgtagtatgaaaaggatgtcatccccttgaaaggagtcagccgaatagcaacgtagaggctccagttcattaaaataagtacgaggcatgtcgactacacttctcactcctatgcaac

SEQ ID NO: 95597 - DNA, 593 bp, Zea Mays
gcaatcttgaaacacaatggaagcctaaagagcacacaccacaaccagcaaaacatggcctaggggccaacaacagcagcacaaccacgaccatcatcaagtccataacatcaccaatcaacaacatcaacaagctgaagaccccccttcatacccataatcttcctcaacggacatgatgaggaggaagaaccaataagtgtcgaggatataacaagggcccatgcaagaccgcgagtcatatcgtgtttttatggcgaagacattaggcatgtcaccaaagattgccccatcataaaggatgccaaagaaagaatggcgagaacaaccctaaaacaaataatgaagcccatagtccacacctaccaccaacaataccctccccactacacagacaaatagtcttcataccctcaatacacacaaaattactatccacaacccatccaccaagaaatattacccccaccccaccacaaaaaataatacccctagcctgctaactacccaccaccaccaaaatatgaagatgtcttctcccaaccacctgttcacaaaatcatcaacatgatcacatgaggttacaacatgga

SEQ ID NO: 95598 - DNA, 278 bp, Zea Mays
caaatatgcttcgaagcaccaaactagtgaccagtaaccttaaatccagattatgcaccgtagttggtatggctggagctgattttactctgtttagatgacaggggcaaaaccagatggcattacatttgttggagtcattttggcctgtactcatggaggcttggtggatgaaggcaagctgcttttcaactcgatgagaggggagttcggtcttaagccaagaatcgagcactatggttgcatggttgacctgctggggcgtgttggtctgttaa

SEQ ID NO: 95599 - DNA, 453 bp, Zea Mays
aaactctgaggcgctatcacgataagaccatgcgacatcgatccttcgcagtaggagatctcgtcctccgccaaattctaacgggggagggacggcacaagttgtcacctctatgggaaggaccattcatagtagcagaagtcactcggccgggatcatatcgcctcactcagatggacggcacggaaattgggaactcatggaacatagaacacctcaggaagttttacacctagctgtatttcaaaagctattgggatgacaatgtactctgtaaactgggaaatatatcatcaatagaaaggcttcaagagcgctcaaattattcattgtcgacctgcattcttacttaattcagagtgaccactataccctactaatggagcaatcggcttaagtcggcgatgacttaagacggtgcaacatgctcgcgcgtacttaactcagggtgac

SEQ ID NO: 95600 - DNA, 304 bp, Zea Mays
tccggacaactcggacagagtcactgggcaagctagagccaaagtgggagggtcccttcatcgtcaagacgaaggcgtcccccagcgcgtccaggctaacaacgccatccggcgaggacctagagcattcctggaatattaataatctccgtaaattttttgtttgaatcctcagggctaacacgcccttgtaattcaccaaacagtatcattccggcccgcactctttttctcccgggggtgaggtttttaatgaggcggagccatgtaatatacacgcaaaaatccccccgcaaaaactaag

SEQ ID NO: 95601 - DNA, 307 bp, Zea Mays
tccacaatgacccaaatggaatcgtggtgccgggaggtgttgggcaatcccacaataaagtccatgcaaatgtcctcccatttccaagatggtattgggaggggttgtaaggtacccgctacctttaaatgactggctttgattctttggcaagtgtcgcactcagatatgtacttagaaatctctctcttcatcctagtccaccaatataaggatctgaggtcatgatacattttgttacttccggggtgcatggaaaatttggagagatgagccttgtctaaaattttcttgctgagttctggat

SEQ ID NO: 95602 - DNA, 277 bp, Zea Mays
gcaaaagttacctaccagttcctcttacctgttgatgtgtgtctggaagcttgcttcctttcttgcgatgattgcacgccaccgtctgaggttgttacaaacaacctaccccgtacaccaaacaccccgtcgaacggcagcacccgattgaaagaagcaagcttcgtaccttttctagtcggccgacatcctcgcaactacggctctgtgcccgacgatagtgtgaactccgttgagagcttgggccgacgacgctccaagcgagtgacgcgaccaa

SEQ ID NO: 95603 - DNA, 538 bp, Zea Mays
cgattgctctgtcagtagggtatagtggtcaccctaagtcgagtaagcgtgagcatgttgcaccgtcttaagtcactcccgacttaagctgattgctccgttagtagggtatagtggtcactctaagtcgagtaagcgcgagcatgttgcaccatcttaagtcactcccgacttaagccgattgatccgttagtagggtatagtggtcaccctaagtcgagtaagcatgcttgataataaacagttcaagtgcccttgagaatgaagtctttttattgatgatgtattttccaattacagaatacaatgctgcccgatagcttttgaaatcttgctaagggtaaaacttcctgagatgctctatattccatgaattccctactttcgtgccatccatttgagtaagccgatatgatcctggccgagtgacttctgttaccacaaatggcccttcccatagtggtgacaatttgtgccatctctcccccgttagaattcggcggaggaccaagtctcccactgcgaaagatcgatgtcg

SEQ ID NO: 95604 - DNA, 505 bp, Zea Mays
tgaccgtggctgttaccgtggcaaggccttaggcaatagaagggctttgtattgtggtcagttgcgacgttgtaagatggctgacgacgtggcataaccatgagtaacggcggcacaacggtgatggtcgcgcggccacgtcgccggcaagtggatgagcgacagagcggctactgtactccaagttcatccactgcgagatctttttacccggggatcgttatccacgtttaactgggcgtgaatcgcggcgtcggcgcgaatctgagtgcaaggtcaccatcagcgaggggggcgaacctgagatatttctgcagacactgtaccatcaggatcttattcagtctgcctgaccgagcgttttgtaaggcctggatctctgatttctatataacaacttgttaatccacctgtaacgaatttgttgtcctataatccagctacaattcaactatagaaaccctatccatttgcttactggattaagcacaaatccactccaaag

SEQ ID NO: 95605 - DNA, 454 bp, Zea Mays
gagaggtcaccgtcaacataattgtagtctccacaaaaggtctcaggcatatccccactaccctatggggtcagtcaacctcagtcgtgggaggacctcagcccggagtctcaacagtgacccgtatactgggaaagacagaacaacgtgccataccgaatgtatgcctacgcatgcaagcggaacccgccacacactactgtgaagacatcagcaatggactcgctatagggacctatatgacacactagcaaggcggtacgccatacggggagtacgactacacacgcccctatgaacgatcttagggacaccacgtcaacccaaggctgcagatcgctccctctctagtataaaataggtctcctatgtaaggttcttcccttgagttataaaagggaaggccccacctccttatacacacacgcacgagctataacacagttctcagcca

SEQ ID NO: 95606 - DNA, 335 bp, Zea Mays
attaaatagcctttttcataaagtattggcaataggtattattttgcatctttcaaatgggtttgtatttttttctggtgggctatctcattattgatctagcaaaattttatttgcccattattgcattattttgggttactcatgatttatttgaaatatgactcattatcaagttctatttgtgaccctacttaaaatgatgggctggggtgttatcatttttgtagtggggttctactggttacacgtccactggatttttattaacaattttggatttgtttttataattccaataattgttttctagttggaataatgctaaataaaac

SEQ ID NO: 95607 - DNA, 454 bp, Zea Mays
gtgattaagagctcaaaccttgcaattaggtgaggggaaatggtcgtttagggttgaagttggtgtcaagcaaagggaagggctagccgttgcctattctggctagtacgagctcgctagagctcggccagtcatcgttcgccatcgggaattgcgagttgtaaagaatagaaaggggaggggtctgttcgaaaatgtcagtgacacaaccaaatagtgcgcagggttcttcaccagttattcaaaccgctgagggcctctatgcaaatttgccatgcgggcgcacgcacgcgggcatgttctgcctgtactgggctggctcgggccagattaagcccagtactgttgatctttttcctttttgtttttctaccagaattaggaaatccctagaaattatagaaaaatggtaaaaatatgaaaccaattttgttggacttctaaatttctatag

SEQ ID NO: 95608 - DNA, 507 bp, Zea Mays
gaaatactcagataatggtggcgacggaccagcttcaagatcttctaaacgatgtgcttcctcctcaagtgactgagcaagctcatacacgcgccacattgcaaagttcactgacacctctttggccgtatctggcgaatccataatctcgtttccggccaaatctttcaactccctcccaactacaagcatttttgcaatggcttgtgcgaggtcactacgaaccgtttcaaatcgggttatctgcgaagggaaaccataccgacattatggattaacatagaactaaaaatttatacaaaccatagccctaaaattggtggaagggaaaccttaccgacactgagcgaggtgccgagcactgaatctgctgctggggagtacatcgcatctggctgttgttggattcgggatcttgctggtgagtttgctgggtgtggaacgtgcctgatgtggccacgcaggtgacgggcttgctggtggagtgctccttgccgctaccgtcgc

SEQ ID NO: 95609 - DNA, 654 bp, Zea Mays
tttgcctctgccacttcgggaattcttcaccggagtcccctattgacgtccgcgccgccgcttaccgtcgtcgtgtcagtacgcagggaattgtggggtaagcacccatccatcctattcgttttgcatggtgcgtcgtgtagcatcgatcggatcgaggttttgtgtgtcatgccggtgatccacgcagtccggccatggcgccgccagccgtggttcctggggaagaagatatcactaccgttgatctctctgcgaatggctaggattagatctaggtgagggtgttcttccgccgtcgatttggtagcgaacgggcaagatcgtgctatcggatacctcttttgtatattaaatctggatccttgatccatcaatggacgatcgtgatcgactcggggttgcttttgctccgggccgtagatttgtgtttgggcggtcctgcgctgtccgcggattcataatacaccagatctaatctgaaccatcgggcgctgatccatcagcttagatcctagcataccccttcggtctgtcgatttatcaaaagagcccctctgttatttggtattcaacccgccatccctagtagcagtactctgtgtcctggaatattttatgctaggacccctgagtttcctggaaatcgaggct

SEQ ID NO: 95610 - DNA, 864 bp, Zea Mays
accgccggtaggcacagctatctatgatcgtatgtatgtatatatgtatgtatgtgtagtcagtggcagatctacaccccgagccacccgtgttggaataataaaccttgtcacgttagttacgtagtcagtaagttaggtgcatgcattagttggtttagtgctgcacgagctccagaatttgtggacgccgtgcgtagtgtggctgtggtggagcgagtcacgcggtcacccatagacgcggatgctttcgagatgtacgaacgtggggatggacgcgctaaaatcgggcatcgtggagacactcgagtcttccctgtgtaatactttcagttgataaatatgcatcagaaaacgtcgcaacttagcgcggcaaaaatctctcttgagtccaatacagtgtgcatgtgtttgtgaggtccagtcttcttctctgaagccggcgttcgtaggacagtgagctttcgtatcccaacatttggtaccggagccaagtttgatacgtcatgtcagctccaacgggagaccgttccctgactccgcctcgtcgtcgacaatggagatcgccgccgcgtcgacgcaggaatggtggcgacagcgagcgagtggtggagaggatcgtggagcggatctcatcggctggacctacgacataccccatgctgaccaagacaaactacaacgattgggcgctcctcatgaagatcaagctgcaggctcggtgcctctggcgggccatcgatccgagtgatgacgtcagcgagccggaggataggctggcactggacgcgttatgcagtgccatcccgccagagatggtgtctacactcgccgtcaagcctacagcgaggctggcgtgggaag

SEQ ID NO: 95611 - DNA, 299 bp, Zea Mays
gaaggagataaaatttttgggtcacaccatctctcaggatggggtatcagttgatcctgagaaggtacaagaggtgatggattggaaacctcctaccatagtacgacagatccatagttttctgggattggcagggtattatcgacgatttattccggatttctccaggattgccaagccaatgactgaattgttgaagaaaggagtcaagtatgaatggagccagaaatgtgaggatgcctttcatacactaaggcaacatttgacaacagcacccgtgctagctcagcctgataaca

SEQ ID NO: 95612 - DNA, 395 bp, Zea Mays
atttcaagtggctggcctttatcctctgataggtgtcacattccgatacatatcgggctatctccctcttcattctggtccaccaatacaagggcttcagatcatggtacattttggtgctccctggttgcatggagaatttggagagatgggcctcatccaagattttcttcttgagatccttattcttaggaaccaccaatctgctttcaaaccacaatataccctttccatcttagcggaaacatttatacttctcagtcttctgatggaggttctccttaatgatttgtactcccttgtcactgagctgggccatgatgatctggtcttgcaaagatggctcaacggaaatgtgagacaaagcaccagaaggaattacttcaatcttcatc

SEQ ID NO: 95613 - DNA, 891 bp, Zea Mays
gtgaaggtagctaaaagctacaattaaagttatgatatatctactcgtaggacaggaatgataaaggactgataaagaaagtaatagattggttcgattggaatgtgttcggtgtctctcaattggtcgtacacctttatatttataagggaacagatctggagctgttcctcggtgagatccaacagatccccatagataggttaggataatcacgcatgggataagtactctcgtccgtgtttatatgtttgccaggacgcggaccgtccgaccgtgcttagatgcgtgtgatccgaaaaacataatagaaacatctaattgtttctttaggagattttcttctgacggcataaggagatcggatagctctagaagacaagtggtataggaattgtactatgcccccgttaatgatgtgatctgttatagcctgacacaaccaaacaagaagcagcgagatcagtttgcattgtgaattcattacatgctgaaaagccacaaccaaacaacacctagaataccatagttgatgtccaaatttgactaagagctaaaaggattttgtagaaataattagaagataaatatcatgaaaaatatgtatatcgtcgcattgaaatccagagagcaaaaaaagagggaatggagcttagagcatctccaagagatacttaaaaggttgatcctaatccttagtttaggataagaagacaaaacgtgtttccaacagaaccctatgccatatccctatactgccgcacgcgaaaaaaatcgcctgagctgcgcaaaactccgccgccgagcgagctccccatccaacgtctgtatctcgttcccgcattgattttagcgattcgcgccatcccgcgtcgaaggattttatcattt

SEQ ID NO: 95614 - DNA, 342 bp, Zea Mays
ggacgatcaccacgatgacagtcttaagtcacccatcgtgtgcgacaatcacatctatccgagcaaaaagtagcctaagggtgcaaccagattagcacaaaaagtgcgcgaagacacccaagggtgtggagtcgtctaataggcgcaacatctatccaatcaaaaagttgcctaagggtgcaaccggattagcacaaaaagtgcatgaagacacccaatgtgtgaattcatctaataggcgcaacatctatccgagcaaaaagtcgtttaagggtgcagccggattagcacaagtgcgcaaaaacacctaagggtgtgaaatcgtccacgaatccatccgag

SEQ ID NO: 95615 - DNA, 392 bp, Zea Mays
agtaaaaatatcctatcaccgccatgatcctaactttgatcaaattcggagcaaccgtggccggcttctataaattgagcgtctcccttgctccgcctccttgttaggaacctagcgcaccactcctcgctttcgattatccacagtagcccaggaattcaaaaatcccccgaaatcggtgatccacgccgccacgaagcatcttgccatggtcaaagccctctaaggtaattatggtcgggcctaagagtgttttgagttctcttacatgttgtgatgctgatcgacctgcccgatcgaactatatcgtagccagaaccccgaaacaccgtgtcgccaccgtggaacgccaccgcggacactccctccatcaactcaccgctctgtccctt

SEQ ID NO: 95616 - DNA, 409 bp, Zea Mays
ctagaatgcagcgatttaatgaggcaggcattgttctacattgctctcatctcagcaacataaaagggaagatttccatggaggctatcttttgagaccactcaccatgactgaacccgctgtgatacgctccagggaaagtaaccacaaactcccctgcgttctgaactaatctgtttggagatataagaaccaaccgctcatcaaccaccgaaggtaccaaaggaagtcattcggtaaaggaaggaaggagtagaactgcctgcagcagggaacccctgaatccacgagcacttcaggggacatcaccgtcgtcttatcacccagcaatgcaaaggtttctgcaccccagatcgcaatcccgaaatacaaaatcaaatgacagttacagcagcagagaacaggggtg

SEQ ID NO: 95617 - DNA, 490 bp, Zea Mays
tttataccaaaaattcattttctttattaatttctgatttcctaaagatcctggactaggcacataattcctgagaagcgcagggtgtcgcgtgtaaattgttcctagactccggctaatcccgtagtggacgacgggttaatttggaataagccgaggggctctttagctaaatgtcgcggcgaaggggtaccggtagagctgagccgtccgatcctggatccagggaccagattagatcccaacccaccaatacacccgagccacggatcatgagatcgacggccatcatcctacacccgagctgggccgctatgatccagtctggccgtccatctgcgaaccaacggatcagataccccaagcccaaaaccggtaagagttatgcgatctggaacgtcccttcatgatccgatggtttaggttgcatcacgcgcagagatacgattcctcctaatccggcccacccattacaagatcaacggccagg

SEQ ID NO: 95618 - DNA, 582 bp, Zea Mays
ctgaatttgtggaagatgcatgtggtttgtcgccagaggaaggtggtggtgctggtcgactcgacgagggaattggtgctggtatacggccggtcatggacgtagtcatgcgctgctgccatggtgtatattttcctgcagaaacattagaccttgcacttccctttcagctttgcaagcaagatgaaacaatcgggttacattagcataatctttataagcaaggatgtcctgaatttccctatttaacccgcccaaaaatctagccatagcagattcctcaccctcctctatgttacaacgcaacatacccatttgtaattcctgataatattcttctacacttttagtaccctgtctcaattgttgcaacttgtttaacatatcacgtgcataataagaaggatcaaatctagcctgcatgacccgtttcaacccatcccaagtttatggcatgttattaggattcttcttaccatgttctatccaccaaacagaagcaaattcagtaaaatcactagtagcagctctaacccgcgcattctcaggaaattcatgacatacgaacttttgatcaaccgc

SEQ ID NO: 95619 - DNA, 493 bp, Zea Mays
ccagatcgctatggtttcccacgagctggtatggcaattgttgaacccactacttatcaggaagcttctaggattcttgagtggcagctagctatgattgatgaattggctgttcttgaacgcacttgtacatgggatatcgttcctttaccctcgcatgttgttcctattacatgcaaatgggtcttcaaaattaagacaaaaccagatggttccattgagaggtagaaagctcgtcttgtggctcgtggtttccaacagactcaaggacttgattatgatgagacttttgctcctgttgcacatatgactactgttcgaaccttgattgcagttgcggcctcatctttttggactatctcccagatggatgtcaagaatgcttttctcaatggcgatctacgtgaagaagtgtatatgcatcctcctccgggggttgatactccctcaggacacgtttgtcgtcttcgtcgcacattgtacgggctgaaac

SEQ ID NO: 95620 - DNA, 391 bp, Zea Mays
attcgattttttaatagccatttctcgttcacctccctgtactgtttctttgacattatgactacaaacatggattgtggtatctacacgtttcgtgcacatggcatgatgtaccacaacgtaacgtcgttcggtagggaagctggggcggaacataaacaccttgaactctacttctacgatgacgatcccagcctcgagcatagatatcataaatgtcgtcaacaacaacttgagaaagacaagacaattattaaacaattggttgaaatacttaagggaaatccataatctgagcaccttaggagtatggggcacgttgataacgttgaagactaccacatcgccttgaaccttgaccaaacgctgaaccagaagttatataatgcgc

SEQ ID NO: 95621 - DNA, 769 bp, Zea Mays
tgccattgtgcctcctcaaaggaaaatgccgcagtaccttttgaggactcttatttttaccttcaccatttttccatctagattcttcacacactgggcattcatcttttttgcataatccttccgaaacaaaacacaattatttgggcacacatggattgactcatatccgagtcctaatacacgaataagtttctttgcttcattataagatgctggaaggctacattgtgggacgacaatgataataacttcacaattgcattgaatgccacattgctgatccgagaaaatgacttgatatgaagaaaaatttgtgaatggtgaacctgggtgaagtgtctacttcatctcatctaacacaactgcaaacatggacttccctgtaccttcttcagatgtgaataactcatgcaccatatctggtaatctatcatcagggttatcttgttcatactcattcatactagcatcctcattcaaaccaggttgttcatctagatggtcagcattttcatttaatctgccagtcaatagtggctctccatgatgtatccatgttgtgtatgtgctcgccatcccattaatatataagtgatcctctacttgtgatttatgttaaaaagttgattcaagcactgtcgacatgggcataggatctcctcggcatcaggaaaccgctcttcaacaaacttcatgaactcatccaccccggctagatacttgttgctgaaaagcctagaattgatccaagatctgtccatctgcc

SEQ ID NO: 95622 - DNA, 525 bp, Zea Mays
ctctctctttctcgcctaccttgctcttctctctcagagccagcgcaacagaagcatggaaagagcgcgataatccgagaccccagcgcgcaactacaaagtttgtctcagctatgcttaagtgaagatcgggtgaaacaagggaaggaggtctcaccgacgatggcggcgtagaaagtctggcccaagcggtggcatgttgttccacgattaagctctaattccggggaggaaatggaagtgccccgaccattaatcaagtacgacgagggcacaaacaattggtgacagatcactatccttcatctgcaagcgcccactgcagtttgaccagcagatgcccacgatggatctcgagcttcactgattcccccacaaatcctggagctcggtcgctacaccatgcttaatcgacatggttggccgcctccctggaaacactagccgcgcccaacactaaccctagcacgaaatcaaccctggcggggctatactctctcttctgctcttggcctcactctgcta

SEQ ID NO: 95623 - DNA, 472 bp, Zea Mays
gtcgttcccttgtcacgaatcggcttgtagaggggagaattgggggaccggagtgatgggtcgtgacctccggccatggcgcctccgtgggtactgtctccactgcgattcgagttccggaaaggcggaaaactggggtcgcttgggcagtgcgtatggaccgttgattcactcgacaacggccgcgatggtgaggaagccacccgttgctaggagatagaatctgggccatcgatctcactatcaacggttagatcgcttgtaggattcgttgggggcatctgcgtcgttggatcgcgatctcgcggcacagaacgcgtacccattcaattaaaacctacatctcatctgaaccgatagttccagatcggacggtcctgatctgccaatacccgctcggcctgaacaaactgtagaaaaccccctctatttctagcatatgaacctgcagtccagcgcagagtgatctggg

SEQ ID NO: 95624 - DNA, 718 bp, Zea Mays
ctacgcgcctgatgacgtcagcacagaagccaagaagatggcccgctttttgaaagggctcataccagaactcaagaccatcctagccagccaagatttcctcagcttctcgcacctctcaaacaaagccatacaagtggaaagggcaagggaagaataaaaaggtcacctcaagaggaaattccaagtcctccgagctcagcagcaagaccggcaccagagaactcgatcctttgggtttccacccaagggaccaagcttcaatagaccagctggacccactccgtcacgtttcagccagaagagtcagagctcctttcaggcccgctcggttgcaagcaaccaaccaccaacaaatgcctgttggcactgcggagaccccagtcatttcaagaacaactgcccccagttgaaggcatcaggacctgcttactccaactcggtgaatagccccaagaatacctcagcacccgcccccaaggcgccctcctccatcagccagcaaaacaaggcccagtatcaaggaagggcacgagtaaaccacgtcgatgctcaggaggctcagcaagctctgggagtagtgctcggtgagttccttattgaatttagtcccgctactgtactttttgattcaggagcatcccattcttttatagccactagttttgtggaaaagcatggcattccctctacccacctagaaattcccttagtcacc

SEQ ID NO: 95625 - DNA, 485 bp, Zea Mays
gcttcggagagcccatatgaagacgctaagtctaacaatagcattgggggtcagctgatgaaggtatatttcaaagttctttagaacctcccctatcatgtcatttagggggaaccgaagccctgctctgaagaagctcttaaagacgataactttgtcctccctcggctctggaattacctcttccccagcaaatcgaacaagcttgctctcagactccccgaaatagcccagttttttcatcatagtcatgtcatcttcagttacagtagatttttcaaattcaagatgactaggctttgtcgggttcagaatgttgttatcctcttcgctttcattatcactctcaccctcaaccatagtttgtccagcttcggcattcaaagcaccttcgtcagtaacttcccctagcacaactagacctgatcgcttcattacttctgatatgggcgctgtttcggcagcttcggcctcgtccccctcac

SEQ ID NO: 95626 - DNA, 328 bp, Zea Mays
attggacactatcaacattttgtcatcctgaactaggatacttacattatccctccatctaactacttgttcttgccctcgtgtatctccaactccatgtatccgcagtcggtagagttacctgctagaggcttggtgggtagtgaggaccactatactagggcatctcgcttttcccttcatttgacctcctttgtctccctcatctctagtttggtctagtgacatcgttcgtgctttggtgtttagtgccaattagtttagttgtgtgaataagtggctttagttgggttaagtcttagtattgatatgaagtcatactaaggag

SEQ ID NO: 95627 - DNA, 325 bp, Zea Mays
gtaattcatgcaattgctcccaaaatcgtgccacaaaaggtgctcctcggtctgagactatagtccttggtatcccatgcagacgaactatctggtcaatgtagatctctgcatacttctcggtcctgtgggtggtgtgtactggcaagaaatgagcggtcttggtcaatctgtccacaataacccaaattgaatcatggtgcctggaggtattgggtagtcctacgatgaagtccatgctaatgtcctcccatttccaagatggtatgggaaggggttgcaaagggcctgctgccttcaaatgactagcttttaccctctggga

SEQ ID NO: 95628 - DNA, 965 bp, Zea Mays
gcgatagcctcagccagtgtaggaggtacaggtggcgggtttggagtttcctccccgccgcgggaagttcccgccccgtcacgagcatgagttcttgatggcatctgaggaagaaaaacatcatgaattattacatatcaaacgtacaccatctttattacattgtgctgaactgtaataattatacatactcattagtacaactcgacttccttatttattttacataaggacactacttaaactatactactctaattatcttcgtctttagccgctccactgccagcttcgggagaacgttcatctgcaaggttcatggaaggaggggctccaaaaaggtccaactccccatcaggttctccattagctgcttcagatggtccagcttccattgctgcaacttctagtgacacatttggatgcagtcggtcatataacaagtgcacctcttcatgcatggtgttacaatacgcttgcagattttccagggatgcgcttagttccgctacccaggctagagccttggcctcacaatcccaggcgaaagagcgtgaatttacggcccagtcaatagtcgtatctcgttccgcaatttcctcctgtaagcgataaacttctgccactagctcagcaatgcggcggctatctcgcgcacgctccctactcccatggcgtagttctgacataagtcgctccaccctggcctccagatcccctattggattgttgcttccactgctactccctgcatgtctaggagccagttggtgtcggggcacaccttgaggtccggttgcctttcgttgtgtggtcttggtacgcaccatatctccataagagggaaaaatttatttagtatagtttaaacatgatgcatgcatggcctaaaaaatatggaaccaacttctcgttgatcccctacctcctacgtataatattatttggcactcgattacccaact

SEQ ID NO: 95629 - DNA, 353 bp, Zea Mays
caaagctcggtaatcgatgcacatccttttggtaccatctttcttctccacaaataggacaggggtggcccaaggcgagatgcttggctggatgtaacctttctctgacagctcattaatctgcttcttaagctcaaccaactctggcccagatattctgtaagctctcttaaagataggggaggttccaggaagaagctctatggcaaactcaactttccgctccggtggcatgcccggtaagtccttgggaaacacatctggaaactcagacacaatcttgatcctctcaattgggtctgcttcactgctatcaacgaccatctgataacaacttcctttctttggctcag

SEQ ID NO: 95630 - DNA, 605 bp, Zea Mays
aagcgctccacctcctattgtgccaccagcaatgcttccttctaggtcgatgactgggataggagacactatgaccaagaaatgagcgttagcacaacgatagcaaaaaccatgaagaagacaaagtgaccaagaagaaaacttaccgtgcgaaggggagcagctcttgtgtcactgacgcacgagcgatcaacaccacttccctaaagttggcgagggagcattcaatgatctccaagctcttgtcagcccaggtggaggctccctcgatgagcttccgctcctctgcctccttctcctcttcctccaagtagtcaaggataaagggggagatccctggaaccctcctccagagcgggcaacacaggggtagaaggtggagggcccaatgttggtgggagctagacctcggctgactttgccaccacgacgcctctagtagggctgggtgggagttgtataataaagtctgtataattattaccgttccgcaatgaaataaagatggtgtatgttggcatgttatatttttccaaatgtttctttgcctcagatgccatcccggacccgtgcacatgatggggcaggtacatcccgcggcgggg

SEQ ID NO: 95631 - DNA, 362 bp, Zea Mays
ccttgaagagtaaggtaaggattgatatgtcatagatagttcataagactgctgtgcatggtgttcttcaccacagcaggaaaaacacaggacagtacttcatgctggatgagattatatgcagtctgcaaaagatgattagagttcatgatagttaacaaatatgaattactcaaggatgcagcatacaaatatgattaattctgagacactatggactgaaaacatacattgatatggctaacaccaagaagtaacacttcaggataattgatcagaggataaccaagaattggctgaattgctcgcactggctttgaatagccaagttcagcaagctgacataacacctcaagaaggac

SEQ ID NO: 95632 - DNA, 442 bp, Zea Mays
gcattttgtaatgtgcatcggactgacatagatcttgctattgctgtgcttcaccgactaggatttgaagaggttagcgggtctgttgggcaatgcatgatcttcatgggatggtgggagtataactgatggctgctgctattttaccgcaccagtttctaccgctatttcttctcatgacacttgcagatattcagttgttcattagtttcagttgcacaagtttctgttccacaagttttagtgctccaaagcctcatacgacgcttaagtcttgattttggtagcttgctgctacacttattccttaatatagtgttgtagttctattttggagatgcatgtactatgactgtgtgacatgcacatactacttagtaagggatgatgctggctgtttagatttatctagctttgtgcattataaggatgtctattagca

SEQ ID NO: 95633 - DNA, 755 bp, Zea Mays
gttcatggttatattatgtaactgcgagaaactatctatggtttggttatactacacataaaacatcgtcgggtgaaccaagttagttcagttccatagagattaaatctatttatgtttaattttgattagtaagaacaactccaacaaaactcgtaaaacatttgttgggaagaaagcgcaaaatgagtcctccaacggtacctttttatcctccattatctttgtgtcctgaatatctagccttttctccctcaaatttctatgaatttagggtgtgttttgtttagcttttggctttggctttctccaaaagccaagttaaatggctagatctagaaagcactttttttctaaaagtcgtgcttttagtggcttttgaatagaatcgtgaaaatatataatttttttgcgggttttaatggtttacacaacttttttttagttttttagcagttcacagcacacaacaacttttttacacctcatagcgcataacgattttttcacagctatagtccaaccaaacagacccttataattttttaagaatttttttacagtagaccctaatattaagtttaaggaaataaatttttagtagtcttttggagttgttctaatgacctctacatccctataaatctactcctaattgaataagcctttaggaataggtccaaaaccaaccctttctcatgtgttgcacatactacgcctcctccttaatctattccttgacaagaaatgctttg

SEQ ID NO: 95634 - DNA, 596 bp, Zea Mays
aaataggtcacttcattgcatcttggccacacaaagaaaaggtatgaaggatggaactatgcaatttcattgaatatcttgaagtttcattgattctgatcatagctatgttcttgtttttcaattggtagtatcttggcttaggtgccttatgctttaaaatgttgtttcctttggtgtacctaagaaaatacttcttaatcatggtgtgcttagacattgtgctttatatgcatgatcttgtcgtttttcaattggtatatgtgttgcaataatcatcatgtgtgaagtgtgcctacgttgcttttaaaatgttatatatcttgaggcatgcattgtttccactagtcataagttgtattatgtcatctattcaattggtatctttttgtgatgcaattgatatattatgcctagaccaaggtatgttgtgatcccctctagttctgaggacattagaatgtgcaaggtgctagtcattcaaatacttgacgcacaactttagggggagcaaacataacttgtgtcttttgagactaactatttcttgagtcatcctatatagtctcaaggtggaaaagggaagatgagcaaga

SEQ ID NO: 95635 - DNA, 310 bp, Zea Mays
ggtgtcaaaaatattttatgtgaggtgctactaacaaccatggtgtatgcatatgatgaatgaaatgtcttatgaggtgggggccttaagagataattaaaggggggttaggagttctagggtttctaaccttgggattaaatttgggatgttacaaacctaccccacttaaaggaatcttgccctcgagatttagactgggtttgagaaaaggtaagggtattccttcctcaaagagtcctcactctcctaggtagcttcttcttctccttctctgctccactgaactttacagagtcttacttctgag

SEQ ID NO: 95636 - DNA, 411 bp, Zea Mays
aattacggtggtcagtgcatatggtgtgaactgcttttttgctgatataaattattgttaaacatttgtagtcaaacattcaacgtcccacaatatatttcttgtttattgacttactcatttttatcttttccaagctgctcaagtgtgggaaagattttagtttgtgtcggccccatatggagttgctatggacatgagagttcatgtggaggaggacaaacgactgatggtcatttagaaaactaagatatgaattcataacctattcaatctatataagtgttgaggtacccaaaatccaccatgtgtaagttcatcacgaagaggcagctcacggttgacgcctcatttcaacaacacaacagatgatgtccaaaaatgctatttcgattctctgattccaccaca

SEQ ID NO: 95637 - DNA, 371 bp, Zea Mays
aagttatgcttatgcttgttttatgcatgcaccaagtgtagatgttatttactgtctagtcattgcactatttctggtcaagccgatgtaattaaatacatgttgcataacccaattatgagtggtagaattggtaagtgggcttatgcactcatagaatatgacttggcctatgaaccattgaaatctatgagaggccaggtcgtagcggattttattgtagaacatcggattaatgatactcataaactagacatggcatacctcactataactccttggactttatattttgatggatcggtttgcaatgaagggcaagggattggcattgtacttgtttcaccaagtgatgtctacttcgacttctc

SEQ ID NO: 95638 - DNA, 290 bp, Zea Mays
ggtgaatgttgatgttgaggtcgacattgaggccaagtgtggccgccaccttcagtcgactgtccatgtcaatcgtcgccaagctgtcagcatgtaccgacggcagcggtaaggacgtcacctgcacggccacatcagttggtcgacgacgctcgtcgacgtgctatattcagcagcaaccccaatcctccaccacacctctcgtcttcaagtagtgctacacccagcagcagccccaatctatctccaagcagtgctcgacacctccttcagtgtcggtaatgtttccc

SEQ ID NO: 95639 - DNA, 327 bp, Zea Mays
ctagggatgaattggctagataagtatcaggcaattatcagatggcaatcaagttggtgtccccactaggagaggaagtggtgaccgagttagtcccgcttgagccaaagaaaggaagttgttatcagatggttgtcgaaaacagtgaagcagacccaattgagagtatcaaggttgtgtctgaattcccagatgtgtttccaaaggacttaccaggtatgccaccagagcggaaagttgaatttgccatagagcttcttcctggaaccgccccatctttaagagagcttacagaatatccggaccagagttggttgaacttaagaa

SEQ ID NO: 95640 - DNA, 272 bp, Zea Mays
gtcagtatcgagaaagacgtctagctctatgaggagatcgtcggggctgagggatgactatcgatagggcaccccacgtcgggcattgtgaggagagccgattggggctatggtgagcattgtggggcaccacctggggacggtctgggtcatagagagatgcaacatgtccacgagttgtagagagatgagctggacagtgcaagaaggtgcgctagagcgacagacgagcgtgaggacgaacacccccgtcctgaagcaggagcggaggg

SEQ ID NO: 95641 - DNA, 680 bp, Zea Mays
cggaggggggagtggatcgagccggcctcaccgtacccactcgcccgacgacgtggtcgtgcgaccgtcatcgaggttgtcgccgttcacttcggtcgcgccacgccataggtcgttttaccacgtcgtcgcgagtcgtggagagtaaccagtgacagtcgtaagcctttgcccaatgagcgccacgacagatgaactccggtgactcattctcttatcaccgcaaactcttctccgtccaaattcgtcgtactcctggtcgccctctataaattgagtgtttggcttgctctgctaacttgttatgaagctagtgcaccagtcctcacccccgattagcgaccgtagcccgagaattccagttttcccctaattcggtcagtcgcgccgccgtaagatacctcgccctggctagccatctacaagtccgttcaaccccttctgtgccgttttttagcatccttgactgttaacgttgctcatcggcccaaccgattgagcgctaccgcgtttgggcatcgagaacatcatctcgccgccgtggaacacctccgagcgcacactcacgtcgacccactcttccacccccgttctgtccaaatttgtgcacatacccaacctctggtgaatcagtgaaactcaccctagcttcaatttaggcactcccgcatatggttgct

SEQ ID NO: 95642 - DNA, 473 bp, Zea Mays
tagctcattgttatatttggatcagaactgatgttttggttacctcattgttaatttgccagtaaattaccaaatcctgttcagtagacagtacaacgctgctagcttgtccactcagatgagtacccagtaagattcagaattgaaccgatactaaaacagggaaatatcctaagcacatggaaacagcagcgccaaatctatctactaaaagtagttttttattgattcaactagactcgttctctactaacgatatctcttaggcaagtcatgaagtcaatcaactaatataaaatagatggaggatttatcttgaagtttctttttaataatggatttatccaggagttggcatatggcatgtcatacatgcttgtagagagggtcgtaactcgtaaccatggtgatataccccttcctcccaggcaccgccctccttgcccagatccgtgtttgctaagcctggttcg

SEQ ID NO: 95643 - DNA, 693 bp, Zea Mays
gtggtttcagagaccgagggacaataagatttatgttcggtgggggatgctagcacagactcactccgaatgttgaatcactaggactcaacgatggatctgagactcgggggttatactggttcaggttcgcactatattccagtgtagtgttgatcgtagaattgctttgagcgtgttataataagtgtgcttatgtgggaagaaggagggggcctgcccttttatatctcaagggtaggaccttacactgggcttgtattctactagagagagatagaaagagaggaagagagacctgctccctgggtcgtgcgtagatatactctcggcatggtgtcgtcctttcctgcggctctggcttttgtagcgagtccattgttgacgtcttcataatgggttccacatatcagtctcaaagtgcggtcgtacggggcatggcttatcctatcgtcatgggcccttcgtcacatgccagcgtgcacatgcgcatgctcggtatggctcattgttccgaccttctgatgtacgggtcactgtatagaccctgttgcccattcggtgtgttgtgcacatatccagatgtggcttgttggtgacgcgtcccattgtagctgatgtggatcagtagcgctggacttagatctctgtctcgctgagttgctcgatagagaattggtcggccaaagctaa

SEQ ID NO: 95644 - DNA, 544 bp, Zea Mays
gcttgatgaccaggttcaaatttctctccacaagtgaagcagagaccattcactcttctatactcttttagttgtctctccttgctccatcctcccacctcaacacctttaccatctgctctatttcctcctcccaatctaccaagaacaggctgcttggtaaacttcattcctcccttatcaataatatcctgctgaacttgagccaatagttgtgccttgtgaacagtagcaggaagctgggacataactggatactgaatttcattcttcagtcctttgacaaactgactgacataaaatgtttcatccatcgtaggattatgaacagcagtagcatatcttgcttcctcaaactccttcacatattcttccactccccccttttgcctcatattcaacaatttcctcatcgctcttgggtattcctcagctccaaatttgtctaataccagtctagacaaattcctccaatcacccaacccttgcttcaaccttactacctgcaaccatcgtgctgcagtaccttcaaagttgagagacg

SEQ ID NO: 95645 - DNA, 578 bp, Zea Mays
gtacctgaatttggtgaagggacctcttcagctgtcgaagcaagacaaactgctccgattctgcagagcgttgaagagccgactgtagtgccgaaggtgcctacattcgggccagtcgaagctagagatgataaggccgaagagccacaggtggaaaaagtgtcaaaagtgcctggaatcctgagcccactagcagaggcagatttgctgaagatgcaaaaaaaactcctgctgcaactccaaagaggaggaggatggctagcgtactagacgctgtcatagagaccacgaaggccttgactcctgctcctaccaagaaagctaccgaagctaccaaaaaccaagtcgaagccgaagctgagccttcagcgtccacagagacgaaggccgtcgtgcctgaagataaggtgggtcagcaaattttagataccggtaagacgacagagcaaaacatggcggaaaaagcaaaatctcctgtccccgaagccctagctgaagatattgattacattgttcgacatgcttcggggaaagaattatctgaagaagaaatcttggaggccaaacactacgcccaa

SEQ ID NO: 95646 - DNA, 705 bp, Zea Mays
gcaaggtctagtgacattttctgaggagaataacgatctgggggtggtttgggcgagctcgccggagtgcgtccctggggaggcttgtgcaccgccacctatgaccgatgtggagttgccgaggttaccaggatcgttggatcaagagcgggcgcacacgattagaagcaaaataacccttcgaccagaataaatcttggcgatcggattaatcgtgcggtcgggatttgaggaagtcgcattaaatcgggccatcaattttaaatccgtgggatagcgttgtgtaccggtttggtagaaataggatctaatcctggccatcaggagcagatcaaatggctgatataggtgcatatcccttcaccgaaaacttttgctaaagaaaccctagatgtttttgtaattgaacccgacatcctgtcttatgtaaaggaaccctcggattaacttttaaaattataaatgggtccccagactttgcaaaacagtctctagtagatattttctggtataaaaattaataataaataatagaagcttgaaaaaattatatcttcttcatttgaactccgattttggtggttctcgaacctatggcctcgtagcgacgtgtagaatattattgtgtggtttgttttcatctttgatgtaatgttatttttacctgttacatgtctatctgtatgtattgttgtgaatagaagc

SEQ ID NO: 95647 - DNA, 307 bp, Zea Mays
ggctcgtctacgtcggggacggctgatgtgactgtccgtggtgacccatattttatttcttgcggggtcatggcctctgatccatatagaaggcggaaaggggtgaacccagtcgccctgcactcagtcatgttcagcgcccagaccgcttcaggtaacaggtctgcccacttgccttttttgtcgtcgaggagcattttcttgacggctgtgaaaattttaccattggcgcgttccacgactccgttggattgcgggtggtacactgaggcgaaggtgagcttggtgccaatggagaagcagaaat

SEQ ID NO: 95648 - DNA, 535 bp, Zea Mays
gttcgtagagtccatttcagattttgtgctgtctccagcatgatccttgattcagtccgatcagcatcaggagttatgatccttgcacccaccgactgaaaacgccataaaatacggttgaatcggtcgttcgcaagaatgggacgagagaatgcaagattccggctgttttatgtcagaccatcaccacttcgtccggtccgggcatgggcaatggcgatgtgagtagcagaaagcatgcagagcatgtctcacaagctcgccgtagcttcttcctccacagcccatatagcgacgcgggccggccattgtatttagggcacgtagagtaattaatatcggattgtcttgtcacttttgctctcctctccaataatcacaatacatgacaggcgcaggcggtttggtctggtcgttaccggggcggggggaaagggggctggaaaaagtccgtcgagaaaacgatggccggagtgagggagaaaaaaaaaaacaggacggcgcacctgcacgcccgccacctaatgtttaggca

SEQ ID NO: 95649 - DNA, 342 bp, Zea Mays
gggcaatccgccgtcgtgcgcgtgcgtgcgggattcgaggaacgaaatcattttggattcgttattaaatgcggggaggtcggtttcgaatttcagcggattcgccggttccccttcctcttctcctttatatatttgggagaggaggctgcccgtggctctcaccccgcactcgcactcagcctcagcctcttctgttttttcggccacggccaaagcttgtaatcgaatgaagcgagagggacaagagatccgcataccttgctgccgtcgccttctcgttcctgccatggccgagagagtcaacgtccttccgccccgtgacccatggccttactccac

SEQ ID NO: 95650 - DNA, 940 bp, Zea Mays
cgcgagcgccgtggagaagcgctcgataccggggatagttgaggaggaagggtatggagcgaggggagaggagttggaaggggacgtggccggggctttggagcagaggtggcctccgtgggatgggttggccgagcggtacaagctcatcggcgccacctccctcgccttcgtcatctgcaacatggacaaggtgacccatcctgtttgtctctatcacgtggacggttccgtcctgggcacttggcacgggatgacaggctggcaggcggctaattgcactgttacgattttgctctacggtattttgagctgctagaattaaaatgactatgaattcgagttgttgacctgctatagttttgctcatggaaaactaggtagtcaatgacatttaccggatattcagtgggaatttgggtggcaactggcaaaacgattgcactgtttttttcctctgggtttcctttagagaactttagctgaagtccactgatgcaatagtctttgtgcttgctctaaggaaacgtgccatatctaactgtcacattttttagggcttattttggaactcatttgcatcactagtacaaacatgtaaccttcactatgtaccaacagggcttttaggcatttccttacgagcatgaaattgtttgaagtaatgaagttgctatttacagtttaatgcactcttcttcatgtgacatatttatttaattctatgaaagcttttatggatgatcggtccatcatcctttcctgagaggaacaactgttcattgcaatattctaattttgcaggttaacttgagtgtcgcaattattccaatgtcacatcaatatggttggaactcatcaactgctggcttagttcagtcctcattcttttggggttatgcattgagtcaactaccaggaggatggctggcaaaattgt

SEQ ID NO: 95651 - DNA, 579 bp, Zea Mays
ttgccatcggatcctataaagatgttgttgaatgtgatgttgtgccaatgcaagcatgtagtattctgctaggaaggccatggcaatttgataaagattatatgcatcatggtagatcaaatcaatattccttccaataccatgataaaaggattgtgttgcatccaatgtctcctgaagcaattttaaaagatgaacttactagagctagtaaaatgaagaatcaggaaccggctaaaagtgaaaatcagattgtggcaaatgaacttgagaagtgccaaatctgttcatgataatagaaatgagatcaagctgaaaggggcatgtttcattgctactaaatctgatttggatgagattgatgctaccactgttgtttgctatgccttgatttgcaaacaaaccttgttttcacttcaggacatacctctttccttgccccctgttgtcactaatcttttccaggagtattcggatgtttttccaaaggaggtgccatcgaggctaccaccaattcatgggattgagcaccagattgaccttattcccggggcctccttgcccaatcgtgcaccatac

SEQ ID NO: 95652 - DNA, 958 bp, Zea Mays
ctaggggttgtatgattgtatctctgatggtgctcggcggcgaggacggcagaaggtccgcgaccctgctgcaagcaagtcttctctcctgctggctggatggtccgtggtttaggctggacggtacgcgaacgcacaaagggtcgaagaaccctagaactcactccaggagggatcccacaggagagttctagagagggtgccctaggaacggcaggccacccaggaggtccttagacgacgaagagtcgaagagagatgaatattggaggtttggaaaaagctaagctaggtctaaattacgtcacctcctaatacgataaaaaacgaaggaaataaagtagatttgattgattggttcgattggtgatactcgcaatcgtatgtaccccttcatatatatagggagaggtctggatcagttcctaggtgtttatcaataaaatttgcgtatttagttggataaacacacacaaaaagagatattttatcttatctttactatattaaagcatcagtttcaacggtcgtcccgcgtcattcttttataaaaaaccacttttatttgtttgaaatcaacccgcgactctctgtctcacccgaaggaatagacggatggatagcccatagaacacagacaccctccctttctctccgtactatctacaactccaatctccttcccctacctattcgccacccctgtctcttgccccctcacccaccgccgccccacagccaacgcgctgcctccgtctctctcttctccgctgccatgacaggaagattgctgaatccgcacataatatataaaaaaacgtagtaaaacacgggcaactcgctagtctaatctaatcgcggagcgtacgggctaacccgcggaccgtacgaggcatagaccgtcctggccacatggccagattgtccggccttcctaggtgccacatatggtgctcaa

SEQ ID NO: 95653 - DNA, 633 bp, Zea Mays
caccaatcattttagctcgttaaaagactggagactggagactatgtgtcgattacagacggctcaatgccctcatagtgaagaacaaatacccgttgccgggtaattgatgaacttttggatgagcttcacggggctgtctggttcacaagtctggatttgagctcaggatatcaccaaatccgaatggcacctcaagatattcacaaaactgccttccaaactcacaatggacattatgaatacaaggtcatgccttatggtgtcacgggtggtccagcaacttttcaattggcaatgaattcagtgctgtccccatttctcagaaagtgtgtagtcgtttttattgaccacatactaatctacagctcaacttggactgaacatttgcaccagttaagagcagtgttcactaccttggaccagcatcattttaaagtcaaactttctaagtgctcttttgctcaaactcagctacattacctgggacacgttatcagccaacagggtgtcgctacagacccggctaaagtgtcggtcattcagtcctggccgtctcctaaatcagccaaggacatccgcagttttttaggccttgcaggctactacagaaagtttgtagcgaactttggc

SEQ ID NO: 95654 - DNA, 361 bp, Zea Mays
ctccgacagcaggcggtagattcccagcatccaggtcaccggcctctaaggtgaccggaccgacaagagcagttggcatattcctcatattgaaccaggggtgatccgacgtgaacatccatggaggcagccgaagaggaaccaagctcggcacccttggaggctgggtcatccccagaaccaccctcgggggctgggttatccttagcagcaccttcagaagctgaagcaccctcggtcgtatccacaggagctgggtgaccctggccggcaacgtcaagagcagtgtgtccccatgagctagaccaccctccaaggtcgacgaagcatgagaaactatctgggttatctcttgcccgat

SEQ ID NO: 95655 - DNA, 360 bp, Zea Mays
cttctctttcagactcacccctccctattgggccgaggctcttcacaccgccacctatttgttcagtcgtcacccacgaaaacacttcatttttccatggtcatccgcctacatatattcatcttcgggtctttggacgtcaatgttatcccaacatgtccgctactacacctcataaactctctccgcattccaccacgtaatcttttgcccctttgtattgttcactggcatttgatcttgtaatccttttctcttttatgttcatcaatcaatgagtagcaagaggacaaaaggtattatggagactacgctctaaacctcactaactatccatgtgtggctcccactcatgtctag

SEQ ID NO: 95656 - DNA, 847 bp, Zea Mays
tgaccttactccaccatagggtgcgctacgggctcgagctgtaggtggcccggcggtgtgcacttcctcccagggcctctttcccagtgcttgtctggttgctggttcatgtcttttcgaggcgccgggggcacaagcttcatgcctccaatgaggtcttgcccactcatccacagtgatgtagatgtctgcctccctgaatggcaggtgccttttggaagatagctcggacgaaagccgagtcgttggatcactggtagaaatcttcgatcacggctgcctcgacaacctcgagaatgcagttcctcatcatttgaaatcttctgaagaacaagaagagagtttcatcgtattggcacttgattgatttgagatcccatggttgcgctggtttgtcggagagggattggaagttcgtgacaaaccggtggctgaaatctccccaatcgtcgatgtagtgtcgaggtagatgtcgaagccattgtagtgcttcctaccccaggacaaatgggcaggtacgttgtcatgatgtcttccgttgccccagtagccctggtggcggttgtgtagacgaccatcctagcccctgggtcttgcttgggctcgtatttgtcgatgttggagaccttgaagtaaggaggccattggatggcctggagttgggggtgagcatggagaccccgcaaatttcctcctgttgatgatcatgctgccggtcccagggaggggagcgagtctcatgtcgcctcgaccgtccttgaaccggactgttggtggaggctaccgccaactcgatcctggttgcacgtctgcgtgccggtgcaccatgatcccggtcatattcttc

SEQ ID NO: 95657 - DNA, 977 bp, Zea Mays
aagcattggctagaggttggctgcttgcaacgggctgggtgtggaaggaactttgaccagactggttgaaacgtgacggagaggatcctgctggcttgctgaggtttgacccttggaaggaaacccaaaaaatcgaaccctctagtgcctatcatgctgttgagctcggagaatttgaaactttctcttgaggtgacctttttcctcttctcgggctctttccacctggatggccttgtttgagaggtgcgagaagctgaggaagtcttggctggcaaggacagtcttgagttctggtcttaaccctttcaagaaatgggccatcttcttgacttctatgctaacatcatatggtgcataacgagcaagttcagtgaatttatggatgtactcgctaacagatcgccctccttgagtcaactctcgaaattcttcttccttgagttggatgattcccaaaggcacatgatgctcggaaagcagcctcaaactctgcccaggtagcatctctcactgtagcactgaaggtgtcccaccaggatagagccatcccggagagctggtgggcagctaagtgaacacgctggttttcagggcatcaaatggcttctaacttcctcttcactatgcgcagccaatcatcagcatcaagcgggtcgctagacctagcgaacgtgggaggcttgagccttaggaactctcccattttgtccagaggtcttcctccaatcgggcgctcgttctcgaggcttctagtgaggacctcagtgagtcgagtttggttggccagaacttgggctaggtctagtggcatctccggaggtgcggggaggtgggtcgtactcccttcatcatcctctccttcgatacctaagggggtccttgctccaatccttgaggcggtaggcatggttctatccgaggccatctgccagaggggagaaaggattactactatgcatatgtcattttttttg

SEQ ID NO: 95658 - DNA, 640 bp, Zea Mays
atcaaattgaggtattcaatgcaacaactggctcaaacaaaggctagaaatggaaaaacctggataagttgaactatgagtaattcataactttggatatgttctaaatgcccttaagaatgttcttgatcaccttagagagattgaaaagtcagactttggaaaaggtgctaagtttgagcaagtttggggatctgagttggaaatcacctaaactcaacaactatgacttagactagttggacagaccctaaataagtttgtctaagttataggaatgctctcaaggacaacaaaattgaatcgaagaacaaaagccaaagagtgtcaagatctagttggtctacggtgcaccgaaccgagtacgcagaaatgtgttcttaagagttcagtggcctggcgcactagactagtccattggttgtccagactgcttctacataaagtatagtccgttggcctagtccacccaaaccagtctgttggtgtgccagaccacttctgcagagatgtattcaagacttcggtgacctgacgcaccagaacagtctagtggtgcgccagaccacttctctagagaaggctgcaaagagaagctcaaggacttcaagggaccggaccagtacagtgtgcaccgagc

SEQ ID NO: 95659 - DNA, 586 bp, Zea Mays
ccgctccagcccctcctcaccgctatcgttgttgtcatcgtcgtcgtcatcattgccatggtcatcatcattgtcgttgtcatcttggacgctatccttgttgaaatcatcattgaaatcccagtcgaggtcttcctcggtctcctcactagtgaatccactactacatgaccacgtctccaccacctcctctgactcctcatcggaggagatttcctccttggtggagtcgatgtagtgcttgtcgtagtcctagatgtcatccaaggatctagggacgcggggacctaggaagcaggtggcctgcctagtagccgaagagtctgcattggatttgtcaacttctattgaggcatagtcagttgagaaaggttggtatcataatggaattcctagtcctcctcgattagaggaagctggggtggtggatgaggaggagggtgctcatagggggtagaggttggaggatcaaacaaaaaggagaggctagatgatttgctactataggtaggagaggtggcgccattgcttgtgtgatatactggcctaggtggattgtgtgatatcctagtgcaagtcttaaaag

SEQ ID NO: 95660 - DNA, 407 bp, Zea Mays
cggctcttcggggaaaacctgctctaatccctgaggcggtaggcgtggttttatccgaagccatctgccagggaagagagtcactatcatgcacatgcaaattgttttcagccaagttattttattcattacaccatcacattacaagcataagattactacaggtgggactacacgagagcgttcttcgaggtactagcgagttccttgtctaaggtgtccccaaatgccttgagaagatcatcgaggctggctagggatacatcttcttcgtcggaccagtcatctattctggggggaggtagggctagaggggccttcttcttcttcttctctgtctggcatccctggttagcggtcttcttctggatcttctttttgggggcgagtgtctttagcttcttatc

SEQ ID NO: 95661 - DNA, 438 bp, Zea Mays
tggtgtggtcgaatgccgaagaccgtcgatgcggtctttttcgacgtgtcttaatttttgcaggggatttttgtgggtatattgtatggctccgcctcattaaaaacctcaccccccgggacgaaaagagtacgggccagaatgataatgtttggttaattacaagggcgtgatggccctgaggaatcaaacaaaaaatttgcggagattatctatgttgcaggaatgctccaggtcttcgccaaattgcgttgttagctggtatgtgctgggggatgacttcatcttgacgatgaatggtccttcccacttcggctccagcttacttcgtgactcggtccggtttgttcggacgagtacgaggtctccttcgttgaattccctcgggagaactgcgtggtcgcgccaggccttcgtttgggcttgatatttattgag

SEQ ID NO: 95662 - DNA, 677 bp, Zea Mays
gaatatctttaatgtttaacaactgtgttgccttgttcttatttcacaacaatcaaaaacaagttaccaacattgacgcccacctccggtgaactcaaacgaccaccttcataaaaagaactctacaaccaccttcgtcatgccaccaaagaagacagcaacgccatgggctatccttgctcctctggacaccaatcaagatgggctccttctaagggaggcctgaagctagaagagaaaagctactagcccaacatcacaggacgaagtgttggatcaagagattagggatctagaagctattcatcaacaagtggagagaagaagggagaagatgcttcggctgtctgagctccagaaaaagattgacgaagcagtcgaagaaatgtgacacatcgcacaagacactgaacaagggcataagccacaacagagagatcttcctcaagaaggccctagccatgatgacatatggtatgacgactttcaccatgatagcattgcttttgatgatgcttcccctctagctacagagttagaggctaccccatagccaccttcatacaagccaccccagcttcccatgtatgatggtcactcggacccatttgatcaaaacttcattaaatgcttcgatttcaccctcaatccatttgatcacacccttgggatctcca

SEQ ID NO: 95663 - DNA, 529 bp, Zea Mays
gagggcgtcgatgtgctccgagttggtttcctgcgtacacaaacacatgcaaacatcagtccaagtcttattcggctccctgggtcatattggctgcaagaagttaatcgttccccgggctcacatcggttccgtgcgtcactgacgcgtagagccgatggctctcgagaccctactccgttcgcaccaggcggatccaaaccactatggttaaagtttcactgcatagtcggaacatcctgcaagtagtcgggcctagaaagcatgagaaacatcagagtgtcggccgaatcataggcttaaaaatcagcgtgagccgattcccggaacaacccctactcaagctgacacaaagtatccagcacgttaccggaacatccaacttgtatgcaaggcctaactgtgtagatattaaacagatccttgataaatcaaagaccaaccatgacagatcagatccaccaagtgaaacgaagcaaggcaccgttctctcgctcaagaactcgcatgagggcggcgaaacactcat

SEQ ID NO: 95664 - DNA, 433 bp, Zea Mays
gggagattttaagtaccaaaaagaatgccaggaaattataatgaatgcagtaagtattcaggctcaggatcacgtactaaaactgaacctttgggttcgaatgatttgcaataaattgcaaattgactgccttgtgcatttactatgaggtgtcactcaaattaatcctatatggaagtgccagaaagagtggttaaatagaacaccactaaactcactattacaatgatgttgtaaataagagggggagaagtatggtcacaaattgggattaaaatgcttgcaagcagctgaaggctagaccttctgagatagtaaatgcaaaccaactattcgttggtaaccaacttagcattggtggacacctagaggatatgaattatcctatgaatggaagacattcacaacctagctcagtgcgcactgatgaggc

SEQ ID NO: 95665 - DNA, 367 bp, Zea Mays
gcggtgccatatccatgatggcttgaactttatttggattggcttcgattcctctctgtgacacgaggtaaccgaggatttttccttgacgtaccccgaagatgcacttctctgggttcagtcggagtcaggcttcgtgcatgccggtgaatgtttctgcgaggtccgagaggtgatcttccttgcttttgctcgcaacgacgatatcatcgacatatgtgaagacattgcagcccatttggtcctcgggaaccttcttggtgaggcgggagaatgtcgagccgacatttttgagtccttcgggcatccatacgaagcagtacatgccaaagggggtaatgaaactggtgctagccctgtcttcctc

SEQ ID NO: 95666 - DNA, 457 bp, Zea Mays
tggatatacaacatagagaatctcatagttcccaaagactgatggttttaaagaaacttttttgctccacaagctttcaaatgctgaaaatgctgtagcattgtcgaacttcacttgcactggaactagatcaacaagaaccattgttttgtcaggttgatcacctgcaacgttcgcacccattacacggacctgcctctgtgccatgtttacccctgaagctacctcttcagcaaaatcagagaccaatggaaaaaatgagtaaaggtcaacgcttagacgaattccaactctgattggtagcacacatgcacatggtgctcccgcaggtggatctgttagaggctctgggcatgataaggaattgcaatctgcatttggcaggttaaacatataagcaagcacaaatatcatacgccatacagttattaccagatcgaacatgtaagttttggat

SEQ ID NO: 95667 - DNA, 317 bp, Zea Mays
aaatagattctcatgaagagattctaaaacttaatgatcgacggagaatgaattctcacatagatccccagttttctgtgtgcccatatatgtacgctgcggtggtgagattgggaacatacccaatatacgcatgggaaatctttcacggattcccacgtactaaaaaccataggggaatttgtacatgcagtacgtgcagttaatcacaagtcaggagcatgcaaaacttcctgacgccaaccataactagttggaagtgacaattcattattgatggtcattaatgatctgaaattttcgaatctatcacagat

SEQ ID NO: 95668 - DNA, 377 bp, Zea Mays
actcgtccgagcaaaaatttattagaggcgatcccgaaggaatcatcgaatggatcggtgaagaagccaaagcttttgaagagatccttagtgatcgtggtgatttctgcgcctttgccggtgccagaggggttgcaacaattttggaaaaatctggctgcgaacacattaaagctgcaacccagacgaaggctgtctttaccgtggagaacacgaaggatccttcggctgaagcgactctgatgggcggaaaattttattccaacatttggatgtaaggcggccaagaactagccaacgaggcaataaagaagaatgagaaagaaactcatgaggctcgagaagaagccaagcgaaccgaagaggctgctgagcgc

SEQ ID NO: 95669 - DNA, 543 bp, Zea Mays
aaagatgttgcatttactatacgcataaagaaagaactgcaatggaacacgtgagctattggccatattatcatatctacagctactgatatcatgaggtgacaccacgtaacatatgctgatgtatgtgcatgtggtagattcatagatatggaattagctggagtattcttcttttgacaatgtttattatggccttgtgtgtcatacatgtgatcttgtaaatatcactcatgtccgccagtttggttcttagtcatgatattttcacatgttgtccattgatttattgattcatggaccaatttatttgattaccaggcactttagtccttgggtcgattatatatgtagtctgtctactagcatgtttgttaccgtaactgaataattgatatatagtaggcaaggatgttacaagtgtcatgtggggccggacgtttgcacgacgccggctagaccaggggcgcggtcaagatgtaatgggccagatcaagatgtgattggccaagtagagtttgttgagagttttcagcaaataga

SEQ ID NO: 95670 - DNA, 340 bp, Zea Mays
ctatctgtaaaaatatgacgcaacacgaccgtcaaaactggtgctttaatatagtaaagattatatattatccagcctcatttgggtctatttgacgattatagcaagacacagagagaagtttgacattatatttattatacatcatcaatttaaaataaattcactatttattacgtttgtcatatatgtcttgctagaactatcatgtgaagacggtttcatatttgcaagtgtctagtatactcactcacatctacgacggtttttatagtctagacgactctaatagtatccttatttgagatggtttcatacatagaagtgtctggaatactca

SEQ ID NO: 95671 - DNA, 422 bp, Zea Mays
cctcaggtaccctgaggcacttcttaacacatggaatacatcatgtacatcagatagattatcaggtagctcgagttaataggccatctctacaacttgcctaaaaactccgaatggtccaataaagcgaggggacaatttgcccttaactttaaatctcctcattccacgaagtggtgacaccttgaggtacacatgattttttcctcaaattccagtggtcttcttctattatccgcatagctcttttgtctagtctgagctcccctcaaattctcccgaattatacggacttgttcttctacctcttgtataagttcaggtccaaagatctgtcttcctccagtctgatccaatgtagaggaatcctgtatttcccgccatatagagtctcgaacagtgacatcttcagagtggcctgg

SEQ ID NO: 95672 - DNA, 620 bp, Zea Mays
gatgggtctgttgtcgaggggatttgggtgatagaggggcttaaacagggaggtatgcagagggagcagcagggctgatggagtaaattcagagttagatttagtaaactaaagaggctttattcctctctattgtgcccatccgatgctatggatcgtgacatggatggagataaggatgtcgggtctaacttgggttctagagtttttcccattgaaatatccaattttggactgtctggtgtacataaaaaccttatctgctagttcttgaatgcaatgaactggacatcagaaactctagtggcttcaccctttgataagtatcaaattggtatcaattattctctatccgtaaagtagtgtttacctgcccttcttctgtctgtattcttggacagaagatatttgtgggcagcgagccttatctgtcctagctcctatttgaataactggacaaaactgatattggtactgagaaacaaaccaggttcagtgcctactgtgttgtatctagttgcatgggttgaagcatagatgcagttcatagttaaggctttaaagatctcaccccccccccccattctgaaaatatctcagccctgtgcggttagtgttat

SEQ ID NO: 95673 - DNA, 338 bp, Zea Mays
ttgaacacctgatcttattgtcgctggatttcctcgttcatattcttcatgtcatcttctaattttttatgcttagcggccgacaaattagtcagtcttgtgtcgctgtttggagaagcagcgttgggatctttagaaccggtcatataagcctgattttatatatccgcaaccttgttccccaacagagtcgttaaaaaagtgtgttcccgtcaatgtagacagcaccaatcagtaggggtgtaccggctgtcggtgccggacggtccgtgacctgagcacaggagcagcaccttccctgcaacgcaccggacggttcacgataacgtagggtcgtg

SEQ ID NO: 95674 - DNA, 632 bp, Zea Mays
atcaggggcacacaagaacactaaaacgagagggcagagggcatgagcagacctgaatcgagctggtcgcggtgaggattctttcacggtggcggaaactcagtttgggggaagtgagaaatttgtggtctctggtgcataattggaggcaagcgtgggtgcgttggcttcgtgataacatggtgcaacagacccggccatcaatttataggatcgttaagcggtggccggggatttggacgaagacacgcggcggtcagaggaataggaggttactggtgctctggttagtggctttcactgtggcagtacaccggcgatccccgtgcatgcgagacgcgatttacagcgacgtggtctaacgctttagcacatggcaggagatcgacgggcagccaatgctggtgaactgatctgcgctggccgcaaagcatgggggtacgacggccagctactggagttatccccaggcgaagatcttttgccccgaagtgctatccggtcactagtgagcgcgaatcgtaatggcggcgacgatcatggcacggattcatcggcggcgaggaggggtgaacctaggatcatgttcaggttactgtaccatggcgcagtctactcagttgacctgacag

SEQ ID NO: 95675 - DNA, 291 bp, Zea Mays
ggaaaggccaatgtggtagcagatgccttgagtcggaagttgcagtgtaactgtgttctgatggattctcgtattgacacattgtgtgatgagctgagcaaaatgaagattgaagtaattccttctggtgctttgtctcacatttctgttgagccagctttgcaagaccagatcatcatggcccagctcagtgacaagggagtgcatattatcaaggagcatctccatcggaggactgagaagtataaatgtttccaccaaggtggaaagggtatattgtggtttggaagc

SEQ ID NO: 95676 - DNA, 318 bp, Zea Mays
cgccaagagatgcgccaagagcgggaggagatacgtcgagagctgcgctaagaatgagaagagatacaccaggaaaggagggcgcagcatcagcaacaacaacaagtaccactgcctccaccaccaccacctgttccaccccgtgataagcaccgggaattcatgagccataagccaccgacatttgctagttctcctgatccactggacacagatgattggctgaagtccgtagagaagatgttgaacattgctcagtgcactgaccgggagaaggttttatatgcttctggacgtctgacaggccctgctgctgat

SEQ ID NO: 95677 - DNA, 302 bp, Zea Mays
gctagagctgacggactacacgagaattttggctgctacaactttgcatatcgcaaggatatgaaggctccggttctcagttaccacacgatgtggccggctggctggaagaatgaatggttctatttcaaggccgacgagaagaagagggagaagctgatgcaaatagtaatgagtctgctgactttaagcttcggactgactaggcctctatgccgcatgccgtcagggtcaccgtgccaacaagctgtggcagagttcagggtggttgctgaacagatcaacaccagagatctagttca

SEQ ID NO: 95678 - DNA, 372 bp, Zea Mays
gatgacgtcgaagaagaagaagaaacttattttgatgatcgggagcagtttgtcccgcctccgtatcacggggatccgggccaatcgtcctcttaccctctgccctaggatccctctggcagtgctcctcccctggcccaatctggggaggaacactttgcctctgacctggcgcaccacctcttcgctcttcatcatcctcctccccactggtgatcattggattggcgcttctctctctccttttggttcttgttgccaaaaagggggagaaggtttattatgcagtaccctttatgcagtacccctttatttttgtaatgaacaatcggtctgtaataactatttgatgcatgcatggctcgaatgcca

SEQ ID NO: 95679 - DNA, 377 bp, Zea Mays
tatcccgaacaaattaatttgaactcgacgacagaaatgttcggagcaaaataatctaaatcgcgcactgtccgagaaaaattgtgcgcgaggcgatgatctaatttatttttcagcacactcggtaaaataataaaatcaactgtgcctagatatcggataaatttttatccgagatcgacgaaaccagtgctgtctcaaataatgtatctgatacccagtctgtttccgtgttgcccgaaacagtcacgaaaactatccaaacgaaatgtcgtcagaatcgtaaacctcagactctccattttgtgatccgagggaataatgtgtatagccgtttgctatatcgcgtatcgattctttgctcgtcgttagaaatc

SEQ ID NO: 95680 - DNA, 478 bp, Zea Mays
acacaatcaaccagttttaatacttaatagtaagtagagaaaactaaaaaataatctggaagtgtttgccatgatttggtgcccaaccaaaggtgactgcagcctcagtggaaagccggagattgcacttcatatctaccacatttgacatttccattaggcacctctcgcaacatgaatttgaatcgttcatattctatgaactggaaatggaataagctactctacatcatcagcaaactaaatatgtctgaacttaatactccctaagtttcaaactataagacgttttggcctttttagatttatagcttttgttacacacctagaaatatattatgtcttcatacacagtaaaatctatgaacctagaaatgccaaaatgtcttataatttagtattgcagtatagaatgaatattacagagaaacccgagcagctacagggtatagaaccctagtgggcctggcccatatac

SEQ ID NO: 95681 - DNA, 410 bp, Zea Mays
gccaacaagagtatgaagttgaactgttgttgtaaggagtgaaaccataagtggacaagcctagacgaacactcctagcgtctcttgcaaattgtcggtcaaaacgatccagagccttccaagcatcgccatctgatggatgcatcataatgtctgggtcttggatctcacgttctccttccttatgccacaacattagcttcgcagtttcaggggttaaaaacagacgtttaagccttggagtgatgggcatatatcgaagctgtttaactgccacttttgtagcaaaagtagctccattctcttttagtacctccgcatatcttgatttaccgcatttctaacaatgggtggccgcttcatattccttccagaacaacatgcaattatctttgcacacatcaatcttc

SEQ ID NO: 95682 - DNA, 323 bp, Zea Mays
attcacttgaaggccgcaaaaagaattctaagatatttgaagtacactcctaatattggtctatggtatcccaaaggtgctcaatttgaataaattgaatattcggattcggactatgcggggtgcaaagatgatagaaagagcacctccggttgttgtcaatttcttggaagatctcttatttcatggtcttttaaaaagcaaaattttgttgctctctctaccgccgaggcagaatatatatcgtccggtaattgttgtgcacaattattatggatgaaacaaactctattggattatgggatcattttgaagaatgtgtc

SEQ ID NO: 95683 - DNA, 343 bp, Zea Mays
tggtagcattcttttgcaggtcagcatatcgaagaacaaagaagattggtccaacaacattcaacaccaattccatattatcccaccaagtcctatctgttaggcaatcatatgcacagcatagaccatccgtgccttcaattcgttctgcctatcccaaaaactctgcaaacacataaacattgtgccaaacctagtggcatttcaacgaattagctccccaccaatcttctccctaatcatagcatgcaacctattatgtttatagaagaatctacacatacgctttgcactgtccactacatatgcaacatcatcaaatttccctatgtccttcagcatc

SEQ ID NO: 95684 - DNA, 575 bp, Zea Mays
cccggggtctcttttgcaagactatgctatcgaagcgatatcttagaatctgtgtcgtgcgattatgatcctacggtaaggattagatccaacctttcactgaaatggtatgggatgcaagcccatggatcagggatcaacgacccagattttatattaactgaactcgcttgcgtccctcggattgtagatctatggttagggttttaccagtcgaaggggtttccatcgctctgatcatcaccgtccaacgagtatccaatggctaacccaatctcccacctctagccgtagcagagcgatggcggcgagctctcttgcggcggagttctctccggcgaactcccactgggcgcccagggtatcgaaacctaaccccaagtagtcctacgtgatgcgcacggtattgggaatgggattagaccacaattacccgcaatcgtacagcgacgaagcttgacctcggcaacacgcacaccgcggcggagaagaagatcgcgacgacgaattcccgtggcctcgagttgtcacagtcctcggggttgcccaagataccttcgcagtgctcccacgaa

SEQ ID NO: 95685 - DNA, 540 bp, Zea Mays
tttgtttgaatcccttgagtagcaactctaaaaacccctatatcaatatcctcaaggtaagtgcctcttatgtgaccaggaagaagaaaccatggaccatctctttgtcccttgtgtgtttacaagagagttttggtttcatcttctaagaccttttggcttggaatgaccagctccacagccagggatgccttcattcatgaattggtgggagcagatctcaggagtcacagttggtttacttggaaaaggcctcaactctttaatttccttgggagcttggacaatttggaaggttcaaaacaaatgtgtattcgatggatggactccaagtttggccttatctcttaggttagcaggggaggagagattgttttgggaagtggcaggggctaaagggctttcttaccttgctgctctccttccctagatatatcatcttttgagtggttgtgtgtgtgtctgatggattgtttcagttttctgtgtttttggcctccgtgggagacctttgtatttgggcttctcaagcctttttac

SEQ ID NO: 95686 - DNA, 584 bp, Zea Mays
gagcaacaaaggatgaagaagactagaatagtatagttaggtattatacttatgtaaaataggtaatgaagtcaagttgtacactggagtatgtataattattacattttggcaatgtaatatgatggtgtatgttggcatgttatattttttccaaatgtttctttgcctcagatgccatcatggactcgcgcacatgatggtgcgaggacttcccgcggtagggaggatactcccaacccgccaccagtaccaccaactttggccaaggctatcgctgccctggtcaatgcactgctgataatacgtgcttcttgcgcgaaatggcgggcattcaattccaaccgcacggaggcagagtttccccacaaggaccgtgtgatactacttatctggaattctctaagactcgaccaccgctcttcatcaacgcagaagaacctctagaagctgatgaatgggtaagagtgatggaacagaagtttgggttaatttgatgcacagagacgcaaaagccactgtttgctgcacaacaactaagagggcctaccaggacttggtgggcaaatttcttagcaatccaa

SEQ ID NO: 95687 - DNA, 302 bp, Zea Mays
cctcttctctatcatcatccttagcatatggatagttatctatgaaatgatcggtcttaccacatttgtagcaagccctcttgccatgggacttataatccttgtccttctagttctttaggatttgtcggaagcttttaatgttgagggtcatctcctcatcattgagcccataaatgtctatggtttcctccttgcttgggggctcctccttctcggttgcggcctcaaggcgatgggttgtggctcggtggtggtgacattgccttgtgccaaattctcaacgtgcttggaatccttaa

SEQ ID NO: 95688 - DNA, 337 bp, Zea Mays
ggaaaacaaagaaatcgtggagtaaaaacagggctggtggattgagatcttctctgtccagtcttgtcttctatctagtcttgttggagtgtgggtaaaggctacgacgtaggttgtagcataggtgagtgtaggaggaatacggacggtgtcgtcccctcccatctgtttgttccctttcgcctcggtaacacgtggggaacagtaggagtcatagtgaagggcatccatgcgatgcattgagtcaatagtattgccacggtaacgcgcatgtttctcatgcggcacaggccttgtgggctgtgcacgtcgcctgcatttaatgtgaggcatgcac

SEQ ID NO: 95689 - DNA, 613 bp, Zea Mays
gggacgttcaagaagtcaaaagacgtaaaaacgacgtgtgacagataaatagtgacataggaggtttggaattcgaaatgacgcacgaaatgatatggaattgagccgagacttcacgaataggtttatataggtgaatatgagtgaagtgtgtgcttggtttgaatttagtcgaagaaaaagagatttgggcactcggctcggaaacgatcgctcaaaacgggaaatttggtaaaatttaagcctgtgatctcggatgggcgtgaaatttggcaaggatgttgctggaagtgttgtggaggtgcctgaaaaatttgggttcaattggagcaagtttggctggtttgggcatttcaccgagcacatggtgtgcggggagttagggttttaggaaaatggccatttgaggtatgaaaaccctcccgaaggagctaggaacctgcaatgatgtttaaggcatacaaaggaacacattccacaacaggaaatctccagatttcacaggaatttgaattttgcacaaagggagagaaagaggggctccactgcctttcagtcagagaacaggagagaaggggagaggagagtagctgctcaccgagggggaagagca

SEQ ID NO: 95690 - DNA, 283 bp, Zea Mays
aaaggcctgggaaggaggcaaattccaggccgagtatgcaacaggagcgccgatgttcgacactttgcctctgagtatcatctcgagccggctcaccaagtccacagcaggaattcttctgttggttactcgggttgaatcagccaagcctcgatacagataggccggatacgctctatctttcagtggctgaatgttcttgaaaacaaagtcagcgaccacagcttctgcagtcagacccctttctttcaacaatccaacttctactagcagagcccctgcc

SEQ ID NO: 95691 - DNA, 355 bp, Zea Mays
caaatgaagtgtatatatctagctgtaactaatttgcataattctattatgtattttaaaagctccctttcttttctattttgcttttactttatttcttcactccttccaataataggatgctagctctttgatactttgttggttactataggaatactacatgcattacatatattggcgatgtcacttgataattgcatattgctacctacacttgtaactgagcctaatttatttattcgccatgaaagctagcatcgatgggatcaaaatgaattgatgaacacatcgctgcctagagtttaactattaggattgcaaaaaaagtaaaattaaactagatcgaccaaat

SEQ ID NO: 95692 - DNA, 600 bp, Zea Mays
cctaatcacgtgattgtgtcattcttaacccactgctgccgctgtacgtgcttaggccacctccatccacacccccaaacctcctcccaacccacgtaaggcttgtttgagatcaaagaggcttgtttgagatcaaaggtaatgaagtggattgagtgggctagaatcccctactacttaattttgaatagtaagggattataggtccctcaatcccctcaattaccctttgtcccaaacaagcccgtagagtgtcatttggagagcaagccctccaatagcttctcccaccgtctagccccatatggaggagaggaaaaactacttgggtgagttctaatttgcctccatactttaatcattcaatttctttgtaatattaactcttttaagtatagtaatctgaaaataatgtgtattatagtagtataaatagtgtatgatttttcaaactttaaaaaccgataaaaaatcaaataactgaattatagtatatagggagagctagataaggtgaatggttggagacgttctagatgtgaggtatcttttagggtgatgtactaaaatataacagtaaatatagataggggaagaaat

SEQ ID NO: 95693 - DNA, 312 bp, Zea Mays
tggaagcaagtcaggcggtagacaccatttcgtgtaacacgacaccatttggattgaggtcaactgcttggacgatatgattacaccccgtggtcacgtcaagttactactcaaggatagtttgctaaatgctcggcgtaccaaaccgtccctcggttacacccattggggaggggacgtccaagaattttcaatagattttcccaagcagtcacatccatacagtatacgcaatgaatgtatcaagacagaagaaagatatcgatggagatcagaggaaagccaaatatagctactgaagtacaagtctaa

SEQ ID NO: 95694 - DNA, 864 bp, Zea Mays
gtgaactacagagcacaaacacttgaagaacattagtccataaggttatgttgatcatcaaacaccaaatcacttagcccgggggtccattttccttacaactgctgaccacttgtggctagatccaactgtgctttcacttgatgtacttgtcccaatgacagatctgcctcctcccgcaccatcccctgtatcaccttgccagcagcttgatagaccatgttaaaatccccagccaatagccatggttcactactgagagctctgaaatctagaagttcccgaaggaattgaattttactctcatcttcttgcgggccataaacaccagtgaaccaccaattaccatccatcccagcaaactgaactgaaaccgagaaattatcaatacgagaggagatgacttgacatactgctcccttccaagcaatcaggatgccaccacgagtaccattggcaggcagggtcaagaacttatcaaagtctgaaccacacacggagaggagcagatgggtggaaagcgatgccattttagtctcttggagacaaataatatcagccttggaggatagaattgtgtctcttacataatctcgcctagccttattattaaggcaacgggcgttccagacaagaatgtttgatagattcattgtaaacaaataaaacatgaccaaggaccgcaggaattagcagccagccaggagctccggacctctaaaatcatcaaagcgctccgcctgccagccaaaaatggcagcaagagcaacgaggtgagagtccgtcagttgcccctcgaacaacttgcagtagttgtcttgagctttttgatcaatggcttcatccttggctgcaagacccagg

SEQ ID NO: 95695 - DNA, 308 bp, Zea Mays
ggagaactggtggactagggttaggttttgctgctaaggctggtagtggcgctagctttagcaaggttggtgagtgtagtggcttgaatccattagagaaacatccagcctccctaaatcttgtgaaacctttccatccaaatctgccacccttgttgtgagagatggagtgcttgtggagccaatgagagcccctacattagaaacaagtgtggtttccaaaaccaaactatatcaggaacacacttgacaccttacctgacatctctagtgatcccatttctagtgctcctcagccgcccaaaaac

SEQ ID NO: 95696 - DNA, 630 bp, Zea Mays
cgttttcggatctctgggcggcggtacggtgcacggcgatgaaatgggacctcggacggagctgacaaactcccggtggagttatagggcgcaactacgtggctaattgcggagcacgagggcaagggaagaagagggtcgcgactatcgccccccaatatcgaccgaggcgaggtggaggggcacgagctaggagcggtgatttcgtcggtggttagttcaacgatggcggcagactggatggagaaagggaactacactttatagcttggaatccgagccacaaatcagggcgatggcggttgaaacggcccaaccgaggaattcggccccgcgatttggttaaccgaacgcgatcgagacgcggtggatccaaaaatcgggggaagaagaagcttctaacgtcctaggccagcatgtaggtgggaagcatacgcgccagagagactgaccgattggggcccgcagtcggcgcagagctggagcgcagttgcttcatgggccaagcagaggggaaaacggccatgtaggaaagtcagtccttttctcttttttatttatttattcctgtttcagatcccttttctatttattcaaattctaatattcaaatttcaaatttgatttgca

SEQ ID NO: 95697 - DNA, 311 bp, Zea Mays
tcagttatatgctaaattgtccaaatgtgatttctggctgagggagattaaatttctgggtcacaccatttctcaggatggggtattagttgatcctgagaaggttcaagaagtgatggattggaaacctcctaccacagtacggcagatccgtagttttctaggattggcagggtattatcgatgatttattacggatttctccaggattgccaagtcgatgactgaattgttgaagaaaggagtcaagtatgaatggagccagaagtgtgaggatgcctttcatacactaaggcagcatttgacaacag

SEQ ID NO: 95698 - DNA, 1042 bp, Zea Mays
tggtcgtcaagggtggacacgagctcgtccctataggcgacacgatcccgccacgagagccacgggcctccccacatgttaggattgcccccaatggaaataattgcctcgcccgagctcagcgtcggccaactgccccagtagacacgcattaaatgccacctactctcccgtgaatctcgcagaagaccatgccaagcactatttcaactactccaactcgacacttttgtgcccatgtacacgctagggatcaagcacatgcccatgcttccgagcctagcgtcggctctctaccccatcaagagaaatggctatagggatcgagtgtccttctcctaaccaaaagacaacacaagaatgagagccatcccgtgcagctatgccgctacatggcttggacacatcttctctgatcacaacaacagcataaccacccctatactcctggacctcctccttgtcactataaaaggaggagcatggggccttctattggggggcgacaggacttcactgctcacaactcacctcactccctatattgccactcacctcaatcatacttagagacttgggactcactccctctcgactcgcttgtatcccctactacgagcacttaggtgtaagataatacaaggcttcctcccccactggaagtagggtcttctcttgctcgaaccaagataaatcttgtgtcttcttgcatcaaccatccgggacaggagcacgcatcacaaatttactagttggttaggacccccaatttccaaaacaccgacaaatagggaatcaatctctggtatatctaggaatagttaatgtaatgtgtcctatacgagtttagtgtgtcttagaacaaatattcatgtctaagagcttttcacatgtgtgatagatgggttgtaagattggcatgtgggacgaatgggttgatgggatgttgacttctatattcaaagcattcttttaggatattgtgttcactagatcatgtagttcgaggaaacaagtttatcatgtcactagtacaaatagt

SEQ ID NO: 95699 - DNA, 878 bp, Zea Mays
ctccccctcaaaaggccttacaaggtccttttcgaggggaggacctccttccatcgacctagtcagcgtggggaaggtggtcattgagcttcaaacgggttatccaagtgagatctgaccgccctttggcaaggtttggtctcgacgagtggtcccactaaggggctcgacccgatgggggcatctcatttagtccttccatattcgatcctgtcttgtccctttggttggtctggccgatcaaagggggccccgtggccaccctgccagccaggtttccgcaggagaatgtgaggttcgatcatggacgtgaatacgagcaaatgacctatgggccggcttacggctcactaggagcttgctcggtccacccctcgctcaacatgagaagttgaggcgagttctagtttttacctggtcggcatgagatagttactgtgtgggtgtggaaaagtgggcagacatcatgacaccgcctggggtgggtggcttgatgggatgcaaaacggtccactcgtcgtatcgtatgctggtggtgtgatgtggtggttaaccacctcactcgttactattatgtcctctacgtcgcccctctctggcactctgccttggctggtgtaaacctgcaaagcacgctatgttccctgttcaaggcctgaggcggctctttgatcgaagtggcagattccccatgctgttcgtggtgggcccaccgtctaggtgccgttttggttccctgtgcttgtgcataaatagggaaggaaaactcttggtgctggctctgcttaccgcattctcgcgttcaagtagtcgcctcctccttcgcttagaagcctccctaccatcgatcccccatgtctgttgagcccgcttcttcc

SEQ ID NO: 95700 - DNA, 340 bp, Zea Mays
gcgggcgtacgtagtacacagcctgtcaggcattcattctttcacgatgactggccggcaagaacaacgtaataagtgccactgtactctccaagggcgcatgtgactcccgttcttcagattcatctcacccaggtttcgtggtaaaaactccagaagctttttcctgacggggggattttctttcttttccatccatgacttctgaagtggtcaaggtatacggtaagctagtgctcggatccactgaggtatgtgggctcgtgttccaagattgaaggatgcagctgtgggagagatccgacatcggctatgtccaggtaattcaaactcatttttc

SEQ ID NO: 95701 - DNA, 399 bp, Zea Mays
gtataacatccaaagttattatgatattgctcttttccaatgaccttcgtctcttaggataactcatgaatattgcaaaagcaatcagcatctggttccagtccttggctccttattggccaaatgaagatcccaaccttaatcaatgccttaggagtaggttgaagaagaaagatttcaaacttttttaacacttcaaccaacatcttgtgtaaggggaaccgtagcccaactttcatgaagcttcgaaaaaccaccacctcatctttctcaggaagaggaacattgttctcaccaccgattcttactatagatacatcatgaaaatatctacccttcatagcctcaacatgccctttcttcacagtcgattttccaaagaccacgtgactcggcttc

SEQ ID NO: 95702 - DNA, 356 bp, Zea Mays
atagggcattagacgtgtctggtggagcaccaatcaaaacattggatgcacaaactccaatggtcgacaatgactagttccaatgtctagctaatgtaggcgcgctagatatatctggtgagtggaccatatgtgtccagtgagtgcgcatatttttttgtgttacttccaatgtctagtttaggacttagggctacatataccattccaattaagcatttaaagagtgtgggagctaaggaacatatcgaaagagttgaggttcttctctagtagcaatagacacctaattgttcaaagaagcactctcgttgattagtgtacttgctttgcgaagtgtttaggttagttagacc

SEQ ID NO: 95703 - DNA, 508 bp, Zea Mays
cttagtgcaagagcgcacaactttcaaggtatggcccctagctgctgagtgggaaatgtcgaaggatgctaaagctaatgcaaatgccaataaaagaagtctagttcatttgaagtactcttatcgatataggaatcaatttggtgagcctgatgatgactagcttgacgccattgaagcaacaagtgatgaactattaggggcatattccaaagttgaggacgaagttatgaatgctgcctttggtgcccgaggaaagagttgattgaacagagtctttgatgctattggatttatttaccctaattactgctttcctgctcgaaagagggggctaaaaaggaaaagtgcaccgaagcaaaagaaaatgaaggttctaacccaccggccgaactcgttctacttagagagggctgcaaaattgcctactgtggagacctcaaagacagaagctgtcgaagcagttgaagagaccctttcagctccggaggtaatacttcacttttgc

SEQ ID NO: 95704 - DNA, 438 bp, Zea Mays
caggagatgtatagcaggaaatcttctgccggttgattcggcatggcttggcgtggtggcttgagtactggtggcatggtcaggaactttttcagtgcctttagagcctcctacgcctctacggtccactgaaatttgtccaccttcttgagcaatttgtagaacggtatgcctctttcgcccagccttgaaatgaacctgctaagggctgccatgcatccagtaagcctctgcacctttttctgtgattgcggcgcttccattctcatgatagcctcgatcttttctgggttggcttcaattcctcggtggctggcaatgaatcctagtaattttcccgtcgttactccaaagacacatttctctggattgagcttccatcaatattgcctcaagctgttgaagaccaactgcaaatcttcaatgaagttttctgag

SEQ ID NO: 95705 - DNA, 419 bp, Zea Mays
cttatgtatctaactcagatggtcaataccaggcggggtggtggaattgatttgcctcctaatcgacacactcggtggatatatagatgaccccagccacaaccagcagagatgaatcctcctaatcctccactcggcggagtcgacccactgattgcagctcagatgaggatgatgtagcaaatggcggacactatggcagatatgcgggctcagatgcaacaagaacgccaggagatgcgtcaggaaagagaagaggtacgccaagagttgcgccaggagcgagaagagatacgtcaggagagaagggcgcaacagcaatttcaacaacagcagcaacaacagcaagtatcattgcctccaccaccaccaccagttccacctcgtgataagcaccgagaatttatgagtcataagcc

SEQ ID NO: 95706 - DNA, 635 bp, Zea Mays
gcgtgcgatctcgatcttcatctttgtccaccaataatgttgttttagatcatgatacatcttagtgcttccgggatgaatagaatagcgactaatatgtgcttcatctagaatttgctagcggatctcattatccttaggcaccactatgcggttgttaaaccatacaacaccttgatcgtctcttctgaagcagttggctttaccagcttctattttctcatgaatgtgcctcattccctcatcatttctttgtgcgtcaattattctttgcaggatgactgactcaagcttcaagtgatttgaagttccatgctgaatcattcccatgttcaacttctccatttcttggcataacataatgtcagaagtcttcatggtaaggcaatgacaaaaagccttatgacttaacgcatctgctactacattagccttgcctaggtgatagtgaatctctaattcataatccttgatcagctcaagccacctcctttgtctcatattaagctcagactgggtaaatatatactttaagatcttatgatctgtataaatgtgacagatatttcctagcagataatgacgccatatttttagggcatgaaccaccgcagctaactctaggtcatgagttg

SEQ ID NO: 95707 - DNA, 936 bp, Zea Mays
tcccacttccattcaggtatcgggaggggttgtaataggccagcaggtttttggtgttcggccttcgtccgttggcagatgtcacattgggccacatactgagctatttctttcttcatccccttccaccagtatctggtcttgaggtccagtacatcttggtagttccggggtggatggagtaggccgagtcgtgagcttccttgagtaggacttctcgggcctccccttttggtacacacagacggtgtttgaaccaaaggactccttggtcatctgtcctaaggtccgggagttgttccttacgggctttctccacaagccttgctgtctctgagtctagacgttgagctttgccgatgaggtcttctagcattggcttgacttcgagactgtcgttgattcccagacatgcatttagttgtgctgattctttcttctagtcttctagaaagttggtcccttttattccgaatggcttttgactgagggcgtcggctaccacgttggccttcccggggtgatagtgaatttctaggtcgtaatccttgatcagttctaaccatcttcgctgacgaacgttgagatcaggttgagtaaatatatacctcagactcttatgatcggtgaaaatgtggcatttgtttccgatgaggtaatgcctccatatctttaaggcatgcactatggctgccaattccaaatcatgggtggggtaattctgctcgtgcggcttgagtaggcgtgatgcgtaagcaatgactttctcgttttgcattagcacacaccctaagccttgcctcgaggcatcacagaagacgacaaaatcttgatgaatatctggcagtgatagaacgggtgccgttgtgagtttctcctttatgatttggaaacttccttcacattttggggtccacacaaatttatggtctttct

SEQ ID NO: 95708 - DNA, 883 bp, Zea Mays
gcatagtttcatttttccttgcagcaagtcaaataatatgcaacaactaaacaagcagaaagcatagaaagacaaaagatgcagaagaatgtgcagtatacagttgttccatttttagtaaattactactagtaaaacctcgcaaaacacagaaaataattgctcatttgtacttaccggacgagacatagcaatgtttctgggatcttgcacgtggaggcaagttgacattcagctaagcttgaactgcctaagatttgttatgatttgagaaaggaaagtacataagtatgaactcttggagcgccaacaaaatctgtttccaaccagtgcctgtgcatggtgatgtagagtgttaagagcacttatttgtcttagaccttagagaggtacatgatcttatagtatgttcaaggaactgacaagatgcacataatttacctatcttcaagaggcgtgccacgtgcctccgtttgggcaccacaattcatcatccacctggacagcactgtctaaaccatgtggtcataggatgctgggacgtagagtggcaatatctagagtttgatctgtaacatgattcggattaaaaacatggtattaattaattggtctcattagcagacatgatttacaaaacaaaaagtacagctacagcatttttccttctctgagcaccattggtgctttgttggaactttaaaatgtttattaacatgcaagaaaaccctgtgttgggacagaacatacaacaagataaatagaaatgtgctgattgaggcagtttctagatttcacatagcagataaattacatctgaacccaatgaatattggtatgcattcaaagacaaaatgaaacactgcaatttaatccaaactgt

SEQ ID NO: 95709 - DNA, 499 bp, Zea Mays
gttcatttcatttagtttataacattttagttcttgcaaaaagatcatttgcaatattgttggtgttcataatcaacatagtggtctccaaatgtttgaatgacgcctatctctataaaatagagaattattctcaactgttaatattttcagatcatttaatttttattattaatttttgttgattgctgatgttaataacctctttcgtattctccagttcctctgcaaacaaacatatggttactgatggactagttgtatcattgtaatcatcatctgggtttcagcagggtggttggtctaggacacctggtcagttgtcgatggctgacattgtgaaaatgggtcgctctcagggaaaggcttctagcaaacctatggtcacagctgaaagaggttatgctggacagtacccatctttgccaagcacaaaccagaacctcaaacaatctggaagcatggtttccccagcagagcttgacaaggggttacaacc

SEQ ID NO: 95710 - DNA, 362 bp, Zea Mays
ctagctgatgaatcacaccttccccaccttccaacatctgattgatagagcaatcatgaatgaaagaaagcgcaaagagatggaagaccagaagcgtaagatgagtggaccccagtcaaggagcaacagtcacccccatttcttagacagttcatctcagcagtacaagaatggacacccatagagatatcagcagcagaaccagagtcagaaccagcagtagactcagaggcagtattagcggtcgcagcaataccatcagaacagccaaccatgaggaaatcagtactagaggaagagcaatcaggcacctcgcctttctgccccagcatctcatcagaacaaccaggcagcccccagtg

SEQ ID NO: 95711 - DNA, 897 bp, Zea Mays
ctttttcttctcgaacggggacactaattttggtatagaaactttagatttctttgatggtcgtggatcccttgatggctgtggagaaggtggatccctgaagggcgatgtatgtggcgaagacggtgggccaccatgaggatgaggagaaggagggtcagaaagaggatgaggagcagcatgtgaagtttgaggaggtgatgatggatgtacaataggaacagcaatttgagaaggcggagacggttgggcctgcgacgatggctgtcgtggtggatcaaccaattcgacatccctttgaggccaaaggataaaattcttgatagcttgtccaagtgtctcgataccttcaggcccagggatgtctagcatgtcgtcctcggatccttggacgactgtcgtcacttctaccttgcaatgtttttctggaatgtcatttctatggaacttgcgtcctgggatcgcaaggcctgtagctactttctttgtacgctgattgttaataccatatcttataactagtgtgcatgccacaggccttgtgatgtcatcaactggatagcggaccttatttcccgttgacgcgatagagcttgggatggtcgtaccctcggtggaagccggcagttgagctgctggaattatttgcatctgtggagtggtcatctgttgaacagacatcacactcgccatcaccaattgctgcatcaattctagaggaggattcgatagcatttcagacatcaggcctttgaactctttcttggcctcctccttaaaataatccgccatctcttccttgtatcgatcatgtttcttgtacagaccttcccattgtggtccgaatccttccttccatccttccttagatgagattcctcgtacacgaccaggatg

SEQ ID NO: 95712 - DNA, 417 bp, Zea Mays
tggacgatcccctctcacttggcggggcgacacgacaataaagatgaaaacagtttgggctcaatgacgttggatgggatcctacctcggccaattgagaggccttccctcctgggccttgaggtgaaccactggacccccaacagctgctagatggcctagcacaaggactgacttcccccctctcatcacatgaatacttgagatgcaccacgcggtcaaaatcactcctcccaggatcttggatcccaatttatgtatgcggtgaaaggaggccgcaaccataagtttgttgcgcccctgaccagggcacgaggatagactccggctcggtcccttggccgaactggatgagatcaaccccaacacttgtcactaggttttgatgtcctgaacaggtatgccaatctgccagag

SEQ ID NO: 95713 - DNA, 297 bp, Zea Mays
gcagccggactagcacaacaagtgcgtaaattcgaagtcttctccaaaagactatccgtgcaaaagtcgcctaagggtgcagccggactagcataacgagtgcaaaaatcgaaggcgcattacatcagtccgaaagtctacgggtgcagccggaccgacacaataaacgtgctagaccaggtgcgcaacgccttacgaacatagccagatgcgcgaaggcagtcaaccttatcatacaaactacagttacacgcgtacagcgagggcatcacaccttacattggttaaaccttcgga

SEQ ID NO: 95714 - DNA, 362 bp, Zea Mays
tgacgacttaacagtggaataggaagggatctcagaagacaagaagttcatggacatataaactagagtgtttaagtaggcgggagaaattcagatgtaagtatttgaaacaagagtattaaagaattcagggatatgagtatgtcaataccaaaggattagagttcaccggatggtagcaacttaatgatggaagaggaaagaatcccaaaagacaagaagattatggtcaaggggcatctacaaagatgtcgcaagcacaaggtgagatcagatctactagattgagaaaagtatagaccatacttagaataaaatacttttggcaagggggcatataggagcacaacatagaattagtc

SEQ ID NO: 95715 - DNA, 848 bp, Zea Mays
tatatcttctctgcttagttttcatgatgcgaagtgtatctttatcgaagtttttaaatttaatatctgttcttttcaggagtcatttttcatatcatgtttgaaatttatttgtttcattgctgcctagcaggatggaactatcaaggatttccacagaaaaatttgatgatgcagttaaatccatgactgatgctggtttcttgaaggaaactgttgaacaagcactgaaaaaactgataatattatatgaggaaaactgggagcatatagaagctgataattattcgactttggttgaagctttacttggtcattcagatcccaaagtatgttctggccttctattctgatttttgtagaggatttatttgctcagatctgtcacatgtaatggtttttttgaagcaatcatatatttgttataaattggcattaagaaatattttggtataaattaattctgatgatatgtaaggatctgtggcaaataagaaactgatatatgacgctgaatttaatacatgtggggaccattgttcctcttattagttcactagtttaccttgtttaagacaaactcatcaatcaatgtagcaggcagggcagaaaaagcgagctgagaagaatctcaatgtggattcagaccattataataagaagctgaagattaaaggtggtcagacgcctagatctagtatgcatggcagtgccaagaaagagttgactgaagaggcagattcccttgaggagagaaccactggtaaccaattgcaaaccagtcgtgcagagactacaataactggtgaaaacagttgtactttacttgaaagtcaagacccttgcac

SEQ ID NO: 95716 - DNA, 355 bp, Zea Mays
gcaagttttgtgcaaacaaatttcacttatagtcaactaatacttgacctccagtaggctacttcgccgtttggagcatataggtcgtactctctctagtctcttcatgagcttataaagataataacttaaatctgacagactgcgaccgtccaacaatcaggctcacataagtgtattctttcaagaatgttctacaggacaacgtctttgctacttaaagccaacaaaatatgttaaggctattgccaacctgccatacatgaattgagagtcttgcatctttgttgagtgagttaattaggttactgtcatgctaacttctagcttattcttcctagaacttaattcataa

SEQ ID NO: 95717 - DNA, 525 bp, Zea Mays
gcacaaacctccctagtataagcaataggtaagcgccagatgatgaaacaaggaggggctgcaatgcaatgcggcttgcaatctaatctagggctagcgtggcgagaattcacacaaggcggctagcgagggcaaatcaagttgtggtgtctcgacttgtaatctgggtaaggtggatgggatagtggcggaaacaaataacagcgatggagcggttgaactacgatgacgacacgacctaaaccagcaacaagactcgacacggatacaaactcaacaaagcaatctgaaacgaatttgcaaggctaaacaagggttctaggacagcggaatatattttttttgtatggcaattatctggagttataggatgaaaaatctaaactaaactagggtaagcctgacggtaatacctgagtctttgaataccacttgataggaacggaggtgcccgatcttccgtcaggtgaagataactatcgatttggtggagatgtcacacaaacgatccggcttccaatcaac

SEQ ID NO: 95718 - DNA, 769 bp, Zea Mays
acttaaatgcatcactaggaaaaaatatcagtatgatgtgcatagcttatgtttatctcataaattaatatagtcactttaatcatgagcattcatatgcttaaataaataaagaaccatatatatatatatattaatctcttcacttttgttatccaaactttgggtattacaaatcgggccttccatatggagctaacaccaaatcggtttggcacacccgtagaccgccacatgccaatcgaccgttgaggtagccgttggagatgaagtagacattagacctcaaggtctggtggtccataggaccatgattcgacgattttagccaaaaactgagaggattgagttccctattcatgctctggtgtgccaccagaccgtggtccaatgcaccaggccgccatgcctttagtggggatctctggatgtcctgtctggtgcgccactagattggtccgatgagaccctatacagctcagtttttgctttttagcaaaacttctccaattcgaattagatatacttgggagctttcctatgactttgagaatgttcaacttgtctaagttgtagattcataactttagctcttcttcaatttagatttcctgtttaaactcaaaacgaacgccaaaacacacttttgctatatatatgtttctagtatatcgtaagtgctcaagaatgtttctcagggcagttagaagctatccaaatgtataaaccagtcatagctgaccttttccatgttttgcccatctctggc

SEQ ID NO: 95719 - DNA, 294 bp, Zea Mays
tctatcttagattttgtttggatcttgtgcatccatccgtccactcgtgagaagggacaatgaaaagcacagggtttctgcacgcaggggcgcaggctcggtgccactgccactgccacccatgcgagcacgcactactgctactgtgatattatagaacagaaccatgcatgcagcctattgctagatcagagctcatctcagaaggcagaaggcagaaggcagaagccgaccgaccccgtatataccctcctgtctcactggttttagatgttttcaggggccttgaactat

SEQ ID NO: 95720 - DNA, 879 bp, Zea Mays
cgacgactgacatggcatggaggttgcagatggcgtgaagactggcgactggcgtggaggtcatggtttgctggcggaggaagttcgttgtgagagccaatcggcgcgaacgcgagaagcgagaggctggctggggcttgtcgtgcagagggtgcgggaggcgacacgggtgttggcgagcgtgcgcgggcctgggggtggagtcatggtctgcttgtgtacgatagaggtgagttggtgtgcattttggtgcgggtggagaagcgggctggagtatgttgtggagtgggcaggtgggacgtgacaactaacatgtcatggatgttgcagatggcgtgaagacatgcgactgacgtggaggtcatggtttgcaggcggaggcagttcgttgcgagagccaatcgacgtgaatgcgagaagcgagaggttggctggggcgtctcgtgcggagggtgcgggaggcgacacgggtgttggcgagcgtgcacaggcctgggggagagtggagtcatggtctgcttgtgtacggtaggggagagttggtgtgcgttttggtgtgagtgtgtgcgtacatgaacagatactacaactgtacttgtaagtgagaggcaataaaaaatccattgcactgctcgggagacttgccgccagctacacactactggggttgggttgtttttgcacttaaactcaactgccacttctacgtgtatgtcgttgttgctaattgttgtcgggctgtcgagctaccaagtgtaccgaactgaagctagttgtgttgggcttgggcctccgatgaaaggccgccatgcttgggcctcgagaccggaatggccaatagaggccgcgacgggccgcatatctgccggtggggtctgg

SEQ ID NO: 95721 - DNA, 275 bp, Zea Mays
gcctttctctaacaactcatcaatctgcttcttgagttccaccaattctggtccgaacactcgatatgctctcttggaaataggggcggtgcctggtataagctctatggcaaattcaaccttcctttcaggtggcatacctggtaactcctgggaaacacatctgggaattctgatactacattggtggcctctaatggttcaatctcctcaatatgggcggtgacttggtgacaacttccttcccttggtccagacaagaccgactccactaa

SEQ ID NO: 95722 - DNA, 350 bp, Zea Mays
ggtgattccatagtgttctccacttgggggctgatttaggggtcttataggggtctttttgtaaagttcctttactgtcttttgtaacattttggtactcttaaactttggttaaggtttaaattatgaaatgtgcatttgcctattctttctctcaactaaaggcttcaagagaggggggccaaggttcaatccttccttgcccaaggtgattattgcctaaaagcttgggtaatgctttggtccttggcatttcttaactcactcatgcttccaaggtcttaagtgctccctctcctccaagttttaaccacatgtgataataggtatatgtgccattaggaagccag

SEQ ID NO: 95723 - DNA, 530 bp, Zea Mays
gtaagctagaatgtgcaaactaggttttatctaagtcaggggcggatccaaggggtgggcaaggtgggccatggccccatctcaatttttcttaaccccttatacctaggtttaggtacacaccaaaataaacaaatttttgtatagttagcgtggacaaatctaatgaaaactagattttgatctatttttctctcgatgcttcactactcagtccactcttcacctgagccatttgattctcttccctagcgcaagcccactcgtggctcactcgcttcttcggtcatcgactgaccagtaagtcggtgacctaacccgcccgctgctgcgcactttgccttctcatcactcatcagctcgtcgactcatcgggatcctacacacaacgttgatattttgcctcctagtatgcaccagcacatgggcaagctgttgatgggaccgtggcatcacctatccctcgctaactcattagagtcccaccgcgccattgcaacacgacaatgggtgtcgtttgccgtcactat

SEQ ID NO: 95724 - DNA, 373 bp, Zea Mays
ctttcagcctcaggcctaactcagctcaaaagatagcttagtcaccatgtggcccagaggtgttttctgaccacgcgctagctttggtaacccttgttagtgctggcagatccggtctagctttctatacctacgagtcggagccctaggtccaatatagcccacaacaaaccatagttattaggaccggaccaaacatcgaactgggagatcgtcagttcgctggttcactggccgttaagaacctgttgaactgctgtttcgataattttggaccggaataattgaagtgctcacaaatacgttataccgatgcaatataatagtgatatacaacatataattagcaacatgggctacagtgccgctgtgt

SEQ ID NO: 95725 - DNA, 871 bp, Zea Mays
ctaagactacctaataatgcttgtgtattcatcaagtggtttatttagcgcgcgtgatacttgtgattgatgagtagtgatgatgacaacaacagcttagcgccttaatcagcatcaaacaacaagattctttatttatatatatactatagttgtactgcggactggaacaggtggtggcgtattaccaagagtccagcgccacctgctcaaaccaactgccgccctctaaggctaacaagtcgttgatgctatagaccccgtttcatacggaaagcttcccgtcagcgttcatcaggagcagtacaaaaagatgtctgaaaccatgtgtgcactgtcgttttcactttgatttggttagtttataaccagctgatgaaagtgaacaggctaataaagtccaggggatctagaatggagagggtcatttttcataccctagctacgtgcatgtgcatgaatatatcatatatgtcgtccatttcagcaggcagcagccagccatgtggatgggaacgaaacggcaggctgtggtctttcattgcatactaatcagtaatcaagcacgcctcagtccagcaggctgtcctgctgacgtcgcgctcatgcttagctgcatcacatcttcgccttaatcctgactcgtgcttctttgtcttacgcataaattcgtggaagcttcgtatgcgcgccgaaaaaggctttgccccggtcaggagtactgcacggcaccggaaatgtatgtatatactttggtcacccatctctgcctgccgacaaattcaggccgccccaggtgctatctttttatatttgacaccaaacagtattaaaaatagttgtatttaaaggtgttgtatcttgctttttt

SEQ ID NO: 95726 - DNA, 408 bp, Zea Mays
acaaggaaaaggaaaaggaaaatgaaaaggaagaagaagaggaaaatggaaatgagaagagcaaggaaactggaaatgagactgaatatgaaaaggtagaatgcatgtttacactaatacacattatttaccagctatttatgtattattagacatgcacacacatgatactttcattaacaaattataggtgaagaacataaaactggttcacatagattatattttggagaaggctgaaactggcattcagttcgttggcaatgtcatgcgtagcagtagtcagataaggcgggcacactgttggtttccttgtgttgatagtgccagagaacgctgtccgtaagttaatttcattcgttcatgcttttgtgaatcctggtacaatatttgcctttgcgtgttaat

SEQ ID NO: 95727 - DNA, 656 bp, Zea Mays
gggtcagcggcgacgatgacgcaaggggagatgtggacgtcgacggtgacgagtgagggagaggggcagtgggacgcaaaggaagggagaggctaggagtgcggggtcactagggagagggagggatgagaggtgatctaaataacattgctcattaaatttgagtaggagagataggattatctagcgatctgaatcgttggttttgatggcatgttaagtctgggtgaaatttgtttgttggatttagtgaagggtatgagtataggggtgatttggttaggtgagttttgtaaagttaaaactgataaattatagtgatgaattatagtgttatagataattatctttaaatattaggtacacaaaaatcatataggtccaatcaatcatcattaatgttacctaacttaaattgacgacaaaacatatgttaatcataataatttagtgttatcattgattaataatctagtgttatcattaatcattaaaactatatactttttgccattaagtgtttgactacatttgcgaaagacgttagactaattttggttcagaatatctaagactcctggtggaatattttttgcatgcattgaatgcattggtagaatagtttggtcgcttggaaagtccaatatattttctca

SEQ ID NO: 95728 - DNA, 1004 bp, Zea Mays
ctcagctaactcgtctgcaaacgtcaaatcacgaggaggatatctgctagaggatatgctgaggaagaaagaccctgatatggaggaggtgcagagaaggaagggtgagagtcattaggagcatgagcagcagagtgaccaaagtcccaccaacatcatcaaactcttccttttcatactaaggagtgataaatggaacaccatactgtgtaggtgccactggttgatatccttgagatactgatgaaggggagcagcaggttgtcaagcaggtgtctcatatcccatggatgcagcaaactggcgcaagttgtcatctgtctccctagcctcacgacgtagctcaatggtgtcggctacatggctttggcagatagaaaacactccagcaatatcacaggccagacacaaccaaggactaggcattcttccacgtcatgttcctcgcccactgcggtccatagaacgagaagtggcagcagcacaggggaaagagctaggaagaggtggctgccagcagacccactagtagccatctttgaatgaccgactggattattggggtcaatccagtaaagggtgtacagagtgtgcttacaatccttctcaaaccaagtttgagtcaacttcaatcattttcatgataaagggtgcatgaacacatcccttatactgtgtccaagcggcatggacaatttcttcccaaataagatcaaagacattgatcatctccttcttgctaggcttcatgaagtaaataagcactctgctttctccgagcacattcatatgatttccccctttagggaggagggtcattctgaatagataattcaagtacctatagtacatgtgcatatttgtggtggtctagaaatccttatcattttaaatgcacatatcctgcagcttctcatgccttggcaagcgataatcatgcataaaaatattctcacgactgatgtcagcgtcagaaaaacttaagaatgtgaacaaatctgcga

SEQ ID NO: 95729 - DNA, 436 bp, Zea Mays
gacgtgttctaccatgttattggcacgccagcagtccgcagccccgaagggctccaaataactaatgacagcgagggccaccgcatagtcaaccttattatgaccgaagactggcgggcaccaataaccctgtttctacaggggtactaccatccaaccgacatcaacgaggccaagcgcctcaagcatcgaagccgggacttcgcgctgatcgaaggccaactttacaagaagggggtcagtcaaccaatgcttaaatgtgtcaccgagactgaaggcgtccaaatcctgcgcgaagtccacagcgatacttgcggctctcacgcagggccaagggccctagccgcaaaggtgatccgtcaaggtttctactggcccgcaatgatctgcgctgcaaatcgggtcacaaggtcctgcgaagcctgccaaaaatttt

SEQ ID NO: 95730 - DNA, 1130 bp, Zea Mays
caacggataccgtccgggactagttcgtctcgttaatcaactgatttgattgacattggaatggattacttaggcgggacaacacgtgcaagaaaggggaaaagacgtggtatacagaaacgacacgtactcccttggtgctaaaataaatgtcatcctcgcgtagtaacaagtcaaatatttttaattctaattaaatatattaatgtttataatacataattagtattagtatgtaatggctcgtgcccgtcggcggatatgtcgccgcgacgtgaactgtcctagtcacctggaactagaacatgattcgattgggtgattttctcactattttcttttctgcccttttcaccgatccgatacaggattgtaggttcccttacatgggtcgacctaaataaaactcacgcactcacactttcagcctaacatggcttcacccacaccacacctggttcaacacacacaatattacttcttcagtcttccagcatcgcttcttcagtctccttgccctccatggcactccctgatgtggcatctgccccctgcaaggcttgcttggccccaagaaagagcatccagatagcgctgacgcagaacattgtagttcttccatgtggtggcatctactggaagagaactccaccagatcaaaacctgtggcacgacccgattccccttcttgaccaacctacgatccagaatctccagaggctggacattgtgactaatcaagtcagagtaagcagacagagttgaaaagacaggagtgtaatctagaatgaatggttccaattgtgagacatgaaacataggatacactcaaacggtaagccgctacacccacacgctccactatcttgtaaggtccaaataacttaaaggcaagcttaggacacgatctactgaccactgagtgttcgcatacgactgtagtttgagtagcaccatatcaccaacttgaaactgtcgatcggttctaaggcgatctgccctcagcttcatccgattttgagctactgccagctgctcccttaatatggctgtaaattgtgccctttcagctaatacatgtgccacatcaactgcagtattggaagggacaatgggtgctgttgcaaagg

SEQ ID NO: 95731 - DNA, 525 bp, Zea Mays
caaccaagctttctttagtgatctttttgaccatggacatcttcgcagcatcatagtatgccaccaaagcgagttcttcactctttatttctttggccatttcacaagctatgaagaattctaaaaatcataagaaaacaaagttgcgcaacgagcaagctctttgaagtaatctttgaagttcgagcagatggtagttgttggttggcacaagcaaataaatgtcgtgtccaacacaggagcaccacatcccactttatacacaaagcaagcgaaaaacgcgggagcccaaaatttaaaagatggtttatcactacaagtgggcccttcgtgacaaactttttacgaaggcgtatttccaatgactcgtttttgtaatgagctcaaggaaggtgttttcggaccttcagcacaaggccttcatttattttgcggtctaggctcgttatgaaaaacaaatcaataccatgaggggctacttttgggggccttctttggccgaaggtcctcaaaatgttaactgac

SEQ ID NO: 95732 - DNA, 508 bp, Zea Mays
ccttagtcaaagcatatgttctgattgcagattcacgtggtctgtgataactctccttcgattaattcaccctgatgatgatttgcctcacgaagaggttcatcttgataacgaaattcctagcaatgcgcgcaatatcattgtgctgggaatagggaacaatgcatctttcgttttgggaaatgacgaagatcattattaaatgtgggagacaaatatgtcgacacttatcttacctctctagattgtaaagggatccaaaacaaagtcctaggcatgagtgctttaagctctcttatcgggtcattgataaatgcaatcgaggctgaaccaataatcacaaaatgaaagtcgcgagcttgaagttcggacatttatgggcactattgaaataatgtgtggtgaatgcgatggttcaagtggtcttgtgagagacccatcccacatatgtgttgaataaacactgttccgctatgtaatatatctggcaaatggcatgaattaaaat

SEQ ID NO: 95733 - DNA, 789 bp, Zea Mays
cacgatccctggtggttgggttgggctttttttgtttgctatgggacatgagctatatggatttaggtgacgtttggatagtcactggcgcacagagaaatgaaaatagaatgagagagtagaaaggttctagttatagattaggaaaccagacctaattcattgtttgtcaatagttagttagagtaactccaatagtttttctaaaaaaacttcataaattcaggctcaacaagttgctaaatagctattaggaataaaaatagcttggtcttctatatttcctaaaacttaatagctattaggaataaactcaggctcaactgttgttctgtccacgcccgccgtagctctgcgcacgacgtcgctgctttgccgcgtacctaggattttggagggtatgcatcataaaacttaataattaaccggaaattttgaactagattacaatagagcccaaacatatgaaatatgaaatttgcaagaaataatgattgaaagataattaccatactatttgcatcttgaaagataattatttaatttgcatcttgatgaatggatgaattattaatctatcaaacttatggacttactcaatgcatcaatggatcaggagacaagatcgctcgttcgttgcgacgctacccagttgccgatcaagcggacgaccaacaccggcgtcgttgtgtgccgtaacctgagggccgagactgagatcgtcaatcgtagaacgtagaagcgcagatcgcagaaggtagaagcagaatagccatgcagatcgcagaa

SEQ ID NO: 95734 - DNA, 719 bp, Zea Mays
ccttaaccatttatgtgccgtcgcaacgcacgggcatctaactagtcaaggttgaaggcccaactcgcccatgtgacagctcccgaccccgtcgcaaacaactaaccaaagaaattctactgtcttacaggtgaatattttccacaaattccaaattcccaaagcgcatcacccgaatgaggaaaaagaacaaaaagaataacctccacttctcctctttgcaaaccgggtataacactctacctcccttaaaaagaattcgacctcgaattctgacgcttctatcggaacgacaaaagggaaaaaattaatgaatcaacaacacttacccacaacaaaaaattctggatatttctgccgcatcagctcctcaagttcccacgtagcctcacgctcagactaattagtccataagaccttgacatacttaattgatctcttcctcaaaacacgctccgaggattccaagatacgcaccggacgacactccaaggtcagatcctgctgcaccacaattggttccatctcaatctaatggtctggatcccgcaagaacttcctcagcatagagacatgaaaaactgggtgtacccctgccatggaatccggcaatcgcaagcgataagccaagctgcccacccgggccaagatagtgaacggtccaatatatctcgggctaagctttccggagaaaccgaaccgaacaactcctttagtgg

SEQ ID NO: 95735 - DNA, 305 bp, Zea Mays
aaactaaaatgtacccaacgaatgatacattagataatcaagaacgcgtaggatcgagtaaaaagaaatgaaatagggcaatacctcgatccggagatttagtcaagaaatcccaaatagattgagggagatgatggagaacgccgggatgaacggatctccaacaaatcttccaaagatgagagggcacaagtgagtttttggagtagaaaggtgtgaaggagagagaggaggaagagtgggcggcggcggctggaaagtgaaactgagaagaagataagaggggagagggagagaaataagcg

SEQ ID NO: 95736 - DNA, 680 bp, Zea Mays
gtgtggtcgtaatcatccaaggaagacgcccgcgccttctattggtgtcgtgcgtcggtgtggagggcgaattgctcgccgccgtgtcaactgcgggcgattttccgcttcgtgccgtggtaggcttctccgccgtggccgtctgccgtaaggtaccttctacatgatcgcctcgtcctcaatttcgttttgcgcatgaagtcaaccgcatccagtagccggaacggtggaattcgggtggccggcgaagagctccgccgagcggaggtgtctctgcgcgcgccgccgggggggagctggctgctggcgtaggattgatgacggaccgatggtcgttggatgggaaaggagcgcccgagattagatcgtgtgaaccgttgattcctaacccttggatcataatcggacgataggcgcgtagctctgtattcattaaaccgcggccgttgatcttggatccggtgatcagaatggatgcgggttattagccggcccagatctaatctggtccgtccatttcagatcgggcggccagaacctctcgataccccttcggctgtaactttttactaaagagaccctgaactatgcagaaaacaacccgccatcctgtgtgactgtgctctgggtctcagatttcttgcgcgccagcccctgcactttccagaaaatagtgccca

SEQ ID NO: 95737 - DNA, 488 bp, Zea Mays
tgcgcagactgttgaaaaatcggctcaactagtttttgggtcggttcaaccgattttggaaccgattcactctccggctgagccagccgctgaaccgagaaccaccctagtggaaaccggttcaaccggtttcagaaccagttcaaccggttttcagtcaagattccccaacggccaccagcttttgggggctcctttgtatacccctcatactctctctcttcattcacttctacccctccacgatttcttagctaacctactctcaaacaagagcattcaattcacctctcacacccaaaattgcatctccttcaattgattgaaggacccttggtgtgaggtgaagtcggtctaactcgctgttgatttcatctcgattctccctttctcttcatctctcgagatcatcgcaaacttgaatcttgtgcggatttgttactcttggaaccttgtgttccttgacggatagaggttgcttgggagtc

SEQ ID NO: 95738 - DNA, 636 bp, Zea Mays
actgccgcaaaaacaatatagaactcaagagtatcaaagaaattattgtctatctgtcacagattttatgctctaacttcaacagactgtttgacaaatatgtctaccataaacgcaaaaactcacaatacgaaagttgtagatatgtttttttctatttcttttagatatatggataacctgttttggataacgaaagtgggagataatgacaccgaaaacagactagtccaaaattttaggatcccaaacagatttacttccaaagcagataacgctttggtaatgacgttttctgcaaaactcgtaaatacagaatgtgtagataattttctaagctttccagaaagtacatgaacataaaattacaagtttgtatacgagatttatgctcaaaatatcgaactagacagaaactaatctcaaaataacgagatgatgagataaaatgtgatgagatctgtttcgaagattgaatttgtggaatggcagcggataaaaaagatcaaattgatccaaaaacaaatctaaaccagcaaaatgaccttgacctaagatacaaactcaatatggcaaaatctgaaaccaaattgtgcaaaggctaagacgaagtctttaggtcgggatacactaatg

SEQ ID NO: 95739 - DNA, 1257 bp, Zea Mays
gggaaatattcgacgaagatggagatgccaaggagttgaaacatacgaggttcgaatatcaggctaaattgtatcttcaagctgaacggtctttggtatggcctgttcctgaggagggctctgctgatgctggggatattgatgatcacaagagaaggggtgtggcgacacgtggtggggtggttgaggggtgctctaaaggtcaggtcatggctatggcagtgagaaaaaagagaagggttgatgctgaaaagaagggtctggcgaagacatctagggtggcgggggcctcggacagatttgttgaggaactggcgaatacgtgcgccaagccaggggaggtcatgacctcgcccaacctctaggaagcatcttctgagatgctgaaagtaactggggtgagtggagcagaaaagaccctattctcgtggcttccggcgaggatgattttatgtcttgtctagctcggtattttaaagtttttccttataggcgaaatattagtgttgttgtgacagctgtgatggacaaggaccgctaggagccttcgtggaagaaacagaaagctctgttgtggcttgtggaccctcgacgtgaggtgaaggcgctctgtactggcacgaagggtgctgccactatcatggtgatgcctccgcccgtggtgccggttgttactgctggggggatgccttcgcctggcaaagctagtcaggatggagtggtgaggagtgctgaaatgggtggagctgttgcgatggtccggcagctttttgtcgatgattacttgctcgagggtctgagcgtgttcgatgcccacaccggtctcgtggctgatggtaattattttttgctcgtctaaaggggattttgttctttgtatgttttccattttttatcgattgtggttttcatttgcagggtcggggtctggccaggtggttgcgacctaggcggagtatgcggtggagacaccgtctgatccgtgggtgcagttctgcgctgttgtcgatagaggcaggggtgtcaccgaggtgtctacatttggtggttttgcagcgactgctgtaaggcagctgtgctatgtaagcaactcttttttatcgtttttattttttttgtgacaaagtttgtatgtgtcaggttgcttcttttggtctgggttgctagtggacctcacgacttcacaacaacattctgagaagaaacgactggaggacaatgtgagcgtctccggacgcaaaatacagaagctatgag

SEQ ID NO: 95740 - DNA, 518 bp, Zea Mays
ttttgaatctgaattgattctgccttgatgtggttctctggtacttgcaggcacttacggagctaggacacatgaaaaacattatgaatatctgacatggattctggtagctcaaggcggtatgatgcgggtcccactctgctaatgacgggatagggaccgacgaaatgcggtgctaactttcctttcatttggaaccttttgacaccacgcatcagggagaccttgaggtatacaaaatctccttcctcaaatctgagttccctccgtctgttgtctgcataacttttctggcgactctgagcttcaagtaacctcttgcggatcagggcaaccttctcttcggcctctttaacaaagtcaggtccttctagtgtcctttcccctacattggaccacattaggggggtctgacactttcgtccatacaatgcttcgaacagtgacatcttgatactggcctgatgactgttgttatatgagaattcggcatacggcaaactggactcccaattcat

SEQ ID NO: 95741 - DNA, 288 bp, Zea Mays
cttgtttagatctctgtgaatgccaaatttattgatttctgattcactccatttcattaagaaaactatggaccgtggaatcttttgattgagcaatcacatagtgcttgctaactatttctagccctttgatacttttgcatgtgtgttactgagacatcctatcttggttgtgcgaccattgaaatatgcaaatcttacccataagtgacaaacgttgtctggttgtctgccatggtaactgtctttttgacatcgcccgagaaatgatatgtaccttactcatct

SEQ ID NO: 95742 - DNA, 508 bp, Zea Mays
ctccactatacttggttaagtagtctattccatgaatcacatcgattccactcgattccaagattatcagctctactagaaagcttattcctctaatctcaagcttagtctgagggcatgagtgagtggctctaagttcacctcctggtgatctaattaatagtttcctcttcaaaggatagtttgatatattatgttttccacaaacgactttgttacgaaagagtgagatgctccagaatcaaataaaaccgatgcaggtatggagttaataagaaacataccatacaccacgtcggcatcctctggaattgtttctgctgtcacatggttaattcttcccttactctggttctgaggagtcttgttctgtgcagtaccacgagtaggtgtattctgatcaagtctttgactgttgttcctctagggtgtttgtgggttacacttagggaaattgttggcataatgaccaatttctccacacttgaagcatacactaggttggact

SEQ ID NO: 95743 - DNA, 464 bp, Zea Mays
ataatattacgatatatgtatgaatatcatatatatcaataaataaagattggtcgatgagcagtcaaccttgatcgtgtacgtgtcatggacggacggacggaggcacggagctagcagctacaagggaaagcaagcaaggaataatatttgtgcatgcaggccccagtggagggagagcagtagagctagcaccgatggatcgggagggaagcagctagctgaggtgacaaggcacgacgagtgctggtacggtgcgcgcgcgtcgcagcagtcacgcacgcacgctgacatcccaaccttaatttcggttcggccttgcttagcatttggagagcgtttggcgctgacatctatagcttttcttattaggggctttgaacgaattaaagccgaccatttcgcttgaaaaaactgtcatttccctggctttttcttaagtttgcagaagcatgtaagactat

SEQ ID NO: 95744 - DNA, 528 bp, Zea Mays
gtgaaaaccgagacatccgatgtctcattattgtaggccacacactagccacacaataatcgagatagtttgtttttctccatggagtatatgtttgagcgccatgggcaggactatgactgaaggagccaaccaattgacccagactcggcatatgctagcgcaggaggacaagcccattgacagtgagagtacatcatttcaaattttaagttatgctcatatgcttgtgattttaccgagtatatggttcactactgtaggttgggtatatttgattcttcgattgactctagggagctaagacatcgaggacgatagcctatatcattgtcctcacaatcatctcgttctggcgcctttgcctaggacatggagattacaggctacatgaagcgttgaggcaacatgcagagtatcagaggcagtaagctgagcactaatggcagaaggacaagtactatgcgaacctataggcctagcaggagactttcctctcggtaagattgatatatgtgtgaatgtggg

SEQ ID NO: 95745 - DNA, 483 bp, Zea Mays
cttgggcactgttacttctcagttcgtcgtacccacatgcgcagcgacgtggccggacagtcatcgtcgtggtggtcgcgtgattgcgccatgccatgaccctttcaccacgtagctatgaccgtggcaagccgaaattaccatccttcaaccgttgtatcagtgagcgccatgacagatagctccggtgactcattctctcatcactgtgggctcttctctgttcaaattcgtcgtactcgtcgtcgcccgctataaattgatgccccgacctactccgttagcttgttatgaactcagagcaccgctcctcgcccccgattagccaccgtagcgccagaatttggattcccccctaactggtctgccatgagacactctaccgtggccagccatcctcaggtccattcatccccttctataccgtgtttaagcatccttgactattaacgttgctcatcgacccaaccgcttgaacactac

SEQ ID NO: 95746 - DNA, 512 bp, Zea Mays
aaggagtcatcactgtcctttggagaagacgatgaagtgtcgttgtcgtagtagaccatcttcttgacgcacttcttcttcccatctttcttcttcctggatctcgagtcgacgagcttttctcccttcggatcatcattgagagtctccttctcgttggtcacctttcccttccctttggcatcatcggtcatctcttcgagttgttagacccaatggaagagaccagatccgataccagttgagagcgcctagaaggggggtgaataggcgatcctacaaaaatgcttcaagcaatacaaacttggtttataaaaggtgttggagtaaactaaaaccaattttggattgtaagaggagagaaaatagactcttcacttgattgctccctttatatgtgtattaaactagcaacaatatataagtgaagtttaagcactaaggaagacataaaccgcaataaagtaaaatagacaagagacacggtgatttttcccgtggttcggccaaag

SEQ ID NO: 95747 - DNA, 291 bp, Zea Mays
tgcttgataccaggttgaggcgtcaagcggggaaagtccagaatcagcttttgattcaatggagtggatggcatccgacattggccacctgggagggagaaagcgacatcaagcggcgttttccattcgctccagcttggggacaagctggcgtttcaggaggggaaaatgtcagcgtaccggcggatggagatgcaagcgtcagtgtgggagagagatggggaatggagccaggtgtgcgcgctgatgggcctaggagaagccaacgggtgacacggcccaacgtccggc

SEQ ID NO: 95748 - DNA, 498 bp, Zea Mays
gaaaatgatggcgcggggaccatcacagccccatgtcatctaccacgataaatacaaaacaaccagacaatccttggccccatgattacgcgtggctttaccccgggaagaacgctggtttaccctttccttacagctcctttccaaggaagccaccgctggccgacccctctctcggcctgcccctctccctgcctataaaagggaggggatggcctctaggcaaggggacacttaagaagacaactagatgaccacaaacgcctttagacggaactgagctcacctagacacccaccctggccacccacaaggacgaacacgaggaggagcgccgacgaggaccaagaggccggagccccaccgtcgagccaagacttagctaggactccaacttgtagcttctaagctccacttccaccccaaaaaagacacttgggagcctcacctccctctttctcccgcttgtaacccctactacgagttttgatcatcaat

SEQ ID NO: 95749 - DNA, 378 bp, Zea Mays
ctattttttcccacatgtttttgaatttggagacccgaattattatatattcgggtcggatgtcaatatctacctacggatttttcacgggtctttgaacttctcacctgaccggtgagctccggtgcagaaatcgagccaagcaaaggcacatcagtggtcagctaaatcgctggcagtgcccagttgatcttgcaaggaaatagtagcttgcaagagtaccaaatccgtcctaaagcgacaagcccaaccatccatcgcaagggtaaccaacgaccaatcagaaatgatccgaatgaaaacaggcagaatagtagatagagcgtacgtcgtggttgacttgatgtctgtcactttcccgtcaaataagactattac

SEQ ID NO: 95750 - DNA, 432 bp, Zea Mays
agaaagtaaaatttaacctaagctagcatgacataattccaaacgaatcttccttagctattttattttacctcgatggaattcatcttgtatttgtcccaatcttacctatatatcaaacttgtatgaaccaagtctcacagaaaccagaggaatggaggttaaactgtaaaaggtaggccaaactagaatatgaatttgtggcaggcaatcattttgacttctaaaaatatcatattagttggagaatgttctttgttggattacctatactctcagaatcagatgtagtttacagacttaacagtcctactgtatgattgttctcttccaggtggttgatgcattgtttgggggtaataattagttttgcatcagtgaacttctgcaaccactcaatgtttcatattgacttgcattcttccaactgta

SEQ ID NO: 95751 - DNA, 451 bp, Zea Mays
agagagttatcaggtcgtctagtgaactcgacctcggccaaattcacggaactagaagtcgacttctttaaattgagtgtcatgccagcttagcccatccatcgcgaacccagtccaccgcgcactactctgtttcgtccatcagagcgtgagttcacaggagttccctgaaatcggtcgtcagcgccaccgtgataccctccgccgtggccagagctgttcaggtcagttcatgctcctctggtccatgttttagcatcttctggtgctagtgaagctcattgagcttcccgattgaactctaccatagtagatcagccagaatagatcatcgtcattactgaacaccgccggaaccagccttcacgtcgactagctcttctgcgcttcctccgttcaacttcgcgcgagtactgcaactctggtgagccaatgctgcttttcaagtcgg

SEQ ID NO: 95752 - DNA, 383 bp, Zea Mays
cactggcatttggaatgcatgacttgcctcaaccataggctttgcaactgcctcatacacacgtttttgtgaagcactttcactgaagacctcatcaaatttgtaggactcacagctccaggaaaatgaagtggaggtctaccatatatctaatggctagagaattagaggacaacaaatcaacaaccacaattctaagagcaacaattacaagagtgaagaataaataaacaaaagtggcaagtaaataaaaaagtatgaaacctaaatttacctctaattcccatgaaagtacccattccaaccagttaatcaaacgacacatggaccaaccagtcaatcaaacgaatcagttctagcgcaccaagcaacccaagcgacgc

SEQ ID NO: 95753 - DNA, 554 bp, Zea Mays
gtgaatttgaacggagcgggtatgggaaagtgggtcgacgggagcgctctctcatacgtgttttgcggcggcgaggtaaggttcttgatgccctatcgcggtaatattcaattggttgggccgacgagctatattaacattcaaggatactagaacatggcacaaaggggaaggaacgaacctgggaacagttggtcatggacgggtgcctcacggcgggaaaatgaccacgatggtgaaaatctcgaatttgtgagctctagtgggtaattggaagcgaggaagggtgcgctaggcacgtaaccagaaggtggatcagggagagcctttaatttatagtagctacgtgagtgcttcgcgaatttgggatgagaagatctcacggccgaaagggggtgagtcactggagcgcaactgtcttggcgctcggtgaggtaaggccccaggcagtaaatgggctgtccagagcgacctattgcgatgtggtaacgtctccaagcacgtggcatcctcgcggcgagtggcggatgccgacgaggacattccgatcggtc

SEQ ID NO: 95754 - DNA, 451 bp, Zea Mays
tgccaatcctacatttgttgccgattatagccaaaggggtggaccagggacatcgccgggcccggggaaatcctctactaccttcaattcattgctggtagcttcagttcggaatgattttcttgccgaaatcgccacaacgccgttgattcgcctctcatcgtcatcgggtcatgctacggcttatggcgtggtaagtaacctcatacgcattcgtttcgcgtgtagtatcaggtagcgtttgcgtcgcaccaaggttggggtgactgagatcaggaaatcgtcactgggcttccctcgacatcgcagacctgcgccttgtcgtgggtaggggcgcctgtcgttcgatcaggtggtggagtataccgatgggtttgccatgtgtcgctcgacgtgtagcgcttgattgccccatgattattcggatttggggcaaaacgctgaactccgg

SEQ ID NO: 95755 - DNA, 301 bp, Zea Mays
gaaccctcagcctctcaaatatggtactgttaatcattgatgcaatacaatttacactacacttccccatctgttatttgttctagtttaattgaatttgagggtgaggcaagcgatgacggttgttggtgaaccagtttctggtagacatgtcgcatttctggtcttgactgaggagaagtttctatgcaagcaaatgccacttcgatgagtagatcaatttctttcttctctgcaattgttggagatgatgggcgctggtccaagaaatccatcgcaagctgaccacgctctcctctgg

SEQ ID NO: 95756 - DNA, 468 bp, Zea Mays
gcgcgccgttgatcttttgacgaacggctctgattagattagagggataccccttcgcgcttaaaatctggtccgttggcggttcatccgagggcatgtgagcagaggaaacgtggttagatctgggcgctcggtgtccaatccaacggccgagaatcgcccgtaacccttcgccgtggcaatttttctaaagagaccctatagttttaagtattcaacccgccgtcctctccactgtttcctgagtcttaggagttttatcccgtagcccctgacttttctagaaatcgaggcccagaccagagacaattaaaaacagagaatttattataaaaatttgtttttaatacaaaaacaattctagaaacttgtaaaattcatagaaattccatttttgacccaaattgaaccattccaatttctaaaattttgtaatattattctctaacactttgagtcactgttttg

SEQ ID NO: 95757 - DNA, 1308 bp, Zea Mays
gcaagatttatagaagtggtcagtaaagccatctggccctggcgccttgtccattggcatgtcttttatagttgcccatagctccgcttccatgaaaggagcatctagttgagagagctcaatctgctgtatacccaattctgcaaggtcaacggtataaattggttcttcagctttccccagcaggttttcataaaagtctagcacaactgcttgcttgtcctcttgggaaactgctatctgatcaccaacattaagcttgggtatgaaattcttcttcctgaaccttgcttgctgatggaagaaggctgtattagcatcgccgtcttggagatagaggatacaggaccgcaagcgggcaatggttctttcaagggaggccaggccaaggcagtgtagtttaagcttcctccgcagccactcctgttcagagagatcccttgaatcacgctcaatttccagtcgatgtaagatttctttggccatttccatctgaactttgatgttgcccaccttcctctgaccccatttctgcagccctttactgagcctttgcaatttcagaaataggcgctcaactgcacaatttgaagacacaggagcttcctaattctgcttcaccgcatccaagaagcccggtattttggtccaaaaactttcaaaatggaaccgacgcttaccagcagtcttcactttgaggccaagtatgagggggtagtggtcagacactcctgctgtcatgctttgcagaattgactccggaaataaaccatcccaatcaacacagcaaaaggctctgtccagcctaaccaaagtacgggtctacgggactgccgctcattagaccaagtgtatttccttccaagcagggggatctccttgacctccatatcattcaagaagcgtctgaaacttgccatcatcgctgtatccaggtttgcattgtttttgtcagcagcctgatagatgagattaaagtcacctgctactagccaagggccactgtagatcgccctgatatccctgagttcctgcaggaaggacactttctcatcgtctccctgtggtccataaactccagtgaacttccggccttcttgctcagcaaattgaatttcgttcatcctcgtgaagtttcataaactgtcaatgaatgtggcttgaaattcgtccacatgtagccatttttgtgtccaagataacggtcatctgatgacccttatttcataaaggtttcgccaaacatgattgcctctgtgtttattctaatctaattacagtataccgaatcctttatgtgcatgctga

SEQ ID NO: 95758 - DNA, 412 bp, Zea Mays
gtggtgtcctaaaatcaattaaaaagatataaactgaaatgacaactttttacttacaaattcaaaagtgctccaattgcgctcacatccggaagcggaacaacaaaggctaacgatgcgctttgcaaaggattgaatctcaaatgcaaggccaccatatgcatcccaccaacgaactaaaaaaagagaagagaagttgaattattgttgccaaccatacaaaacttaaatgattaatgaggtaatggaacttactggggctctttttttgtatttctctaattgctaatggtgatgagaaggcagggccagccatattcatatactcatcagcttgtttactgattataacttgaaggtcataatcttcaaccatcttccatagcacctcattgaatgctaccctcagctt

SEQ ID NO: 95759 - DNA, 443 bp, Zea Mays
ctttaggctggatcggtagctattattgtaagagaattcagccaaggaaaggcacttatcccagtccttaccatagtgtaacacacatgctctcaacatgtcctcaagaatctgatttactctttctgtctggctgtcagtttgaggatggtatgctgagcttcttatcacatgggttccaagtgattcttgcggttgctcccagaaacgtgctacgaatggtgctcctctgtctgacacgatagtccttggtattccatgcaaacacactatttggtcaatatatatttctgcatacttttctgtcctatgggtggtatgtactggcaagaaatgagttgtcttggttagcctatccacaatgacccaaatagaatcatggtgctgggaggtgttgggcaaacccacaataaaatccatgctgaggtcctcccatttccaag

SEQ ID NO: 95760 - DNA, 447 bp, Zea Mays
tttgataaaatagaaaataaacataaaaacgaacaagaacgtacctttggcttacctattcggagcatgaaatgataaaccctaacagcaactagcaagctgattaattagccgaagaacgttggggcatttttgccaccagcaaaacgggcaatggtcttgtcctccacgtacttgatgtacagtcacctgtggaaagaaaaggaaaacaattacgttgcgaataatatatacgttatataagtacgacggttttgttttacgatttttcacttgtaccggcccatttccgtctcagcaggccacgatttgccacgttcccagcacgtctcaagtccaggatccatggaatattttatgttttccagccagagcgacacaacatgatgtcattgatgacttaatcctatgtgccattgacgagtgagcccgtatggcggagctttc

SEQ ID NO: 95761 - DNA, 464 bp, Zea Mays
gtggttttatctgaagccatctgccatgggaaaagagtcactatcatgcacatgccatttttttaactagttattttattcattacatccagccattacaacatagcacactgctaccatacgttcatcacacacgagtcctatctagggtactcccgaactccttctctaaagtgtccccgaattccttgagaaggtcatcaaggctggccagggatatctcctcggtgtcggacgagtcccttaacccggcagggggtagggttggagggtttccttccttctgctcagtctgacatccttggcttttggtcttcttgcggatttttcttgctggggcgagcttcttcagtttcttgtcatagtctatttttagggtgcggtaagcttcacgggtattggtttcttcgccttcagctattgagaggctctcttgaagggacgccttttcccctgaaagttcc

SEQ ID NO: 95762 - DNA, 344 bp, Zea Mays
acaccaggtacactagcagccaaaagaaccatctcgtgcaggataccagatctacagtgcatctccacatttagcggctgaagaccacactctaaaatttagagactcgtttacagtctcttgctggagtggatagagtgcgttgtgtcctctaaatttaaggtagaggaccctttagaggacctgttggagccagtcttatatcttttgttcttatgcccctttacctcctctaatacattcttgtctgttatcacccttaacccttgtaatatctatacccttacattcacgcttactttgaacctacccttcaaacctcctcttttccatccctgtccaag

SEQ ID NO: 95763 - DNA, 440 bp, Zea Mays
taggcttggccttatctggtcttgctaagtttacaccttccatatgaaactccagtttctacaaatcaaagatattaagtcagttttcatattcacatattcatcatatactatagcagtgttattacctttctagcttccacatccgtagcactactatcaaccagacgcatatcagtgttatgttccaatgttaatattggcatattacattgatcatcgttagcattgcattcatttgtattagaccccattacaatttcctgtgaaataacgcaaactctagtgaagacacaaatgttatagagcagcataaataatacattataaaattatgttgcatacctcgttcccatcatctaatttgcgtaaattatctataactaagtcttctgtttcatacgcttcgacctatatcatttaaattacatacatggatc

SEQ ID NO: 95764 - DNA, 641 bp, Zea Mays
ccttgtgatcatcactacttctttcaccactactcaatatctctgtagttatctcttcctccattgctggtggaatcatacctccaacaattacccctcttgaagccctactaccttgaccacaatcatcctgggcactgtcatcttctccctctctacggtcccttccatgaaccgaagagaaatcttctaggatgtgatctaaatcaaccttctttgtgtagtatggttcttcttctcgaaatgtcacatccatactcacaaacaatctcctaccaataggatcccaacacttgtatcctttctgagtagacgcataacccacaaaaatgcacttgactgcttgaggatccaacttgctcaccgtaggtcgatgatcttttacaaagcaaacgcagccaaagactttgggtggaactcgaaagtcattctttcccaacaaaagctccataggtgatttcatgtcaagtattcttgagggcattcggttgatgagatatgtggttgtcattactgcctcactccacaaatatttaggcacattcatttgaaacaagagagatcttgctacctccaacaaatgacgattttttcactctgctacaccattctgaggtggagttccaggacaagttgtttgg

SEQ ID NO: 95765 - DNA, 357 bp, Zea Mays
atccaaagttgcatcagcctctgggaggggtgccactaccaatgccccagcaggagcagcatcagaagagtcctcagccagcaaatcaagcatagcgcttatctctgcatcactagggttcaggggcacctcaaaatggacctgccgttcaccatcaggaatctccccgagcgaggcaaccaaggcactaacttcttcagcagagggccacactctaaggcccaaactaccatcactgacaggaggattcgacacaaaaagagtgaaggatttgggaggaggcaagttctaggctgagaatgctactggggcaccaacatttgacactttgcctctaaggatcatctcaagttggtt

SEQ ID NO: 95766 - DNA, 540 bp, Zea Mays
ttcacggcaatcaaatttaagcatggtactggcgaggcgcacgattatctgttagatgtcctaggattaataatgattctcttcatcttgtctgatggtcttggggtattttaattctgacagcgagcttgcattgctcctgtctcagtgtatatgattagatgggtcaagaggcatttggtttagttatttgcaattaaagccttcatatcattgctgtgtcttatggttccatttcaaggcacaccgttgcttgctttgcacctactttgatttatcaggaaattttgaatgtttattacattatcattggacatttgttactgtttggttgcgactttgcttagcaattttcctcaggaatcttgtgttttcctatgcgttatggtcctagacttatggctattctaatttatttaggctgattggaagaagtgcatttctcattagatgattctttctgttcagctagatttcccgttccatattagcacattgcttattttgattctttcggttcagttcattttcttgttccat

SEQ ID NO: 95767 - DNA, 420 bp, Zea Mays
atttagagccctgagcttctaataagtaaaagaagccctgatcaaatacatcaacttatgaatccactgaaatactaaaaacgaatttttttttgattggagagagtatgactaatgaaggtgttgtgatggagtaccacattcgttaattaaaaacaactgtctacggaaatgatcacatacaagatttttgtgcaatgataccggtggttaatttatcagcacatacaaagatgcttgtccttttttgtttaatctgctgagcaacgtgataatttgttaaccttgattgttaacgttgattttttccagtggcaaaatacaaagataacatataaacaataaaaaagtattctctccgtcttaatttataatttctttgactttttttagagcactacacacatccgccctcaaaat

SEQ ID NO: 95768 - DNA, 380 bp, Zea Mays
acaacttggacaagttgtaccgggatgccagtagctccctcaccaccttggagaggagccatcgcttcaccatgacagagttggagtgcaagagggatgagttgaaagagtccaaggatgaggtgtcgaaactcagcaagtccttttctttgaaggattccattatcaaggagtcgtatgcctcgaagaaactggtgtcacaagagctggaggctgctcgtcgcgacacggaagccgcctgtcgtgatatcaaggtcttggaggacgaccgttttatcatgaaggcatggtgtgacaaggtgatggataaggcgattcgggctggtcgggtattgatgaagaggcctggcgtcgtggtgcctgatgatattgcagctgat

SEQ ID NO: 95769 - DNA, 532 bp, Zea Mays
gtctagttcttgatgtatagcatttgagaacaaggaccaacagtccctatccaaagtagaataaatctaattttcaatagacttctgggagcacatctcaaggaaagggaaatgtgaccaacactccagcaggcaaaaatacaaggaaaactgggcgagtctactacactcaagtggctaccaccccgaaaggagaaccggtgatgatgggtacatttttcgttgccaaccatcccgtcgtcatcctttttgattctggtgcatcacatacttttatgagcaagacttttgttgagaagcattgcatacatagtattgaatcaaaggagggttttgttattcaatcacttaggggtcaaatctttactaaggaagtagtcttccatgtacccgtagattggccggacatgagttccctactaacattatagttataaagggacaagatgtagatgtaattctaggcatgaattggttagcccataataaggctattatcaatgctgatcaaaggactattcagctaagtcat

SEQ ID NO: 95770 - DNA, 412 bp, Zea Mays
cacgcaaagagctagtggaaggttgtatggaacagcaaagacaggccaacatgagtaggacgttgcagttagattgaaaggcgagaaaccatgtgttgctaaaccgaagcggacattccacacttcatcagcaaagctggaatcaaaagcatctagtgcctttcatgcatctgtattagctgggtgtgccatgacatttggattctcacgtacccattctttgtgccatctcatgtgtctggctgtatttttggagatgaacaaatgtttcaaccgaggtataagaggcatgtaatgaagctgcttatgtgcaatcttcatcgtcacggtcaaaccatcatcgttttcaacctcaacgaatctacactcaccacatacagtacacttcttctcactcgcggtctccttccag

SEQ ID NO: 95771 - DNA, 341 bp, Zea Mays
tacggggtcactggcagcccttagccacttcattttgaggttggctgagagggcactgcccttcttcaagctcctatggaaatcaggcccatttgcctggattgaagaggcgaaacaagccttccaagaattgaagcagcacctagcttccctgttgatcctggttgctccggagccaggggaaccgctgtacttgtacattgcggcagctgcagaagcaataagcatggtgttagtcgctgaaagggcggcacaagaaggacagaaacctggaaacttaggaccagctacagagacccggactatccagaagtcggtctactacgtcagcgaggtcctcc

SEQ ID NO: 95772 - DNA, 628 bp, Zea Mays
gtcggaaggggaatacatgtgcaataataagtgtttgcatatattgggtgagagacagcataatactatgcataaactatgggagggagacgcatgcgtgcattgcctgccgcagctaattaaacgtccacttccctttcatccccttccccggccgggttagttagcaatccagtgatgatatccatcatattagctagcatgcataaacactttattaattggtgtattgttattggagaaagacaaacccaccaactatatatcctagctagctagctacctaaaagacacgtacgaccaaggcactagctagctagcaccccattggccattgccctcttctccaaccgccacgcagcctatcattggacgagtgggtcggatgatattcgatagtggaaataccttttttttttgcctttgcttgttgatcgacactctagcaagctcagcgtcatcagggagaaaagaagaatcattctcatgggcggcgtgtagattgcgatcggacggagagaggagcaacaattgatagacggaaggaatcagctggcaggaacaaaccctgctagctagcgcgcatctcaatcctcatgcatgttagtatagcaagtgtgtccaaaag

SEQ ID NO: 95773 - DNA, 416 bp, Zea Mays
aattaatctaggaaaaattgggttagaaattatatagaaccatgaaagaccatatgaaggagaacaagtttcatacaaagaattggtcttgatactttgtaggatttggacgaaatggtgttgcaaattcctctgtcaggattggtgtgtgttgtttcagtagctgaaactgggtatttcagttcttttgctctgtttggtgcaccataacttttgatcagtgtgttttcaatcttgtggtgctatacaaaagtgataggtatatatttagagagtaacttttgctaagcaaggttgatctgttgctgtgtagaattgggagaaaatgttcttccaagatgagctgtcaggcaaattgtgcactaaacattattcagttagtgctgctgaaattcagtgtttcatcatattttgga

SEQ ID NO: 95774 - DNA, 4464 bp, Zea Mays
atacagcagctcaaatggagaacgaccggtggctgaatgaggagatgaattataccaaaattgagctactgataaccattggctccactgatgcggacaggcatgaacaaaacaacgtaaaaacgtttccaaacattggttcacacgttcagtctggccgtctgattgcggatggtaggcagaactcatgcgcaactgcacatcggccagccgaaagagctcttgccacagaagactgagaaatattttgtcgcgatcagatataatagactgaggcaatccatggtgtttgtaaatctgatcatgaaataaccgagccacagacaaggctgtaaaggggtgtttaaggggcagaaaattggcatactttgtgaaagtatccacaattaccaaaatacaagtataggattgtgattgtgggagcgcctcgatgaaatccatggaaataatttgccacaaaccagtagggacaggaaggggctgcagcagacctggcaaacgagctctatctgctttagcctgctgacaaatgacacaatgacgcacaaactcttgaacagtatgcttcatacctttccatgcaaacaactgttttaaccttgcataggtaacaggtatccctgaatggcccccaacagcggattcatgaaaaactgataataaacgctgttgtaaagccggagactggccaacccaaattctgttcttgtaacgcagaatgccattgtgccatgaaaaatgtggtacagcagaaccatcaatggccaacttggcaatcattgctgacgctatttcatccgtacgataagactcagcaatgtcagttatccactgtggagtacaagacgatacagctgaacaggtaaactgcatctgtggatgacgggacaatgcatctgctgcactgttatcaactcctcgtttatagacgatgcgatattgcaatcccaacaaacgagtgaacatcttcttctgccacggcgtatgtaaacgctgctcatccaactgtgccaaactacgatgatctgtatgaatgtgaaattccttcagctgcaaataatgacgccaatggtccacagccatcaatatagccaagtactccttttcgtatgttgacaacccttgagatttaatacccaaagccttgctcaaataagctaccggatgaccagcttgcataagtacagccccaacacccactgcgctagcatccgtttccaaacaaaaaggcaatgaaaaattaggcagtgccaacactggggctgtaatgagagcttccttcaaggcttgaaatgtcgcttcatgctcagaagtccacacaaatagggcccctttcttgagcagagcttgcaagggtcgagcaataagtccaaagtgtttcacaaaacgcctgtaatagcctgccagccccaaaaaactgcgcaattccttcactgtacccggagtagaccattctgccactgcctgtatcttgctgggatctgttgccactccctgagcagaaataagatgacccaaataggacaactgggactgggcaaaagaacacttagacaacttcaactgccactgatcccgggcaagaagctccaataccgaccgaaggtgcagcaagtggtcttcaaaagtggcactatagattaaaatatcatcaaaaaatacaagaacaccacggcgaagcagaggcgccaaggtatcattcatcgcccgctggaatgtggccggtgcaccagttaatccgaatgccattacacggaactcataatgaccagagtgggtctgaaaagccgttttgtgagtatcatccgggtgtagcagaatttgatggtaaccggcagtgagatccaagctagtgaaccaagatgcattgcccaattcatccaatagttcttcaataactggtaccggatagtgcgacttcaatgtgattgcatttaagtgccgaaaatcaacacaaaaacgccatgtattatccttctttttaaccaataaaactgaagaagaaaaaggactcacactaggctgaacaattccagactgtaacatcaccttgatctgtctttcgatctcatccttcactgccgggggataccgatatggacgaaccttgacaggagaggctcccggtatcaatggaatactatgatcacagtaacgagaaggaggaagaccagaaggaggctcgaacactgtgagaaattcagacaacaatgccaacagaggtgaaggtaatttcaagtccgtcacagactgcgagacaggttccaactgatggacagcaaccactgaacctggagaacaaacagcagacaagccttgcaacaacaccgaagattcttgataaggaataatcatccatttttgcaaccaatgcacattcatcggactatggcatgccaaccaatccataccgagaattatatcatatgatgataatggcaagactcgaaaatcagatgtaaatgtgcagtgctgcactgaccatttagcgccgatcaattgctgaaaacaaatttaaacgagcaccatcagcaacctgcacttgcacagaactaggcatcaaggaaataccagacagctttgttgccagtgcggaagacaagaatgagtgcgaactgcccgaatcaactaacaccaaaacttcaaacccctgaatcactccttgaaatttcacagtaagaaaagcctcctcgccagacactgcagctgcagataacatcatgaacacctggtcacccgccacctgatcagcaacagtactgacagatgaaccctctgcatcatccacataaagatccaacacttcctgaagcacatgcaactgcaccgactgtggacattgatgatcacgtgaccacttctcagcacaacgttgacaaagccctcgagcacgacgataggcacgtagtgcagccaatttatcttcaccagtggaatgtcgatgtaattcagtacgacgaccttcaatggttggaacatttctcttctcagtgacaagtggtcgaggtagaggcaaaggattagacgccaatgaacgctcgggcagaaacaactccaaacgacgtccatccacatgcctatgcgatgtcgacacctcttcctgcaacaatgcgaacacacaggcagaatccagagaagaaggacgctgaacaaacacaacagctctaatatcctcacgaaggccatccacaaatcgttgcacaaaataaattgggtccataggacgaccataggctaccagattatcgaccaaagcggaaaaacgttccacatattcagaaacagtagatgtttgacgaatacgaaacagactacgaataaaagcttcatgctcatctttgccaaaccgatctaacagcgattgacaaaaaacaggccaagtagaagcacgacactgctctgctcgagaagaaaaccaacgagcagcaggtcctttcagatgcatcgttgccaccttgatccacaaactcggatccactgaatacatatcaaaatagccttgactaagccggatccacaattttggattctccccctcaaacactggaaagtttaactgtggcaaccgacctctcatagcccactaacaccatctgacccaatcatctcaggcatagaagcaacaaactgctgagcagaggaagagcacataccctttaccgggggatggataagggcggtgaccgacccaaaaccatcctcccggtgaatcgattcgatgcagtgcccatggggcgaggcggctggagatccggcagcaggacgcgctcccactgatggcgatggggcaagtactcccgtcatcaggttgggttgatccagcagcgccctctcacaatgcttggcaattttgccaacctccagacgaagatcatcaaccacgccatcgatgcccatcttccattcctcaagcgcacccgtggcgtgctcaagggtacggacgcgagcatcctgcgccgccgtatggcccgaaaatagtgcctcctagcgcgcatcctgatcggtggcgcggcgatctaacttcgcttcctgctctgcgaaacgccgagcgatctcatccaaaataatttgagtatccggattcaccatcacttgctgccggcggaagcgggtattgtagtggtggcacgacggaggatccagagtgaaatcccaacaagcaagaacgactgccctttgataccacttgttagctgctggctgggaagtaggaacttggaacacggcaagaagaattggacgaacaacacaaggaataggtaggagatagagttcaacttggaggacaagtatggagttcagttattacatttcctactcatccgcacacatctgtgatatatttatataaggaaaacacaccactctaattcacccaattgggcccaaacaccttcacactcttcttcctgggcctcttggtctcctgatgcagcccaacacaatggccgaggagcccaaaat

SEQ ID NO: 95775 - DNA, 353 bp, Zea Mays
taaataaccaatatcattagtatgctaagcagatgatccaaaattgtttataagcaggaaaatggtttttatcatgataattaatggaccaaaagctcatgcgatgttgaagataggacaaaaaataagaagtaaaaacatacagcaaactaccgaccgacattcaggcagatgatgggatcaagttcatccgagttggttcaattttctgatccacttgggacttggtaattatcttcatttttgtgtatctgtgctaggacaggttgctttagatgtttgataatggcctaacaacacaaggactgaagcttaagcaattcaaatatgaagtggataaaatgagtattgag

SEQ ID NO: 95776 - DNA, 440 bp, Zea Mays
cttatttgttgttgtacgtggatgacgtcatattgaccgcctcaacgccatatttgttacaccagatcaccaccgctcttcgggctttgttcccgatgaaggatcttggtcccctccaccacttcgggacagttgtgtcccgctccgccatcgggatgctgctctctcagcgtcagtacactatggagattttggagcgcgcagggatgacctcatgcaaaccatatcagactctagccgacactcagaccaagttttcctccactaatgcaccagttgatgatgcctaccgtagattggttggcgtcctcgagtatcacacgttcactcaaccagacatcacttatgttgttcagcatgtttgcctccacgtgcatgacctacagaaccacatcttacgacagtcaagtggattctttgctacctcaacgacacgacag

SEQ ID NO: 95777 - DNA, 496 bp, Zea Mays
taaggttgcttcaggatcagaagtccacccaaagcatcactatacgacatagagccgaagagagatgatgattaagattgatgaactacaactagagctaagacatgaagataattaatatagatagattaattcaattggattatatatattctcaatcggtcgtatcctttcatatttataggagagaatgtctagacttatcgtagaaataaggaatatcttgcaacaaatcaggactccggttcgaaccgatctaatctcggacgtttcagacttacccatggaccgtcctccagtgctatcaaatttattgttcagcacacctgcctttctattcatatcttttattttaaatcaactataaataaatctatggtataaatacattttcctctcatccgtataacctgtacacctaccttcgcttcatttcgatgtgccaagagccgaaaaaaaaccctccaaaccagtacccctcgctgctcaacggctc

SEQ ID NO: 95778 - DNA, 388 bp, Zea Mays
ttgaaatcctcaaagttaaaaccaacataccatatttggcattgtctgagatggaaatttgctgttgttgaaccttaatcgagctcttgtctttttattaaactattatggataagcttcctgtaaaaattaatcctgggaaagtaggaagaatacaaggtttgtgaaaagtccaatattcagtcttccctgcaaaatgtttgccacctctgccctcataaagaagtgtatgttttgtttccttccgcttatactaatatgaagtgcacctccagccaaaaaataagctgttctagaataaatcaatatttatgatttgttcatctctgcacaaaatctacttatatttgtcaaaaaacaacattcatggattcaccagcaaaagtgc

SEQ ID NO: 95779 - DNA, 853 bp, Zea Mays
ttcttttgaaagttcccttcttctggaagctcggctccggggccattaaaagtgcactgctctttttcatttcttccccccccccctcagcttcctggccatcaacatccatctccccctctacaccgtcctgttgagatgtatcttgtgatattatgcttgacttgggaaaacctggttggctcactaagtctaattcctttcgcatctctgtctttttccgtttgtctttcttgggcctcttggtttcccataatttttgcagcagacttttcactggacttgccttgataaccctctttatttatatggtccttccccgccatattctctgctggaccaaaatcgagcttttgtggaactcctcctttcctgctcgtattagcaatctttagagggctagttgacacctcccctttctcacaatcagagaaagcctttgcacttccagattcagatctgattgcgatcttccagctttgtttactcccactaccttggctcttctcccatttgcctccacctgaaccactcccatcactccctctccccctgttttcttccaggaaccggcgccgagacggcactattctgagatcaccactatacggtcttctcttttctcttgagctcttaatgtcacaagatttatctgtatgcccaaggagaccacagatgtagcagaaatttggtaaaaattcatacaccaccggacaccaaattttatcccccttctcgttcaactccattatcactcctctctgaagtggcttatggatatctaggagaactttcactctcaggaaaaggccgatggctacctcatcctcctcagattccacctccagaaagg

SEQ ID NO: 95780 - DNA, 341 bp, Zea Mays
cactgggtgaagaaatgtccaaagaaagcagctcagtagtcgccagcagtcaatgccccagcaagacaaggagcaccacagcaagcaccaggaggccgtggtcaggcctacaaccgtggaaaggtgaaccacctggaggctgaagcaatccaggatgctaagtaggtatgtttccagtcgaatcctacccaacaaaagtactatttgatactggtgccacacattcttttgtttctacatcctgggtagaatcacataacatccccatagaaccaatgatcccacctttaagagttaatttagttgggggaaaagttcagtccgataggatttgtccgaat

SEQ ID NO: 95781 - DNA, 409 bp, Zea Mays
ctcagaaacaacagacatatggttacctgtgaaaggcaactggctattgggatcgatggggggaatgacagcatcggatgaacttgatgctttccgcttgggcgccatctcaatcttgctggcaagcggaacagaagcagtatcgcacgggcgcaaaaacaaggcttggatgcagaaaagcaagaactagggcacggaaagcagaggcgcgcaacaatgcagtacatatggggttttcccaggccagatatcgtttctagaaagcgtccagtcatcacccggcggttatttttaaatgccggcctgccatgtcatcactcagctgctattcctaaaaaagctggcgtgccatgtcatcactcggccgttatttccaaaacggccgatgcggcccgttctaacccggctg

SEQ ID NO: 95782 - DNA, 665 bp, Zea Mays
cccgaggctacaggcatatagcaaacgcaacaaccaagtcagccatgaagattcgcttgaccagctggaggaagctcgggacgtagcactcgttcattcggtaaaataccaacagtcccttcagcgctaccatgagaggcatgtccgaccccaaggattccaagaaggcgacctggtgcttcagttacagcaatacaaccgagggcgccacaagctcactcctccttgggaaggatccttcagcatcgccaaggtgctgaagccagaaacatacaagctctgtaacgaggaaggagaagtctatgataatgcgtggaatatagaacaactacgtcgtttttatccctaggcatacaaacgtatttgtactatgttctctatgtttaataaagaatagctctcaagagaggctcggccttactttcaaaaccgagcctccctcgggggctagcaaggggaacccctcctctgtgttgtcttttttctcacaattttgaaaaacgaacacgattcatagcctcaccctagtcgtaacgcgaaaacccttaggaacggaggacgtcccgactaaggaaaaatagccaagccacaggaacacctacgcctcagggatacagtttcctcactcactattccctccctaaagggtaacttacgtccgacgg

SEQ ID NO: 95783 - DNA, 480 bp, Zea Mays
cgcttacttaactcggggtgaccactatgccctgctaatggagcaatcggcttaagtcggcaacgaattaagacggtgcaacatgctcgcgcttacttaactcggggtgaccagtatgccctgctaacggagcaatcggcttaagtcggcaatgacttaagacggtgcaacatgctcgcgcttacttaactcggggtgaccactatgccctgctaacggagcaatcaacttaagtcggcgacgacctaagacagtgcaacatgctcgcgcttacttaactcggggtgaccactatgccctgctaacggagcaatcggcttaagtcggcaacgacttaagacggtgcaacatgctcacgcttacttaactcggggtgaccactatgccctgctagtggagcaatcggcttgagttggcaacaacttaagacagtgcaacatgctcgcgcttacttaactcggggtgaccactatgccctgc

SEQ ID NO: 95784 - DNA, 432 bp, Zea Mays
attttatattgaactgttgcctttacttgcctatgatgatatgttttataatgatgatcaatcaagggagtatgacttgttgctttgttttccttgctcattttgtgaattttgcttgtgatgaaatatatttgactgatgaccattcatgggaggttgacttactgctttgttttccttgctcttggttttcttcttgggtcaggcaaccaaacatactctctatcctttaatcagatttctccacctgccctatgttctcccatgtatggtcatatgatgtgtttattcatacaaaactgaggcaatctattgtattactctcatgagttgatcaagcgatttaaattgataataatttctgaggcaaacacttttcatgagaaattggtgttactgtttcagtttctgtttcaggtctcatggtatttt

SEQ ID NO: 95785 - DNA, 800 bp, Zea Mays
gtgatatgctcccatttccactctggaatttctaatggcttcagcaaacctgcaggccgcttatgctcggccttcacgcgctgacatacttcacaggcggccacatacttagaaacgtcaaccttcatccgcttccaccagaagttttgcttcagatctcggtacattttggtttcgccaggatggacggtgtaaggcgttttatgagcttctctcaagatatccatcttcacctctgatttttgaggcacacagagacagcccctgaaacggaccaaatcattctcatcaatggagaactcccgcggtttaccatcaccaaccctctttcgagcttcctgcaatagacgatcctgctgctgagccgcacgcactctctccatgagagaggattgaataagcatccgagtctcctcgctagcggtgccgacataacacaaagtgatccccaaacggtccagatcagcgatcaacgacaaggccacctttggaaccccggacctgctaagggcatcagccaccacattagccttccccgagtgataatgaatggacaaatcataatctttaatcaattccagccaccgacgctgcctcaaattcagctccttctgagtaaaaatatacttgaggcttttatgatcggtgtaaatgtcacaagcctcgccataaaggtaatgcctccatgactttagagcaaaaaccatcgcggccaattcaagatcatgagttggataattcccctcatgcttcctcaactgccttgagccataagcaatcactctgccttcctgcatcaa

SEQ ID NO: 95786 - DNA, 467 bp, Zea Mays
aattctgtcttcactcgttaaccgagaaaatcgcgtctgagaatttataattgagattcgattctccacataaattatctgttgacgtggaatcgggtgtcgactgcggatgaaataatttgatttcaaatcaaattgaacaccgtctgaaatacggttgttcacaccgttcggatttgttccgacgacatctcgccccgatccaaaactttggatataaataacgggtgcaaatgcatctgattctaaaatattcaccaaatcaaagcgtgtcccatttattgttatcaatttcgtttgattcgatccatgattcatcgctaaaaatcttcaattcataaatatctctaattctcagtaaaaaaaagaagaaaagaaaatctaaataaaaaaatctgggaaaatatctgttcttccctatcctatccgctgctctttcgatctatttatatccccttcgtttctat

SEQ ID NO: 95787 - DNA, 314 bp, Zea Mays
atatgatagtcatatgaaatgttgttttactctacgcgcagcatatctatggtcaattcatgatctgctagcatatggcattttttctggttggtgtgtccacggcatactgcgttgtccgatatgtatgggtggctcacaagcatataggttagaacatggtaagaaggaaacatttttttatgttcaccgacgcctcctttcctataatcatccttttagaaaggatacaaagtcattccgaaaaggcaagagggttagagatgggccaccgaagcggcaaactggtgaaaatatcatgagacaacatcgtg

SEQ ID NO: 95788 - DNA, 621 bp, Zea Mays
caagtttctatataggtctggactctggatctcgcgcgctaatcgcaatggttgatgccatttcgggcctatagcagcatgccttactcctttctgctggatccatagcgtattgggaaagcaaagttaatatttatggtagccaaaatgggttcttgatgagttgtaacgtgggaaagagaatcttgcctgagatgttgggttgtatttcttgcttgcaaagatacattacagtgctatttggattacatgccttgtatttcaactagaccatgatcgtgcagaattgcaaatggaactacttaatacaaaatggaatgaacagagaatgtgcaactgaagagggaggcatttttagcattatatgttattgcaatgctagtagaaaagggagcacagtgacacgtctcaatacatggcaattgattaatgacatggcatggcatttttagcgttatattttattgtagtgctagtatgaaaaagggggaacagtgacaacagccacacatctcaatacatgacaattgtttgctgacatggcatcctatcctatatcaaacatagaaccttaagctcccaagttaacctgttcggcctaactgcttaagtcatgtggca

SEQ ID NO: 95789 - DNA, 577 bp, Zea Mays
ctagttttctacgttgactaccagcaattctacatttttcagtcatcttttcaatgttggctttagttgaagcatgaagtttcaaaataaaagtcagcacgctccttaacatcactatgtacttgctcggtagtaggtagaggcaaaagatcaataggagcatgagggttaaagccatacactacctgaaaaggacttaccttggtggtggagtgttccgcccgattatttgcaaactccacatccggcaaacactcttcccacattttaaagtttttcttcaatattgctcgcaacattgcagacaatgttctattcacaacttccgtttgtccatcagtttagggatgacaagtggtagaaaataacaattttgtccccaatttgttccatagagtacgccaaaaatgactcaagaattttacatcacgatctgaaacaatagtagaaggcataccatgcaaacgaacaatctctttgaaaaagaggttagcaatatgaatggcatcatccgttttgtgacaaggtataaaatgtgccatcttagaaaaacgatcaaccacaacaaaaacactat

SEQ ID NO: 95790 - DNA, 622 bp, Zea Mays
ctcactcagatggatggcacggaagttgggaactcctggaacatagagcacctcagaaagttttatccctagctgtatttcaaaactgctgaggcgacaatgtactctgtaaagtggaaatatgtcgtcaataaagagagatttcaaagatattcagttcgtttatgattggcttgcattcttactcagggtgactactatgccctgctaacggagcaatcgacttaagtcagcaacgacttaaggcggtgcaacatgctcacgcttacttaacttggggtgaccactatgcccctgctaatggagcaatcgacttaagtcggcaacgacttaaggcggtgcaacatgttcacgcttacttaactcggggtgaccactatgccctgctaacggagcaatcgacttaagtcggcaatgacttaagccggtgcaacatgctcacgcttacttaattcggggtgaccactatgccctactaacggagcaatcgacttaagtcggcaatgacttaagccggtgcaacatgctcacgcttacttaactcggggtgaccactatgccctgctaacggagcaatcgacttaagtcggcaatgacttaagccggtgcaacatgctcacgc

SEQ ID NO: 95791 - DNA, 805 bp, Zea Mays
gctatccaaagtgtgtggtctaataccttctgaccaaattcttaatacacttaatggcttaacttgttagtgtcagggtctatgtgtttttaagtcttattattatatcctgcctcatatttatgaggaaaggttaattttgaagatatattccatgaacatacttaagtgctaaacttctttcattccttttgttatgttgtatagttctacctattcgtcagcagtgccctcaaacaagtgctattcatgtcaggcttgagcttgctaggtcccaacggtcttagtttgtcattgcacacactagacttttagttctggtgctttatcttggggtacacttgttttgaggaatggtttggttctaggatttgtctggccatcatctggtcaatccattgttcttaggcaatgatgtcattctcatgttttattgttgtatgaggaagtctttgaaacttggaccattactcagatgaggacaacccctttccttgaaaaaaaggctgcctcctaggtcatatacattgtagtcactcattgcttagagaactgaagcaacatcaaatggtttgttaacattttatgtaaatcaatgctggaaagcacctctgtgttgttgtggagaaggtatcctctatggtgttgttgatgcctttattgagagttatcattagggttaaatttagccgattcattcagatgattcatggcatatctacgttaatgatgaatggtaagggaagaaacatttggtcttgaaccacttcgtgaagtttgcaatttgaattcatttatatctgcg

SEQ ID NO: 95792 - DNA, 1231 bp, Zea Mays
ccgtgatgacgcaaagctggcatgtgctgaatatttaaaaataataccttggagtcggccgctcggactactaacaaatcacgcaccatcagtttctactctagctcgtagttggcttcgacatgaaacagtcgctcgggattctaccgatggaaccacacggcctcaacaaccaagctatagggcagagaatgcgggctggtgggccactgtctcgataccttcaactaaattcagttaagattggatcgcaaaactccgaacagattccgcttataatcttgatcggctagccaaacaaatcctaacggactgcatggctggcatacggactcgccctcatcctctccgcgagcatcgcaacaaactcaacagaacgcgcgtctggcgggcgaaatcccctctccgcgtcgtgatccgttcattgaaatcacggatgctgtacacctgggaacccaagccaccttcctctgagcctccatcaagcagccgccgtcgagtgctaattcagcccagttcctgcctgatcgcgttttccccgcttagtctcgttgcggtgtgatcgcaacaaacaccggagatcacggagccgatctggttgcctgcttcaccctcgccctgggatataaaatcaatctccctgtgactccccttggccattagcaagttgaagcactgagagccatagccgtcggcgagccgagcgattccaggttgaagtgaaaaaaatactaaagccactgctctcggcgttcgccgccgttcggttgttgtggggcggtgaggccttggacagagaggttcagagcttattgctgttgtgcgtcgtgatcggttgagtcaacagcgactgcttgcccaatttgtcttacatcgttgccgatccatggctcgtggagggtagcttgactgacgcccagggtcgtggtaagatttctatctcgaagtttgctttgccctccggttcaggtagtgatggtcggatcgaagttcttgcgctgggtcgccggatctctgcgtaccggtgatctgcgccgccttggagctctttgctctgagccgcatgggtgtttggaggaaggagatggatccagggccgctaatctggtgatggacggataagaatagaagtggcagtagccgtttcatctcgatcggtgattctggggccgtggccgctggatccgtaacagacgactgggatcgctcttggcataccggttcggtcggg

SEQ ID NO: 95793 - DNA, 470 bp, Zea Mays
gggatctgcacaaagtacttgttcacaatggcagtcaggcagacatcatctttctacacgcttttgatcgcatgggcataagtcatagcgttctcaagccaacagacaaccccctctacgactttggaggaaaaggaacctttccactcggcaaaatcaaattgccactatcattcgacactgcgccaaatacaagaagcgagtagatcaccttcaacatagtcgatatggtttatccctacaacgccatcatggggcgaggatccatcgataaacttgaagcagttatacatgaattatacatgtgcatgaagatctcagacccctagggtgcaatcaccatatatggagaccagcaggtcaccaggaacatagaaagagattccattctcggccagcgtaatgtgcactgcctcacaactgatcgcgaagacccctgcaaccttcacccaatcaaagggaaaaatatc

SEQ ID NO: 95794 - DNA, 447 bp, Zea Mays
tttgttcctcctcctcctccacagggacatggcgatggtgatggtgatcgcgaactagggagacgatatacaagggcaccatctatctaggacatcaatcaactggctaaccttgtccttaatcaagggcaagaaggtatgtgcaattccctcctctaattatgtatttactgcatgaatggattagattacctcactatttaatcagtcctcggattactaagtgagacattacaagatcctacaattctatcaatggcatcaagagctaggtctgttgtctccttagatcaattcgagatgagtagaatcaagaagagaaaacaaatagtgggatttaggagggggcaatgttcccctgatgatccaaattcgaagaataagaatcatggaaccgaggggcacatggggtcctaggatctttaatcttctagttattgccccatg

SEQ ID NO: 95795 - DNA, 282 bp, Zea Mays
gtagtattgttccatagtcaaatggggtccttgatcctaagaagttcaaactctacccttaggtttatattccctccgatcccaaatacaacttcatctaggctttttcctgaaatgcaccaaatctaagtccattataactgcaatgcacttttttgcttcattcttccatatctatccctacctaagtgcacacagcacactaatcaatgcaatacacctgctacccatctttactctagtaatgattgatgggcaataatatagccaatgcacttctca

SEQ ID NO: 95796 - DNA, 323 bp, Zea Mays
cacattttgactgttaataaaggccttaaggcatgtttgtaacagatcctagctaggaattagtttatgcacattctcattcgttttaatttgacgagattgagcacagttggggacatgcatgttctgagattcattcttagagcatctcgagtgctgttaaagcaaagctgtggactgcataaactgaacagtgcacattgcagcagtctgatagtgattttagcactgaaaatcaaaccttgaagtttaagcttagttcaaatacaagttggtaaaataatattttttggcagccttgatctgttttgctgggagaggcg

SEQ ID NO: 95797 - DNA, 414 bp, Zea Mays
agggtttgatttaatcgaaaccaaattgaatttatctgaatctcatttatattggcaaaagcaaatttcagaaatccgagttctggtattaggatttagacgtggtctaatttagtcggaccaaaattatatgggtgattgtatttagacaacgtttgcttaagtttgaaattggacaaaaatgtatctgctaaggaacatatttaatttcttcgccttaatgaatgggaaactgattaattgtgaatacacgctctcgactccaattttctcggtctagtttaatctcgcatcaacacacttgtcgctgagcttctaataaactttactcgggtcaaaaattacaagagtgggtcgaggttccaaattcttatccgcttaatcgataaattttaatcagacacaaaattcgac

SEQ ID NO: 95798 - DNA, 688 bp, Zea Mays
atagctcaacagctttggtgcagatgaatgatcatgttgtcacacaatgtttggagtaaatcgtgctcaaacttgctctattaggcacactgaagacacttccgattgtacagtaactgaagaagatcttaggtacgttgcacctcaccaccggtgatctcgcgcctggatttgcgccgaccgccgcgattcgtgcctagtgcaagtggataacttaggggagtaaaagatcttagcgcccggattggctcggactcggtcactgttgagctcgccgtacccacttggtctgtggccggcatgaatgatcttcatcggcgttgtccacttactgatcgtgcgccacatgcctgggaggtttaaacacgtcgcagtgaacccttgtagcaagcccgaccttcatcggtggccttgccacagtgaaacccacgatatcacctatgcgagtgacttcccctctatccggtcgctagtgcgccatctcaaaattagccgccacctctctcggacactataaattgatggtaccgctagctccgttgggttatcacgaagccagagcaccagccccttgcctccaattagccaccatagcgcccaaatttccttttcccccaattcagttctccgtgccgccgtgagtgaactcgccgtggccagccttctgcatgtcagttcaagcttcctt

SEQ ID NO: 95799 - DNA, 799 bp, Zea Mays
gggagagggtaggaccctaagtccctgagagtgattgagtcaagtgccaataccgtatgagagagaatattgctaagtgttcgcctgtgtcaagtcgtggagtgtcctacttataggcccagggagagctgccttgcggacgggagctgacgatatgccgtgagggggtgtcttcatgtattgtagacagtatggcctagtactttgttgttgacttgtgcttgcttgtcgtctgttgagagctgtggctgagggcttggtcacgtatccgagcccctggcgtggggttgcccataccgtaatggttggcatagtgcctgttataggaaaaaggcttttgcgggaggtgtcagttccactgtttgtgatcacgttgggaagtcctctgtcacagatatcgagggaagaatcgagctcgggcgaggcggaggttcgtccgaggttacgaccgagcctgtcctgagacttgatgacgcgtgtcacagtcgacggagtggccggagcgggagagcaagtagcagaggcctggttcgggcgaggcggagcttacgcccgaggttgagtttagcttcgggcgaggcggaacttgcgcccgaggtcttggtccgtgtcctgtcgtattatgcgtcacgaccgccaggtggcgtgcgcacgcttaatgatgttggtgaatctttgacaagactgttgtcctattgaaagattcacatgcagcctgacgtgaggtaggtgtgcgcattgaatacggttgtctcccaatggacatcaggcaagctttgtctttatcgcctgaggcggg

SEQ ID NO: 95800 - DNA, 1028 bp, Zea Mays
aatgttcaacatcaaccataaatattacatatgacattacataaatagttagataccaaattactctcaaacccaaatatgcccaaaaactcaaacttatcccccttttttggcatcagacaccaaaaaggagaggagagcactcaccaaccaccataagaactaggaccaccatatgaggtaggaggaggataagaagggaaaagctgctcagctagctcgtttgtaaacattgaatctcgaggagggtcatctgtagaatgagggactgaggaagatgggctctgataaggtggaggagaggcatgagaggatgaagagcgagggtcaccaggtgcaggagcggtagcagatagaccaaatacaccaccatcatcaacaacaaaatcttcctctttttacacaaccatcacaaaatgttcaacatcaaccataaatattacatatgacattacataaatagttagataccaaattactctcaaacccaaatatgcccaaaaactcaaacttatcccccttttttggcatcaggcaccaaaaaggagaggagagcactcaccaaccaccataagaactaggaccaccatatgaggtaggaggaggataagaagggaaaagctgcttagctagctcgtttgtaaacattgaatctcaaggagggtgatctgtagaatgagggattgaggaagatgggctctgataaggtggaggagaggcatgagaggatgaagagcgagggtcaccaggtgtaggagcggcaacagacggaccaaatacaccgccatcatcaacaacaaaatcttcctctttttgctcaggagtaataaatgggacaccatacttctgttagtgccactagttgatgtcatctagatactgattaagaggagcagcatgctaacgagcagttatctcataccccatggatgcaacaaactagtgtaggttgtcatttgtctcccttgcctcatgacgctgctcaacaatgtcggttgcatggctatgatagatagagaacacttcag

SEQ ID NO: 95801 - DNA, 674 bp, Zea Mays
ctcagcatcataatgacccgaaaaagatggtatagtaaatttaatcttagcataagggtcgtcaggagcacgattgttattaccttgctagaggtgtggcataccttctgtgttttgatgaagacggcgatgtaggtacaaatctcttgtggccgcttcatcatagttaccttctgcatcaaacaccgcatcatcgggaacacgtggatgaggaggtggtggtagcggtgcttgttgttgtgtctccaacacaacaagtctctcgatgatctcggacaatcatcgatccagcctctcgtaagtcttgccaaggtccatgtcaatgaaggcatcatgcactgacttgtggaccgtctcctccatttgctccttcaggagcttgttgtttgcctcaagatcttggcggctaacacattcatcgaagtatgtagggatccttgcttcttcttcatcgcctgccatcgaaacacaaaaactggaaacaaacggtgaaggttatccctaataatttcactacacgctcctctcaggtggaccacatgaacacgctctattgtatcttaccaagctcttacaagtgtctgacgaaatacaaagcaaaggatggtacaatcggaggctggttcgtgatacttaccaagaggtagtgaaacaacgattgcaaggtcaaattt

SEQ ID NO: 95802 - DNA, 593 bp, Zea Mays
atgtgcatgcgacaactcagaagtccgatacacatctagcaccctacttacatgcttagtctcattgtttactttagttggacttatttggaggtcttgatccatgttcacatgcatggtcagtagttctaagtgatagatgttcctaggtttattagcatgatacaagtagtaaattgggtctaagatgttcctatagatggtttactatctatctggtactagatttggttaacaacatgggtaatgccggaactcctctagactgccacttccacattggttatgcatgtagcctacatcgctccagagtaaataattgactcaaggatgctttaggcaagtttattatatttgttggtcgctttcaatgcatgattacatttattgttatgataatagcccagagatgcgagacttttctgacaaggctctcaaagacctgtttgacaagatcctcccctgtttcacctgaactcgctccaggaacgtccggttcatcgcctagatagagtcactgctagaggagatcgatctattgacaccatcgtcagaacacattgttgtcttataccaagaggtgaactacatca

SEQ ID NO: 95803 - DNA, 491 bp, Zea Mays
acttcccccactctctttaagatcaagaaaggtccaataaagcgaggggacaaattccctttaactttaaacctcctcataccccggatcagtgacactttcagatacacgtgatcacccttcctaaattccaactgtcttctccaagtatctgcatagcttttctgtcttgactgcgcagtcctcaagttctcccgtatcaagcgtacttgttcttctgcctcttgtataatttctggcccaaagaactgcctttcaccagtttgatcccaatacaaaggagtcctgcattttctgccatatagagcctcgaacggggacatcttcaaactggcctggtagctattattgtaagagaactccaattaggtcaaactcttatcccaatcgccaccatgtttaagagcacaagctcttaacatatcctctagtacttggttggttctctcggtctgcccatcagtttaaggatggtaggccaagctgaaatt

SEQ ID NO: 95804 - DNA, 310 bp, Zea Mays
ccacgatacggctgatcagcgaagtcttcttgttttggtgcttgggggtgatttgggtggtggatgtttggctaatgcgggtgcggaggcagaagtgggggtggtacgacttgtacctcctggtggtgctggtatgcgtgattaggtggatgttgggcggggccgtggttgtatggttgtgggaggtggtgttgatatgtttgggcgacaactcttgggttgtcggcgggttgttcccgggacatcctgtctctggtggctttcgttttcgggcagtccctcgtcgggtgcgcgcagtcttcgccgtgaa

SEQ ID NO: 95805 - DNA, 751 bp, Zea Mays
gctcaagcagatggcttgtggatctaggtacaaaggctaacatgaagaagagagtgcttgcaaaatgttgactaactaatcagattgtgaagagtcgtatggtgttgaagatcatagcattagaagacatgatttgaagctatcggattatctcgtatgttatgaggtggttcaaatcataagacatgagggtaaacataatcacaaatcaaaggaagaaggcatcagagaaagaacttggaaagagctcacaattgtgcaaactttgagggaaatggccaaaagtgaaaaatcaagaaggaaaagattttggatcagctccgtgtttgaatatgttcttgatgaccattgtggcatattggaactcaatggagtaagatgattgcttagatttggagttttgagttccaagtatctattggagaaaaaggctgatttttatttgagttattgagtttaggaatcgccctactatcaagagtggtccacaaatgagtgttggtatgtacttgcactaaagctaaaaatccttacttcaaaacatctattttgtctctgctcaattgtgtatgaagtcggtggttcaacctgtcaactgtggttgaattgtgcagtttaaccagtcctcagggcggttcaacctatcaactgcagttgaactaggcggttcaacatgtatgactgcagttgaactaggcggttcaaacggtcctcagggcgattcaaatgcttttacaccggttgatctagc

SEQ ID NO: 95806 - DNA, 898 bp, Zea Mays
ctatcaagcactacgctctggacaacaaggtcagaggaataaccaataccagaatcagtagagaagcagcactcataccggtcaaagctctagtgtccaacaacaaaatcgtcaaggaaacaccgtgaacacaccagccaagaacaacaatgcaactacccccagttcaacccaatggttgtttcaagtgtggcaaacttggccactatgccaacaactgcccaagacataaccaacggacaccccagaagaacagcaaccagaggactgaccaaaacacacatgcatatgcacagaacaagactccacagaaccagagtagagaaagagtcaaccatgtgatagtggaatcagttcctgaggatgccgacatggtgtatggtatgtttcttattaactccatacctacatcaactttatttgattctggagcatctcactccttcataacaaagtcattcatggaaaaacataatataccaaattatcccttgatgaagaaactattaattcgatcaccaggtggtgaacttagagccactcactcatgccctcagactaagatcgaaattagaggcctaagctttctagtagagttgataattttggaatcaagtggaatcgatgtgatacttggaatagactacttgaccaagtatgatggagtaatatcttgtgctaagaggatggttacattaaccagtccacaaggagaaagaattgaagtcaatgtctgtatgctagcaacagcagaagcaatggtaaatcagttggaagaaaaatctttggagcacatcagaatagtgtgtgaatacctagacgtatttccggaagaactaccaggtatgccacctgatcgtgatatagagttttctattgaactattactcggaaccgc

SEQ ID NO: 95807 - DNA, 430 bp, Zea Mays
tcgccgaagccgagggcggggtcttttcgatggcttgcatcacgtccatcattcgtcgcttcttcggacccccgacattcccctagtagccgaagcactgtcctttccttccaagctttgttcaacacccttctcctttgactgcaataggctagtcagatccaatcccaagggacttagcattgcaaatgggaagggtttagtcattaccttcagtatctctgaaacatctacagagcaggatggagaagggcccgcaatctttcctggttcatcttgtaccttcatctccgcagtagccatcctaacaggtttttgttttttgggagccaaatccttccgttccgctacagttttctgcttcttaacaaccctctgatcttatttaacggatcggatggcttgcctgttcaaaatactcacaactctc

SEQ ID NO: 95808 - DNA, 304 bp, Zea Mays
aaaactcaaccatgaaaaacatgttgaaaacaacataggcatacatgtatatcacaagcataataacaacttcaatctcacaaaagaccagagatatcaatcgtattaataaaacaatatcaaaatttggaaatgaattatacagacattaagtcataaacaacttaccacatcaccgtaaaggaatagggagggtgaaattatttcatctgcacttcaaagacattaacatatatcaaagatatttgaacccatacccttcctatatgtgcaagtgtgtcaaatttatcttcaaatttccaag

SEQ ID NO: 95809 - DNA, 960 bp, Zea Mays
gccatggcgagctcacacacggcagaattcttgactgattttggggagatctcaaattggggagctgtgggggacgattgaaggtgagggctggttctctaggtgcacaactacttagcagagcaggcttgggcaccaatttaaagaatccaaggtctgtggctcctaatttgggcatggcgtgctggcggccagagaggaagaaggtcattggtggctcagtcgtggcgttcaccgatgcagcggttctgagatggtaagcctaggtgtgccacggttactactgcgcagtaaagagacacggcgtagcatacttgaggtcatcggagcttccatgacgacaccggcggtccgaccacgtcgcacggttacagacacggttgataagcttcaccccgcgaccaaatccgctccccctccgatcttttcacccgcccggtactttcctgcctaagtccaacacgaattgtcgcgatcagcgcaaatccttgcgcagaggtcaccggcggtgagggggactgaacctgagatctttctacgggcactgtaccatcagaacgacatttagagcaccttatagagcggtttgcagtgcccggatctccaattttcatgttataacttgctaatccacctttaacaaagttgtggtccgataatccagctttaatcttgctatatctaccatacttcaattctcactaaatcacactcaaaatagctctcaaacttggtcctagttcactgtcagtccagtttcagagctgtactcgactgacaagccaacttcaggtctgtttttctcccactttcatgtagcactagggcttacttacttaataaaatttagtctccttatatagctctacaagtttgctatattgaccaagagtaaaatcctcaagaattctgagatatagagctctaaagtcgaccccattcaactgaattcagacttag

SEQ ID NO: 95810 - DNA, 596 bp, Zea Mays
ggatcttacaagaagctgtacagttacacgcacttgattaatggatttgctcttcatgctgaatctgagaaggtgccttcttcattgctcttaatttttcatactgactagctgcttgcaagagttgaagacgttattagtgaatgccggttatttgtttctattgaaattaacagttgaaaaatcatatttgttatatgtgtaacagacagttagaattcttagtggtgcaaaaggagtaagacttatccaagaagacatcaaaatggccaagatgaccacacatacaccaagttacatcggagctactggagtctggccgctcctaggtggtgctgagaattctggtaacggggtggtgattggcatgatcgataccgggattgaccctaagaacccaagctttgctaccagcaacacgtcaagccaggcggaaccaccaccggctagtttcaaaggaatatgtcgtaccggcaatagatttcctccggattcatgcggtggtaagatagtaggagctaggtggtttgcgcgtgctgcccaagcgactggagagttcaacgctacaattcactatgaatctccttatgatccag

SEQ ID NO: 95811 - DNA, 948 bp, Zea Mays
gttcaacgtattcagtaactgtatcactttgtgtaatgtgcaaattttttctcataagagagttgtgttgatcccgctcaaagcgagcacacactgcagcacaaaacttcggccacggtgccacacgtaacaccgaatcagatgactgtaaccaaaacgccgttgaccccacaaaatgcattgttgcaattttaacccaaagctcccggggtatggtgtacacatcaaaataattctcacttttagccttccacattttaggatgatgtccgtcaaatgagggaaaattaagttggggtaaggttgcggctaaacgtgactgataagacacccaataaggatcttgcgcatgaatcacaggggaatgaaagacatcagacgatgggattttagatgtacctttgaccggaggtggagtcagggtggttaccaccccaagtccatcgctccggtgcagagatgcaaggtgaagatcgtgattccctggactcgcctgttgcagagataaacccagagaggttgatggtaaaaaccccgactccagagccccggtgtcgaacaccttctgagtagtggtgttcgcctctttactcgccatcaattcatccaatttatccgacagagatcccacatcttgacgaagattcaacacctcagtttcgatctgaggtttccagacagaaagatctctcaccactgctgtattggcatccagggattgcttgatagactcgttttgcagttgcaacgcttgcagcagcgccttgagatcccccacgctttgctccatgttttgaagatcacgttgcaggcgagtcttgtattgcggacggagaagatactccggaggatccgccaggattgcgaccagaatccgataccaatttgtaagacccttgacactgcagaataaactctccaccgtcagaacacaccaggaaccaaatc

SEQ ID NO: 95812 - DNA, 393 bp, Zea Mays
gatccagtgttaagcctgatgacagcagactcacaactttgaaagcttacagaagggccaagggtttgtgtttcaagtgtggagatagatgggggcataatcatacgtgctcaaccagtgttcccatgcacctggtggaggaaatgtgggcattggtcaattcagctgaagaagaggatggcaatgaagagacagaggatcaaattgataaaacaaccgaggaaacaatgttggcaatctcaattgctgcagttagtggaggagagggtaacagagccatctaactatgggcttcaattcactatcaacaggtcctaatacttgttgattccggtagctcagccagtttcatgggaagtcatctaatgggggtcatgtctgatatatagaaac

SEQ ID NO: 95813 - DNA, 361 bp, Zea Mays
ttgctcgatcctatttgcatatattctttttcttgaacacacatgagagttgtgtatctttgcattaagagagaatagatggtcctatttgcatgtatgaggtctaagagaaccgagtgttgacctatacaagtgttgcgggccttggcggtagccaacaatctagggcagcctagccatccaacagggccactgaggcgagcgtcagtgctacggttgccctggctgagcctgagatagggacgccacacccctaggcgtgccctcccgtacacccaccaacaagttatcctaaagagtccctagtttaggtagaattggtaatttgctctattatgttgtctccttcggctacaatcta

SEQ ID NO: 95814 - DNA, 394 bp, Zea Mays
ctcatcttccttcattttgaggaacatctttcgacgattttcatggaaagatctattgccctaggatcaacatctgcaccaaaagatgaagtcgagacaatctcaactttttcaagcttagaagcactttcgtttcttagtccactcgacatgatcttttcctcactcggttaagcgttagaacgaggattaggctctgatacgaattgaaagttgcctagaggggggtgaataggcaagttaaaactttttcaacaaaactagaaacgaactgggtaaaaccggttcaaccggtttgcacgagctcaactaaagaatgagatataaaactgcattgatctcgaaatccacccagttagctttggaaatgagatgttctaaatgatccacaggg

SEQ ID NO: 95815 - DNA, 764 bp, Zea Mays
ggagtaataggcttacagacatctagcactagccggtcaaagcaaaagccctcatttaatttgagagatttgacctaatttgaagcttgttcatgtcacgacggtggaccgaccctgcagatcgcgttccggatgattaatgggatcaaagctaaaattgaagcttgggaaggctttaagggttcaccaggaactaggtacatgattgagtttaggccgaacgaggatagaggagcggatcgacagagagggtgcatagggcggcgttcttcggagcaacggagtgttccggtggtgggactttggtaaactttgattgattggcgtcgagagcaacaggaagctaaggacatgctggaacacgaggcaattgagcgagtactaacccgaagagggctggccacggagaggtccttcacggcggcgctcggaatagggtggaatggatttgtggactgtgtgagttctccggtgaaattcagtcgattgctcaagtgctcgtgtgcatgatgtggtgaagaagcaggacccgggctcaatttataggccgatggctagagttggatgaggctcgcggagctgtaaatgtgctggcgagctcacccgtgcgggcaaagccacggcgatggtccggcgactaccaattaaccgggcagtgccacctcgggacattagcgccacgtcgtagaagatttttaccacggccacagacccatccccagccgcggtggtgatcttatcccggcgagatttttctgatctcc

SEQ ID NO: 95816 - DNA, 413 bp, Zea Mays
attttctatcattgaaagcatttcttcttgatgtttgccctcttctaggttgacctctcttcatctttatgaatttgtttaatttctttacaaatagagtcatatctccatcactctcactttcattttcttcatcatcactatcttctttttcaattgccttagaagctttagctttgagagcgattgattcattcttcactttctttgccaaacttatagcatcgacttgagatttctttaatatgtcttgagtaagaatttcccccaatacttcagttggagaagttgtagatagatcacttcttactaacatggtcacaatggtctcatacttctccggaagagatctaaggaacttatgagtgaaatccacatccggtacattaaaaccaagtcccttgagttcattc

SEQ ID NO: 95817 - DNA, 652 bp, Zea Mays
atctgttgtccaacttaatgtatttatgtatttcattccagaatggctgacaacaacacaaacacaccttttcgaccacctgctgccagccccaattcaggtaaccaaattcccccccacccatgtgggatcctcagatgtggcacgcccaaggtttggacccaacccaggcttctatttttagtaatcctacatcccatatgaccaatcctacttggtcccagggacctaatgacccatcttcatatacctttcgtaatccatggaacccatattttggtatgacgaatactgggagtcctcctacacaaacatctttcggtcaaccacagatggtaccacccattgcaggtccacaagtttccacccatgttcccagccagactgaccctataaattttgaatccaaagcagaacacagtgtccatgaagttaacagccctaccaaaccttcagatacacctgcgacatttagaaggacaaaggaacagaacttcaaacctgatgaagacctgttgctttgcaaaacatggctagagattagtagtgacccagttattagcacagggcagaggaaggagggtttgtgggctagaattgagaaaaggtacaatgaacttaggggtgagtttccattgagacttaatagggc

SEQ ID NO: 95818 - DNA, 392 bp, Zea Mays
cttccgagggaagacgtaccttcgatgctagcaaagcgccctctaagactctgtcagcagaagatagagctacagtgagcctgggtgggaccaacctagcattctcgggatcctctactgtagaggccaagcctccaaccagccatgtcctaacgccctacaaaatcctctaacatttctcatgattcctctaggatgagacggtcccgacgccacgtgctcccctcaccaagacaagatgtggtgctagataaataaaatatagcgcatgtccatcgctatggtgtatccatgaatactaaatggtgtgcgttggtaccatagtccatatagccatgtctagagttctaggcctaccacaagcactataaagaacatgtagctatactgcc

SEQ ID NO: 95819 - DNA, 1183 bp, Zea Mays
agagacaccgaaccgaacaactcctttagtaggtgataccctaagaaggacttgatcccccactgcaaattccaagtcccgcctcctcataacagcataactcttctgacggctctgagcggccaaaatattctgacgaatttcccgaaccttctcagatgtctgctgaacccaatcaggaccaaccagagatctctctcccaaagtatcccagcacaaaggggagatacactgcctgccatataaggcctcaatggtgacatcttgatgctagcctggtagctattgttataagcgaactcggccaaggcgagatgatcctcccagctacccttccaagacagaacacaagcacgcaacatatcttccaaggtttggatagttcgctccgactgaccatcagtctaagggtgaaaagcaacactagagagagcttggtacccaatgcactgtgaagactctcccagaatttggatacaaatttggagtttcaatctaaaacaatagacttaggcaccacgtgaagcctgattagttttttcatatacaagggaaccaactctgaagctgaatttgtggtctttatgggaataaaagtgcgtagacttagtcaagcgatccactaccacccatatagcatccctgccccgaggagaacgaggtaagccaaccacaaaatccatggtgatatgctcccacttccactccagaatttccaatggtttcaataaacctgcaggcctcttatgctcggccttcacgcgctgacatacttcataggcgaccacatacttagaaacgtcaaccttcatcctcttccaccagaagttttgcttcaaatctctgtacattttggttttgcctgggtgaacggtgtacgacattttatgagcttctctcaagatgtccatcttcacctctgatttctgaggcacacaaagacggcccctgaaatgaaccaaatcattctcatcaatggtgaactcacggggtttactatcgccgaccctcttttgagcttcctgcaacaaacgatcctgctgctgagccacgcacactctctccagaagggaggattgaatgagcatccgagtcccctctctagcggtgccgacatagcacaaagcgacccccatacggtccagatctgcgatcaaaggcaaggccacttttggaaccccga

SEQ ID NO: 95820 - DNA, 493 bp, Zea Mays
atgaaggcgccatcaagcgcaattcagcgcacaacacacattacaactacacggtatacactatacacaagatattcacccatcactaatgtgcccatcgtagttctttggcgaaggggagggcaacattttcgctcatcatcgccaaaaacggcgatggcaacactcattattacatcggctcttccttcgggataagaccagcttcctggaaattaaacagcatcaacctcaactcttccccttcaaaaaggtcccgcaggtccccttccctgatacacgacctagatgtcgacgccagtaactcgcgacgagcaccctgattcagccgtggtctgctccgaagacgggacatctccatgcccattcgacgatgtcttctaacaccttgcaaagactcaccgacgctttgtttcgacacccccatccttttttctcccttgtaagtcacctgggagtgcactgatcgaagtcaccggcgcttcacggggga

SEQ ID NO: 95821 - DNA, 433 bp, Zea Mays
cgagactttccacctaaagaagattacactcatgacgttgatctattacgtcaatatactggttgtgcatgcagttagccccgatggtgattccagtcggtaggagcaagtcgcgtacataacagagaaggacgaactgatctctttggtcatatccgaggcaatctacttcaaacccttctaaccaattgatctaatcaaaccgtgcaacaagtagatccatctcatgaacctagatctagacctaaaactatgcacaacctggctctgataccactgtaggattatggggagacagcttcgctcgagctcgacgagccagtagcttggctcgaagtggctcgacactcaggacgagcctaagctaagcctgttttgtgaaaagagtgagctagctcggctcggctcatgagctggcttttggctctaccca

SEQ ID NO: 95822 - DNA, 634 bp, Zea Mays
agttaattatctggtcatttatgacaactctacacttgtcccaggtttgaaatcctcttccgaggtatgactgataagtacattgcccccagagtcacctgttattaatctgtgccctttttcctgtacttctccatgcctttaaatgatgcttcctagtttgtgtggtgactggtgactatagcttcttctgacaagagtatgcagtttccttacatgtatctgtataagccaaatgtgatattattccctcagaaagctcattccagtctcttccctgaaaaaaatctcctgtcttctgtaaagtcttactatttccatgtgttgctgcccaaacccccctgagttaaatcttgggcgctattatactttaatacatgttgggagcctgatattcagtatttggggcatctttcatcatcccataaacacccttgcatcaaactgctgtctcttgctccatttgttctattattttgatttgatgaccccacaattgataaccttactgttacattgatttttatctagtagaacttactatcaataacatttttggtgcagaagtagtgagagttcacaacttttccattttatgcacacgctattagcttctctttacacttcttttctc

SEQ ID NO: 95823 - DNA, 354 bp, Zea Mays
cttagctttatgacatgattcgcatcgaaggacatgtcgctccacatcccttctcgttttaggccaaaagaaatgattggcaagcacttgctctatcttcttggcgccaaaatgagccataagtcctcctgcatgagcttcccacaaaagtaaaattcgaacagaacattctggaatgcacaatttgttagcccggaacaaaaaaccatcattaacatgaaattttacccatcctctgccatcacaacacttagaatatggttcaacaaagtttaagtcagtcagatataattcctttatactttctgatctaagaattttagcattgagttgtgttagcaaagcatgtcatcg

SEQ ID NO: 95824 - DNA, 671 bp, Zea Mays
ggattttacactcttcttactattcttcactatgttgtagagccagagatactatttcacccagtttagtcccatgttttacaacttgtttgtatttgcatggtcaaatgttcttgtatcctctcactgcgcaagaagaataggtagcatgtaatttgactgcaatcttgagaagaaatgtcaatgttgaacttgacatgattctgaaacttttattctggttttgatattaatagagtttctgaagtcacctcgtgctcatgatattgagaagctaccatcatttattgaagaagcaccaaaatatgtgatattttctacattgtcacatgggtatgattctatgatacctagtcttaattctcttccgagaactagaacacgaagctcgtgcggacgcttccctgcgtacaacggttgtaactcattcttcactgcaggcgcactgtcgttcggcactaaggtgttcaaggtcaccctccatgtaggctacgatcaaaggtatgtaaactctgattctcccctgttggccggtacggagatgcaaatgtgatacaaatgttaaatgaattgtgcatgatggacatgaagtacaaggtggtgatcaatcatgccacacagatgaacctgcggcagccgaggatgttattagcgggctacccactaacatc

SEQ ID NO: 95825 - DNA, 468 bp, Zea Mays
ctctttatgactctctgcaatcaaatcaatgattattcaggtgagaatgaagcatctaaacacatacatttatacgtaagtacgtacatacatgcatgcattcaggctatagtaactgtaaccaagcattgccagttgttggtttcgatccattggatgagtatcagtggcctggctaacaaagagctatagcagtcaccactctgcctgcataacaagagaagagttaagtacaatagttttaaaacgcattgatctagagaaccatatatttaatagtgatcaataaacatggagcaacctactgctactttgtcacttaataagcaacccacatggcaaggacttactatgaggacattcacctgggccccaagaactcagcaatccacattcaacaaccattcactaacttcctaaacaaaaaaaaatggttacattatgtatgtaatgaaggtggctgttgac

SEQ ID NO: 95826 - DNA, 338 bp, Zea Mays
cctgatatattttagggagtccgaaggggtccttcggacaatgtttgttgagatcggtatagtcgacgcacatgcgccaatccactttattctttttgagtacaagaacaggatttgctagccactcaggatgcagtacttctctagtgaaccctgctgccactaagcgagctaactcggtgcgaatagcttctctcttgtcaggcgtgaaatgacataatttttgtcgaatcggccttgcttgaggatagaccttcagtttgtgctcgaccagttctctcgggactctcggcatatccgcaggttgccatgctaatacgtctcggttatcttgcagg

SEQ ID NO: 95827 - DNA, 623 bp, Zea Mays
atcaagcaaggggagatcaagcacgactccttcataccttcactctaaaataacaatttaagtaattctaatgataatcaatctattaagcattatatagatcagaaaagggatcaattagaacaatgtatagggtgtataaatattgaagcccgcacccgcttgatcctctacgacataggaaccattgagattaccaagtacggagaaaagcagggaggacttggagccgtcaccgccatagctcatctccgctattaatcggtgcccagggaatgggtaatggcctctccaagaaccatggagtgtacgcatgtggttggtagagcatgggagttctcgggttcaacacaattgttcgtcggagagcacaagtccgtcgctgggctgcttcgctccgtggtcggactccaccgcagtcatcaagcccccagtgatcggtccgggaggaagcgtagtgcacaaggatggtgggtgggggagatcgagggcggagaccattgagagtgttgtggattgttcgccggagccgtggagatgccgctcagcgagggttgcattcatcaccgtgttattgccggtaaggctacttctcctaagattgacatcatctatgcttcatg

SEQ ID NO: 95828 - DNA, 283 bp, Zea Mays
atcgaagacatatttgttctgatggatccaaatagtccaagcacccatgatgataagggagttaagaccttttctggtgacacctgagaccacctctgaaacctcctcccaccaattcaagaaggaggtgaccgccggcttgggggcaagggagtgaagcccaaatgtccagaaaagctggtaccaaaagactctcgagaaggagcaagccaccaaaagatgatcaagagtttcttcagcttggtcacataatagacatttctcagggtggtttaggccttta

SEQ ID NO: 95829 - DNA, 1018 bp, Zea Mays
gctcagtggacgcaagatttatactggttcgaactgaacgtccctacttttagtcttcaatggcatgctctatgggcacctgattgctcgtagtaggggttacaagtaggcgaagagggaaggatcgcaagtctctaagggttgctctgctagaggatcaatgtatcgtgtgttggttctcaatttcgtctcccttttgtcgagctaaccctcccccttttatagatcaaggaggagcctggttacatatggtttctgtcgaaagggatcatcgcgctagaatagttctgcttcagtaaaagcctcgacgtgtgtcgttatttgttcccgtataaatttttgctcacgcatcttcaagactaccagtgaagcatgtcggtgagggaagtccaagcatcattattactccttctgtccacgtctgcctgcaccgacccttggtcttcatagcctaacctcttggcttccctttgtagtcttgtgtgcttcgtatgctgtcagagaattcaggcctagggctagttggccatgtgtggggctcaagcctaggactcgtaagtcatgaatggggcccaggactaggactcgtaggtcatgagtggaaggcggaccgactcttttcccatgtagtggctcgatgccaagtgcggtattgatgatgagagcagtcctttggtcagacgcggaatccactcaagtgctccctaacggttcgtttggtccccttgccaggctctgcttctttcgaccccaggtgcggtgcgcagggctcatccgtggataaattcacgtgagcgggctcctccctatcttccctctaactcgtggccctcctggggccagggatccgatcccgacaagaagataagtcatttgtgttacctctttccataaagcatttgtgagctgatcatgatgaagaccgtgatgaaaatcaatggccacaactcctcgaaggttcatcttcacttgaagaatcaaccgaagtcttgatgttgcgagcgctttgtctttgctc

SEQ ID NO: 95830 - DNA, 438 bp, Zea Mays
gggaaaatccacgcgctgctcccgctcggctgaattgcgaccgtcggggaactgggtgcctacaggtccagcaaggtcaaaacccatctctcccgcatgcctatttcatagattcgagcctcccttcctcttgtccactgatttgcgaccctgattggcgcctgctgcccccctttggtcctccctcatctctgttgattgattcacggtttcttccctttctcttcatacagtcacagggcaggcacataagcatttcttcctctccttttggcttccctcctcttgggtgtgcactgcccctgctcttgacttggatgtgcactgcctctactcgacttggatatgctctgcagttcgcatctcctctgcagctctgtttccctcctcttctgtttctttccccgtctttcctctgcttgtgctttgttatataga

SEQ ID NO: 95831 - DNA, 568 bp, Zea Mays
tgtatgtcttagctatgccacaatattgagcttgtcgtgttatatgggtaaatacgtcctatcatagcggcaaatattgggtgtcacatcgttgagtatgatgtagttagtataaaatggagtttcatatactttataatgcttataggtatgctagtatgtttggttgtggctacaaggaaagtggcttgtaccatagagtagactcagatacatctattgccctttatcgtgattttagggccgatgacaactgctgcatagtagcctacacctattgcctccatcatggccacaatgcacctccataacaataatatcgtccatcacattttatgcaatggatagtcactttatagtggttgcccagtatcaagttaccatcctaagtacgggcgcacatggcatcggggccatactgcctaggatcatcctgtcccaaggggcatcaaaccctaggctcgcttgctctactaacttctacttctgggaccgctttgcctcgagagaatgttaaaggacgcccaggagttctagttatggtccctagcctctaggcaccccccgt

SEQ ID NO: 95832 - DNA, 403 bp, Zea Mays
ataacatactcatacacagcatatccgatgggtataataatgtgcccaataaaatacacgtatacatcaaaatttgctatatctataccctaatgtcctttttacccatcggatactgggttagggtactcattgcctaccactaccgttgtgaagttcttttaacaggaatcggtacaaatatcacaagaaattgacaaaagatctaaaaaatagttacttgaattctggttaaagcgggaaagaagggatagttaatggactacaactgcaagttccaattttggtcacactcaaaagctacggaaactggctcatgcattatccatccaatttcgggccggactccaaaagcgtgcggctgggcccaaatctggatgcagtccagctgcttaaatccaac

SEQ ID NO: 95833 - DNA, 563 bp, Zea Mays
ggacgttggtgctatccaatcgagggatgtctaaatactatttgaaagaaatgtagaaataaatgaaaaatcgaggcttccgttgcagaggcatacattctagaggaggtgtcaaacttcacaacaacttactatggtgacaaactaccaagtgtgcatagtccccgtccttacaatgatggcggcaatgaatcaaacctcaacatgtttcgaggccaaatcggaagcgcaagtggttctaccactaagaccctaagacatgaaaagtgacgccatatcatgctatatgtattgaccaaccatttagaggtgacgccacacatggaacaatttcttcatgaattctggcttcgatcaagggacccaactccacaggaatatgatagccttcttagaaagggtgcgggaattggatttcctgatttcatttcctggttcaaacataaggtacgtgcttagtttgtcatttgaagttgctcttacttgcgaatactataacaatctagcgtgttcgaacttgcagggccaaagagatccgtctataagtaccgagttgagaaaag

SEQ ID NO: 95834 - DNA, 552 bp, Zea Mays
ttcatccttttgtgtcttgaaggtctgttcatcagctgtttcatttatagtgttgttttgacttgtcaacacaccgcattctttgcatttagtgacatcacttgtagttgacattccaaggtctgacatctgtatgggtatggaagaatggaacggacgaaagggttgagcaaagacagattatagagagcaaagaaaacccatctatctaaggttttaccaagctaactgatgtcattgtggacaaaagtcacacaatacaccaacaatcatttcaaagaagcaaatcaaacatgaacacaaaggacaatgaattcaagcataccacacaatccaattctactcattcaatcaaatcaaacggtgagacaaggtttggaataataaggatattataaagtcaaggagttaggtaagaaatagcaaggagttagacaagacatatttgtcggtggtcaatagtgaaataagataatcatgaactattaaagtcaggataaatgatacaaccaaggatataaagtgagttagggagaaagcattatcaaggag

SEQ ID NO: 95835 - DNA, 711 bp, Zea Mays
aaaataaacactgaatgatgaaaatgcatttttttggtggggcagggaaaaagttatttgcattttttgtgctatggtggatcatgtaatgaagtactcaaagtagatctggtaatcgcacaatcagatctgcaagaacttctataattctcctaattgaataagtgcttgatgtttgaaaaaggtcttcccatatttttctttagaagcaagattcgctcttgggatagtgagaacttcgagttggaccattggtggtccaaagttggtattagggcatgtttggatacaaaagtcaattactaagtagctaaaaaatatccctagtgcatccaaacaagagggctactagatggactgtttttagccaagtctccaactacgcagccaaaatcaactagctaaccaaactcgactaatttgagctaattttagcctaaataataacccctagctcatccaaataggccattggtatgtgatagtttgagattaggatgacaaattatgttacatttgttttattcctaccataatatgcatataactatagttctacatattcttatttcagtcattttcagactctaataacttttaaatatggtaagaataattagatcagatcttgctaacgcaagatatttgttgaaaaactgttttgctatccagattggcagttagtttgtgcaggaccatgcgatagtaacc

SEQ ID NO: 95836 - DNA, 509 bp, Zea Mays
gtcttccttaagctctagagagccatggtcaatccctagggacaatgacgattaagttgcctgagacgtggaaatacccaaagcttgaggccttgcaggatcatgtcgttattttgctcgatctttccgttcgcacaagggtgggccactgcggcttagtctatatggatgtgatatttgttgcaaaattccaagaatgcgttcccgttgaactatgtatcgttgtccatgataattgagtttggcacctagaagcgatggatgatgttggtgacgaacctgatggcttggtcagaggtgatcttcatgatgggccatgccttgatccatttggtgaacttgtcgacagcgaccagaatgtgcatgttgccatggggtgcctttttgaggggtccgaccagatcaagtccccataccacgaattgccaggtgttgccaattgtctggagcaggtgggtttgtcatgcgtagtactggcatcccttgcatgttcacaccacctgatgtgc

SEQ ID NO: 95837 - DNA, 443 bp, Zea Mays
ccgaacgtttccagcgggattctgctgatgatgagtagctagatctacagagagaaggcaagggtcccgctgggaagcggcttgtaatattttttggtctttgtaagatacttttgagtactatttatcgagtagtattagcacttatctgtatgctatttttctttgctgtgtgcgtcgttaccaacttttccctggtacttggccccctgggatgtaggctcgacgtgtcgaggctggatgccagtatacttaagaaagaattggtgacctgccccccaggaggtagtctcgacttggacctggacctgcacacaaccttggctaggaagttttagtagtgcacccataggacccactaactggtatcttttatcctttgattcacgcaacaggacctgtagggtttagaccgggaagccaatccgtgtgtccggaccccc

SEQ ID NO: 95838 - DNA, 589 bp, Zea Mays
gagtcaaagttagatattgtagggcacctactatgcttctataccatgttgaatcttcaggcccaagggttcaccattgtgaaggcttaacttttctgaagtagagagtggtgtagtggtaggcttgcaatttatcataccaactcgactaagaacatctgaggtatactttctctgcgagaggtgaataccattatctacattctgcacttctattccaagaaaataatgtaatgggccaaggtcttttagtgcaaaatcagttttcagatccttgagcaaagctgagacaacatcctgagatgaacttgcttcaattatgtcatcgacatatacaagcaagaagatggtgatacctttcttgatgtaaaagaatagagaggtgtctcctttggatgcttgaaaacctagctgcaatagtttgtcactgagtctagaataccaggctctaggtgcctgcttcagaccataaatgaccttgtcaagcttgcaaatgtgtgtggctgcagcttgtcttcgtaacctggtggttgcttcatatatacatcctcctcaagaatgccatgaagaaatgcattctgaacatcaa

SEQ ID NO: 95839 - DNA, 762 bp, Zea Mays
gagcaacagaggcaagatttgagaccactagagccacagccaccagaagaacatagcaacataggcaataaaggaggaatacataaagaacggaagaagagaacaagatgatctaggattagggatgtgggcacactcaccatggtcggacgactcagaggaactcattttgtggcttgtgctgactgtaacctgctgaagatggctagccagtgacagaggaggaggggtagccaatagaaaaggagaaggggcaaccgacaacagaggagaaggggcataggagggacaacttgaggcagataagcatcggaggccaacgaggtcgtgcagagaacgttaggctctagactctggaaggatggctgacggccaaggaggaggtggcgacgtcgtgagcacagagacagcgggaggcgacgacaaaacaagtgggtgagcgcaaaaaggatcggacgacacctatatgcagcagtagaaaccctaatgggccattggatgccatcccattagcaccttgtagcctagctgtgagatcccactcctagtcgcccatagtgcctggtcgcccgattagtcgtgattatgtgacgattaatcggatggctagacgactagacctcctagtcacgtcactacccctaatcgggcataatagaacgacaaggtcgattaattgcgactggtcgcatgacttgaaatcattgcatgaaaacaagaaatacatatattatcatcgatcttaatatctcacaaattctt

SEQ ID NO: 95840 - DNA, 701 bp, Zea Mays
caaatccctagcatattgcttggcttcggcaatctgctctttcgacaactgtttccccgaagcatgtcgtatgataaaatctagctcttcagtaggcgcttcgggggtaggagatttaatcttctcgggtgcgctttctttttccaaaatcaaagtagttcctgaaggttttgcttcagtataagttggcggtctggctttggcaatattcggtgatatcctagcttcgtcagatttctttggaatgtcgccttctttatcaagctttgaagtaggagtttgtacttttgtcgattctataacagcgtctagcacgctggccattctcctcctcttgggagttattgcaggaattttggacaccttcggcaactccggctctggtgctaggctcagggtttttggatgccctgccgactcctttagttctggatcttcgaccggtttttccttagcttcgacaggatgctttggcacatcgaccgtctcggcgttctcctgtctcattgcttttcgcacttcagccgattctcccttggcaccagcaggaacggggtattccggctcggcggcggaagaagtcccctcggcaagctttggcaccctggccgtttcaatgtatctgggccggtgtgtcaaaactttaatctttttacccttcagcgtagcagagatggccgaagcagcagcttttcttttct

SEQ ID NO: 95841 - DNA, 603 bp, Zea Mays
caggcatcgtggctggctgcgaacagggggagtggcgcacagcctgaggtggacggtggcgtcagaggacagccgccgggaaggtggaggtggggagatgcggaagcagaaggtccaggatctaattgatcttggtctgtgataccatgtagaaggataggagattggagaagacaccacactctgcagtgaggtggtgacgttcatatatatagccaatgtggctgagtgtacatggcaggtgccaatcacagtacatggcaggtgccaatcacaatacatggcaggtgccaatcacagtacatggcaggtgccaatcacagtacatggcaggtgccaatcacaatacatggcaggtgctaatcacactgattgtggacttgcctaatatgaacttgcctaatatacacttgctatatatatctatcacttcttccaaagcatctagagtttctagggcagagttaaagtccttaattagaccattaagattagattaatttttactccatttcttaagagcttgccttaaaagtccattatgcattttgacaaggttaccaaagccagctaagtcggtttctgctggaaagcttgtgatcg

SEQ ID NO: 95842 - DNA, 610 bp, Zea Mays
cctcgatgcgcctataaattgcgtgtgccaccagctccgtagggtagtaagctgtccagccaccacgaatcagcctcggtcattcactagaatccacgaatttggaattccccccaaaactgtttccgccaccgtagaaccaagctcgccgtggccagccacttccaggttcatccatgccctatgctaccttgtttcagcattagtatgcttccctgatgctcatccatccacccaattaagctaaaccgccaccaatcgtcgggaacgcgattgattacccatggtgcccgctgtcaccgtggacaaagcagggtagatcgtcgttcgtgaaattggttgaggggaaaggtacggtaggcatctaatttggtccctgtcgctttggagatccagccatggcgtttgccggccggaattggctcgccggggtgcggcgagggctgttcctcgtcgtggaccttggtctgcgaaggaatagaagtttaagggccttagtgcaaactattagtgactcataagcatagtaaccgaacccaacttccattagccaaaaccccgaggacctctgcgcaaagtcacctcgggcgcgcgcgcgggcgcatttctg

SEQ ID NO: 95843 - DNA, 660 bp, Zea Mays
ctggatgctatgctggagactacaaaggccttgagccctgctcctaaaaagaaaattgttgaagctgccaaagcgcaagctgaagtcgaaactgcacaagtagaagccaaagctctgaaaactcgggctgaagctgaagctgggccttcggcgccctcttcaacgaagcctgccgtgtttgagggaaaaacggcagggcagattgctcctgagaagatcgatactcctgctcccgaagcttcgaacaaaagcactgactacatcattcgtcatgcttcgggaaaagaactatcctaagaagaaatgctagaagcacgacactccgcccaaaaattgaaatatctgaaggaggcattagtgttcaatggtagtgacgaagaagattttctgtactgtctcccagataacaaagaaatatccgtttgccgggagataggtaagagcatcagattctcgaagctagaagacggtctttcgattttattgaaggatgaacttgctgacagcctagcatacaatagtataaaggtataaaagtttacttttaagttggaaactagcatatttcattttcatacttaattctttcttcttatttacagggcttgattcttagtaatgccctgagagcacagaagaatattgaagatgaaagctata

SEQ ID NO: 95844 - DNA, 567 bp, Zea Mays
tttgaattcaagagtagttttaattagcatggtgagtgactaaaggtagaagaatcaagtccaatttagacaagagagaatatatcacatggttatcatactataaggtctcactattcatctcaaagtggtgttggattataagtgttcatggatgttgaaccaatttagatagagtttgatgagcaccgagtaaggttctagagaaggaaatgggatcaaactagcctggaggtaggcattgaacggtatgagcgtacctaatggttggcaacatcttgtactcacacagtatccattgtgacgcattgggccatgctttggagttagcacattttcaaaaggggttaaaaatggagctagaagagaccttgggcaccatgtgttccatcgaattgtatggtatatattggtttggttgagttagggttaggtatatgattaacaagatgttgggcatcagattagcttgatgacactaaaccctcattgggttatctcttatggcatcaaatttgagtagcctttgctccaatggttgcctcagatgcaccatttgcgtattag

SEQ ID NO: 95845 - DNA, 467 bp, Zea Mays
gcagcataaccatcgggaaatttaatttttttcatccatctcattacctcgatcttgtctttagaggtaagacagaacaaggcacgtggcggcttaccattgtcattgagcacttgggttggtcggtcacagagcattgctagatctcttcgagctttcagattgtcctttgttttttcaaaatgcatgcaggtgtgtatgagggcttcaacaacattactttcttggtgcatgacatcaatgttgtgcacaagaatcaatgacgacatataagggagctctagagaccacatatatgtgtctagttgtcgtccactccgaatccttcgtacttgtcccccttttcatttaggacaaggttgttcagctgagcatatatttctgctgcgttaagacgtttaggcggtcctttggtgaccatggtgttctttataaagtttttcttatcgctcctaaaggggtgtttc

SEQ ID NO: 95846 - DNA, 399 bp, Zea Mays
cttggatctgtgcgcgaggcggcgacgggggacacgaagtcttgggtctgtgcatccacaaactaaaatgcacccaggtgcattttagtgccgccgtatatatatatatatatatatatatatacccaggaatggaacagggcacataaaacattttgccattttctgtaacacagaagatgcaaagatatcattcagaagctcttttcttttaagtattttaattccttcttcgttgtgttattcttcagatgaatcttctggaattgattggaccatgcgcttcaaaataatcttggggatatgcaatgggttacattttctgcatgaggagcgaagtgaagccatagttcatttgaaccttaaacctagcaacataatgttgggtgacgacatggt

SEQ ID NO: 95847 - DNA, 395 bp, Zea Mays
cattatcctatatgtgtttggttgcacactacatagataatgattggaagatgcaatgtcgtgtcctgaatttttttgaattggaccccccacacaaagggcctgttataggacaagcagtatatgaatgtgttgctggctggaaaatagaggataaaattgtttccatgactttagataatgcctcaaacaatgatggtgctattcgaggtttgagggccagattttcagctagacaaggaagtgcttttgttgcaaaatatttccatatcagatgttgtgcacacataattaatttggttgttaaggatgggactgctgcattggattctttaataagcaatctaagatctactgtcaagtatattaaaaaatctccttctcgcctgcataag

SEQ ID NO: 95848 - DNA, 434 bp, Zea Mays
cgagggtacactacttctagagttctagttgattgacctcatgatctgtcgacaggatgtattgtttgatagttcaaacgtttaattgatcccaaaaaacaatcaatgctcacttcgcccgtggtcagaagcttagagcagcacaccttacatattatagttgcaagttcctctgtgcaattagtggatatgctatgctatatcaaatctccgatcaaaatttgctctcaaagattaaggaaaccctgcattatttcttgggaatggaagttaatcatattaatgaagggataactctgacccagaaaaggtatgcgactgagattatttaaagggcaagtatgcagcactgcaaggtagttgccactctgtcaatttttgaaaatcgttcattgtatgaaggcactccaattgataatgttgaagctacaaag

SEQ ID NO: 95849 - DNA, 686 bp, Zea Mays
ttcaaaagcatgtttaaaaaggggctaagttgtctgatccgtgaaccatccaggctaggtggtcggaccgtctgagaactaactagaaagatgtgcagatttggttgtgtggtttaggcagtttgtaatgtggatcgtcctggtcatgtggttgcaccgtccagcagtactagccagaagggcctagtatttggctaagtctctggtgcgctgtgtggaccgtccgggcgaggggtgtggaccgtccgtaactgacttggtgaatttacatagggacttgcgtttctgggggttgtattatggactgtccgtgcctaagtcacggacgatacatgttctcaagtcgtgggccatctgttcctaggtgccatactgtccgtacgtctcaaagtcagtttgtgcagagctcaggacgtttattgttgaggaaccaatcactcatacttcgaagctattatgtccataccttcatatctgattttgtgagagtgaaggtacaaatgtaaacgactcttgtaatatacaattttagacgatgaagattgaattggtattgattgaattaatttatcaaattatcattatccttttacaccttctcccatttgttaatcttttaaggctaattgatgggcaaagggagaatattttcatttgtgttgccttatttttttatctctttcagg

SEQ ID NO: 95850 - DNA, 561 bp, Zea Mays
agcttaagctgatagaaagagttgggcaacccacatatattccagcatagggaaataatgatctattgatgtgacaagacataagagggaaggagaggagttcaatgtaaaaaaatgtcatgtcagtaatgccacatcagcaagaaacatccatgtggctggtatgaactaatgttgcatcacttgacaagtttaggacccataaatgcattttcaaagtttgtggactgaagtaacactctacaagtttgatgaccattgttgtatttgactatttattttacattgtagactctattacatatatatgaaaattgaagtaaattaaactatttttcttgaccatttttgtatgctcatactaaatttaaataatattgaaagtaactacatcgttcacatggcatatttggtcacaaaactatgtaactatttgaagtgagttctaactagcttatgaaactgtgagctatgcattgagagtgattatttcattcatccattataacttgtaagttgatgtgccactcttggaaataatgcaacgaaacacaccaccta

SEQ ID NO: 95851 - DNA, 368 bp, Zea Mays
accacctccaccatgaataagagacttgggagtctctcctccctctctcgcccgcttgtaagccctactatgagctttgatcataaaaggtgccggtagcgtaagccaccgatgactggaagtaggcacgttcggtccgaaccactataaatcttgcatccaccgagcacaccgtccggagctcggaacgcgcacaataaatttacttgtcagagtgaggttcgaaacaccgacactaaatacctcaaaagaactaattcaactacccttgaaagctatcacaaaccccctatcactaaaagcttccctctgaatgttgtgagtcttgacctcaatcttactcaagggttggccctaagtttaatgac

SEQ ID NO: 95852 - DNA, 450 bp, Zea Mays
gactaacccaaattcatgaccagtggagcactttccccaaactaattgcatcaaagactaactgaggagctctggccacggtgaccgagaacacggcggctagatcgtcgcgttcccgacgattggcggtcccctagtttgaattgagggctcagaaagcaacacagagtcatcagagtgcttaaacgagggagagagagcgatgagctaacctggaaagggctggtcgcggtgaggtgagtttacggtaacggagagtggatttggggcgaatccaaaattcgcgacttctagcgaaggactgcaagcgattagcggtgactgagtgcgtgaggatgtggtgaagctcactgcggggtcaatttatagatccccggggcggtggcgctcaatttgagtggatagcggaggcggccggagatgaggaagaggtctggcgtcgtggttacg

SEQ ID NO: 95853 - DNA, 508 bp, Zea Mays
cgaatcacatccagcaaaagtactatttgatactggtgccacgcattcttttgttactacatcatggatagaagctcataacatccccgtagaaccaatgattccacctctaagggttaattcagttgggggaaagttcagtcatataagatgtgctcgaatctaaggattgaaataagggagatagatttcactgctaacctggtagtaatgggtactcaagggatagatgtcatcctagagatgaattggctacacaagaactaagcaaccgtcagttgtgacaagaggatagtaaggttagtgtccccatctggggaagagatagtaactgaactgaccatgactgatctagaaggagcctgtcaccatatgtatatagatggtaaagaggccaacctgcttgagggcatcagaattgtgtcggagtttcccgacgtgtttcctgaggagttaccaggcatgccacccaagcgtaaagtcgagtttgccatagagcttgaacctg

SEQ ID NO: 95854 - DNA, 313 bp, Zea Mays
atcgcaaataattgctcgtttatgaagtacggatcctctgatttattggtctgggcttgtgaggcgtaccacggaattcacattttatatcttgtggctgccctggcaattaccaactgtctcaggaccataccgtggacacggtgaatgatcgtgtcaaaattgtacgctaaatgtgttctttagtgaagtgccaggcactccttgcccactggccagcagtcagctaatgactcagcttgttgaaatatcagtgggtctaaacaagttgctgaaagttgctaccaccacagactagtataactaacttcat

SEQ ID NO: 95855 - DNA, 732 bp, Zea Mays
gaaagttctgtggcttgtagctcatgacagatgttggatggatgatcggtttatgtgtcatggtctgttgtcccttcctaagtggtgcctcatgtgtgaccaggaataggagacaattaaccatcgatcaatatcatgctcctttgcaaaaaaatactagtactccatcctttgtcatgtaggttaaaataatttgcaccacgaatagttgataaggagtttgatcaatggtcggatagatcagggcacataattccataacatcaaaagaagggatttagttccatgtcatgctaggggatttaattatcgagacacatcaaaatgctttgtatattcgatgaagcaactcataacacatcaagagctctgagcatcactagtgacaaatgacatctttgggagatagcaggtgcatggatcctctcttatttgactggtccgactcatgaagagtaataggttcatgtctaaggatgtctattaccctaacatgtatgtaaagtggcatgtgtagtgtgtgggtattgctggtattttttgttttgtttgtttgtggttgtattggccctctttttattttatataatgatgtgtagttgtcctgtgtattcaagaaaaaaactatactagctaacaatattatagacacaagaccttaacttagcttttatagaaggaaatgaagtgtaacatgagcacaacatattaaaaattggaccagtacacatt

SEQ ID NO: 95856 - DNA, 309 bp, Zea Mays
cctaccttacccgtgattgttttctccatctcgccatttcgtgagtcttgccttagctccattctttactatgttctttgttagtatcacccttacccttgacccttctatatatcacattgatgttcatctcatacctgccctttaaaatcgcccctcttccatctcataccttctttctcttggtcgtatccccttctttggcttgcgagtttgtaacctcatcctttgttgtgcttttgtttcttagtgcctttacccttctcatcactcaatctcaccttggtgattacgatatgtttgttatct

SEQ ID NO: 95857 - DNA, 458 bp, Zea Mays
ttagggcgagtgggggcggtgggggtggtcgtcgatggcgatcgtaggagcgggtgacggcgacggcgaggagcggaattttgagggtttcggtggggccgcgatgagtgggttgattgtggtcgggtgggtcttggacattgaccatattggctcggtcggctagtggggagcgacgcataactgtggggacccatagtgtgcgcacgatcagttggtcagtgtgtgtacgtcgtgttcatatgaagcataaagtgttgtgcaaaggatcgtaaatagtttatacaagcattaatcccgaaccacaccccggatgtggtataaattgttgtgtgtacatcgtgttcatatggagcataatttgttgtgtaaaggatcataaacactgtgcgtctgattgatatgtagttgttatcatcaatttatacaagcataaaccccgaaccacaaccccacag

SEQ ID NO: 95858 - DNA, 335 bp, Zea Mays
gcaccatagttagcatgagacccactgaacgaatatgcataactacatttgcattaaacagaagattgaaccaaatgagctacaacataagattttatttgatagaagggtctaatgaaaacattggaccatgagagtgcagaggcagggccattgctactgcaagtcgcccctaagcctggtactaagagttgtaggaggcaagaattcacagttatcttagcctacatgctattctctgaacacaatatttacgagcttgataggcctgttttggaatacaaattatgtgtccgataggtaaataatttatgcaatgattcttagacctttgg

SEQ ID NO: 95859 - DNA, 440 bp, Zea Mays
caaactttaaggtttcaaacatcgacaaatacgagcctaagcaggacccgggaggttggttggttgtctatacaactgctgtctgggccgctggggcaactgaagatgtgatgactgcatacttgcccatcgtcctcgggcaagatgcattacaatggctacgacacctaccgcgtcattgcatcgacgattggagcgacttcagtcagtgttttattgccaacttctaatccctctccgacaagccggctcaaccatgggacctcaaatccatcaggcgccgaggggacgaaacgcttcaatcgtacctcaaaagatttcagaccatgagaaatcgcatccccgaggtcgctgaggcagtagtgattgaggacttctaccggggatccaatgactcggccttcgtccgagccatactgcaaaaggcgctgaccacctcc

SEQ ID NO: 95860 - DNA, 398 bp, Zea Mays
gttctctccgtcggcgaggttgcaatctaataaattcaatgagtaagatatacgtatggaatggtatgcaatttagcaattataattgtatggtgaatgattaactaaataaggtcgaggttaatcttactactggagatttttgtggtatacttagcaaatcaaggtcaagtttggttaagttacttggtaggattattttagtattccattgattttccttttcatgtattagtgaaattttagtgagattcctagctgaattcattggggtgagattcattattcctttgacttagcccttcttttcttttttctcttatgcccttaaggtgggtttgaactacaagctagttttataaatttccaaaaattctgcaaaaattaaagtggctcct

SEQ ID NO: 95861 - DNA, 437 bp, Zea Mays
gcagcatgtgggggatgttaatgatcatgctccaccatctactaaacatgctgaaaattcatctcctatcagtgcctcgtaacctgttgtggagtcacatcctcaatctcttgctgaaggctaagctaggaggaagatagttcagcccaaaagactgattcaagagtgcaatgttgcttttgctttggtggttgctgaagaggttgataacgttcaggaagcactaaattactcagaagctatattgtctattgatagtgaaaagtggattggtgctatgcatgaagggatggtgtctcttgagaagaatggcacttgggaactagttcgactgcctcctggcaaaaaggcagttaagtgcaaatggatcttcaaaagaaaagaaggtatgactccaaaagagcctctgcgctataaatcaaggcttgttgtaaaag

SEQ ID NO: 95862 - DNA, 303 bp, Zea Mays
acttaatggtcatctatgagctccaacaccctgcaatggtcacaaagaacatttccaaacacatgaatgacccaaactaaaagtcaaagtgtatttaactcttttgggtcccttctaggttttgattttgatacttcttcgctttcttgtgaccatgtcctactacttgagctaggatcttgagctttatgactggaaccataaactttaggaattacctcaatggttccaagtaatgtccttatgttgtgatcctcaatgcaccatatcctttctcaacattatcaaccttgactttgcaag

SEQ ID NO: 95863 - DNA, 307 bp, Zea Mays
ctcgcgcccgttgtcacactggatgcttaggatgatgcgatcgaattgattggagacccaagcgaagaagtgagacagggtgggataagtgtctgacttcttacataaaggaaaagtccataaataatgtgagaagtcatcgagaatgtgtaaataatacttatagccagaaatactgattacaggggatatccatacatcacagtgtatcagatcaaaattgtgtgctgctcttgaagaggaggtggggaatgggagcctaacatggcgacctaactgacaagcatgacagaggtgctcaaaagat

SEQ ID NO: 95864 - DNA, 923 bp, Zea Mays
gctggcggttggttgcttgcaacggagggtgcctgaagggagctctgactctgctgactgtagcgcgacggagtgggtccagatggtttattgaagcttggacccctgggtgggagtccaaagggtcgagctctctggtgatgttcttgctgttgagctcggaggacttggaatttcctcttgaggtgccctttttcttcttcttttgccctttccacttggatagccttgttggagaggtgagagaagctgaggaagtcttggctggtgaggatggtcttaagctcgggtcttagtcctttcagaaaacgggccatctttctggactcggtgctgacatcttcaagcgcgtaacgggccagctctatgaacttgtgcacatactcactgattgtcctcccgccttgagttagctcccgaaattcatcctccttgagttgaactatcccctggggtacatggtgctcacggaaggctgtttcgaattctgcccaggtagcatctctgacggcctcactgaaagtgtcccaccatgctaaagccattcctgaaagctgatgagctgccaattggacacgctgattttcagggcatccgatggcttccagcttcctcttgatcgtgcgaagccagtcatctgcatcgaggtgattgctggaccccacgaacgtgggaggcttaagtctcaaaaattctcccatcctgtcctgtggccttccaccacctgggcgctggttttctagacttctagtgaggacttcaatgagtcgggtttgattggctagaacttgggctagatctagtggtagttctggaggtgcggggaggtgggtctcacccccttctccgccagcctctccttcagctctcagagggaatcttgctccaatcccggaggcagtaggcgtggttttatccgaagc

SEQ ID NO: 95865 - DNA, 465 bp, Zea Mays
gaccaagattgactatttcttcctgttgatggattcagcaagcaagggggactgaggttccacatgggagtcctgactaggagggggtaggcacttggagggaatcttgatcgagatagtttccatgctgggctcaacgaaggcagagataacactggacaataaaaatttcttggcccattcaaaagaatccggccgcaatagtaggcccatgaagaaagcagcccacacctttggaacaggaactaattctgagttggtggggaacaagtcagcccaagaagaaaggcgttttctagccaagtaatcttcatatgcaggatcatggttgggctgctccaagtgttgcatgaagcccacattgatgttttcttccacttgcatgttctcctctccctggtcgttgtttccctccaaaagcatacccgctgggggaaaggctcgcaaagcaagaactgcatccac

SEQ ID NO: 95866 - DNA, 374 bp, Zea Mays
ctcgtccggacagctcgggcagagtcccggggcaagctagaaccaaagtgggagggccctttcatcgtcaagacgaaggcgtcccccaacgcgtacaggctcacaacgccatccggtgaagacttagaacattcttggaacattgacaatcttcgcaaattttttgtttgactcctcagggccagctcgcccttgtaactcgcaaaacagttttattccggctcgcactcttttcctcctgggggtgaggtttttaacgaggcggagccatgtaatatacacgcaaaaaatcccccgcaaaaattacgtcgaaaaagaccgcatcgacggtcttcagcattcgaccaatacaaaagtcaccgcgaggggcagcg

SEQ ID NO: 95867 - DNA, 619 bp, Zea Mays
aattttgatgactgtttggccaatcttgagattgttttacaacgttgtcttgaagcagatttggtactcaattgggagaagtgtcatttcctagttcaaagagggtattgtcctcgttcatttggtttcctcgtgatgaattgaggttgataaggccaagttggcgtgattagttgcttgtctcctccagtgaatgtgaaggttcgtagcttcttgggtcatgcagctaatcacatgcatgagaggatcaagatactatataataagtaatatctgaaaaagcaattcttggtagatccacttgttaaggcccactgagtgtaggagatcccatgtcccatcaactcgagagcccatatggcgatcctccctgaaatgtctagattgcgggtcactttgccctgggggaatgacgtcaccacaatgtcaggatgcgattcgaaatagtgtctaagcttcggtttagtaactaagatggcatataggaacatttgtacctagacgtagcgagttttcgcgccggtgaggacttcgtttatgaagtagacggggcgctgaagcagttgtacaccttctccttcttgcctttcgacaacgagcaccgagcggaccacctggg

SEQ ID NO: 95868 - DNA, 503 bp, Zea Mays
ccggacccttgagaccaaccctatcgacgcgaactggcttgcaagtgtttgcccgaacaaccatggggcataaggaggaggcatgaccatacctcccgttggttgaggaattcgatttacatccatctccatgaatgatcgccgaaagggatcggttgttcagtgcaaagtagaccccagcggcacttatccaaacgtcgtgttcgatgtcgtcgacgttgaagaacttgttcccactagaacaacaccccgatgagatgggtggtggaagtctcgtagccttctatgccatcttgtccatctgggtgtgtgtgcttgccaacacttccgttatctccccaaccttcttctcgattcccggcctccacctctaaaactcaccccgatcggtcatcagaccttgcacggtgagatccatctactccatggttgagtgcatcacatccatatgtcgtcacgtctccttgttaccctcatcgattttggcgattagctgcaccaac

SEQ ID NO: 95869 - DNA, 386 bp, Zea Mays
gaagaaacaaaaacgctagaaattttaagcccttcatcggaagtaacagtgccgaaggcacaaaaaagttatgccgcaactcctaagaggagaaggatggcaaatgtattagatgtgttagaaacagtaaaggctttaagctctactccttcagggaaaatcgacgaagcttcaaaagtgcaaaccgaagctgaaacaaagccgaccgaaatcgaagatgcagtaatccaagttggtaccgaagctgggccttcagagccccctgagaaaaagccttcggaaatcgaagaaagggcaacagaagaagagaccacagagcaaattttgcctaaaaaggttgcctctcctgctcccgaagctttaaaagagaccattgattacatcat

SEQ ID NO: 95870 - DNA, 903 bp, Zea Mays
cttggggccgggcaatgtgtcagctcggtgaacccttgtttgaaggttctatcttctgttagttcgttgcagcagggtctcttgcggatctatgcgtggtggcagcgtactgtctcaagtagagtgtttgtttttaccttatgaatctgaaatgtactattttttcttggaatgttcgggggttaaatgaccacgctaagagagaaagcgtaaggcatacaattctgtccaccggtgccttccattgtttgccttcaagagacaaagattacgagttggtcaaatgtattattaaagaaaactgtaggcgccaagcttgcaaatcaaacttttcacttgccttctctaggcgcctcgggtggcatcctaatcgccgcagattcggatttctttgacatggttctcttaccatattcagcagcatattcattgtcagtcagaatcagttctcgattggaggatgaggtttgggacctcacgggcgtttacgggccccaaccgaacaatgaaaaaatgatattcctctctgagctccgtaacatccaaaccatggtcagacctgaatgggtattattaggtgacttcaacatgatcaggagagcaagagagaaaaacaaagggtcaatcaacagaagagtgatgaggcagtttaataacacaattgatgatctgcatctcttagagctagagctcactgatagagcattcacctggtcaaatgagcaacttaaccctaccatgactaagattgacagattcttcgggacaacagagtggcatgacgtgtacccttcggctgaccaacactccatgtgcactatgacgtcggactactgcctgctcctaatgcaaggccactcttcggttactttctaccatgggttcagattcgaatctttttgg

SEQ ID NO: 95871 - DNA, 521 bp, Zea Mays
accgactacggagttgacaggcacccagtttgaggaaatacatgaaaagcaacaacaaatgcgtcgtgcatttgagggctgccctgatgatttggacgttactgcgcccatggagacgaacacaaactcaaacgcggaaaagcatgtattatatacaatctcatcatggttacattatatgttaatttccaatttgcatccaaatattagacaaaaccataataatgtcaacagattaccattttaatgttggcaataatatgccaagggacataaacatcccacatcaacatataccagactgcaacattatgagctcatatccgtcttcccacttgccgatgtttgacgccacaccgcaaaaacatgtatatgtttcatctttgttttgtccattgtaatctcaattaacgattaaatttaattgacacatgactgagggtttaaacatagtatcattgattttttggggcagggaggtgacattgatgcatctcatgacactccaacttacacgggcc

SEQ ID NO: 95872 - DNA, 298 bp, Zea Mays
tgaacgaaatgcaaactcagatgaggcaagaacgccaagaaatgtgtcaggaacggttggagatgcgttaagaaatgaggcaagaacggttggaacggcaacaacaaccaccactacctccaccacccagggataagcaccagtagtttatgagtcacaaaccatcgacattctctaactctgcggacccactacaagcagatgactagttaaaatctatggacaaaatgctcaacatagctcagtgctctgacagagagaaggtgctatatgcatcgggtcgccttaccggccccgc

SEQ ID NO: 95873 - DNA, 556 bp, Zea Mays
gtactgcagtgtcttattatgtgtgttccatctgtgtacaatgcatgggtatttataggtaacctggcgggttggtgggtccccaactaccattatacccccggttacctgctacattcctagaatattcccctcaacggggttgttacaatggggtgaagtatagtagcctagacataccaaaaaatttaccccgtaaagggcttacagatgggcctagatggtgttgcgatggaggctaggccccacgataatcgggtacaaccttctcttgcgcgttgcacccttgacccttatgaagtcgtgccccctaactccatggagacctagacttcgctgtctgaagttcgagcattcaggacacgtgcgtggggctatagcgagccccctaccttgactaccatggcctttcacttcatcccctccgaaggccgtggtcatagacctcgacgttgttacaagtcgaagttcccttcacaacttgtgcctccaccaaaacctgtttgatcatagccagattagactgatcaagggtgagcttggcctttgctccaaa

SEQ ID NO: 95874 - DNA, 419 bp, Zea Mays
aagggtgggggatgagtcactgcggcgatctaccgtggcgatcgcagagcaatgagctatagtgctcactgggcagtcaccacggctcgcgacgacacgataaaggtcctaaggcatggcgccaccacggtgaatggcgtacatgccagtgacggccactcggccacgtcgccggcgcgagtggatgagtgacagagcgcatagtgcctccaagttcatccgcagcaagatcttttacccgaggatcgttatccgtgtttaacaaggcacgtatcacggcgctggcgcgaatccgggcagaaggtcgtcgacggcgaggtgaactgcacctgtgatcttgttcaatgcactgtaccatcgcaattccattcatttggtctgatagagcttatttgggggtgatttgctccaaatttcgt

SEQ ID NO: 95875 - DNA, 556 bp, Zea Mays
aacgaacaacccaaatgactactctgaagtgggtatgcgcatacgctatcattatgaaagctggccaaagttcgatcatgccacaacccgagggacaaccgtgtgtacacgccattataggacaagataagacacacctcaggactgtaacacggtaagaagggacgatgctaaccattggacgacggatagcctagagaacaaagaggtaaaaccacaaaaccaaagccccatcggaccggtctgaatgacacatccatgtatataggttgcccctttactagtctataaatggaaggggcgaccatatgaaaaggataggcacacacaggagctaggagctagcgtttgtaatacatcgagcactccactctccacacaaaaaggtttgggcatcgagccctccctcgactaaatttgtaatctgtcctgttacaaatctagtgcggggtacgtgagatacctaactggacgtagggatttggcccaaaccagtataaaatcttgtgtctccatcgcacaccatccgctccagacacgcaaatcacttagaatt

SEQ ID NO: 95876 - DNA, 714 bp, Zea Mays
attactgctccatggttctcttttaagcattaactgataacttggttgggttgtgacaattaaaccctaacctctggttgggagactgccagcgtgccacacgggaagagaggaccacgatgattttataatctgcaacctgcccctgtacttggtctggctgtatccagaactaggccgaccgtgaggaaatcttcgtgggaaattttcgaaggcacctacgttcaccaaggcaacccgtgggacctcaagagttgccgacagaagtctgacgaaaccttgagagactacatctgactttctcacgacagtgcaacgagctgactaacctcgtcgatgctgacgttatcagtgcattcatttcaggaaccatgagtgaaatgctggtgcataagctagggcgcaaaagtccgtgaaccatgaaggaacttttgtacatcacgatgacccacacatcaggggaggatgcggtgggaacaatcttccaccaccgcaagctaaaggccaacgacattatattaaattcggaaaaacgcgtcttcggcgttccaggaggcatgttgtttggtttccagtctccgagcgaggtattgtggccaacccggagaaggttttgtccatcacgaatatggggctcatacgggatctcaataatgtttagcgattaatgcggtgcttggcttccctcagccattttgtatcatgccttgggga

SEQ ID NO: 95877 - DNA, 334 bp, Zea Mays
gtgctgctaaggaaaaatgctacgaaatggttatggattgtgctaaaattttgaagaacagtttttctaaagttggtgcattttcttccgagcagaaattcatccgcgacaatcctgaagttatccaatggattaacggcgaggtcgaagctttcaaggaaattcttagtgacagaggggacttctgtgcctttgtcggtgcttgtggggccgtgtctattttggagaaggctggttgtgatcatgccaaggttgtagctcaaccagattttaccttctcagccgacgatgttagaaacccttcagtcgaagctaatagcctaggtgggaagtt

SEQ ID NO: 95878 - DNA, 518 bp, Zea Mays
catcatttcagaggctactcgataaggcgctagctattgaacacaagcgtgttcagctgggagatttgaagagaaacgctatatctcaaggacaaggaagcagcagtgttcgtcctcgctacagttcaccccagggtacaccagttcgcattggcggaggccagcgcccagttcagcaatcaccactgaggactccacctcctcgacaggctacccctactagcactccgatgaagttttcaggacagagtccaggcactacttgtttcaagtgtgggaagactggtcattatgcaaatgtctgcccacagaggattgctactactccagttcagaataggcaacaaactccaggatctggcaagggatattctattgccaaggttaatcaagtcagtgttgatgctactccggatggtgcagacatcgtacttggtatgttttatgttaatgcaattcctgcaaccatcttatttgattctggtgccacacattcatttatgtctgctagatatgcc

SEQ ID NO: 95879 - DNA, 313 bp, Zea Mays
gtcgactatgaatcttctccagagcgcccaggtatggatgtaaatgttattacattttccgtcgattgtactattgtcggcgacgatgaacctgttgttgcccagtttgattttggtcctaaagaagccgcctttactaaaccaaaggaatcggtaaatcatttaaaaccgctcttcgtgcgcagacacattgatggaataccgattgctaaaatgttggtagatgaagggggcggctgtaaatctaattccctattcattgtatagaaaattaggtaaacaagatgacgaacttgtcaaaaccaacatgacc

SEQ ID NO: 95880 - DNA, 286 bp, Zea Mays
cattgatccactgaatgtggtatggatgtggctatggacgtgtggttaggccaagcttcttgaccaaatctgaactcaccaaattattgcagcttccaccatcaataataacacgtgcacgccgattcttgatggagaaaaagtctggaacaaattattgcgttgctacttctctaatgatttaggctgagaactaagaacacgctgcaccatgatgcttcgaaggttcgccgtagcattagcaccaagcatggcatcatcattagcagcaacatcactggagtca

SEQ ID NO: 95881 - DNA, 712 bp, Zea Mays
cgcggtagcgttgaatcggccaagaccgagagctttcctaacatcaaaggatgcagaaacgcgaacctgaggggcatgaatggacctgtggatggctgaccacggcgagaggtcacacggcggcgtggctgatcgaattgtggaaaaactggaattcacgagctatagtggttactcgggagcgagaagtggtgttctggcttcgtaacaagatagcggaggaggcaggggcgtcaatttatatagaccagaagcggtggctccgaattttggatgatagcaggactcatttccccgacgagatcattaccgagatccatcgtggagcacatgcgttcaccgggtgacggtcacgacatagaggacgccatgaccatgacaacacagtgaatcaggcaactacgtgtctctcaccgagaatacggcgaacactggcgacgatatttcactgattgtgcaggcaagtgggcacgacggtgatccatcttaggcctatgttcacctcacccaagatcttttcacccgccatggttatccactccagactagcacgaatcttaccggcgacgcggatcacaacgtggagatcaccggcgacgggtgcactgcacctggaatcttgttcagttactataccatcgtgatctggtttagttcatctgatagggcaaattgaagggcttcgttctccaatttgtatgtgacaacccac

SEQ ID NO: 95882 - DNA, 436 bp, Zea Mays
cggggtgatacttcttggatgaagacctcgggtgggacatgagcccgactggatcccatctttgacaacgcgtcgtctgccgcgttgcgatctctctccacgtgatggaactccaaaccttcaaatttgtcctccaattttcggacgactgcacagtacttgcccatagaatcagttgagcaatcccagtcttcatttatctagcttatgactactagtgaatctccgtataccgtcagcttcttaatgctcagtgacacggtgatgttcaacccgtggatcagtgcttcatattctgctgcattatttgatgctggaaataataactggagcgcatacttgagttgttctcctccaggagcaatgaagaggatccctgcacctgctccttgcagcttcagcgagccgtcaaagtacattctccatacttcagtag

SEQ ID NO: 95883 - DNA, 1497 bp, Zea Mays
gaggcgatgcacgggcaaacaggccaccgcaaggatgaaccataccggagaccgggtgccaggaccgatgaggtccgaacaccccctccggtcaaaggtacggttccaagcaatactccacatcagtttcgctgggaatcggaagggcgtcagtctatgggagagtggtctcaagggtctggtctagggtctgtaggacctagcatgaattttcctttgtttgatggttcaaaccctaagctctcgaagcatagaagtgagacctatttcgaattttatctggtgtctagggagcgatggattaggatgtcgatcatgtactttgaaggtcctgccgtgttttgggttcagtccatggaagataaaatcagggagatgaactgggaggagttttgtacccacttaatcacacgtttcgggagggatcaacataatctgctgataagacaattctatcacattaaacagatcacctctgtagtggactatgtagagcagtttgatatcttaatgcaccagcttttagcacacgaaaatcagcttacctcttccatgatcactgctagattcattgacgggcttaaggatgagattaaatctgtaattcttattcagcgtccgtcagacttggatactgcttgctcccttgctctattgcaggaggatgtgctgatctgcactggaagaaaggagagtcggaggatggagggtggaggattttccaaaccaaccggaagattcagtccggtgctgggatctaattcaaatgtaaacggtggtcggaatgctcaatccacaaatgaccgccgaggtgggaccaccatgaacccgagaacagatgacggtaaattgtcggcactgaaggcctacaggagagctaagggtctgtgcttcaagtgtggggaaaggtggggtcagaatcatcggtgttctgccaatgtcccattacatgttgtggaggagatgtgggctatggcacaggcaactgaagaaagtgacggcaatgaggagttggaaaatacttatgaaaacgaggaagacgcagagattctagctatatctgcagcagcggttagtggaggcgaaggcaatcgaaccattcggctgctagcatctgtttgtggacaacaggtgttaattctagtggactcgggtagctctagaagtttcatgagcaacaagctaatgggaacaatatcaccggtgcaaaaattaccaaggccaattcgggtgaaggtagcagatggaaggatattgtggagtaagcattgggttcctaattgcaagtggctttgtgggggaataacatttcacatggatttgaaggtgttgccactcagtggatacgacatgatattgggaatggactggttagaagggtacagtcctatggctgtgcattgggctgaaaaatggatgaagtttttacataatgggaaggaagttattctgcaaggactcaaacctcaactgggaagttgcaggcagctctcaagt

SEQ ID NO: 95884 - DNA, 411 bp, Zea Mays
gagtcagtaggcaaaggggagaagtacttgtgagataataaaaggaccttcctagattggtgataacatgtatttgtcttttgtagtttgaattttgcataacactggatcaccaactgtagaactcatgtcacacacatgctttttatggtgtcttctcatgtcttgttcatatttggtttaatgcaccaaggtcgagtccctaatctcttcgagtatgtcaagatcagtgactcgaccatcttctaaccgaggttgtgaaattcaggacccggaaagatttatgatccatatttatgggaagcatggcttctgacctatacactaggaagaacagtgtttgacaagtaggagagcttgggacgtctataatccccatagcacagtaggtaattcttgcacccatcttcc

SEQ ID NO: 95885 - DNA, 294 bp, Zea Mays
tgatcccatgtgtacttatgatcttatttgagtcaggttgtactacacgtcactctgttaggtaattggctgaattctaaacattgagtccgtccggctgcagagtgtacttatgaaggtcaagtgttctgaattctgaacactggctattcggatcagctgggtgtgccttaatttcgggttgtggttgttagttactttgtgtgtatgtccggctgcagagtttgtgtctttctaaaaattgatatgcctgctaaattgttggcctatcttttgggttgttttacttagaag

SEQ ID NO: 95886 - DNA, 686 bp, Zea Mays
gggtacttgttcttgattgtgacctcattcagagctcggtaattgatgcacatcctcctagggccagctttcttctccacgaataggataggggcgacccaaggtaggtgcttggtctgatgtaacctttctctgacagctcatcaatttgcttcttgagctcaaccaactcgggtccagataccctgtaagctcttttagaaatgggggcggtgctaggaagaagctctatggcaaactcaactttccgctcaggtggcatactggtaaatctttcgggaacacatctagaaactctgacacaaccttgatagtctcgagtgaatctgcctccttgctatcaatagccatctgatgacaacctcctttccttggatcgggtgagacaaactcagccaccatttcttctcctagtggggacaccaacttaattgtcctcttatcacaactgataattgcttggtacttatctagccaattcatccctaggatgacatctacttcctgagtacccattactatgaggttagcgggaaactctatcccccttatttccacacttacattcaagcaaacactatcagctcaaactttaccaccggctgtatcaatttgaatgggtgttgacatggcagttatgggaagattatgcgcttctacccatgatgcagtaataaatgaaagcg

SEQ ID NO: 95887 - DNA, 320 bp, Zea Mays
gtttgttggggaaaatttgatatcatggagaaacaagaaacaatcagttgtatatcgttccactgctgaagcgggatatatagctatgtcacttgtgttatgtgtgatgctacatgttaagaatctcctattgaagttgaatgtattgaggaaaagccccctaaagctatggtgcgataacaaatcagctataagtatagctaataatcatgttcaacatgatagaacacaacatgtggagattgaccagttctttatcaaagagaagttagatgatagaacattagagctgtaagttcgaaggatcaaatagatgattg

SEQ ID NO: 95888 - DNA, 597 bp, Zea Mays
tgcttttctcaacttatacatgactctcgcttgtcaaaatacacgattatcactaaccactttttagaaattttgaaaagaaccaaaaacaaaattctctcatactcttgtaaggttgtcattaatcaccaaaaaggggagattgaaagcatctaggcccctagttgtttagggtttaaggtttagagattgaaagcatctaggtcccaacaccctggatgatggaaatcaaagagatggctaaggaagaatgtctaaaaggtcaaggattgctagttctaagtgttgaaggagttgtcggacacttaggttagaaacatgcctttattttatttttagtcgtactataaagggaggttttggatgagtaacttgacctaaacttgtctcatgtagtgtgataggttacacatgcataaaactagtggtaggaatctcacataggtccatgaaaaagttagagcgaaaccgattagaaaaaaccacttagaatagtgaaaatgggcctctgctaggtcactgaacctgtttgccagagcggtctatagcggcgtgtgccagcctggtgcaccggaccgattcgggctggcatcggag

SEQ ID NO: 95889 - DNA, 505 bp, Zea Mays
ttcggggtactctttcttatccatagccttaggggagactggcattccttccaagactatggcttcttcagggagttcccaaaccttcttctctcctttgatagagaccggatgaccttcaagaatctggggatctttagctctcatgggttgaactgggttggatgaagcaggctcttggatccgcagggctctacgttggttatgggtgaccaagtaggcctccatcaacttctggacttgctcatccttggcttgcttcagggcttcaacaggaatgacttcaccactttccaaggcagctacataggcttgagttgtggtgagatccacatggagcttatggttgcgcttttttgcatcttttgctcgggcaatcatctgacggtggtgccgagacaagaaaccatactgtgcatctagggtgagcaggtatgcagtgaggtacacgactgtggggtcgtcctcaagcagttgctgcccttccaatgcacgcatcctggcc

SEQ ID NO: 95890 - DNA, 499 bp, Zea Mays
tcaaactcgtagtagggttacaagcagtcgagagagggaggagaggctcccaaatctcttatcggggtggaagtggagcttagaagctgagaggtggagtcatagctaagtcttggcttggcggtctctagtcttctggtcctcttagtgctcctcctcttgtccgtcctttttggctcatctccgtctgaaggcgtccgatcgtctccaagtctatctcttctctccgtctaaattcgtctgtcgacccccctttcctatatgccaacctcttccttttataggccaggatatgggtcgaccagcggtgccttcctagggaggagtcgtaaggcaaaggtaagaccaacgttttaccccggttgagttcacgcgtactcgcggggcccgaggctacctggttgcttcatatttatcgcggggcggcgatggccccatgcgccatcattctggctacgtcgacccctagcttccatagcctagggctcggcgcagtctg

SEQ ID NO: 95891 - DNA, 293 bp, Zea Mays
ccgccccatttatgctttgtttgggtactctagtatccacccaaatccatatgtattgatatggattggagtataaattaatttaattttacattccaatgcacctcaacatatgtggattgtgatgcatactagagtatctaaacaagacctgtggattgtgatgcatactagagtatctaaacaagacctttgaagaaaatccatgcacccttgtccttgttccctaccacagagaaggaattttctccgtgcctaaccccaacgaggatcgaggacccaatggcgatccc

SEQ ID NO: 95892 - DNA, 320 bp, Zea Mays
attgcatgtatgacattgcataacttcattagagacagtgctctacacgatagagactttgatcaactaggacctaatagccttggtcatgatgtacctgtgggtgagagtagtagtagcacatctgatgagttagacatgagtgcatttcgagatggaattgctaatgcattagtgtcgtagttaaatatgtgaatgtaatggtagttatgttgtaatgaactccactaattattatgtaatgaccttttgttggttcggtgtttatgtgtatcgtttgttcaaacagaatctgcaatctgagaatctgtgtatccaaa

SEQ ID NO: 95893 - DNA, 452 bp, Zea Mays
taggatgctctgaatatgtcaagtctggttctaaggcaacatccgttacttcaatggttcgatcgggaacccgaagacacttcttcaattgagacacgtggaacacattatgtactgcagacaaggtttcgggtaactggagtcggtatgccactggtccacattgttcaagaacagggaaaggactaatgtaccgggtgcaagcttcccttttaccccgaaacgtgatatacccttcatcggtgagactttgaggtagacataatccccaactagaaagtacaagggttgtcgtcgcttgtctgcataactcttttgacgagcttgagcttctttcaaattatgaattattcgttgaactttctcttatgtctcctttaccatatcaggcctgaagaaatatctttcacctggttcagaccagtttaacagagtacgacaccgtcgcccat

SEQ ID NO: 95894 - DNA, 387 bp, Zea Mays
aaggcctaatattgaagagacttaacctaaagatgaagaatctaatgtcagaggatgttgatgtgatgaaagtgctgagaggccttaaaagccgagctatttagacaatatgatatctacactgaaggagggacacctgaaggtgtatagaaagcttggctatattgacaacattaggcttatctgtcttggcgacaacaatgagaaatcataaccacgaaaagacaagattgtcacctataaaatattattttagacatggctccagtttcccatacaacccatggtttcaaaagcattgaaaaatgtgatatatacttccatcaactaactccaagcgatgtgatgtggcttggggtattcatctagaccgttgttggagcaaag

SEQ ID NO: 95895 - DNA, 492 bp, Zea Mays
gtttgaattcaacagtcgttatgattgcagaagtaagtgcagtgtgatggttttgaaacttcttcctatttcacggggcatagagaccgccctaagacaagcaattcgcaaacgtgcttatgctgaatcgagtagtcgcgagcatgtcatgccaatttaagttactactgacttaaaccgactgctccgttggtagggtctagtggtcaccctgagttaagtaaacgtgagcatgtcacatctccttaagtcattgccgacttaagtcgattgctccgttagtagggcatagtggtcaccctgagttaagtaagcgtgagcatgtcacaccgcattaagtcattattgacttaagccgattgctccgttagtagggcatagtggtcaccctgagttaagtaagcatgagcatgtcacaccgccttaagtcattgccgacttaagccgattgctccgtttgtagggtatagtggtcaccttgggttaagtaag

SEQ ID NO: 95896 - DNA, 454 bp, Zea Mays
tcgcaacatcccgaggttggcagggtaacttggttcatggtggggcattcatttagttgtgattgtgacaagtgactggcgtgtgctcaggcgggtgcacgaggtcttgtcggagtggctttctgcactgaaggtatcacttcaaggtctgcaacccgacacattaatatagcactcggcgtgcacaacaaggctgtctttgggcagagggtgtaggtgggtcttgccaagatgcacaaacgccaaggcagctagaggcaggcttacgatttctttacgcatgtgttttgccataggtggttgtgggctccctctatctagtgtgcgttatggtgggcgggcatcagacattttcaaagaatttaccatggtgaaaagacaagcttaggctataatttagaagaatatcaaggaataaccgatagaggtctaggtttgcatagtttggattagg

SEQ ID NO: 95897 - DNA, 995 bp, Zea Mays
ccatccttaattaaatcaattcctaaaaagggccttaaagcaacgaacagtagcagagggaatcacagactgcaagtgggtttctgatataagaggagcactgtccgtgcaagttctactggaatacttgcagctctggaatttggttgaggggtgtcggtgttttaaacccgccggttctaaccaactagtaaatttgtgctgcgtgctcttatcccggatggttgatgaaagaagacacacaaggtttatcctggttcgggcaagagaaggccctacatccagcggggggaggagacttatattatcttgcatctaagtgctcgtagtaggggatacaagcaagtcgagagagggagtgagtcctaagtctctgagtatgattgaggcgagtgccaatatcaggagtggagtgaggagtgaacggtgaagtgttgtccttgacctccttatagaaggccccgggctcttccttttatagctgcaaggaggaggcccaggggtacaggtgttgctatgctattgctgtggtaggaggaggtgtgtccgagccctgtagcggtatggccggcgggatggccctcgtccttgatgtcgtctttggtcaggagaaggacgcccgatccctgtagcctgtcctttgactaggtagagagccgaggccgggtttgggagcatgggcgtctgcccgagctcgtcctgtacaggggtgcgaatgagacgtttccgagggtgtcgagtcggagtggttgaaacagagctcggcatggtgaaaaagtgtgtggtaatctggtccggatgtcattctggatggtggaaagtggattggacactggtcttgttgtttctgtagccttcctgtcttcagcgggagagcaggtggcatttaatgcgcgtgcttccctgttggggcagttggccgaggtcaagctcgggcgaggcgaagatttcttccgaggccgaggccgtgattagacgttgcatgtagtcacgct

SEQ ID NO: 95898 - DNA, 285 bp, Zea Mays
aggtgctatcaactaatcgtttaaaaatattagacttacttctcgctttgtcactacaacaccctttagtcacatgaccatcggaagcatccttcacacggttatacgacagcaatctaacgttgtgttacacaagacatacatcttccttcgttgcgagtataaccatattacggcatatacccgcacacctcaatccattatcttacgccaccactattataatacaccacggcgcacacacacatacgtgtactaattcaattctcacataacttgtatttt

SEQ ID NO: 95899 - DNA, 406 bp, Zea Mays
ctgccatccaggtaggataatatgcatcagaaaaaacatcaacagttaaaagttccgaaggtggaagtctaccagaagaacaacaaaacgcaaacaccatctgagacattaacatttttaactacagatgcgtctgtctaccggtctccatccaaaatttctattgaaaatttctttaaccagtcttcggatttgcaagcttccttcctgtagggtccttccttccgtctttgtgtggatcatggcattaacattttttaaccacagatatgtttgcccaccggtctccatacaaaatttctattgaatttttttaaccagtctttggatttgcaagctttcttcctacagggtcctttcttccgtctttgtctggattagagtccaaacattcattcaaaagcac

SEQ ID NO: 95900 - DNA, 332 bp, Zea Mays
ggaacaacgacacctaagaggtgttgaattagataatctaatttttctataaactaagggctctaattttacctagtcaaaatccaagcattaaaggttgaatcaataaattagctaagtttgaaaggacttggaagaaggctacgagacaaaagatgagaaataaatggagaccgagcgggtgagagatgatggagggtggaaagaagaagttcgatcgggtggaggacctcggcgtcatagatcataattttgacctgggcaccacatatcactggcatcaaggtgcgaccatatcactacctaccgtagcgcctagtgtgatatctcga

SEQ ID NO: 95901 - DNA, 523 bp, Zea Mays
ttcatatgtaattataggtttgccatgttaatttgttttgcgggaagtcaaggagtatgtgttcaagatcatgggtggatgtgacaagcaaatgaagcaatgattcaaacattacaatcctggatgatgacttagaagcatgcagaaggtattggtagagatcattttcatgaaaatgagatgttccacgatttactcatcttgtgtggttgaacgagcaggaatcaaactcaaaggaaatcactaaaaggaccgtaggaaaaagagaccgaactaacaagtactctcacttaagggtgtttctctttgtgttgaactgtagacccagaaagaagaatgaagagaagcgggtgagagaaaaatttgggcaggtgcaagtgcaccgtacaaaaagcatactaccagctaatcctttcaactatcattttatctaaaaaattagcatcaacctctatataccggaagcatgcatgtatataaactttataccccaataaatacccccaatacacacaagtttggc

SEQ ID NO: 95902 - DNA, 558 bp, Zea Mays
agcaacgatgttcaacgtaggctttatcaggactagttaatctccatgggttgacgatgtctgccattgaccatgcactagaggaaattattcctgaagaccttttattcctaaagaccgttcatcattcgtacaaaggttccggatgatgtccctttggctggtaatcctgtcaggcaagaactaacccgaacagtttctcacacttcttcgaccttggagggcggtctagctcacaaggacacactggttcttaacgttgcaggctagggttacctggctcctgtgggtacgaccgagggtgcttcagcttccgatggtgccgttgaggataacccaaccctcagggtggtgctgaggatgacctagccaccaaggctgctgagcttggttcctcttcggctgcctccatggatgttcatgttggatcactaccggttcaatctgaagaacatgtggtgatgagttcgcctactactcttgtcggtccggtcaccttagaggccagtgactcggatgctaggaatccactgcctgctgtcggtgctgaggtctccc

SEQ ID NO: 95903 - DNA, 488 bp, Zea Mays
attttcctggttttctaatctctggactgggcctcattttctgaaaagtacaggggcctgctcacaaaaaccccacagacacagagaaccccgaggggagaactgtgggttgattccctagaagtacaagggcgcttatgcaagttggccacgcgaaggggtaggcacggtttctggccgctggatctcactccgaggatctcgatcagatggcgctttaagtgaactggtaatcaaccgaaaccgttggatccaaagccaacgcccaagatccaaccacgccagtgcccatcccacccctcggatgggcgacccacggtcaagatctaaagtgctaaaagggggtatcaatggtttaatcccagccgttcaaatcaaatcaacggacgcgcacatcgtcttcaacccctggctccctctctctcttctttttctccttcctcagttgatattccacggccgaacgccataagagcagtagcgagcca

SEQ ID NO: 95904 - DNA, 473 bp, Zea Mays
aattcatgagcccaattaggtccaccagaattccagagatgaaaataagctttgaagttatcacaggcaaatgatttcaaattatagtctgagaaacccatttgcttagagaacatagagaaacggaagaccctatcagataattgtaaaaccttgaaggcattcacataaccaccaataaccgattagagaatataacccacattttgaatagaaagccgaagtttgcatcttccaatcgataaatcaagatagaactctgacagatttttacccgagagacagttgattggaagtcccaaatcgaaccagatggaagcttagaggtgaagacttgattgagaatccggttttccaatggcctcatcaactgccgccatcttccttccacactcgtcgtcctcagttttatggatttggaattgctgtgtagccaaacaattcaatatggcctatgataaacctcaccacta

SEQ ID NO: 95905 - DNA, 1538 bp, Zea Mays
ccagtccctagactgaagctgcaaattgtttttacattttccaacctaaaaccatcaaccagcattttatggaaagatacttatacttactgagctgaaagggtatgcccccagtattatatgtaatggtctgtgacatgacaggtgtgcactcaggctggatcacatacaatgtacgaccagagaaaaatgcaggctctagcaactgtgtgtaccatggctgtgtatctgagccctaggacaaaatgaagccaacgataaccacataaaccaaaacatgaagcagcaaaatttacaggcgggttacttggttggtaattgagggagctcacagcgactatcttggagaagagatccagtaaatctgttgcattcaaagacggagaaaggacaggaaacagccctcttgatatagctgacatttcgaaaacatttactcaaggattacgaacatagtcaccaaagtgtaagcatttcaaagtgtgttttaactgtactatgacaagcacataccttctgcaaccgctctgtccttcccagtgacaaggacagttgcagggcaagaccaggagtcacggcaaaatggatcaggcaaatcattaaacggttgggagaacgtccttgcagcccggaaatcagcacgggggatctgaatcagggctggccactgtggcgggctgggaatcggacagctccccacctgatccagcgtcgagtactgaatgccacactctttccttacgcaccttccgttggcactggtctcgaggcagacgcaaccgcatttgtacttgggcttgtcaagctcgctgttgatgacgttctggagcacgatgagaagcacgcaaatcaggattgggaagaaagtgatgccgatgtttgtcttgaggttccgtttctgcaatgaggacaatataaaaatcaggcgctgcccatggagacgtaacgagctttggctgtttggcattgcttcatgtaaaaaaacatattataagcacttcagcacttgttaagaaaaaaaacttggccagtgaaggaataatcgtcctgccggtataatgcctaaggtcgggagagaatgacattgtaacacgagagcggataaggtacaacaaaggtagtttttaaccacactaaaaaattcgtctcccagtgaaatcgaactttgggtcttcaaggtgatatttggagcttttaaccgccaggctagagcagcacttgttgcgaaactggtatcaaatgcagagcgtgcaatgcactggataaattccaaagaataaaggaaaacgaaaatttaactagaataatctgtagcattttttgcttgcccactgggcatttatcatgctgatgtaccctttgcattcacaggagaagaaaggccaacacaccaaaggctacctacccgccttggttcacctaaaacaccacgcacacagattggacccaacccagagacagagaccgcacaagatcctctgaaatcgaaacatatgagactcgagcagctctttgctgatcaaacaggtgcttctatc

SEQ ID NO: 95906 - DNA, 495 bp, Zea Mays
aaagagtcctcaacactatttctctgtgtcactgacattcgcagttaggtccctccctttctatttcttcacaacgccggatccacgacggtggacggcgatgagccgatcttcggcgagcctgtactggccgggacacgtaaagaccggacccctagcttggtggacacctaattccacccttggtgacactatcccctcaactaattgcatgattttagcttgaaatctctctatccatggtgatagcgcaaactgaggataatgcaaggtgttcccgatgatctaacgtggtctagtccaattggctgggccgataagcatccatagcacacaagggtgctgaaacaagagcgaggagggtgtgaacggacctgcaaagagctggccacggcgcgacgttcacggtggcgtggaaacccgatttgggggaagagaggaattagagagctatggtggctaatcggaggaaggagtgggtgctctggcttcgtg

SEQ ID NO: 95907 - DNA, 760 bp, Zea Mays
ataagaggagtgttagttcatagtaatgtgttgagcatttaatcactaaaacaaccaaaaattgcctaagggcacatttccctttcaataagccattgggacccctcatgtcatggggtatctaacaatataagcccctagaggcccttgtgccccaaggcatctagcaacatatgccaccgggacccctcatgccatggagcatctagaagtatatgcccctagagcccctaacggcccaaggtttctagcgacgtaagacctcggggccgcatgtaccccaaggcacttaatgatgcatgtggtcggagactaattggccacccaaaggcaacaacgacttagtaaccacatcgagatgttgtggggctgaatggtgtggagggcccactaggatagtatgacactgagacatgggctcgatatcaatatgccttgaatattgttcaatgtgatatcttaatagataagtcttgggtttaactcattatacatgcgatggacaacgtaacagggctaacaaggcatgtagacacggaacataactagtagggcacacaacggtcctatagctcgaaaaataagtgcatgtcatacctagtagtacgatgagatataaggagcattatcggtagcctatcacatgcgaacatcataaccacaatgcaaaggtcgatgtcgtaggttttaatgcccacctaggtagtcggtatagtgggttatcataccaagggataactttgacagtggtagtgtttaa

SEQ ID NO: 95908 - DNA, 490 bp, Zea Mays
cgcgagcactccatgctaatacaataaaaccagctcagtatgcagatttcagtcctgagaaggtgagtcttgtattggtggtaccgaccatcttatttatcatgttgttatgtactccattttttttgcttttattgtatcagcatttgtccttggcatgaaatcatctggaaacatctctcaactaaaaacaatgttagggatcaatctttttactgaagtctctattcttgtctgaacattaagccagtggttttctttgaaatcataagcatggagtgcatctattttacctttttcagttctaacaaagtaaagcatagcaatgatatgccatcatccaagcacacattagagtataaatatttgatttatgattctgttataggtgaaaagggcattccttactctaataggtaacaatgacttaacaataatgataggtgaaaatggcattccttactctaaatctctaatagatttaaaatcc

SEQ ID NO: 95909 - DNA, 313 bp, Zea Mays
ctttgggttcatgcaaacaaactacccgctttctaccagcacacaagcacaaaaacaaacacaagttgcactagcggtcaaactaagaagaaccacataccacataaacatatgtctaaaggacataacaaacaaaactaaaaattgcttataggagaataatgcttcacacatttttccaattatttattatcggaataaagatgagaaaagcatgttcgttcacgatcaccaattattagaataaaggtgagggaagcatttttgtgcgcaaacaacaaacacaatgcaacaatcaggatgcatgcttgtc

SEQ ID NO: 95910 - DNA, 633 bp, Zea Mays
gctttgaactacaactctcctttcacagtgaatttttccttaaagcttatttttgctggaatttgggtgtaataacatgaccttgtaccaaattttagccactaacacttattgggtattttactgtgattttctaaagtttttggcaaaaatggtgctttctactaccactatacttgaaaaatgtcatacaacagatttctaattttttctaccttcttctttgtgcaagagcaatcattctagaatttggcaaccttttgcttaagggaaagggtggtagaaattcttggattatatgacctttttcatggggtagggggtaatgggtgttaccttacatttttaactaggtttcatatttttctctggtggtatacttcatcaatagttgggtaaaaatttatttgcctaatgttgaacagtttttggctttcttatgattcaattagaacatgggccaaaattaagtttggattgttcaacccatttattatgatgggttggggtatctactatttttgtagtggtgttatagcagttaggagtctactgaaattttcttaccatttttgaaatggtccttgtatttttaattatggcttttctggatttcttagtgcctaataaaat

SEQ ID NO: 95911 - DNA, 570 bp, Zea Mays
cgaaagcgatatcacaagagagcagagaaagcctagatgcaaaaaagcagaaactagggcacgaagcgtggaggcgggcgacagtgcagtacataggggattttcccgggccagatgccatttctaaaaagtgcccagtcatcacccagccgttatttctaaaacgctggcgtgccatgtcatcacccagccgttatttctaaaacgctggcatgccatgtcatcactcggccgttatttccaaaacagccgacgcggcccaaattaactcagctgttgtttctaaaaacgctgacgttatccgacttcactcggccactactttcaaagcgaccgacgtcgccagtaatcactcggctgttatccctaaacagtgacataaccccagaagattcaactgttacctctaaaacgccgacgttgccagtaaccgctcggccgttacttctaaaacaccgacgcggcccgctatcgctcggctatcacatctaaaagccccaacctcgctgataatcactcagccaccaccgctaaagcgctggcattatgaaggaagcagtctgaatcacg

SEQ ID NO: 95912 - DNA, 453 bp, Zea Mays
gaactatgctctagctatgcctatctgaggatccaatcattttgtagggatccataacccgcattatatatctcgacgaggttagggttacatgggaccaaacatattactattgatacgtctatatctgtggcaccgactctgactagcatgcaaacatgtgattctgttgacttatcttctctgcctgtgcggaagttagttacaaaatagtcacaccattgtctttgagctccgcattgttatcctctagtttgaacttactggttagtctacaaggcctgctcatctgacctgttgaggtcatttggaggcctgtaaactgaatctggcccatggatacctaggggatatctatccccacaaccccgtgttgagtgtagtatccattctagcgtcgtcgtgtcacccctatcgccctcacacatccactctgccagcacactcttcgcg

SEQ ID NO: 95913 - DNA, 394 bp, Zea Mays
aatcattttcctaaattctatttactaaaaacaaggctacggactactgttacaaattctaaagagtacatgggctagtttataaatatccagggcttaatcgcaattaatttacataggccgaggacagtgggttgattctgaacaagccgaggggctctttagcaatttgtacgggtcgaaggggtatcagtggatattgatcgtcagatctgaaccaatggccaagattataacgccataaatccgaacgggtacgcgataacagccgccaggttatgaattcacggttcagatgctcccacgtcactaatctaacccgggccatggatgtttcgatcaatgacccaggatcaatcgttgaaggggtatccctagatccaatatgtgccac

SEQ ID NO: 95914 - DNA, 580 bp, Zea Mays
agtgtacttcgcctgtttggttgtggaaatctttatgcaggcttaaacaatgttcaaagtactagctagtacattgattaggcgatgtagatttacacaagctgatgaacaaaaaaagtggagaaattctcatctctttctaccagtactagaaacataagttctctactaaaacatggatgtgactgcatataacacaatgtaaggaaccaaacacaactgtatcagtgcacaatgattacataaatcaatttacaatatctctgagaacaacaaatgaataattaaactaaatctagcgatggttagggtttaggggttggacctttctgacttctgtgcctccttttgttcaccatcaaggtcgtctgcgatgacccaaatccagcgatggttagggtttaggggattgcgagagcaatgtggatggggcgtgttaggtggaaggggcgagagaaatgcggatggcaatgagatagagcgggatgcggcgagtgaagtcggcgacaacgcagctcatcgacgcaatgagaggtaagggggcggcggtgaggtacctggtcgagggggtaggtcgtcg

SEQ ID NO: 95915 - DNA, 357 bp, Zea Mays
ttggtgagactttcttggttgcacaatttatgttgggtctcaaacatgatttgagggtaggagttgaggtgcagtttcctcaaactgtgtccatagctgcacaactggctttgaagcatgaaaattgacaggacagacaaacaaatgaagcaaggaagtttgttatggccaattctaatccatcactagtactaaggattctaggtagtcccaaggagatgtgtgaatggcaaaacaacttaaggagtatggaagggtcaatgcgttatattataaatgtggtgagaagtatctgcttggacttaggtcaatgtgttatattataaatgtggtgagaagtatctgcttggacttaag

SEQ ID NO: 95916 - DNA, 416 bp, Zea Mays
caacaaatatatggttttgcaaaggtagtatgtaccttgtcttgcattgtagtgccactctgacgtcttaactcaatacgtgtaagacatccacaaaacttgtttacacttttttgtatggtctcccaccggtgcataagagaatttatggtacgctttgatgaacaagtcttgtgttcatggaaataatcacagatacgagaccaataccttccacctttttgatccttgcctaccacaggatccaaactaatattcagccacgctgaaaccaaaacttcatcttcatggtcactaaaattctttgatcttttatggtttggtcttgtagaggggactgcacgattgacttgcattgattgggattgctggtcagcgtatgcgttgttattattatccaaatcttcaagattagt

SEQ ID NO: 95917 - DNA, 395 bp, Zea Mays
gcaaaagttgataggaaggctagcgacgctgaatagattcatctcacagtctatagagtgaagtctgccattcctgagaacactacgagaaacaagactttacctagggcccagagcaggtagcaaccttcgagtcatcgaagggaatatctatcataactaacaactctagtcattccagatcccacttcgccactattgctatatgttgtcgcttcacatggcgcggtcagcatgacactagtccaagaaaaatccaaggatggaaaaccacaacaatattcgatctactttgtatttgaggtcctcactaattcaaaatgcaacatgaccgagatggaaaagctagcttacgtcgtcctcatggcttcccgcaaactgtgtcactattttga

SEQ ID NO: 95918 - DNA, 402 bp, Zea Mays
gtcaacagcataatccattgaaccaaatggatacactgcttagagatagaatcgataaaatggcgtcatgattcttggaggaagagcatgagatcgaccagaattgagagatttaggcaagatcaacatccgatacttgagaacaggttataggagataaccagataacagggcagaatcaataggggatcccgagattcggacgataaagcaaacatgattcacaagaagaaggattaccagatccaggcgaaaggagaggtaggcaaacaggatcagctaggatgatcgacagaaacgctatgaagttttaggggcaaggatttatggaaagaacatggcttggtcatggtttgcgcaactagacaccaaacaacaaattttttttgacataaccacgtg

SEQ ID NO: 95919 - DNA, 424 bp, Zea Mays
gctggttttaattaaaagataaggggttcaggtgctaaaaagataggggcggacggtaggttctattatccaaaagtgtaggggctaaaccataagattcaggacctatctgtaatgatctttgaactatgataattggttggtaaaaagacattaaattagggggttatttacaaaacagacggtccggctcaggcgaagggtatcggccatcagtggccatttgcttaagatctaagtgctatgatttaaaagggcaagccggctcggctagattaatatcgattgctcgatcttgatccaacagaccagatcgtgcggctccgcggccagcgagtcaagaagaaggtgcgcagtaggggaggcatgacgtgcggcgatgcacgacagacacctcaccaaagatggctggaatgacgctgcg

SEQ ID NO: 95920 - DNA, 648 bp, Zea Mays
gcatgtcactatgagtggacccctagggtcggactcatctttttcccaagcttggtctggtgcgagtccttcagccgggtatctcgcgctgccctgagtctgccctaggctttacctcctgagtatttatatgatcttgttcacccccacatccatcggatcacaaaaccatgccaactcaaaacggctgcaccgcgtggtcaaccaaagccatcgacaggagtggtgcttggtgccgctgccatcattcatgacctgcacaatcgatcgggcgttaggaattgtgcatgcggtgatcactgggtggccatcgtagagttctctgtctcggcgagtgattactgcgggtcgctggtgctcgctgcgatcaccggattctagccgagctggtggtctagggtagccactgggaaacgatcagtggagcttgcgcctcgccgtggacccacactacatcgccagccagctcctcctacatctatggtaagacctcatcttctatgcccgccggtgtcaagtcaccgtaccttaggcatcgttgctacggctggggtttggcaagtagagagaataggaggcagcagcgtaaggttgaggacgcacgggttcggtagatcccagaaccaagggttgggattagaccttcgt

SEQ ID NO: 95921 - DNA, 467 bp, Zea Mays
ctttgtgaaaggaacgatgtagcttggggaatctttactaatgctcgtgtattcttttcctcctcgcccctattttacttggggcaaattaccgcctgcacccttgctcgaggggcggtggtgtgcgtgctggtttgtttctgacccgtcggcgagctaggcatgtttcctcgttaaatgagtcacctcgccctagcatcacgtgatagagagttgcatggccacctttatttaatcgttccattctccctgttttcctcactttgctctcggcccctcttgttgccccatctttcttgctcggtcttcttcctcgctctcgagttatccgcctgacccccctttcgaatccgcctcgcccgaccccggtctcgcatgccttggggctaatcgagggcgagttcttcccgagtgaacctttctccttgcctagggatcatttccccaacaacagttatgagatagat

SEQ ID NO: 95922 - DNA, 307 bp, Zea Mays
caaaacaccccctctaccctaatatttgataattttatacagagagaaccactcactttttaaacccccaattttgagatagagacttatacatcagtaagaagccactgtaatttttgcagaatttttggaaatttattaagctatcttgtagttcaaacccaccttaaaagcataaaggaaataagaaggaagagagggaataataaatctcactctaatgattcagctagaaaccttaataaactctcactaagacattaaaggaaaatcagtagaacaccaaaataaacttaccaattaactt

SEQ ID NO: 95923 - DNA, 682 bp, Zea Mays
cacaaagttaacagtgacttccccattgcagaatatcaagagcagcaatcctgaactggcgaccacagagattgcaaagaagctcggagaaaggtggcaaaagatgacaggtaccaccaatccagctctaacatactacctaaaagtccattatcttccacgtagatccttcctggtggtcatgtttgtttagagaaaaaaacaaaaacagacacggagagcatctggtctaaccatttccacccatttaaattttgtagcggaggagaggcagccatatgtggagcagtctcaggtcgacaagcaacgctatgcagaagagtctgcagcctaccgtggtgcagccgctcagcagggctctggtgctggatcggaatgaaggtttaatcgtctcgacagttaacttgcaaggctggatgattgagtcgtcagaataaagctggaatacccaaaaacctaagctgaatgtcatcgtttgacctgttgggttgttccggaattcaaccaggattcattctagttcatcaatgcttatattaattaggcaagcaatctggtctggaatcgatcgaggccgttccctggaaccgaacatacccctaagcaaatcctgccaggtaggacaaaatgtagcagcaggtttaaacaaatttcagagaagtacaagtattttttgcataag

SEQ ID NO: 95924 - DNA, 409 bp, Zea Mays
cacacgtacccagtgcaacatcctgtctatttcatcagtgaagtcctaggtccctcgaagaagaaataccctcaagttcagaaactattgtatgcagtacttctaactgcacgcaagctccgtcactacttcgacgatcacaaagtcatagtagtcactggatttccaataggggatattctccacaataaagaagccatcggaagaatagccaagtgggcttgtgaactgggagctcatgacattgagtttcgacctcgcactgcaatcaagactcaaacactagttgacttcgtatcaaaatggaccgagcaacaagtgccagataacccagaaactgcagaagtatggcgaatgtgtttcgacggctcgttgaagctgcagggggcaggtgcagggatcctcttca

SEQ ID NO: 95925 - DNA, 532 bp, Zea Mays
gtttgaaatcttctgaggaatgaacgaagagttttatcgttctatcgtctgatggatttgaggtcccacggctgcgccggtttatcagagagggactagaagttcgcgataaaccgatgactgaaatctcccaatcatcgatgcggtgccggggcagatgccagagccattgtagtgcatcctgccccagaacgatgggcaagtacgctgtcatgacgtcctccgttgccccagcagcccaagcggcggttgtgtagacgaccagccaacacctcgggtcttgcttgggtttctatttgtcgaggttggagactttgaaattgggaggccattggatggcccggagacgaggggtgagcgcggagaccccacacgtatcctcctgtcgatgatcatgtcgtcggtctctgggaggggagcgagtattaggtcgcctcgaccatcccggactggactattagtagaggctgctgctgagttgatcctggttgcgtggttgtgtgccggtacaccatgatctcggtcgtattcc

SEQ ID NO: 95926 - DNA, 712 bp, Zea Mays
aacttttgtacgagacgaaggccaccggcaaagagcagtatcacaacaacttcggttgttacggattcatcgctcgctctaatgcaagctacccggttccaacataccagaaaagatggcccagggcctggatggaggaatggttttatgttaaaaataatctgattgagagggaggatattaaggaaattatccagcgccccatctggtctcgcttcggcctccgaaggccgaaggtggctattgaaagtgatgtcgaagcgtgtcagaaggcttttagcaatatctgtgctttcattggcacaagggacataattcaagagcacatagcctacagagtgtggccacttgtggatagctgggagatgccaaaggagactgctgttgaatccagcaaaggtggattagttcgattgaaatataccttcatatacagagagaagttcgacgaaccaaatgatgactggttgaaatgcattgaggctaccagcgacgagttgcttgggacatataccagggccgaagatgatgccttgtcctcagccttcgggggtcggggcaagaaaagattgaacatggtttttgatgcaattggcttcatatatcctgattactactaccccttgaaaaggcaaggaaaaaaagaggaaaactgccgcttcgaccaccaccgttgtgccgaagggcaagaaaataaaggttttgacccacc

SEQ ID NO: 95927 - DNA, 514 bp, Zea Mays
ttatcccttaaatctgggtgtgacattatacaactcacttttccttatttagattacataaggaaacaacctactactatactaatctagtcatccacgtccttggctgctccagctccacttctagcttcgggagaacgatcatccgtgatgttcatggaaggaggggctccaaagagatccaactaaccataaggtcctccgccagctgctcctgatgcaccagctcccatcgccgcaacctctggtggcacgttcggatgtagctggtcatacatcacgtgcacttactcgtgcagagtattattatacgcttgcagattttttagggctacacttagctcttccacccaggctcgggcagtctcctcgcaatcccgggctatagatcgtgaatttacagcctattcaatagctctatcccgctcaacaatctctcgctgcaaatggtcaacctctgctaaaaactcagcgatgtggcggctaacacgcgcatactccctgcttccatgcc

SEQ ID NO: 95928 - DNA, 612 bp, Zea Mays
ttcaccgtgggcgggtcgatacactgcatgactcgaggtaatctctctctctctctataggttcgattttgtccctatatcatgtagatacggtcggttggaagattggtggtccggagcgccggtacgactatctccggtgtgctcgccagcgatgggaggcatggtgccaccgcccagtcgctgtggagaaagaagatggctactaaccattgatcggctaccgtacgactatgattaagacattgtgcatcgcttggatgttttaaatctgtgttgttcatatggaaacagagggctcatgttatatgaggtgtggaaggccatcaaatgtagatcacagatccctcataatatgttggtttgtgcgaggggggggatggatctaatccggaccaccgaatcacgatcggacgactaaaaaacaaacataccccttcggtcgaaccttttgcatgaagacctcaggagttacaaaataaactcaccatccattttcagtagtaaagaaaataagaataaatgaggactttgcagatacaccctctagagctaattcttagtataaaataatatttaatgacctaaaattctattctatccataactttc

SEQ ID NO: 95929 - DNA, 462 bp, Zea Mays
cacaaatataaatgtgatatctatagcttaaatataatttaacctaagaatgaaaatgatgatgcatgtaggcacaacaagacatatttacaaggtgtaaacagcttcttggcttttgcatttagaaattgagctgtagggaacaagattttatgcccctgtagaaagtgtgttaactcattttggaaagaggcaagtgaaatacgtgagcacttaatatgcgatggttttctaaaagggtacaccatatggaacttgcatggggagactaactctgttgtgaatcatggaaactatgatactaatgaggttatggaagaacccaatgaagatgatgacatatctgatttgcttagagacttagctgctggtttagatgatcgaggagattttgaggatacaagctcttttgttgacccctgtgaggagctagttgctattcaaaagttggctgcacaaaat

SEQ ID NO: 95930 - DNA, 413 bp, Zea Mays
ttagaattgatggtcaatgccaatatatcattttctgcgtgaaattatgttgtattgagatttgatttaaacattgagttgtgattatgcagatgtaaatgtttacgttattcattgtatacattatttcagcagaggcttaatgtgagatgcaatccccaagatgttatagtaagcattcagattttaaatgacagacaacgtcaagctattgcatggagggggttctctagtatacttgatatgagagttgacgcgcttggcagtagatctcatttagcttggctgatggaaaagcttgaccataatgatatgacaattcgagccgccccagggaaggagctaaaaattacaaaggagacggtgcaccttattttggggttaccaaatgctaggggaggaaaggcattaag

SEQ ID NO: 95931 - DNA, 500 bp, Zea Mays
ttcaggcggccctcaccaccaaaccatcagcgacttcttctgcgcaggcgaattctaagcctgaggaagatctcacaatacccgcaaatgaagctcaagtcgtgacctctatgcggccaactaaagaaactaagagaatcaatcttgggttcgccgacgagcgcaaaactgctatcatcagttccagtctggatgattaataggaaggcgcgctcgtccagtttctgcaagataactgagacgtattcgcatggcaacctacaaatatgctgggagtcccaagagaactggccgaccacaaattgaaggtctacccccaggcgaggccgatccgatagaaattacgtcgcttcacgcccgacaagagagaagccatccgtgctgagttggctcgcttggtcgcggcaggatttattagagaggtgttgcatcctgagtgactagctaatcctgttcttgtactcaaaaagaatcaagtggattggcgcatgtgcgtcgac

SEQ ID NO: 95932 - DNA, 354 bp, Zea Mays
gcttcgcattccgaaaggacacgaaggcccccgtgataggctaccgcaccaaatggtcgactggatggacgagggaatggttttatgtgaaagcagatgagaagaaaagggaaaaacttatgagcatggtgatgagtccgctgagattaaacttcagcatgactcggtccctatgcaatatgcagttggggtctccttaccagctagctgaagtggagttcagggtcgtggctgagcatatcagcactagagatttagtacaagaatatctggcaaaccgaacatttccgacctctagtggttggggaatgccgaagaagaaagaagaggggaagaagtatgagcttgtccggc

SEQ ID NO: 95933 - DNA, 307 bp, Zea Mays
cgggcaaacacaaccttaccaagggtccagggtagaacgacaagttttaccatggcatagtagcccttctcaaagaagctaccggtagaacgacccctgccttggcctataaaaggaggaggccagccacgaaacgaggggcaagggtcatgagaggacactcaatggaagacaaccactcctatttgacgagacctaaagacccggaggccagagccaaggcgtgacgtccaacgcttagcttagaactccagtcatgtagtctgtaggtccacccatgcataagagacttgtgagatcctccctc

SEQ ID NO: 95934 - DNA, 471 bp, Zea Mays
caaaatccatgatttttgccctcccaccagggctgaggccaaagatcttcacatttctgagaatgatgagtactggaaatccacaaattttcataagtactacaggtacctcaactctcttttcaggatgactctcattcccaaggggggaaatcaaatgaacatcctgggtgaaagcaaagttcttctctccttcatgaagcccaatagcagtgagagcttgaatgtgtttgatatgatttggcaagaaattattcatgcctcttgctttcctctcaagggatgtctgcatgcccccttcatcatgaaaatgattgaggtggtcacccaattcagatataaaaagggcaccagacatccttcctatacccctttctggattgaccccaataatctagcagggcggttgaggaaggctcctgcaagctctcgtgagcaaactacagctggtccctctcgtccttctcctgg

SEQ ID NO: 95935 - DNA, 530 bp, Zea Mays
cctggcgcgtaccctgccccatatatatggcccacttccccctcatccatctcattcaacctctactgtgtgccaccactaaatagccttcgccacgccacgttctagagtgccggcgagatgtagagattactgtcgccgtggtaccatgcccacgattccggtctgcacccgaggtatggccgaaagagttcgctagggcataaggaaaccatgcacgaagtctctgcaaccggtggttgactgggtcatttgggattcctcattagagacccgtcgatccaccaaatcatggtgtcgtgcggtctacacactttggcgcccaattgaaggtgagaaccaccctaataatggcaagttcaccgctataccacgtagcacccgatcaattcggggtaagggtatggtttgggacttcgccggcgtggtgatgtcatggggggcagggccaccgctcgacttagactgaggagggggatgattcgatcaccgctgattgcaaaatcgacggttgagattgtaacagctta

SEQ ID NO: 95936 - DNA, 289 bp, Zea Mays
gtcggggaccagctatacaagaaggggatcagtcaacccatgctaaaatgcgtcaccgaaaccgaaggcattcagatcctacgtgaagtccacagcggaacttgcggctcccactcagggcccagggcccttgctgccaaggtgatacgtcaaggattttactggcccgctataatctgcacagtgaatcgagtcacgaggtcgtgcgaagcttgccagaagttttctccccgctcgggcaacccttcgtagttcaccaagctgattgcccacacatggccacttcaac

SEQ ID NO: 95937 - DNA, 616 bp, Zea Mays
tcatgtttcccatctatactcttcttttctgatttccaacgtgagacactacatactgagcatgaatcaagtttttgatgctccttccaaaatagaatgcaatcattttcacatgcatgaattgtagtgtacccgactcctacagatttgaccactttctttgcttcatgaaagtttctaggaagtgtcgaacccttaggtagtgcatcaacaagtaaatctaccaacaaatcaaaacttctatctgtccatcctccaagaagtttgatgtgaagcaaacaaactaggaaacgtagctttgagtagttttggcaacccggatataattcttgactattgtcttctgctagcttacgaatggctaccgtgtcttcattaggttcctcaaaagacccatcatcctccatatcccctccatcatctaaaccacaagctaaatcctttaacaacttagattcgagtaggatgcttgctaaactcataatcattgttaccatgattcacaaaagaggacgaagcttctccatgtaaggtccatgttgtgtacccttttagaaaaccatcacatatcaagtgttctcgcacttcaccggcctctctccaaaatgagttaaca

SEQ ID NO: 95938 - DNA, 1131 bp, Zea Mays
cttttccgagttacggtctggcaccttgcgcaagacttatcgagccaacccatacttctgctgatgtatccccttgaattctgaaccctagttctcactttttccaccgccgctttcctgtttcctgagcacttgagtccaccggcctttcttgagagatcacgatggcctccaagaggaagagatagagtgttgttgttccaattatcccgccaatcgatcttaacagccaacttccattcaccggcaaccacatgtctgttgtttccgaggctgaccttctgcacctcgtcgaaactggtgttcttccaccaaaagagttgtgttcctagcgaatatggcgtggggttaccgttccgatagaggatacccacgaagttgtcatcttcgtgccatttctcaaccgaggactagccctgctagcatctcccttcttccgcggccttgtcaatttttatgctctgaatcttacacacttaaaccccaattctgttcttcaaattgttgtgtttgttcacctctgtgaagctttccttggaattcttcctcattttgggctttggaagtatctctaccacaatcagcgcgggatggctggaggacagcatcagcttgttggcggtgctagcctagaacttcgcagaggcaggaaggtcgaatatcttgatatccctctgaaggacagtattaagggatggtgccttgagtggtttaccatggagaacaacaacaagtccctccctccttgatcggggagacaacctgacgtccgaacgcctaactggacagagtcccctacagattcagagctagctgagtctagagtggtgcttgctgaaatatgcacattgaaagatagaggcttgactgttcaagctattgtcgctgatttcgtcttcaaaaatattcaacctcggaaagatagagttaacccaacctatttgtatactgggatcaatgaccctacccgatttaccaacaggtggattcctgaagaggacatgatgagccgaattgacttgatgctgagagacaagatttcgaatgttggtgctcctctatcttattctacctggaatctacctccatagagccccttttctgagttcatttccaaccctcctgttcaag

SEQ ID NO: 95939 - DNA, 706 bp, Zea Mays
tgtctttggtagacagtcatgggtacaaggacaataccaccgtaaagactcggcaaagggctcttggtgtgctgctctactatctaccacggcgtagaggccgcccggttgtcgggagatgaccacgacaaacaccctaaatacgacaagggaaacgagggttttctagaggttcgggcagccaagatgtaataccctaagacctcctttggtggattggattgcaagagattggctacgtcctaatacagaaggctagttagagacaagagtgaaaatatgtggggtcgtctaagaagacaagccctagagtaacttgggcgtgttcggttctgttgtgttaaatctagttttcctccttaagggaggccccctctcccttttatagaccaagggagtgagggtcacatctggtaggtggggccaaccctggcgcatgtcccatgctgcatttatggaaaccatgctgatgtcagcctgatgtcctgtggaaatgtcagtggcgttgtaggtacatgccctacctgtaccggatatcccgagtgccatgtcgagcatgtgcctgtatgccgaaaacctagaacatggcaggaggagcaggctctacatgccaccacatgagacctgagagttgtatcgtacgtcacgaatgaccggggtggttagacatcgtgatgtataaagtagatgtcccatgatgtgatag

SEQ ID NO: 95940 - DNA, 516 bp, Zea Mays
cacatggaaccttatgtgttcttctggcagacatcgcctctactgatggacatctctaaattagctcacaatgatacatgctatatccactagagaaaccacatcctgaggtactcgcctttgcttggaactaccttatactatcgctgatatggataggagttacatgcttctctactctttaaagtctttcgctccaaatctcgggacgagattcttttaagggggagggttgtaacaccccaagtgtttaacaccagtttaacagtgagtatgaacttaagcatagaatatgggtgagaataatggtctctatgtcctaaacatctttgcccatcccgattttcgatatcgcatctatccctatttaccagaactgcccaagatgtttttgtgcagctcggtgttaaactgctatctgcgatatcgagccttgtgccggttcagttacttgtctaaagagaatatgaattcggaagcttgacccactcttatgattttatcccaaacaaatta

SEQ ID NO: 95941 - DNA, 302 bp, Zea Mays
acatgaagaggctagagagcagcaaagttgtctagaagaggagctctgtgatcgccaaaccccgtgggaagggaggctgtgcaggggaggagtcgagtgttggagcaggagagaagggaagggaagagaaaaggagatgagctgtcctttgtgatttgaagaaaccagtcctgctgttggtaccatgggaatggaaggaagcctggtttgaacgagtttgaaggagctagaggctgcaaaagaggtagcaattaaacaacatgacggtggtaagactatctacaacagactacatatcatac

SEQ ID NO: 95942 - DNA, 428 bp, Zea Mays
gctgcgagaacagccggggcagaggtcgatgtaggggaagcatgcaagcgtagcgtgtagaggggcccagggctgtcacaccgagcgagaagggtcctggtggcaagatccttcacagacagaccaaacgggtcaaattccatagagcaagaattgtcagtagtgaactgacgaacagaaagaagattttgcacgatgttgggggcgacaaggacgttggttaaacggaagggaccgggaagaaccgcggcacccacggaggtgacgggtagggcagagccgttttccacaacgatggaagaaggaagggaggggtgggggagaggtggaagacagtatacctgcgtccgaggtggtgtgacaggaggcgccggagtccggcatggagagcgcactggaggggaacccgggggagaggactgcgacgg

SEQ ID NO: 95943 - DNA, 359 bp, Zea Mays
gcctgtcaccgaacattatacatcaatgttcgagacagggcacttccctaacctgctgcaggatgttatgcatgcgttgggaacctacatccgacccctgtatgagacaaggcgagtgtacgagccccctcgggctttctactacatcactcgcattcatgtcagggtgatggatgcaggtgatagagggttcgggactctgtcagctcatgagtctcttacgccgctatccacctacgctgcttcggtcagcgatgctgctaggcgaactttgtggtccctcagccacacttaccggcagcagctgcacaatacgaagtacatgcatcttcctctgtgtcttcgtggagaaagccaaa

SEQ ID NO: 95944 - DNA, 407 bp, Zea Mays
aacccttaccaacttcaacaattcattttaattcaatggtgaaacatccacaccagatgaatgtataagaagatcaaacacctcacctcaaagcaccacgaaactagttctattgaaacaaaactcctaatcttcctaaaccttgttcttgccatcatgaaaagataatcatgtaatctaacattctttgcaccccacaaaagggagaaagtctacagaactaatggagcaataaagctgacaagaagctaataacattctgcgcggcacagttcatcgaagaaatgccaaaaactccacaaagagcactgacagcacaacaacaacacaacacttgcttaaccaatgtcactatacttcatccaacaactcaactaagaaaaatatccaaactagtaaggttaacc

SEQ ID NO: 95945 - DNA, 473 bp, Zea Mays
agggatgctatatgggtggtagtggatcgcttgactaagtctgcgcattttattcccatgaagaccacaaattcagcttcagatttggttcccttgtatatgaaggaagtagtcaggcttcacggggtacctaagtctattgtttctgatcgagactccaaatttgtatccaaattctggtagagtcttcacagtgtattgggcaccaagctttcacttagtgtcgcttttcaccctcagactgatggtcagtcagagcgaacgatccaaaccttggaagatatgttgcgtgcttgtgttctgtcatggaagggtagctgggaggatcatcttgcattggcagagtttgcttataacaacagctaccaggctagcatcaagatggcaccatttgaggctttgtatggcaggcggtgtatctcccctctgtgctgggagactttgggagagagatccctagttggtcctgattg

SEQ ID NO: 95946 - DNA, 313 bp, Zea Mays
ttggcatcatggcatacccagccgtggagcatgagttcaagaattacactggggattcaagaagcaaagccatgggaccacaaagagcaatgtcagaggaaagcttaccaacagatggttgatccggcaactgactgacaatatcgcagatcagttcaagaccaccctcgttgttgtcttctccacatttgcccaacattagcacctcagtgttacacttgaagcagtatcctctttctggatcactgtacagaacggcaaaccagtgcttcttcttcagggcgtgtgatcgagagtgcccaaacgggtaagc

SEQ ID NO: 95947 - DNA, 757 bp, Zea Mays
caagatactacttgttaagaaaatgtcatggtaaagtgatcattccttgtaggtaatattagaaataaatcatctatattttagacttaggcacatattaggtaatcaaattgtaccacttgtaagtactaaatagcatgtgttcaagttgatatcatttgttaggattttaaagagctttatgccatgctcctaaacattttaaaccatgtaggtttgcttcaagggtaactgagcaatcttaccataagatatacctaagtgtacgcgtgctaaaaatttcaaactttgacatgcatagcaaaacttggtataaatggtaaactatataccaagtgtaagaaagtaaattcttagaaatcattacaagggtaaaatctagtcacctacatggtttgacaattttggtccattaacacgaactcgcatgacttacaccttaatatttgatcaccatctgtagactccacacctgtgcaccaaaaagccaagagtcgtgttgcacaaacatactcacaccccatttagtccacatgactcaacccaagatgctacacttgttgacaatcattcatcataacccgaaccacaagggcacatattaaccttgtgttcgcactactgatatatacattgtccttccatgaccctttggaatttgctctatttgtagcatgaaaatctgctttgagtccttggtttggttgtggctgcattttcactctattggtctgcttttatctatttgacctctatt

SEQ ID NO: 95948 - DNA, 544 bp, Zea Mays
ggagaagaaggagtcaggtaagcttagagtatgcattgattttcgcaatttaaatagagcaactcctaaagatgagtatcccatgcccatagccgacacattaatcaataatgcatcagggaatagaattattagctttcttgatggtaatgccagatataatcagattttcatggccgaagaagatgcgtctaaaacaacctttatatgtccaagcttcattggtttatttgagtgggttgtcatgacatttggtctgaaaaatgctgctgctacttatcagagggctatgaatttgatctttcacgagctgttgggaaacactgtggaattctagattgctgatattgtagtaaaatctgttgagtttagttctcatttagctgatttgcgcaaaacctttgataagatgcgtcggtatggtttgaaaatgaacccacgtaaatgtgcttttggagtgtcggctggtaagtttttaggattttccatccatgaacatggtatagagatagaccccgatcgaatcaagtctattcggaatgtg

SEQ ID NO: 95949 - DNA, 357 bp, Zea Mays
cacaactatgccagggacttgggcttcgggtggattccttcctttgagttgagcttcgagggctgcaatcctaacatgtgattcttcaagttctccatgtacccttgaaatatccggggtagcactgtccaagttagtgttaagacctgccaccacacctacaatggtgatgaggcgatcttttctagcttcacctggaacaacactggtctagctttctccatgaagacgtagaggaagatgtctgtacctcatgtcatgcagctgctaccgataagtgtggctaagagaccacagagctcttctagcagcattgctgaccgaagcagcgtagctagatagtggcgtaagagactc

SEQ ID NO: 95950 - DNA, 351 bp, Zea Mays
gttcggatcagattgccaggttcagttcatctcgccgccgttgtgattcatgctctgtggggtgcagataactcataagggtaagaaatatcgcatcgtggatgaactaacgccactgttctgctccggtcgccgtacccgccttagtcacgaccgcttcggataaactcacctgagttagccacctcgcgaccttgcgccacatgctttggtgctttaaccacgtcgcagtgagtcaccttagcccacccgttcattgtcggtaagcttgccacggtgaacgccacgaattgcttgcgccagtaacctcttccctctccggccgccaccgcgccaactccaaatcacgag

SEQ ID NO: 95951 - DNA, 285 bp, Zea Mays
caaaatcctcggtttttgtgtcataattctctgtatatgtatttattcacatttcatatacttatgactatgtgactaatacgtgctcacctcttctgtcatttcagtgatctcgcctgcccgtgagcccgtctcctgtcctgcctggattctctctctcgtgaggtttccaggtagttatccgttcttttataatcttagcagctgctatctctcgtgcttagtttttcactctcctatgcaacccttaggtcaagatggtgcgcatgaagaatgtgtcagtgc

SEQ ID NO: 95952 - DNA, 339 bp, Zea Mays
attcatttgaacaagaattggacaagtttgtaaaatttggtctgctgacttacgcaccggaccaagtatgcagagaagatcgagacttgagtttttcccaattggtgtgctaaccgatccggagactatctaggtcgtttacgcgcagaggatgtaaaatggattctcgagcaatggaggatcggaccggtatagtgtgcatcggacaagtcaagatgcaacgactattttacagatcaacgatcatctgctgatgtggcaccgacgtggcaggtccgatggctcactggaccgattattgtgacaaccacccgtcagaatggtaacctgccaagtcag

SEQ ID NO: 95953 - DNA, 384 bp, Zea Mays
tagaataagtgtttggcaaaagataactgtgggatcgttgatatgcggtgcagatctaatcggggatacctcctggatgagttaatccgggccgtaggtttaatcggacggttcggaatgcgttaggcttcataaaatctaaagcctagactcctgatccgatgatggcgatcgtgtaccgatttggtcctctctagatctaatcctgggcacacatcccatatccaacaaccgatatcgcgccataccccttcgctgcgcatgttttgcagaagaccccttatggttttagagaataaaacccaccgtccatagtagtggcgcgctgagtcttagagacttttgcaccagacacccctatgttcctgtttaattgacgcccag

SEQ ID NO: 95954 - DNA, 662 bp, Zea Mays
ggagaggcctggtgtggcttctagaggccacatagctgcatgggctgatgacgtgcagtgaggaggattttctagaaatgatctgtattctggataaaagggagatgaaaatggttgataaatcaaagaagaagctagtgcgtggaggggataaagcttacggtacaaaatgcttgaacggcggtgagatagtaaaagaggattttccctttattattaaagataaagaaacacatttttacacgtattttgattttaggattgagtttgagaggtttaaatggaccaaattaaaatgctacacaggctaagatacgattttccacatctatgaatagagaagcaattattggggtttggttctgagtaccctggtctcgtttattttgtatcaaaaaccttagtcatcgaattctaataaatttatttgggacaagatcacagtacttagttgatttttaaacaggcaccaaactcaataatttccgagacaactaaactccaaacttcatgaaacattttggatagttctgatagacagagatgaatgcgataacgaaatcatgataagcgaaaataatcaggacatagatactattattctcaacgatatccctcgcttaagcccatactcgctgtcgaacgagaaataaacacctggg

SEQ ID NO: 95955 - DNA, 502 bp, Zea Mays
gcatctacatcaaattccccacaaattttgtatacaatttataataaaatcccaacatctaattagcccaaaacagtcctcaagataaaccctgtaatctgttttttctcttttggacagcgacatacccggattcaaacagcgatatcttttaacatataatttcaaatcaagcgcataagtactcattggaaagataagacaaagccctacatgattatcatactggttatcactaattacccacgaaaaattcccagaaactgctaatactactgctgttcacccacctgaaaaatctgtttttttggacagcaacatatccggattcaaacaatgatatctcctaaattataactccaaatcgagcgcataagtactcgttggaaaggtatgacaaagctctacatgattatcccactgattaccactaattaacccacgaaaattctcagaaatccttagaactactgctgtccacccactcacaaaattcctcgac

SEQ ID NO: 95956 - DNA, 673 bp, Zea Mays
tagggatgttgaggatgatgaaaagaagcaggagctctttctggacggtttaattggacccttgcaatatcaactggtatcgcacacattcccgtccttctagaggctacttgacaaagctattgctgtggaaaacaagaggagtatgtttggagagaaaagaagggctgctaaccaagggcaggctggaagtagttcccgtcctcgctatactaccactccaagtacaccatctggtggcagttccggacgaaaaactcaacgggcaccaactgctcctccgcaagcaagcaccccagcaggacctgttgctcctaacacatccaccaacagggcatgcttcagtgtggacaaccgggacactacgccaactactgtcccaacagggctgcctacactacaccagctccaatgaagcaaggtcaggcttcggcaggaaagagtcagcccctatctatcaaccggggacaaagcccatcatgcagaagtagaagctgaaccaggtgaacttgaaattcaagaagaagatctagttgaagatgaagtagtcggtgaagaagtcaacgaacaacaagaatagagataaacataaatgtagatacatatgtatattgtactttttgtaagacctaaaattagtttagccagtagttcgtattttactattttagga

SEQ ID NO: 95957 - DNA, 280 bp, Zea Mays
ttttggagaaagaggcttccaaacttggtctgttagacaaaccgaatggtgttcagacatgaatagtcaactgaagaagatccccctcgccaccgttgtgtcttgcaccgtgatccgcactcaacgccatgacttgcacaaggctaaggacgacgtctacatggtgagtaaaaaatcagcggaagggtgaaaagatcatggggggttgaattggggctctgcgatgcagtgcccacttgccggcgatgtagccgagcagccgtcaccttggtggctgcct

SEQ ID NO: 95958 - DNA, 574 bp, Zea Mays
atgcccttgaccataaccttcttgccttttgggatttattcctcgtccatcattaaatttctaccatttggcaatccttgttcctccgttattgacatacttgtatccctgaattctttaacactcttgtttcaaatactaatgcctacttaaacatttccgtttatatgcccatgaccttctggtctttggaaatcctttcctcttctgttgttaagtcgctatctttcggcaattccttgtctcttggtattggtatgctcatcttcttgaaatctttcatactctcatctttttatgcttacctttataccccaaggtctgtttaagatatttcatttttacatgcccttgaccacccttgtttttcaatgatccatgagcggttattttattttgcacatccttggtgatctcgttgttcctttgtaacatccctcggtaatgaaatttaacttcaactcttctgttggaacctcacttatcttatccttgattgttttctccaccttgccatttggtgagtcgtcccttgactctgtccatggattatgcttttcatcgttctcacatt

SEQ ID NO: 95959 - DNA, 377 bp, Zea Mays
attttgttccattaaaatatgatagtttatttaacttgtgagctagcccgttaacaaaccaagctagctcgataatgaaccgagctagaatatcagttcagcccgtgtcagcaacagtacaaggaacacattgagaagctgaggatggtgcacaacgtgaggaaccagaagaagctgatgaaatagaaaacaggggcacggagctgcaactcacgtaaccaggctccaatgggccatgtaatgcgtcatgggccgagtcgtgcaactatataggagcagtactgtaagagaaaagggtatgaaagaaatagacaataccagaaaaaagccttcgtgctcccaccatcttctccgacttctctatctctttccccttc

SEQ ID NO: 95960 - DNA, 383 bp, Zea Mays
caaagttgaagaccaatcataggagaacaactttgtttaagggttcaagccatgatcctatgagaaatttggagaaaaacccaatcaaagtttgactgtcaggctagtttcattctgaaattcagaacttgagtgaaaccgagctagctttggacttggatttaaacatgatacaatgcaagtttgggtatgattcccataacaactttgtagatggtatattgctctacaaatttgttgcagagtgtggatcacgttgccatagaaaatcgggagaaaatgaagctccaatatgctctgtcagtcgctctgaataagtggttcccatggtacagtgcccaccggataaggtcgccagcaaacccaccgctggtggctttccg

SEQ ID NO: 95961 - DNA, 401 bp, Zea Mays
gccgtggtggtttttgctctaaagtcgtggaggcattacctttatggcgaggcttgtgacattttcatcgatcacaaaagtctcaagtatatttttactcagaaggagctgaatttgcggcagcgtcggtggctagaattgattaaagactatgataattgtccattcattatcacccggggaaggctaatgtggtggcggatgcccttagcaggtccggggttccaaaggtggccttgccattgatcgctgatctggaccgtttggggatcgctttgtgttatgtcggcactgctagcgaggagactcggatgcttattcaatcctctctcatggagagggtgcgtgcggctcagcagcaggatcgtcttttgcaggaagctcgaaagagggttggtgat

SEQ ID NO: 95962 - DNA, 853 bp, Zea Mays
gttttgttaatggagactgacctgttcttagtcagaataaggagaaaaggatgactgaagaggggaagatcagtcaagtcatgtagattcaaaagtgcagaaatatctatccctgatctttttcccttgctgtgtcttacattggaatagagtgaagatagagatgaggagatggcagggatgttcagaactttggtcatcactgaaatatcaccaagtctgaaatatctactatagtgccatcttatctccctacacccccttgccatggataaactcacccttgccttgctatgctcaaggaactggcgtgggtcttaaggattgagccacgcctccacatccatgcactctctgacgtgcccaaagttcttgctgtaatcccaagaagtcagccatcccttgatcttttcactgcctatttaagagtaaccgaggggatgaaccaggagtaaaggagagatccttacctctgtcgtcaaccacggtgtgtagcttcaacgtagttttgttgccttcctttccacaaactataccttggacgctcccaaattccttggtcaagtgactcaacgtgtatggtgaccacgtcgccgatgcctcaacctcacatggccaggcgactacggtacggtacgacgcatattaatcaatgttctagtgtccttataggctagtgaagctcaccgaggtattcgtttagtatttacggtcatagtttggttggaacacgggctcgacgccacataaactgctccggtgtcaacccaccaaaactcagttggtccgatgccgattcatgtaagcgtcgcgttgtccgtgtcctagtagtgctccatgtgcccttaatttg

SEQ ID NO: 95963 - DNA, 581 bp, Zea Mays
caaaatccgaggccgggggcacggcataattagctctggttttatttattgattattaggagagtcctttgttggtttctcggttgtctcggtatgtcacaggctgagcttaggtgatggaaagatgcccccctctccctacgactaccaacccatatacccacccatccatccatggaacgacgactgactctagttttaacttgccagcacacgctgtgttcttcggcttcactgacatgtgctgtgggtggggcgtgtaactaccgtttgcagagcgatctctggtaggagcatgtaactagcgtgcgtacgtgacgctgtcatgcctagctgctccttggccagcaaacgtactacacaccggagtatacgccaaatcgacatctactgtatcagtcagtcagtcagtttcatcatgcgagacgccggtcctggtcatcctcatcatcctcatgcaatgcatgcaccgtggacggaccgtccaaacgaaagaccgcagccagcgcggtccagacggatccctgcccccctgccagcagagagacgcgtacgccaaggcttcgacgaaccgtcctcgg

SEQ ID NO: 95964 - DNA, 581 bp, Zea Mays
aggatctgaagcattgattttgatgaatgaagccgatgctgctctcaagtctatactttagtgaagaaattggccaactgcagctcagaaggcacgtagtgaagagcaaatgttttctgatgacaacgaggcagagtaaagaaggcatctacaccaatatgtttagtaagttcatgcttcataggatcattggcaacttgtataggtcctgcattatcacaacaaagaggtgttgtgacatcacaagaaatcccaaaatcatccaacaaccatcaaaccatacaatctctgaagtagtagtggcaagttcttgaagttctgcccccgtactagagcgagaaacatttggctgcttcttagacttccatgcaataggagaggagccaagaacaatttgttgggtcactcgcccaagtggagtccgagtaagcatggagccaaagcagactattacaagcatagaataaacaacgagataatgccccgtaccataacacacaaagtaattgtctgaaatgaacagtagggccactcacaaactggctgaaaatatatactgtatgataaataagactccaaaa

SEQ ID NO: 95965 - DNA, 370 bp, Zea Mays
gacgtactcgaagaagagcgactgaatacggtgattcaatcagcgcgataccagcaaactctgaggcgctatcatgataaggccatacagcgtcgatccttcgcagtgggagatctcgtcctccgccgaattctaacgggggagggacggcataaattatcacctctatgggaaggaccattcatagtagcagaagtcactcggccgggatcatatcgcctcactcagatggacggaacagaaattgggaactcatggaacatagaacatctcaggaagttctacccgtagctacatcacggaggatctcggaacgacgatgtattctgtaaattgagaaaaatatcatcaataaaaaggtatcaaaggc

SEQ ID NO: 95966 - DNA, 503 bp, Zea Mays
ccacagacctggaggtggctgaggcaggggctctacttgctgaggttggattgttgaaagagaggggtctgactgcagaagctgtggtcgctgatttcattttcaagaacattcagccactaaaagacagagcatacccgacttatctgtatcgaggcctcgctgattcgacctgggttaccaacagaagaattcctgctgtggatttggtcagccggctcgagatgatactcagaggcaaggtgtcgaacattggtgctcatgttgcatactcagcctggaatctgtctccttccaaggcctttaccagttttgtgtcaaatcctcctgctggtgatagcggtttgggccttagagtgcgaccctctcccgaagaggttagtgctttggttgcctcacttggtgaaatccctggcggcgagaggcaggttcatttcgaggtacctttgaatccaagtgatgcagagataagtgccatgctggatatgttggctgaagattcc

SEQ ID NO: 95967 - DNA, 345 bp, Zea Mays
catgggggcattgtgcgcttggtctatcacatttcatacgttggtccggctgcgccttgtagttggtctatgcgcggacagtttcttggtgtagacttttgcacggatgtaacgctttgcgttttggcgcgcttgttgacctagtccggctgcacccttaggcgacttttgcgcggatagtctttttaggaagacttcgattttgcgcgcttgttgtgctagtccggctgcacccttaggcgacttttgcacggatggtctttttgaagaagacttcgattttgcgcacttgttgtgctagtccggctgcacccttaggcgacttttgcgcggatagtcttttta

SEQ ID NO: 95968 - DNA, 360 bp, Zea Mays
gtggaagatgaacctgaagtagttgttagtgaagttcctcttgatcaagaggatgatgatgaagggcaaattcaaagacaaccatcagtgcctcatcctcgggttcaccataccatccagagagatcatccagtggacaacattcttggcagcatcaaaagaggggtaataactagatcccatttagcaaaattttgtgaattttactcgtttgtttcctgtcttgagccacttaaggttgaagaagcactgggtgatccggattggataattgcaatgcaagaggagctaaataacttcactcggaattaagtctggtccttagttgaaagacctaagcaaaatgtgattggaaccaag

SEQ ID NO: 95969 - DNA, 545 bp, Zea Mays
ataaaaacagaagaacccagggggttcggtatacaaatctctaagactcagggcgcccaaatacgggcggtgggttgattcctaggtttgccaaggtcctatctgcaaaactgcgcccgcgaaggggtatccgcagatatgggccgtccgatcaagagctagcggctccgattagatcgatgtgaattataatcggtgatgcgttcacaatcgttggatcagcaacccgcgttctggattcaaagtaatccagaataccccgtcgcccgtacgattcccatcctacggctctaatatcatatcgcgaatgggtaagctatcatctaatctccaccctccatcaacagatcgacagcggccgtctcttcttcctccctgcgcactacaggacagcaccagcccacccgaacggcggcgtccaccggcgagcgcgctacttaggcagacactaccccaaatccaaattggattgcgctgcacactgagaaggacatggcgaaggtagtagtggagttctcaccagtcgagatggcatgcaaggatcc

SEQ ID NO: 95970 - DNA, 674 bp, Zea Mays
ttgaagaacatatttggggtttaaatgggtaagatttagagaataaaagtcaagaaggtcgtggaagaaaggagaagctggcagggctagtccccggatgagaaatggcatgaagataacagccttgtgggtatcctctgtcggaacagtaacccacaccagattcgccaggagcacaattcttttggcggaagaacaccaatttcaacgaggtgcagaaggtcagcttcggaaataacagacatgtggttacaggcgaatgggagttggctgttgggatcgattggcaggatgatcggaatagcaatactctgtttcctcttcttgggcgccattgtggtctctcaaacgatgtgggcgaattcaggaacttcagaaattggaaagaggtagaggaaaaagcgagaactagggttcagaactcaagcggggacgtcagcagaagtatgggttggcgtgttaagtcgggcgcaaaacggcaggccgataactcgggaaaagttgggattgcaggaaagcaaacatcactcaggcattacctccaaaatgctaatgagacatcaaatgcatgaatagagcgtgcaacaacagatcaacagggaactgggtcttcattcacatggggagatcagtacaaacatgagatcgactcatcatgtcacacccgggcttta

SEQ ID NO: 95971 - DNA, 526 bp, Zea Mays
catcgctttactatgtcagagcttgaccatcatagggatgagctgagggtttcctagactgaagtgtcgtggcttaataagttactgtcttcaaaaaattctatcctcaaagagttgtgtgcctcaaagaaacttgtttagcaggagttggaaattgctcatcgtgacattaaggtcttagaggataaccatggtatcatgaaagcaatgtgtgataaagcgatggacaaagttgttcgtgttggtcgaatcttgatgaaaagacttggtgttgtggtgcctaaggacattgttgctgaggttcttgctgcgtccgctagtgtgagtaaacctccttcctctggtgatcctgctggaaaggcccccatcgaaaatgctcctgcacaataattgtgtaacaaagacaaattttgattcgttcgaacagaaaacacttttcattgagttggtatttcttgttgagatggtgcatcatagagttcatgtatgcgtgagcatgttgtgtcggcttaagtcgattattccg

SEQ ID NO: 95972 - DNA, 846 bp, Zea Mays
ccttaaaagaaaatacctcttaccccaagaaaaatcttctctcctttcccccgatattaacagacccttcttttcctattccagatggaagactctctggtcattaggacatcctactgctcagaggtggagggattcccacatctgttgcgaagttgtgcgcttcgcatggggatccgcaagaagccagaatatgtctggaaggagtatctcgataatggaatggagaagcgctctatggtagtctacctgggagaaagccgaaactaaccgaaccacccttctttccaagtcactttcaccggacaccgcttcccagatatttgctaaaatgttgcccgaaaagccctccgacaactatgccagaactacagcagggtggtctttgaaacccccctttgctactttccacccagcaaaaaaaacccccgcctggaggaaaagacttcaggccctgtcaggaagtgaccctaccgaggatgaccccaccatcgtctacatggctggatacctccacactctcgataaccaatatgatgaccttgcctcccactgcactcacctaaactcccgggtggaaagcctggagcaacaagtcaaggaacttacaagggaaaaggtgtccctccaagagagtctcgagatagcggaaggcgaggaaaccaacacccgtgaagcctaccgaaccctgaagatggattacgacaagaagctaaagaagctcgcccccgcgaagaaaatccgaaagaaaactagaagccaaggatgccagactgagcagaaggaagaagcccctccagccctacctcctaccaggatagagaactcgttcgacactgaggaaat

SEQ ID NO: 95973 - DNA, 441 bp, Zea Mays
cttgtagaaccattcagtttccaagggcatgtgcaatcattccctttgcagtacactctatatctatttctatccgactttgttatgccaagctcaaactcctcatttatagcatattgcctcacagctagcctaaactctttcatcaatggatagagagtacccaacttcagatcagggtggtcaacatcgtgcaatatattgaccatttctgcattttcatcatcaactggcatggcagcatctagatcacttggatcaaaaccattattttccgatgtaaaatgagatgcaaagttgcttggttccaggtgggttcgattcatgtcgtcatcctcatctccaagtcccaagaacgcatacatctcatcctcatcacagattttaaacatatcacctgtctccccattatccttattttcagcattctcaataataaag

SEQ ID NO: 95974 - DNA, 1022 bp, Zea Mays
gagaaagtgggcatagagaagaaagtcaaccacaacaaacatagtgtgagataccaaggctccaagcaaccataactaaaggtaagtaagtgcctccttgtagcatatcttaggtagtagagtgcgccttgtcagggataagatccccggtcctagtcattcaccgattagcgaacgcatccagaaaaatccactagcaattggagccaattggtcagctgaaggagacaagtagcgtctacccaaggggaacccgccctagatgagccccatggcactgggcccagggtcaggcatggcagagcctaacaggggagccgggcgtaccgaagggaaaccactcgagtcgatcccttgcctagcctaagaccgacccatcataagtggctgaccacattaactgcacctggcgccgagccacagtagaggcactgatccgcctccaactcatagcctacgaggccttgggaccatagggcactcatgacctacgaacccatcggaccgtggcgcatttatggcccacgcaccctcgacctacgacacactcataacctaccagtactggcctgagtgcacagacctctagcatggcacaacacgacaaaccacgtcgagtcttaggctacgaaggccaagggttggcatagcccaaatgatggcgctcgggccccatgctgcccgcgtcgtctgccataaagagtacaagagtgtcaggcggcctagggcccacgaacacacatggccctaccccatggtagaacgcctggttttaccatcgcctgatggccccttcttgaggaagccaccactggctgaccccccctctttggcctataaaaggaggggggcgacccggtcttggattgtcctagatacacgagcggactattggatccctgaagacatgatggatgcaaggatataccctagatgagaagacaccaagaaggatcgacaaactggaagaagacccaggggccggaggcccactaccaagccaagacttagctaggacattg

SEQ ID NO: 95975 - DNA, 432 bp, Zea Mays
agaaattgacgcttttgaagaaattctgtgcacccgaggagactattgcgcgttaataggcgtccaaaccacagcttcgatgctagaaaaaactggatctgaacatgtaaagactataagttgtactgacttcaaagtctctgtggacgatatcagacatccttcaaccaaagcctccaacatgaaaaaatatttttcgtagaaatttggagtgctggaggaaaacggttggttgagaagcagctacaaaatgcagagaaggttttttgcttctacattgactctagtttgttatatgccaaattacttgcttatatgtgctctttcacttggtaggtggagaaggctgcaagagaggacacagcaattagggaggcccaaagaataaaagaattcgaaggtatcaactttgcattttaaccgaagcttttg

SEQ ID NO: 95976 - DNA, 674 bp, Zea Mays
tccaaacatcggaatagaatttttcgcctatcaaagtaacttcgcccgaaggctctttagcgttgtctatggagaagacggtttctgcctgggctgcagctttaacgtgttcacagccatttttctctagaatcgctgcaacccctcgagcaccggtgaaggcgcagaaatccccacggtcactaagtatttcgtcaaaagctttagcttcttcgccgatccattcaatgattcctttgggatcgcctctaatgaatttttgctccgatgagtatgcacccacctttgcaaaactatctttcaatttttagcacaatccaaggatttctcataacatctctccttcgattcacgaagctcatccacattcttttgcaatcttgaactagtccattcgcttatttcttgtttcgctttcgccacctcaatatcctcattcttttcggcaagctttttctttaggttttcaacttcggctttatgagcttcggattgtgcattaagttttgctttgctgctcttcaacctgtccactaaggaaagcagaattttatctttttttcaagggcttcattcctcagtctaatgacctctgaccgaaggttcccaagggctatttggcagctttcgtctttagcattcttttgtgcccttaaagcattgctcaagattaa

SEQ ID NO: 95977 - DNA, 296 bp, Zea Mays
caaggacaaggagaccatcattggcgatacacgagaggctgatgaaaacactaaaatttcttgcaggaaagtggtgacaaaagacccatgatggagaagagtcattaaagatcaccatcacgacctccaatgccgaggggcagacgcagtgaggcagacaggtgcgactcttgttctgcgcatcgcggaaggtccggcatgtaggcgcggatggtccgggacaccccccgaatagtccaagtcaagcgaacggtctggcagcgcccaggagcaacaacgtacacgtacctttaaac

SEQ ID NO: 95978 - DNA, 1156 bp, Zea Mays
tgctcattgtataatttgtcaacaagccaaagcagaccgcactcgtttacccggcctccttcaaccattgcccgttccatcttcgctttggcaaattatttctatggatttcatcgaagccttacctcgctctcaatcttacacttgcatcctggttattgtggacaccttcaccaaatatgccaacttcttgccgctcaagcatctgtatacagctttgtccgtggcacgtctttttcacgatcaagtgtacaagcatcatgggttgccccagtccattgtatcggatcgcgacaaggtgttcctcagtaatttgtggaaggaactgtttcgctgggctgatgtgcagttacagatgagttccgcatatcatccgcaatctgatgggcagacagagcgtgtcaatcagtgcctcgaaacattccttcgttgctttgtccatgcctgtcctactcaatggagtcattggttgtctgttgcacaattttggtacaattcttcgccgcattcagctacaggtcgcgccccatttgaagtattgtatggttgtcgtcctagacagtttggcatctctgataacgttgttatctcttctactgagttgtctgcctggttgcaggaccgccagcttatttctgatttggtcaaacaacatttggagagggctaaaatgaggatgaaacgtcaagcagacaaacagcgttccgagagagaatttacagttggtgattgggtgtttctcaaattacagccatacgtccagtcttcagttgctcatcgggctaaccagaaacttgcctttaagtttttcgggccatttcaggtgatccaacgtgtggggtctgtcgcctataaactgcaacttccttcatcgtcgcgtatccatccggtttttcatgtctcacagttgaagcgagcgctggggaaaggtttggtggcctcacctgcattaccatctgatcagtaccgtttcagtgttccagttaagattttgcagcatcgttcttctgttcgtgggctcaattcctgtccccaagtgctggtgcaatggtctgctatgcctgaggagctggcaacttgggagaatgtccaagatttgcaacaacaatttcctaatgaagctgtctggggacatccagcaggcttagcagggggg

SEQ ID NO: 95979 - DNA, 888 bp, Zea Mays
ctagaccttgcttccgtcgccattaattcttcaaggttctcaaaattcattgctctcaatggttgccgctcattcgcacgagtttgaaccttcctccacgctgggagattgttttaggagacagagaggtgattcaaaagcaactccatgtcaaggggccctacccgatgccgaaccaagaggagattgtggcctaactcaaagtccagcttcataaggaattcgaattgtctgttgtttttttttcttgaaagctcgtttagtcgtttgctctggaccactgtatttacctgaactctgcagggcaggccagtgacgcatcatcgaatgaccataaatgggtagcctatggtcataaaattgcaccataaatattgcagctcctagagctgctgtcattcaatcaaaatgaccggttgtcaagccaaagatctcccctggatctcattcgcgctgcgtgggagacgtcgcagttccagggcacgggcctgcctggctcaccagtcaccagtaatgtttacaagacgcaaagcggaaggctacaggctagagaaggtgtcaagcagggcagcagctgagccgcccagtgcatgttgatgttgtgacggggcagtgaaaatctagagatgaagctggattggatacaaggataacagtgatcctgtatgtattttgttccatattctatattttatcccatattccatattttatttcatatctctaaaaccggacacgaatcattcggatactgatatctatctcatatacatatcaaagcctgattttgagtattcagattcggatacggtcggatattaaattttcagattcagatatgaactatgtatatagggttttgaccctctgggaatgaacggaaattag

SEQ ID NO: 95980 - DNA, 322 bp, Zea Mays
tgctgctcctgttgggacgctggtggtggctcctcccccagaaactgatacaaccttggatattcagaagcctgtcagtgttcgcccaagacgcccttcccgagccaatcaacttgatcctcctgctgacgagcagaaaaggaaaaagagacgtctccggcgagtatctagtttggatcaggatgttggtccttcggttcctgctgctgaagaagtgcatgttcctgaatttattgatgctgaccccaatgggggtgctccacctgctgctgaccccaatgggtgtgttgtctgtgttgctgatgaaaacgacgtggaggaa

SEQ ID NO: 95981 - DNA, 745 bp, Zea Mays
ttcatacatccttccatagctataggagttcatggatgaagtttcatgcacttggacttcatagatgatgcttcagggcgaagtcttggttgcaacatcttgcacaaagtcgattttgcaagcctatgttgataataagtgcttgttagttaactgtaaattatcgagggatgtgttaattatagtgaaatatccaatagtagcccctcgtgggtgaaggtctactctaaaggtctgaatcccatgaggctatgatatcctaaaatggttataatgtcatccctcaactttggagttggctgttacattgaagtttggccatcatggttgaaaagttattttgaccaaagatacctatatatgttgtgcttcaagagttgtatattctactggtcttcttgcatccagttgatcttattgttgttgacctaggcactatgaagctttgaaagaagtctttttcttgttttgttgattgtttgttgtgtttacaatgtctaggaagagcttttctttgtcacttatgtgggatatgatgaagacttagcagatgttgaagtcttatagtttgagttggttaacaatgaagcaaagtcactcgaatttggtgtgtcccttatggatgatgccacccttcctccatttgttcagacgagggacatggtccgcaactaagtttgcctaccttggagcaaagtagttcttaatcctgaagcgcatgagtgtgttatgttcaaagatttct

SEQ ID NO: 95982 - DNA, 844 bp, Zea Mays
aaaacttccatgcaaaagatgatgtatgcagtatgcatgacaacaacatgagatcctccacccacatgtggtagacataaacttccacttcctcaaaatgataagacaacacgtgtaacatgctcaaaccacatcttcaacataaaaaaataatgtaacatgaataacttcgagccacatttcccacaatggagtacaagtatgaatacatttgacatggatgtgattaagcataggacacataaatcaatcaacggtataaaccaccactattttacttgtcttcaccggggagtttggacaaagccttgagcataatccggaagtccaccacctgttttggacacacaactcagtacacaaatttcacgtaacaacgctcataaacgacgccgcacctacgcacaatttcaaaccccgccgcgggtaacaactcttcccacacccaccaaactgtagcggcgctgcttaacaatttcatatctttaaaattatgacagcagaggtaacaaccaaaaactccagaggcatctatataaaattccccacaagttttgtatacaacttatcattaaacaccaacatctaattagcccaaaaccatccacaaggtacatcctgcaatctgtttttttggacagcaacacacccggattcaaacagcgatatctcctaatttataactccgaattgagcgcataagtacttgttggaaaggtatgacaaagctatacataattctcatactgtttatcactaattacccacgaaaaatccccagaaactgctaatactactgctgtacgcccacctgcagaaatctgtttctttggacagccacata

SEQ ID NO: 95983 - DNA, 569 bp, Zea Mays
cctacttccagtagaggggggatgagacctttattacttgcacctatgcttgcagtagggtttacaagctgaggtggagagggaataatcccaagtcccaggggatgattgaggcaagtgacaataccgaagggaggagaaaacttgtgaagtgtctgcctgccttttaaaagccatatacttccctatttataggctcaaggggagctccctaaggatgggagttggctgcatactgtgaaggggtgtcttcgtatcatgtagaaagtatggccttgtactttgctgttgacttgtgcccgcttgtttcttgctgagagccgaggctgagggcttggtcacatatgagagccccctggtgaggggttgcccagaccatagtggttgacacaatgctaagcatgggaaaaagcttcttaagggatgtgtcagctccactgtatctgatgacgttgggggcgtactctatcacctatgtcaagggcagaaccgggctcgggcgaggcagaagtccacctcaggtcgtgactggtagaaccgggctcgggcgaggcagaagtccaccctag

SEQ ID NO: 95984 - DNA, 380 bp, Zea Mays
tcagttgatcagaacccagtgtgcccaagtgctgaagaaacagaccaagactcaacaccagttgggcaggacccagtgtgcccaagtgttagagcagcagagaatgttacaactttgatgaacactgaggaattgccaaatagagaggaacctctaaggcttcctgctatccttgtgcagcagactagagacccctgggaaagcatcaagaaaagattgcaagcaaagcccccatgctataaggtatactcaagaagaagagaaatcctacctgaacgaactcaggtagacagtccgacagcctcaaccccctacaagaattcagacaacacataatcaaggtcgttgatggtttgatgatcactccttcaatccccaag

SEQ ID NO: 95985 - DNA, 418 bp, Zea Mays
cgacgccaacctttggtctttcaagttaatgatcatgtatacctgaaagtatcaccaatgaagggtgtgaaccgtttcggggtaaaagggaaactagcaccccggcatgttggcccgtttcttattcttgaatgatacggaccagtggcataccgacttgaactgcccaaaacattatctgtagtacgcaacgtgttccatgtatctcaattgaagaagtgccttcggattcctgatcgaaccatcgatgtggtggatgttgccttggaaccagacttaacttattcagaacatcctattcgagttttggatcagaagtataggatcactcggaaaagtactcttaaattctataaggtacaatggaaccagcatactgaagatgaagctacctgggagactcaagactttttcgaaa

SEQ ID NO: 95986 - DNA, 545 bp, Zea Mays
ttcgagtataggcgatgttggctttttcggaagacttcccttcgctatctctactggctttgttcccaaaggtccaacttcaacgtgaataggagaaacgcttgcagcggctacttctcttagaccttcaattttgtcctcgggagcttcagcagaaacaagagttggcatcttcgtagatttcaaaacagcataaaaacactgacattctccttttcctaggagtcattgttgcagcagttgttagcttcggcaaccctatcatggttaggggactcagcagtttcgggtgctcttctgcctttgagctctttgctttcgtctcttctaccggaccaccacttgctttgaccgtcacaacaggaattgactctgaagccaacgggatggcttcggcgagttcagcaatctccatcttcttcgtaccaagcactgcaactgtcctctctaaagaatgtggcttcgtcctgcgagtcaaaaccttagctctcttcggcttaggcgcagcggaagaagacaaagttgccatttttctttttgaccct

SEQ ID NO: 95987 - DNA, 920 bp, Zea Mays
gtcaagatggattaattcgtttgaaatataccttcagatacagagaccggtttgacgaaccaaatgatgactggctgaaatgtattgaggctactagcgacgggttacttggggcatataccagagccaaagatgatgctttgtcctcagccttcgagggtcggggcaagaaaaggttgaatagggttttcgatgcaattggttttatatatcctgattattgctatccctcgtgaaagcagagaaaaaagagaaaaactaccacttcggccatctctgctgcgccgaagggcaagaaaatcaaggttttgacccaccggccaagatatattgagacggccatagtgccaaaatttggtgaagagacatcttccgctgccgaagcggaacaagctgctcccgccgctcggggcgctgaggaatcgattatagtgccgaaggtgcctatagtagagccagtcaaagccgaagatggggcggccaagaagccagagtttaaaaaacaatagtgctgccagaaattttgagcccaccggtagaagcagaattatcgaaggttacaaaagctcccgccacaactcccaagaggagaagaatggctagcgtactagatgctgtcatggagacaacaagagcattgactcctgctcctgtaaaaaaggttgccgaaacagctacggctcatactgaaaccaaagctgggcattcaatgcctgctgagacgaagcctgtcgtaactaaggaaagagctgagagacaatctcccgatattggcatagctatggagaaggaagtagccgaagaagctaaatctcctgctcccgaagcaccgtccgaagattttgactatattattcgacatgcttcgagaaaaagattatccgaagaagaaattttagaagccaaacactatgcccagg

SEQ ID NO: 95988 - DNA, 1100 bp, Zea Mays
tgtcgagttggctcaatccgtctctgaggttcggtttggttcgttttcttcgtttccatacaaccttaccctcggagcgtcgtactctagttcggtggggaggatttccttgctccataagccatgaagtatggtgtgtacccagtcgattgatttgtggtcatcctcaagctctagagaaccgcactcaacttcttgggccactttcggcatagttgcttgaggcgtgcaaatagctggggcttgaggccttgtaggatcgtgtcgttagcccattcgacctattcgttcgcatgaggctatgccaccgcggcttagtctatatggatgtggtattcatcacaaaattctaggaatgtattctctgtaatctatgtaccgttgtccgtgataatcgagtttagcacctgaagcgatggattatcttagtgacgagtctaacggcttggtcggaggtgatcttcatgaagagctacacctcgatccatttggtgaacatgtcgacaatgaccagaacatgtgtgtagcctcgagtaccttttctaggggtctgaccaagttgagttcccataccacaaatggtcaggtcatgggaatcgtctggagctcctgtgtgggtaggtgggtttgtcgtgcgtattagtggcatccctcgcatgttcacaccacctaatgtgcagtggacaccacagtaggctagtagaaaccctgtcggaaagcgctccccacaaggcttcgtcgagtcgcatggtactcacaggttccgctatggatgtcctcctggagctgtctcccttgctcgataaagatgtacaattattcccatcaggacaaagaacttggctcgttggtggagtcttcgcgctgccgtctcgtcccaagggagcgagttgttggacaaaaagttttggtatgttgttctcaaatcgcctgcgaaatctgttaggggtcccgaccttctatgacaacaatgggctcgggggtcggtgggctaatgcctacgtgttgtctgcccttctagtgggtttcatcgtaatggtcggtgggctcgaagaggtcggtcatgaagacccccggtgggaccgtcattcgtcccgacc

SEQ ID NO: 95989 - DNA, 555 bp, Zea Mays
tttgccacctgcagtgctggtaagaaccttgtaagagcggggtaagacacttcataatttgtattccaccaccaccaccaccaccctgagagatagttgtagggctcacattgtttgttgcttttttgtctctgttttatgctaacaatgacaggaccaaagaatcaaatggacaaggacaaggggcctaagcttaacgacgatgagtgtgtctcttagctagaattgaaggagatgatgcacgcgatgactgaagcttttaaaaaataccaggactctgcggcgacatcctatgagcagcttgattgacgagttgctaaacttgttacacgcatgaacgtactggaggctcgtccccccaccaactccagccccagctaactctcctgtggacgacgacgacgatgacgacgatgtttatgcaccgctgcgacaacgcctcgcacgtaatcgacaaggtctgggaggtaatggtagacgttgtcatcataatcctgaaccagaccacgatccatttgctaagattaagttctctattccaccgttcatgggttc

SEQ ID NO: 95990 - DNA, 486 bp, Zea Mays
gggattcggtcatcgtcgcggttcggcagggaggattgtgattcgtcgatgttgggtccgaaggtagatagagcttaccgagtcaggatttatgagggtcgtggatcttagatccaacggatagcaggttgtgctgattcatttttggtcaggatttaatctgggccaccgattactgatacagcggtggcggtcgtctgataccccttcggcataggcaaattgcttataagccctcgggtatttacaattgaacccgccatccaggctcgggcaaatactattgcaacaaggctctgttatttatggaaacaaccctcatctttagggtattgttgtccgcggtccatatgtctagtaaacttataaaataaaccgagaaattgatttttattgtgaaaataacactaaaaaccttgtaaaaatcatatctccctcattttaactctgttttggtccgttcaagttgcgttagcttcgtataaa

SEQ ID NO: 95991 - DNA, 632 bp, Zea Mays
agtggtgccataggtgaaggcactcactatgtcggcatcagtggcgttggggagttcatttctcttttgagaaaacctccggatgtaatcatggaggctctccccactcttctgggtgcacctctttaggtcccaggagcttcctggtcgcttgtaggtgccctagaaattcctgataaaggccttccataggtcagcccagtcatgaatggtccctgctggcaggtgctcgagccaggccctcgctccctccgcgaggtggatgagaaggaattggatgatgaggtggtgatcctttatccccgccacgcaacacgcgaggcggtaatcttccagccatatgcccgggtttgaagatccatcgtatttggaaatgttggtcggtgctctcacctttgaagggtattgagccttacgtatcgtgcgtccaaaggcacgtggtccctactggggtgggctagggctccgctcgcgccttttctcgcatggctgctccacttcttcctgcttccagcgccggctgtggatgatgtactaggcatcgcggatgcctccaaggtggtccttcatggggatgcgcgtccttatggattgggaaggttgtgctcccttgctccgagatgaggtcgttc

SEQ ID NO: 95992 - DNA, 913 bp, Zea Mays
acttctaggatttttgggacctggtgctcagtccactctgatatgaagtcaaccagtgcctaagtctttattgtcgtgcggggctggaactctatgtcgtgagctcctagctcacatgcccacttggctattcttcccacagcttctttgttgtgaagaatatcacctatcggaaatcctttgactactatgactttgtggtcgtcaaagtagtgccggagcttgcgagcggttagaagtaccgcgtacagcagcttttgcacttgaggataccttatctttgaggacctgaggacttcgctgatgaaataaactggatgctgcactgggtatgcgtgtacttcctctgcctgctcgactactaacgtggtgcttaccacgtgagtcatggaggagatatacaggagcagatgttctgtcggctgaccaggcatagctcggtgcgatggcttgagtactggcggagtggtcaagaacttcttcagtgcctctagagcttcttgtgcctctatggtccactgaaatatgaacctgctcagagctgccatgcatccagtaagtctttgcacctttttatgcgaccgtggtgcttccattctcatgatggcctcgattttctctggatttgcttcaattcctcgatggcttacaatgaatctgagcagctttccggctagtactccgaagacacacttttctaggttccccatcggtagcgcctcaggctgttgaagactagttgcaaatccatgatgaagttttctgagttttctatcttgataaccacattatcgacgtaagcttgcaccccacttgccccaatgattggctaagcatgtttggatggctctctagtaagccgctccagcgttcttgaggccgaacggcatggaggtatagcagaaagctccaa

SEQ ID NO: 95993 - DNA, 381 bp, Zea Mays
tgaaggtggcgtggagttttggtgggaaatggcggtttaggacgacacatatttgtatgtggagggaggctagatggacggggtctagaagtggacattgtttttttgtcatcctgtattcatgtgggctatcgatctgatgtctgcaaaacagtgccataaacatgtgcggtttcaacaacggtagcctgaagaagtgcggggctcattatccatttgggcagccgagagaggtccacacatcgtggcggcgtggctttattgttgtgggctacatcgtggcctgctgttgaaattgccacgtacctatgtgccgtgcgatgtgcaaatattccaaaaacaaaaccaccgggtgtgagccgttattctggttccaatcgc

SEQ ID NO: 95994 - DNA, 751 bp, Zea Mays
caccattaaaaaggtgaacacgtctgatcattggattagggtagttttggggacttagagagaaaatggagggttctagtgtgctctccacttagtgaattgatttggggtttttgtagggcctttttgtaatatttctcttactaagttttgtagctttactaatactcttcatctttaattaaaggttccttttgtggttttgatcatttacccattcttccccctttaatcccattgttagggtttaaggcttaagaaatagttagggttttagaatcttgtttgtgggtgaacattgtatgaagggtagactctccttcttgttatggttaaagcttagcttagccatggctctaaaacttttagtcccctcctttcccttatagcacaaggttggcgtaggacatagtgtgttcctttggccagggctctgggtaacaccaggggtcttacagccaccacccttgggccctataaattgagagtgccatcggctccgctaggtagtcacgcacctaatacaccagcccgtgcctcggatcgtccaccagaacgccccaatttgagatttcccccaaatcggtcaagaacaccgcgtgtgtgagctcgccgtggtcagccctccacaggtccgatcacgcctccttgctcgtgttttagcatccatgtgtgcttgtgacgcttctcggcccggccaattgagctagaacacgtaggatcaccgggaacgtttcgagttgtccattga

SEQ ID NO: 95995 - DNA, 553 bp, Zea Mays
gtcgtgccgggctggcctgttggccatctacagtgccacaaagctttcgttgaaatgatgatcccaaaccatgttgccgtacgtacactagtctacaggcactgtaactgtagagggaaagaaaccgtcagggcactgcactgctcagtctgctcgcacggatgctactagatcagcgccttcagcggttaggcgggggacacgatctagccatagcgaattattggccgttgggtacttgggtgacccagccgcttgctgtcggtcgagtcgtaggccaggccacgcagggattcgagttgcattgcgctccagatcagctcgaaatctcatggattcgagtttcaagtgtcaaggacaatctggctggagcatgcatgagaaggtaaactcgagctcttcaagcaaagcaacacacggccgaatacgaggtctgtgtccgtcctacatacacctctcggcgcagcttccgtgttcggtcggtccgttcccgaacctgccgccggagcatacctgaccgcatttctctacctcctcccatcgatggtgtaac

SEQ ID NO: 95996 - DNA, 504 bp, Zea Mays
aaaaaattctattgtcaaagcttcctgctccctgcgagcttgctgctcaagcttcggacaaacgtccaatcgtttaagcttcgtatgttaagaactgaaatggctagagtacggtccactgctagggtaacacgtgaaggggaagaagctaggacttctgagatagcccccatcttagaaatgatgacgcattctgggttgattgtaccagaagaagaaacagtcccaacagaagatgttgttgatgccgaagttgaaccaaccactgccaaagctgacagtgaagacgaggataatgatgccattttaagtccgagtaaacccagccatattgagtttgggaaatccacaattacgactaaagatctggttttaatgaaaaaatttggatattttggggagaatgatgacaatctagttcggtttgctggggaagaggcgattccagagccgaaagatgacgaagttgtggtttttagaagcttcttcagggcaggacttcag

SEQ ID NO: 95997 - DNA, 714 bp, Zea Mays
aggaaaaacacactatagatagcagatagatagcagtttaatgaacaccaaagttataaggtcaagttgattaaactttcatgcaataaatattttgttgattgcagatagataacaacattgtaaatttgaacccatttaaactcaagaataactgaaagatcaagcatccgaatgtctaataaaaccactcattaaagttcagatccataaatacgagtgaacgttaacaaactaacccttatgaagcataaacactaatttatataagtcatacataactataatgagcacaaataaagggacatgccaacaacaggagtaacaatgtagactatggtaaattaataatttttaggaccacaaaacatatctgaaatttccagtctccagttataaggtcaagctgattaaagtttcatgtaataaatattttgttgattgcagatagataacagcattgtaaatttgaacccatttaaactcaagaataacttgtatgtgatttatgtgttaattgaccatgataaagtgttagcattagttatgtaatcatagtgtcccatccctgagtgtccgttggtttagattttatttccagctgagccaatgaacagttaatacttaatagcgccatagcgggatgttgtgtttataatctatatgtgcagtaaaacaacataaggtaaataggtcaaacaaacacaaggcagt

SEQ ID NO: 95998 - DNA, 430 bp, Zea Mays
ctcagacttgattccaactttagcaggttctacgaatgatcgtaaccattttctacctagaatataaagtttaaacttataatgcacgataaacagatagcttagggttaagtgatattcaaactaagcaatgctcaaaccctaactactcaaataagcacttcaggtcaaacatgcagtgccacaagatttatcccatggtttagctcgccactaagccttgcctacctccgcattattgaggaaagccacaaaggcaaagggtctcacacccttcctcgatctcaaaccaagaactctcactcttaggatgacaggggttttcactatattgagggtgacttatagaaatccaaggttgcaacaacttcttatagctcgtggaagaattaatcatcagctaggatcaagctccaagaatcaattgaag

SEQ ID NO: 95999 - DNA, 507 bp, Zea Mays
gacagcgcatggccgagctccggcgagcttacaccagccgattcacttaatgaccggcaccctactttggccaagaccgaattcaagacccaccgatcgtttcccctcactcaatttcactaatgagactctaaatcatcctgtccacggagacagcgcggacaatggatgaacatgggcgttctcggtgatccagggcggtctagttcaattgaattggtcgaggagcttgaggaggacttaaggatgctagaacaaaagagcagggagtacgagcagacctggaatacgctgaccgcggtgagggatcttttacggtggcggagaacagatttggggagaatgagaaattagcgagctctggtgaacaattggaggcacgacttggtggcttggtgcgtgattaccctacggactcgatggtgtgctcaatttatagcatccacgagcggtggccggtgaattggacgaagacgcacggcggccggagaggaagaggggcactgg

SEQ ID NO: 96000 - DNA, 719 bp, Zea Mays
atcaaggatctttactggcttctcacggcactgaagatctttctgaatctgtattgcctcttcttcgatgtgactttctggtgcttgcaggcatttgcagagctgggacacttgaaacacattgtggatatcagacatggattctggtagatcaagacggtatgctgcgggtcctactctgccgatgatgggatagggaccgacgaatcgcggtgctagctttcctttcacttggaaccttctgacaccacgcatcggggagaccttgaggtagacgaagtctccttcctcaaatctgagttctcttcgcctgttgtccgtataactcttctaccgactctgagcttcaagtaatcttctgcggatcagggcaactttctcctcagcctctttaacaaaggcaggtccttctagtgccttttcccctacgttggaccacatgagaggggtctagcattttcgtccatacaatgcttcgaacggtgacatcttgatgctggcctgatggctgttgttatacgagaactccgcgtaaggcaaactggattcccaacttctatcgaatgttaacacacaggctcttaatagatcttcgaggaccttgttgaccctttctgtctgcccatctgtctgagggtgataggcgatgctgaagtctagcttggtgcccatagctttctgaaggcttgtccagaatttggaggtgaactgggttcctc

SEQ ID NO: 96001 - DNA, 503 bp, Zea Mays
aacaagaatggatgactaaaatagtaaagagcgcatgatgttgttagtagtctaaatcatgcgctcagccttgccattctgagaagtgtagggcaggacatccagagttgtacaccatgggaggagaatgatcaagaggaattatcaaactcacggccattgtcacactggataaccataatggtttgaccaaactgagtagaaacccaagagaagaagtgcagaagagtcgcaaatgtgtcggactttgaacgcaaggaaaaagtccgcgaataatgagagcacaagattatatgtataacccaaaacactgataataggataagtccataaatcacagtgtatgagatcaaaattatgcacatcctgagagtggctagggaaaggaaatcgaacatgacaacctagctgatatacatggcatagatgcttagagttgcccctagtacaagagatgattgaactactacacaactaggacaacatgttagggctagaatgac

SEQ ID NO: 96002 - DNA, 637 bp, Zea Mays
ttaccgcttgcagttgtcggattccatggtaggggtgcacccggtatttcatgtctctatgttgaggaagtttttgcgggatccagaccatcaaatcgagttggaaccgattgttgtgcagcaggatctgactctggagtgtcgtccggtgtgtatcttggagtcctcggagcgtgtcatgagaaggagatcaattaagtatgttaaggtcttgtggactaatcagtctgagagcgaggctacttgggaacttgaggagctgatgcggcagaaataccctgaacttttcgttatgggtgagtttctttgtcttcgctaatctttcttttggtcgttccgatagaagcaacggaattcgaggtcgaattcttttttaaggggggtagagtgtgatacccaattttctgaaaagaagttgaagtttattttttctcttttctccgtgtcctgtgttattggggtttggagttttaggaggcatacctcagtgaaacagtagaactttttttgacttgtacgctagggtcgggagcacagacatgagagcgggtttgggtcattaatctcgatccgacggatgggagcccacccttttccccccaatcctagccgacccccctcctccctctttgttttg

SEQ ID NO: 96003 - DNA, 689 bp, Zea Mays
ctcccctgcccctacactaattaagtgaacaaggcccaataaacagttacaaccctgagttaaaataacggcaccaactactatgggcacacagcaaagtagcgtaagtagtaacactaaaactaaaaccttaataagccttaatacaatcgggaaatactaaaattttactctaagaattagtcaatactaaaaaatcatgtttcagtcagtgagactcattccgaggtgagtcttagagcgcggagtctggaatttggatagtcgagagcagtctaatgagtggactaagagtagctctagtgttggtaggaatctaacctcgcggaaggaaactgaactatcaacactgcagcagtcaaccgctcactgtcagtagcagaattcgacatccaaacatggctctgtgcgagggagtaaaatattcagccttcgctgctctgacctctttagtgcagtacaatttcctctttctcttggctgttttggagattgaactcgatgagaaaggagtagattacactattttatttggttgtaggctccaccaaatcgaactcaccagcggaggtggcgaactcagcagtggaggcagaggtcaaagggagggggagacgccatctagcttgaccttctcgacttgttcttcggaggtggcttttgcgaaggaagaaattagaaccattaag

SEQ ID NO: 96004 - DNA, 463 bp, Zea Mays
gaaaaactattctagttctccttttcatcgtgtccctatacacctatttatagtggcgacttgtaatgcatcttcgtgttaaattacaaatatgccctcagttcttatacatatgaactataaatcttgtagagatagcatcgcctttccctcttatgaatgtgttggctgaacttcaatatacttcttctctgccttcgttcatcttcctctgcatgttgtggtttcgaagccaaagctcctcaacttcggttacatacatgtgcttcttcggatagggaattggagcgaaggctggtttaatagcggcgttgggacacttgaaatgtgcttaaaccaattggtcaaatattgctttgaggacctttgacaataaaagggccccaacacatggtttactcccactatcgacgagctcaactatttgatggttatgaatgtttactaaatctctcccgacctt

SEQ ID NO: 96005 - DNA, 319 bp, Zea Mays
gaaaggttccactccttgacctcacaaagaagtgggtttcccttaactcctcccagagcgaacgctgttgagcagggcatctaccaatttcctagcgagcggttccgaagctttgataattttgacgagctcctcgtcactccgggcatcataataacctttgctcaaggcctccaggtcgaagtgcgacatggtgatggcgaaggtttggctgacccctcggcggaaggattccgcttcgagctctcgaatcccgtgaaacgctcaaagcttaagatcaaggacttaggcccagactaaggaggcaccctagatcgcg

SEQ ID NO: 96006 - DNA, 320 bp, Zea Mays
accataactatcgcttgaggggcctcggtacaactttttgtagataggttggtggacagattaggatgagtaaaacagttccaccccacagctgttgaaaccgctttcctcgcgtttctatgcatgtaagacgcgttgtgtgtgggtctgctgaagccgcattccccatcccctatggagcagcgtgcatgggttgttgagctcctgtcgtggtgcatttggcatgggcccacttgccatgccggtcattgctatggacaaaagacatgacgtgtgtgggtatgtgtcattgtggttgtgattgaggcgctcacatgtcg

SEQ ID NO: 96007 - DNA, 599 bp, Zea Mays
ccaatcagccaggtaccagcaaactctaaggtggtaccacgataaagcagtacgacactgagtaggaaactcgtggaatattgagcacctcaggaaattatatctatagtgaatacctcaaactccagtctaagccacacattgtaaacaaaaggtctcatgtggttagatgcccccgtgtcgggatgaagaaggtgttggagagatcccgtgccctttgatgcacaccatagatccgtcaccgaaacagaccatcccagatacacctatgtcaaggttggagaaggcgttgtggcaccctatcatgtggttggatgtccccgtgtcgaagatccagcgccatggatcccgctcctcctttttgtcgagcgcgacgaagacctcctgctccaccagatggacgcgctcttcccgaacgcatgccaccatggtgctcgatgtgttgtagatcactgccacgtcgctcggtgcttgcagcttggtctagctgggtgaggggttgattgcgacattagcaacattggcaacaagaagagacgactcattaccttgggccacatgggcctggtgactttgttgagcctgctgctccttcttcc

SEQ ID NO: 96008 - DNA, 882 bp, Zea Mays
cgagcgcgggcctgtggcagcctccatagccctttgtttgtctcatgtgaagagtagggaacactcctacatataagttggttctctcctacctagatgggcaatatgagactaaagccacatatcatctctacacaccacattggcttccttattaaattgggtcacacactagtgggcctagttccaacgcaagaccgtggaccgttcgtgctcccatagagaacaccatcaattggttctttctagtgtttagtgtcagatcggcgccaacactcggtcgtctatgttactttggcgaagtgtctggcctcgttcaaataaaatgtaaagaaatctttcctctgcaattcatggtcattttcttgttttcgttttggtttgattttttctcttctctgccccttttcttcattgttttgggttatttcttggatttaggagtttggagtcatttggttggatcaatatgagcaaggtcagttgagcaacgcttccaccaagtggtttcgttagatttttctcaggctctagatcttagggcctgtttggaagcggagtttttttaaggtttttgagaaataccgtggtattagctaatactagagtattctagaccaaaacctgtttgggagagcattagaaaacagagtttctaataccatggtttaggcaaaactatagtatttttacagtatttgacacacaagcctggactcaagtttttcttcacgcgcgcacgttggcgcgcaattttctctccagctcacccgtctcgcgccttctgttttcctttctatcctctcatagaacccgccgtcagccatttctccatcacggagacctgcgccgcctagggttgctcggatttctccatcgccg

SEQ ID NO: 96009 - DNA, 327 bp, Zea Mays
gtgtcagaggcccttgtggaatgacaatgacaggaaactttgtgacccaatgcatttgccaccacattggcttttcctaggtgatagtggatttccaagtcataatctttaattagctcaagccatcttctctgcctcatgttagttctgactgggtaaagatatatttcagacttttatgatctgtatataaatggcaagtatttcccagcagataatgatgccatatcttgagggcatgaacaactgcagctagttccaagtcatgagctggatagtgctcctcatgccggcatagttgtcgtgaagcataagctatgactcggc

SEQ ID NO: 96010 - DNA, 736 bp, Zea Mays
atccgagactccttaccaacagtgccgacatagcacaaagcgatccccaaacggtctagatcagcgatcaaaggcaaggccacttttggaaccccggacctgctaagggcattagccaccacatttgctatcccagggtgataatgaatggacaaattgtaatctttaatcaattcgagccattgatgctgcctcaaatttagctccttctgagtgaaaatgtacttgagacttttatgatcagggtaaatgtcacaagactcgccataaagatagtgcctccacgattttagagcaaagatcaccgcagccaattcaagatcatgagttggataattcccctcatgcttcgtcaactgccttgagccataagcaatcactctgccttcctgcatcaacacacagccaagaccaattcgagaagcatccgtataaactgtgaaacgcttaccactctcaggcaaagctaggataggggcatccaccaacttgttcttcaatgtctgatagctgacctcgcaatcgctggactagacgaagagaacacccttctccaagagtctagtcaaaggcttagcaatgctggaaaaatttggtacgaagcgccgataatatccagcgagccccaagaaactttggatttcggagacactagagggtctcttccactccaccacagccgcaacattcttgggatcaaccgcaatgccctgctgattaatcacatgccccagga

SEQ ID NO: 96011 - DNA, 690 bp, Zea Mays
ggaatatctggatcagtttgtggtcgtattcattgacgacatactgatatactctccgaatgaagaaacacatgaagatcacctaaggctagtcctacaaaagcttcgtgacaaccaattgtatgcaaagttctcaaaatgtgatttttggttgaaggaagttgctttcctcggacatattgttactgatggtggaattaaagtggacccaggaaaaataagtgagatactaaattggaagcgaccaaaggatgcgtccaagatcagaagttttcttggattggcaggatactacagaagatttattgaaggtttttccaagttagtgaaaccccttacctcactactggagaaaggtaaagagttcaagtgggatgaagcatgccagaattgttttgaggaactcaagaaaaggttaaccactgcaacaatattggtaatgccagacattcacaagggatttgatgtgtattgcgacgcatcacaccttggagttgaatgtgtgctaatgcaagaaggaaaagtaatagcctatgcttcaagacagttgaggaagcatgagaagaattatcctacgcatgatttggaactagctacagtagtgcatgctttgaggatttggaggcactatatgattggaaacaagtgcaaaatcttcacggatcacaaaagtttgaaatacatattcac

SEQ ID NO: 96012 - DNA, 489 bp, Zea Mays
gtagattccacttccataactgttgcttccatattattgagcataccaaggttgagttgttccatttcccagcacaattcatgtggcatcaaatatgtagtgatacagttcgcttgacctttatggcttaaagcatctgccactacatttgctttccttgggtgatattatatttctagatcataatccttgattaactcaagccatcttcgcaatcttaggttgagttctttctgcgtgaagatatatttcaagcttttatgatccgtgaagattttgcacttgtttccaatcatgtatgtctccaaatattcaaagcgtgcactatgacagctaattccagatcatgcgtaggataattcttttcatgctactgtaactaccttgaggcataggcaattacttttccttcttgcattaacacacatccaagtcctagatgtgatgcatcgcaattcacgtcaaatcctttgtgaatatcaggcataa

SEQ ID NO: 96013 - DNA, 346 bp, Zea Mays
cgagaagctgaggaaatcttggctggcgaggatggtcttgagttctggtcttagccctttcagaaaacgggccatcttcttggcttcggtgctgacatcgtcaggcgcgtaacgagccaactctgtgaatttgtgcacgtactcactgacagatcttccaccttgagttagttcccggaattcatcttccttgagttgaacgatcccctagggtacatggtgctcacggaaagcagtttcaaattctggccaggtagcgttcctgacgaccgcgctgaaggtatcccaccacgctagggtcatcccagaaatttgatgagcagccaattgaacacgctgatttttg

SEQ ID NO: 96014 - DNA, 546 bp, Zea Mays
cgggctcaagcaccaacagtaccaaatgagatagttaccgaggccatgatcaaggggttttgcccaggatcggcggcacaatactttgctagaaaacccccttagaccctggaaaagcttctctagaagatggatgaatatatcaaagcagacaatgatttccgtcgaaggaaggaagaggccttcagatattccgagatgaccaggggcttcagtggatggttcaacccaagacatatcaggaccatacacaatccaaatcagaacaaagacaagaacaatcacaatcagtgatagcaaagtcatcctcagtcctcaggaacctagcaaaataccttcagaccactggccccaatagggggaagaggaagaagttttggaggaagattcaactctcaaccaaggaaattgttctgcctttcctatggagaggacaatgggcatacaacaagaacatgtcaagtcacaatcaagaaatagaaagaaatagttgaagctgaagcacagcagaatcaatcaaagcaggtcctccacactacctcatac

SEQ ID NO: 96015 - DNA, 318 bp, Zea Mays
gatgaatacgacaccgaacttgagcttttgtgagctagttgaattccaagcttgatgaaacccttcgaataatcttggtaatcggagatgggcctaatatcgaaatcattattcacactagtatttcttgcttaagtccatactcgttgtttaacaggaggtaaacaccatgggtgttacacaaaaatgcaattagaagctaaagacactagttttgatcatccactacactcctctagttcgtctaaaagggaaaatagaagcagtctcagtatagtgttgtggtgacaaatgcaaacccatcacaatcttttggat

SEQ ID NO: 96016 - DNA, 447 bp, Zea Mays
acgaatacaaagaattagcatcccctacaactctgaacttgttgttgtcagaagctctctcaactccctgaggatctagtagtagccagctaacaattagctatctaggtctaaacagatctgctactggcagaaaatttaaacaacttcccaagtggaaaaaacgtgtttgatcttgaaaacagatgaaggggcaaggagttaaactattccacgagctaatctcctaactggatcttttggatagaatgtggcacaaaactaatcataaacgtcaatgtactatcagttttctgtttagagctgacgcgccgaaactctattaccacattaacattggtctgaactccctgaggataaactactcagcaagtcaacaacagcttacactgaaaaaaggcatgattcttgtagtcctttttgcaaagggcacaaggctaaaaactg

SEQ ID NO: 96017 - DNA, 525 bp, Zea Mays
ctatctgtgcagttgatagatgtagtgacaacatatgcatacgtggtcactaaattatggtatttatggagtcttgaaggattccaaatacataataaccaatcacaaatttgcaatgcttggaaagtctttgtgacttagagcattcaggtcaaatatgttacattcgacctggtgaatccttccttccgaagggatacacaaagaatggtatgtttagcgtaaatatgtgcaacatatttctaaacatacattacttatcgacggagttcgagatagaagatatgaattgaaagagactttcaattcaaagtaaactatcttgagtatcttggatacaaaaattgtctatatccaacatatattgaagaaattcaatatgagagaatcattgttatttgattctttccgatcatgagatgtgctattgtatcttgcaagagcattcggccggatattgctttgcaaagatttgctagctaacagcacatgaaatcaagttatgatctccaggtatactcatgc

SEQ ID NO: 96018 - DNA, 519 bp, Zea Mays
tccagatcatcaaggagaagctcacgaccgcgcccattttgacactaccagatatacaccaggattttgtcatcttctgtgatgcttcaaggcaaggcttagggtgtgtcttaatgcaaaatgagaaaattattgcttatgcatcccgcttactcaagccgcatgagcagaattaccccacccacgacttggagttggcagccatagtgcacgccctaaaaatatggaggcactatctgattgggaacaaatgccacatcttcaccgatcacaagagtctgaggtacatcttcactcagccagacctcaacctctgtcaaagaagatggcttgaattgatcaaggattatgacctcgagatccattaccaccccgggaaggccaacgtggtagcgggcgccctcagccgaaaacctttcgggataaaggggcccaactttttagaagattggaagaaggaatcagctcagctaaatgcatgtctgggagacaacggtagcctggaagtcaagccaatgc

SEQ ID NO: 96019 - DNA, 504 bp, Zea Mays
cagccaaaataccgccgcgtgaacacctcgccatggccacccttctgcaggtcagttcaagctttcttaattggtgttctagctttcctcatgtcccctgaagctcaccgacccattcgattgaactagaccgccttaaattgcctagaacaccttggattatcctcggtttcagccgtcgtcgtgagcaggcgtgctccggtccggattagtgaaattagctaagggattagtgttggggagggttgaattaagtgacaaacaaaggagaagtctagccgttgcattttccggccggtatgggctcgccagagtcgctgctctgccgcccacggtcgaggatctcaggttgtaaagaaacagaaaggggaggggcctttgcacagatgtcagtgagacagagaaacagtagagaggattctttactggtatttcaaatgaccagggatccctatgcaaaatggacactgcagcgcgcgcgggcgcgtttcgcctgtctcaggc

SEQ ID NO: 96020 - DNA, 540 bp, Zea Mays
gaacaagacagtcgagaaacggtcacgttacatgattataaattaaccactcgcttaatggaaggaaatttaatgtagacactatgtttagcgtaaagtaaagtcatgtttcatgtctaatcattataagcaggtggagataaataaaaaggattgtcgcgcggcgagacgcgcgacatagcactctaaaacgaattaagaagttaacgactcgtcgcgcgaccgagcacgcaacgagacacttcaccttagttatgaggagacgttaagcgtcgcgcgacgaaacgcacgacggcatacgtcgactaaactgagtccaaagtggatcgtcgcgtgaatacgcgcgcggcgttacaccttaaacaacctgaaattaaaatggatcgtcgcgcgacgaagcgcacggcgcaacacatagatagaacctaaaattaaacaaatccgtcgcgcggcgaagcgcgcgatgcagcacgctaactaacggagtttgacattaactaccaaccaaaaataatcacagcgagcgcgggttgcgcacgc

SEQ ID NO: 96021 - DNA, 509 bp, Zea Mays
ttgcaggacatgactgagtgtaacgatgggctctagggtggcctaggtgtgcctacaataccctaacggaggaagaaggcatcatccatggagtccctcgactgatgggaaccaaagaggacaacgaactagacgacaatgcctgaccttttttcgcttgacccttaggctcttgtaacagggttggtctatgaccttggcctataaaggaagggaaagggacatgattccgaggatgagcaatcacacatacacatcactagcacaagtcaaagcacatagcacttataaccgcacacatattcacacactagagacttgggagcttaatccctctctcgcccgtttgtaaccactactacaaaccagtgcaacgtaacacgagcaggtcaactggatttatggatgttatgcccaaactagaataaacccttgtgtcctctttgtacaccattcgctcaaagacacgcagagcacaataattactagacagtggtttcgaaacaccg

SEQ ID NO: 96022 - DNA, 369 bp, Zea Mays
taaggaggcacatcatgtcctcggtcgtcagctcgacgaggttcaatagtgtttcgcttgccaaggtgatctgcatgtattccttggggacgacgtggaggaccttctcgacgactctccttgtcgatgtaatcgtcaccgtaccgtgtcatctgctgcatttggctagatagacggagagcgaagttgttgatgtccttgtctggccagaacgccaagggatcccacccatgatacaacttctgctaggtggtttttgcgtttgtggtcgccactgatgcgtgccgtggggatggcgtcccaggtgtacttggcggtctccttgtccgtgaggacgagcaccatctccagtgggacaatggcaaggag

SEQ ID NO: 96023 - DNA, 374 bp, Zea Mays
gagcctattcctctgagcagatatttattcgtggaaatcctggtgaagtcattcaatggataaatggcgaagtcgaagctttcgaagaagttcttagtgaccgaggatacttttgtgcctttgttggtgcccgtggggctacgtccatcttggagaaggctggttgcgatcatgctaaggctgtagttcagctagactttgccttctcagctgatgatattagaaacccttcagccgaagttactaccctaggtgggaagttttattccgaagtatggctgaagggtggacgagaaatcgccgatgaagccatcaaaagaaatgagaaggaatctcattgttggtcactcgttctcaaatactgtgaatcaaga

SEQ ID NO: 96024 - DNA, 415 bp, Zea Mays
taactcttcttcaccgggctcacctaccctagcacctggtttgtccaccaacaccgtcagccacgcctcattgtcctgcaccgacgcccacaccttcggggtcgacgtcaacaactttggtccgcgatgaacatcacacgttgtttgccactccactatccaatgatgagggttgcatcgacgcctaccacgacgatgagcctctgcactaccgcactatggacaacatctcagtgagtagtatacccctagagtggtgcactacaacttagaggcggagctacacctggcgcatgatgacatcgagtcccgctccttcagtgaggcatagggggacacgccgcaatgcagtaaccaaatgtgggagttggttgaccttgctggccatcacatcatcacccttaagtgggtcttc

SEQ ID NO: 96025 - DNA, 287 bp, Zea Mays
ggggaatggagcattttgcatgccataaacaaatgcaaaattctgaaaagcagttggaaggaaacaagcacatatagttagtggctggtgatggtgcacgttgctcttctttaactctccatgatatcttatattcttatgcatacattactttatgttgtcccccactcgtgacatggatctgtcttccttttctatctgtgtattgtgctaaaaacgcaaatgtgaaattctgaaaacctgttggtttcatggtcactaaggacgacaaccacatggtgccaatc

SEQ ID NO: 96026 - DNA, 535 bp, Zea Mays
atttcagtgtaatgtgctcatctttgtgaccttgtaacttctaaacaaaagggattctgccctaggtaaccacatcaatattgtagatctatggaaggagaataactttgctatagaactcatgccttggtaccatgaagaattctgagataaatgagcctaaagttggactgtcagactgcttgaaatctgaaattcagattaacagtgggatggcatggagttagggctcgaatttaagcatgatccagtaagaatttggctaggggtgctataacaaagatgaatatggtttaatggtttacaactttgatgcagacagtcactctagttgttatacaaaaatcaaagaaattgttgcccaaagttgctctgccagacttgtatcaagtaactaaaactgaacctgaagacagaaatggtcacagtgatatgggaccaatttgagcacgccataactttaaattcgttcggttttgacccaagaatcctatagtaagtttgtagactgatgtttagtgaacaaattttaagg

SEQ ID NO: 96027 - DNA, 308 bp, Zea Mays
cccacggtcgggaagacagccggatgttcgcactccgagttggaccgagtcccccacggatcaggaggtaactgaggcgggggctttgctagctgaagttggactgctgaaagagaggggtctgactgctgaggttgtggttgctgattttgttttcaagaatattcagccgttgaaagacagggcatacccggcttatctgtactgaggcctagctgactcaactcgggttaccaatagaagaattccctctgtagacttggtgaaccgtcttgagatgattcttagaggcaaggtatcaaatgttg

SEQ ID NO: 96028 - DNA, 423 bp, Zea Mays
atgttttatgtgattatatcatggcaataaaagacgatgcaatattagagtaagtgcttattgatttatctattttatgtatgtcaactacttagattcttgatataaactttcgtcatgctacattacaggatgacatgggtgcgaagtttcaatccttttaagatagaaatatctgtcaaagacctacaaaacatattaacgataaatcaagatatgattctaagatgttttgacatggctgttcgactgcttgctaataaagagtcacgtaggccgaaagaagaaatcataaataatagaaaacattatatggacatgcgtttttgggtaagtttgtttccaatcattaatgtattaatatataatatctacatctaatcctcatgtggacatgtatatatattgtccagagaatggttg

SEQ ID NO: 96029 - DNA, 423 bp, Zea Mays
atagctttcctggggcatatcttgactgcagaagggatagaagtagacccatccaaggtagaagtcatttcaaaatggaaacagccatccaacgtcagtgaagttcgaagctttctgggaatggcagggtattaccaccgctttatcaagggattctccagcatagcaaaacctatgaccaaacttctcaaaaaggacaataagtttgcgtggactccaaaatgtgaggaaagtttccagatcatcaaggaaaagcttacaaccgcgccagtttcaacactgccagatatacaccaggatttcgtcattttctgtgatgcttcaaggcaaggcttagggtgtgtcttgatgcaaaatgagaaagttattgcctatgcatcccgcttactcaagccccacgaacagaactaccctacccacgac

SEQ ID NO: 96030 - DNA, 789 bp, Zea Mays
gtggaggtggagggaggacttggatctcttggtgttgtaggtacatatgattgggttggtgatgtattggttcgttgtggaattgttgttggtggtatcgctggggatggtaagtatgcgcaacaacttgttggttgtcggctggctgatttctgaccattctgtctttggtggccttagttttggggcaatcactagtgggatgtccgcagtcatcaccgtgaaagaggcagtagaaccttcgtgactgtggagcacggcctctgcttctgcctctggtgttagcgttgcggccttgtgtggggtactcctggcgacgagctatgtctccggtgggatgttggttggcgatggtgttcacctgttgctggttgcgatttggcctgctagattcggactgtgccggtctgacccatgttctgctagaatgcggggtgtccttgggcttccgttaagattccatcttgcgctgatgtacctctttggacctgccgtacttttcgaataactgatacaactcttgcaagtttttgggtgggtctcttatgcagtggttgtataagacactggtgcggagaccgctgattgcatagtgaatggctatgtggtcatcgacatatggcaattgtgacttaagtaggaggaactttttgtagtactcccgaagggtttctttctaattttgcctgtagagcgataattcagccagggcatctgtgtccggcatatacccttggaaattcaacaagaacttgtcgtgaagtgctttccatgattcttttgatagtg

SEQ ID NO: 96031 - DNA, 704 bp, Zea Mays
ctgaatccctgattaggcgttttgggggcaccagactatctattgggtggcatcggaccgttggtgcaccatatgaccgtttataccggagagagatatagagagatctgctccgcgttggcgtggcgggtcctccttagggtcgcgtgtagtcgtactccttgcatggcgtcgtcctcacctactactctagctcctgtagcgagttcatcgctgacatcttcgtaatggtgtgcggcgggttccacggatcagtctcaaagtgcggtcgtacgtggtgtggcttctcctattgtcatgggcccttcgtcacctgtcagcatgcgcaggtgcatgcttggtctgccgtgttgtctcgtccttccgatgtacgggtaactgtagagaccccgatgccattcggcatgctatgcatatgttcggacgtggtttgatggtggcgcgtctcgtcatagctgacgtggataggtagctctggacttagatctctgcctcgttgggttgttcgacggtgagttggtcggccgaagctggttggcggagagttgtcagtcggactgtctcacagagttggtcggcagagttggtcatcggagagttggtcgaccggtccgcctcgtagagttggtcactagagagttggtgagtcggtcttcctcgcagagttggtcagcaaggttggtcatcgtagagttggtcagccg

SEQ ID NO: 96032 - DNA, 394 bp, Zea Mays
ctacaaccaactgccctgaaaggatgtacccactactttgtcaatatcttgccaactgatatagtaagcaacgctaaaaagtgttgctgtgggacacaacaagttggagaaaacgtaacatcagaatgcaacacaaacatgttatccttagttctccaatgcttaatatctcgcatgttttaaacacggtaattggcactaagatatagtcaccttcagagagaaatgagcttttctgtctcgaagcaattcaacacgaaatatttacttctaacaaggaaaatgctacgcaatgctagaacggagagcagggatattggtatctcaccgatgccgttggttccaccagtgaccagaaccagcttcccctaaggcatgatgcacttgatccacc

SEQ ID NO: 96033 - DNA, 653 bp, Zea Mays
actttggcttttttaacagagcctactattgaataaggctttaaaactgcaacaggaaaatgaagataggaaaaatgaaattgttatcagtaacttggaagagagagtgaaagaacttgaaaatcttctggcagaaaaagattcagagattaagactgccgaagtagacctgactgaagctcatctttggattaaggaccaaactactcgaatttctgatcaaaacaaacagcttgaaagcacattcaaatttagaggaagctggaatccgttatgggcatgagattgaaggtttaaaatataaagtcaaagtcgaagcagagaaaagctctaaattatctaaaacccttaaaatgcttcgggacacctactctggcttcccggctcgatgctcccttcgcttgcgcgagatttttagttcagtcggagcaatgtcaggagaagagaaatattatgtctatgatattccaaaggcactcgagtttgtggaaaaagaaatcaatgaatttgacgaagtgatggaggggcacgtggatttttgcgccctagtggccgcccggggaaaagtaacatatttgcaaaagctgggtgtaagcatttgagagatgttaacaagcccaccttcgctatctctccagctgacattaaggata

SEQ ID NO: 96034 - DNA, 477 bp, Zea Mays
gtcaaatccgatatcgttggtttgatccgtcgacatctggctaaaactcagccttgtaatttcgtcaaaacaaatttatttagaattcgacgaataaagttttaagagaaaattatcaaagccggaatcagtttatttcggtctgtcgtttctcgtccagatctaaatctttaaatggtgaattaacggtacgaattcatccgacttctgagtgttcgccaaatcaaatcctatccaattgttgctgtcgatcctaattattcgaccctttgattatcgctaaaattcatgatccaaaatatctgtgattctctgttaaaaaaagaagaaataaaaaaggggggaaaaatctgccgccgcccctccccttcagatttctttttcatccgacctctctcttccctgatttttctaccgcagttctcgtctaatatttttcaccgcctacagtcgttggcctcatctcctcgtcctgtg

SEQ ID NO: 96035 - DNA, 486 bp, Zea Mays
ggagaacttgagaattgcgcagtcaagacagaaaagctatgtggatacctggagaaggcagttggagtttaaggagggtgatcacgggtatctgaaggtgtcactgatccggggtatcagaaggtttaaagttaaagggaagttgtccccttgctttattgcacccttcatgatcctaaagcgagtgggggaagttgcctatcaactggaattacccgaccatcttgcggatgtacatgatgtcttccatgtatcccagttgaagaagtgtctcagggtacctgaggagcagctacctatggaggatcttagtgttcaagatgatctgacttctactgagtatgctatcaagatccttgatactttgactcgtgtcacgaggagtaaggtgatcaaaatgtgcaaagtgcaatggaaccatcacagtgaggatgaagctacttaggagagagaagaagagctacaaatagaatttccccacctctt

SEQ ID NO: 96036 - DNA, 289 bp, Zea Mays
cgacgggtaccgggaatttgttgtgggtaggggatgcgacgatagagcgacttcacggtgccggtgaacggagacagactctgcaagcaggaaggtcttcacgagtagcaagcaacatcaatggtacaagggaaataaggaggatgaacatgcgctagcgtttgcagcaggaggaaatgggaggggtactgcgctcttatattgaagaggagatgaggtggattaggatcaaattaatcacagattaaattgctaattgaacccttgctttattgtgaagagaacagac

SEQ ID NO: 96037 - DNA, 883 bp, Zea Mays
gccctctgcccatgcatgcgacgacgtgcgctacagttacccactgacgatggcggttgcgcagtactgctccacagcaacagctgtaactgctgttctcactcgcgtacgtaccggccggatgctgcttgcgtcgtcccgctgtccaaaaaacacgaacgaatggatcggaccatgcatgcagcgagtcacgagccacagcatcgaacgctgtcaacaactctacaccacgcgaggatggcgccagcccgactgcagaaaacctgatgggaggaaagcttggaagcggaagctgatggagctgtgaagctgagaaggagcagcagagttaagaagccgaactccaaatatattggtgccaactggctgtaacacaggggatgggtgtatctctggttggggtttcagtagcaaatataaaaggcgaactgctgccatttctgtaatttggcttttggcttttggttgttgaacaaacccgaacagacttgaaccgcaaggaataacacctgtccacatcgccaatcccagatcgcgagctcctccctgtgaacgtgctaacagttggtattcggagccaatctggatcctcctcacgagtatcacaccagatttcaggcgaaggctggagggatggcgccgccgcgggttgaggattccttggcgcagttggtggccaaaatcgacgacggtaacaaggatatgagtcgacgcatggaggcaatacaagcaacgatggagaagatggagtccacggttcagggactggtggtcgatcgaagcgagttccagaaatggcggccaggaatcgagaagaaggtgggcgagatggcggacgtgctgagtcagatgcagcaccagatgaacaagacgacatcaaagg

SEQ ID NO: 96038 - DNA, 569 bp, Zea Mays
caggtagtcacctcgcaatcctaggttatggatcatgaattcatagcccagtcaatagcccgatcacgttctacaatctcacactgcaaacgctctacctcatctgacaactcagtgatgcggcgactagcacgcgcacgctccctgcctccatggtgcagctccacagtcagacgttcgactctagcctcttggtctcctatgggatcattgctcccactgctgctcccctcatgtcgaggagccaactaatgacaaggtacaccatgaagttcggttgccttccgaagggtggtcttcgtgcgtgccatgtatctataagaggggaataatacttagtattgtttaaatatgatgcatgtaagatcctatgattatggaatcaactacttgttgatcccatacctcctacatataacctaatatttggcactcttttaccagacttcttaaaaggttagttgctataagaaaggatcaaggtaagaatgaaagaatattcaaaggtaagtattttaaaaccttttgaagcaccaagtaaagtccgaagaaatgggcatcgctctgat

SEQ ID NO: 96039 - DNA, 321 bp, Zea Mays
gggaattggctatacaaggggagagtatgtctgaggaagttaatgacgacaacaatgaacctacagccgatgaaagcatccaggccatatatgtagcagctgttaatgggagcgaaggtagccaaacaattcgattgtgggcctcggtgcattgtcaacaggtgtcggttctagtagattcaggaagttctgccagtttcttgggcagtcatcttatgggagtcatgccgggggtacagttactggccaagccagtgagggtcaaggtggctgatggaagaacttttgtgagcaaatattgggttcccaattgcaagtggc

SEQ ID NO: 96040 - DNA, 322 bp, Zea Mays
atcgtgcgcagccagtcgtcggcatcgaggggattgctggatccagcgaacgtgggaggcttgagcctcagaaaatctcccatcctgtcctgtggtcttccaccattcgagcgctgattctccagacttctagtgaggacttcaatgagtcgggtttggttggctagaacttgggctaaatctaatggcagctccggaggtgcgaggaggtgggtctcactcccctctccaccggcttctccttccgctcctaggggaaaccctgctccaatcccggaggcggtaggcgtggttttatccgaagccatctgccagggaaaaa

SEQ ID NO: 96041 - DNA, 598 bp, Zea Mays
gtgtaattaggagagtataggtatccagctacttattatgtaggatataagagttggataggttaggaaaataatagcctgggtaagaaagtttccggtgagaaagaactccgtgttgggtggtaatgcatctgaagatcgagtttgacttctctccttccttgacggggttgatcctttccctcatgagctttggtgtctccaagaggttaagatagatcggtaggtaatagtcaggtagagggtttagtaggtggctatatgatagttgggattagttatgtaaccaattatgtaggtcaagttgtttatgtatggctaagtcgatctaagtcaccaatttaggcttaagtgaattaggagtatggtcgagttgatctaagatctcaaacgggtttataggagtagggtctattgtatttcctcagcattagccaatcctgtttgagtgacttccaataggcttggtcataataaattagataggattggttatgactagaatagactagataagatcttgttatttagatcatggttgttacaataatgtggaataaataggcttattagggcaagatgaatccataaagataag

SEQ ID NO: 96042 - DNA, 872 bp, Zea Mays
cttcttgatgctgagtgatacggtgatgtttaatccgtggatcaatgcttcatattctactgcattatttgatgccggaaatgatagctagagtgcagacttgagttgttcacctccaggagcaataaagagaatccctgcacctgctccttgcaacttcagcgagccatcaaagtacattctccatacttcggtagtctccgggttgtctgggacctggtgctcagtccactctgatatgaagtcaatcagtgcttgagtctttattgccgtgcaaggtcggaactctatgtcgtgagctcccagctcacacgcccacttagctatccttctgatagcttctttgttgtggagaatgtcccctattggaaatcctgtgactactatgactttgtggtcatcaaagtagtgacggagcttgcgagcggttagaagtaccgcgtatagcagtttctggacttggggatacttcatttttgaggggccgagaactttgctgatgaagtagaccagatgttgcgccgggtatgtatgtccttcctccacccgctcgactactaacgaggtgctcaccacatgagttgtgcaggagatgtataacaatagatcttatgctggctgattcggcgtggctcggcgtggtggcttgagtactggtggtgtagtcaggaacttttttagtgcctctagagcttcccgtgcctctgtggtccactaaaacttgtccacctttttgagcaacttgtagaatggcatgcctttctcgcctagccttgatatgaatctgcttagggttgtcatgcatccagtaagcctttgtaccttttttgtgatcgtggtgcttccattctcatgatggcctcaattttttc

SEQ ID NO: 96043 - DNA, 575 bp, Zea Mays
gcaaaatcgatggacgacaaggtaagggtgatagcaaacagaaacacatcaaaggatggaactaagacaaaacttgcaaggcgacattaggagaaataatcaagggcaagataggtgataggtaaatcaccactcctgatctgggatggagaagggagggctctaaaggtttggttcaaaataagtgtcaaggtaaagatatagatactacaagggttaaaggcgataacaaacaagggtatgagagaaaaaatgaaggcattgaagagccagtggtatgagtacaacaaataatggagtcatgtccaagcttacacacggtaaagaagaggatgttgtcaagggtgagataagtaaaacaccgctcctgaactaggatggaaaggagagggctctaaaggctaggttcaaagtaagtgtcgtggtaaacatataggtattacaagggttgaaggcgataacagaaaagtgtgtaagagaagaggtataggtatagaagaaccaagggtatgagtacaacaaataatggtgttaaggcaagatttgcacgtggcagatatgagattatgaccgag

SEQ ID NO: 96044 - DNA, 3345 bp, Zea Mays
gtttccaccgtaaacggaatcgtgaaatcaggaagagataagaccagcgtaaaagccatggcatcttgcgcaattgaaaagcttcctgggcggcagcagaccactgaaaagctttcttccgaagtaactgagtgagtggcttcgcaatgatcccataattcatgataaatttatgatagtatctggtaagacccagaaaagcccgaagttctgtcactgtctgtggcaccggccattgtaccattgcatcagttttgagatgattggttgctaccccttagctgatataatatgtcccagatattccaacaaggtctgagcaaaggaacacttggagcccttcaagtaaactgatgggttctcaatgtggacagggcaggacctggcaaaggtgcacaacatgggtctccaaagaagggttgtagacgagtatatcgtccaaaaacaccatcacaaatttgcatagaaaatggctccaaaattgtattcatgatgcattgaaaagttgtcggagcgtttgtcagaccaaacggcatgacaaggaactgataatggccttggtgggtcttaaaggctgttttaaatttatcctccggtcgcatgcgaatctgatggtaaccttctcccatcaagtttagtgaaaaactttgtaccagccaactcatccaagatcttgtccacgacaggcatgggaaaacgattcttgattgtcaatgagttcacacgtcgataatcgccgcaaaacctccaagagccatctctttttttttgcacaagaacaggagacgcaaaaggattaaggatcggactgatcaaaccggctgtcaatagctccttgacctgatgctctatttcgtccttgtgatgaggcgagtaccaatagggacgcgagttcacatgcactgctcccagaacaagaggtatggtatgattgtaaacccaagcaggaggtagagtgtgaggctcgcccaaacacatcctggaactaagctaacaacattgtaatatgtggatccaacaaggaaggctgatgactgcatctgttccagcacagctagcgcccaaatctcattgcccttactccacttaacgaactttttagctggtagtttagaaacttgcaatggcgggggaaccacaccttgaagctgaatgggttgtccgtggtgcacacacattagtgtccgatgagtccaatgacactctaggactatgaggagaaagccagtcgtaaccgagaacggcatcgtatgcacccaattggactaatttcatatcagtgcgaaaggtatggccttaggtccaccattccaacatgtacaggtttggaatactgagatgaaagacccaactggttcacaaaagcagtactcacaaaactagtagagcttccagaatcaacaagaattaacgtcacttgattgtgcaccagagctcacagatgcaaacaaccatcacgttctgtaccggacagagcattcagggatagatgatggaactccttagtcaaagcatcctccacagccaattgatttaatgtctcctctgtcaactccaaatcaagatcattcaccacaatagcatttagttgtggcttactacgcttggtacacttgtcaggatgtgtgggatcaaatggctcgccacagaaaaaacatggtccattggctttacgataatcatgtagttgtcgttcacaccacaaaggagttgtggtaacggaacgctgctcaggtttaaccggtgctatagcagtcttatgaggccatatctttgaatgtttctgtcgactctggtcctgcacttgctcctgcaattgggccaaaagcattgctcggtcgagatcatgaggcacctgagcgagcactggcccttggatctcaaattttaggcccttgacaaattgtgaaacaaagaacatttcatcataaccagtgtgaaacatagaaacttcaaaccagaggtcttcgaaacgctgagcatattcattcactgtggcacgctgtttaagatccaataaactagccaaagcctttctgtaatcctcggccccaaatttcctttccactgcatcacaaaactgcaaccaactgcaacttgacacattgagcttaaacacttgccaccattttgccgcattcccttccatatgcagagcagctgtagtaacccacatggttggctggacatcatagatacgaaaataatcagtacacttatccaaccaaatcttgggctgagagccatcaaacttaggaaaactaagtttgggtaaagtatgactgttcaatgtggttctcatggtcggcaagtcctatcgtgggtggactggatacctggtcgaggagggcgaggtggagactattctaacaagctagaatcagaagactgactaataccatcctctgacagctgctcggccatctgttggagactaagctgagccacgactcttccagtttctgcaatctacttgcccatcaactgttgaccagtggttacctgtgtaatagcaccggaattaatatccaactgaaccatcatccgttgctgattggtgttgatctgaccgatctgatcgaacatgagatccatattctcgagaacacggtgccagttggccgcgttctggttagtgttcactgccatggcgtccaacagaaactgtgtctgcatggatggtcgagggggcgccgtgattgattacccacaagcttaccgtgcgggctggaattacagggaaaaacaggtccttgcgggtagcaaagcactcgatcacacaaacctaggccagtgctcagatcaaagccgacggaatcgtgtagtcaaggaagaggactggaacgaacagatggtgtgcataagggtgtagcaccgccaagattttgccgagatctgatcccctgacgccgaccgcgaaaccgaagcaatcgccgattgcaaacaaaggattcgatgcgccgatctaccaccgccaacaccacccactccgatccgcccccgccaacaccacccactccgatccgccaccactacttcgccactggaaacgagagacggcgcatgcaccgccgaggatcaccaagagtttgataccatatgtcacgacgagacggcacacacactgctgaggatcaccaagagtttgataccaactgtcacaacccgtggccgccgacgatcgcttgccgggatgtgagacgaccagatggtggtagagagccgaggagttcctcgtcccgtttctgatgtatttcttttttgatattgtttcttacacagttccaatgttttatccctcacacacaagctgacttcctggccacacatccatactcagcactt

SEQ ID NO: 96045 - DNA, 401 bp, Zea Mays
gtttatttcaccatcttcggcatcggtggaagcagcaattttttctatctctaccggggggtcttttgcatgatcctcatcacagccagcatgcgtcgtttcttctgaccacccacattcccctcgtcagtgaagcaatcttcttctcatcttcagcacctttttcaacccccttctcctttgactgcaataagcttgtcagatctgatcctagaggacttagcatagaaaacaggaagggttcagtcattacctttagaatttctattacaccgacagaagaggacgaagaagtctcaacaatcttctctggtaaatcttgcatctttgtctcgataggttccaaggttgaagattttcgctttttaggagccgaatgcttcgacttcgctgaaattttc

SEQ ID NO: 96046 - DNA, 969 bp, Zea Mays
aagaaaggaacaaatctaagttcctttgtgctggtgggtttcaataaattacgcactagattttcgacttccaaatagtagtgcatgtacatcattgttcatttcccctaatacttgatgtgcagtcaagctttcggtgcaaccaaactaccaaaagtcataaaaaatttctcaagaatttagatgcatgtcattatttactctactaatatattagttttcaagttctaattcattctatgttaagagatataaaaaatagaaaaaattatcattttgaccgaaaggcatatatcattttagtgaatctacaaccctcaaagtcattccttcctttggattaaccaacaatgtgcatgatcctgcctgcctctttggctcctacactgcaaaatggcccaaatcaccgaacaacatgaatcatgaatgcacctgaattgctcctgagctccctccacgatgctactaaatacgcaacattgcactcagaaccatcaattaaacaaaaagttagatccaacatataacaaggtggcatcaaagactgcacctcttgtgcagtttaacaggatgatatcatcttaaatgcctaatactgcaacagccaacagtgtactcgcaatccacatttcccggaacaaattagatggaaatacaagacaacatagcataaaaggatgcatcttttcacaccttttggggtcttgaaggcagcagcagtctcgcccacccaacccaaaccttgagcttgggcgatgccgccaaagaaaggcagaagctgtgagccgttgacggcaccaagctggtaagcttcctgaaagactgaagggcgccttgctcggatcagatcttgggagtaccgccgtgcgcaatgcggcaagttggaggggcgtcttcttcgctgtagcttccctatccgatcgtcccgcggcatcgcctgagtttttaatgctccagtccttcctcgag

SEQ ID NO: 96047 - DNA, 328 bp, Zea Mays
atgccatgatgggcacatgggaccaattagattggatatatggggcctagacacccatgtgttgcacccttctttggagttccttcttttgtctcttgtaagccggtattattgggaatatatgtttcatcagtggggtcatgttgttaaatgtttgaactttggaccccacccttctatctgcttgatactgcttatggatttggcatgagactatatgtaacattgggtcatactggggcggtcctaggagttgcagactgtaggtctcccattggtttacttgatgcgctgatgggcttgaagctgaaggatggatgttgtgccc

SEQ ID NO: 96048 - DNA, 829 bp, Zea Mays
gcctaccacgtggctcatcgttaagtacgtcggctatttgatagggatgtaattaatgcatcaagtacgtcgattttggactggtcgacatacttaatttaagaacgttgaccccgattatcgtggttttggaaaccgggggacaatgagatttgtgttcggtagggggtgctagcacggatttgctccgaatggtgagtcgttgggactcaatgagaaatctgagacacggttttatactggttcaggcttgcgccctagtataatgtagtgttgatcatagtattgctgaggttgtgttacaactggtgtgctcgtgtgtcaaaagaggattgccctgcccttttataactcaagggaggactttacaataggaactcatattctactgggagggagcttggcttgctacctctaggtggtgtggtcctccttatgtcatttgtagggtcgtgcgctgtcgtacccccgtatggtgttccatcttgttcatccaccatatgggttcctgtagcgagtctactactgatgtcttcaaggtagtgtgtgcgggtcccgcggatcagtctcactgtgtggtcttacgaagcacggctcctcccgttgtcacgagccctacttcatctttcaacgtgttgtggacatacaaccggtatggcgtaatgtccagtccttccgggtgtttgggtccttgttgggattctatactgatgtcacccaacgactaggcttgactgaccccacaaggcagtggtggcacgtctgagtccatatgcgggggcgcacgattcgtgttctgatggtgactactaggcgcgctgcacgttta

SEQ ID NO: 96049 - DNA, 288 bp, Zea Mays
agcctgctcggacgccataagacctgctgctgcgtaagagtctgaaggatggcagccagggtagggccaatcgcaggaggggtagcaggaacaacactggaactcttggcctcatgatcatgttagtggggaggcagaggtggaggcagaagtggaatcccaaaatcatcatcatcaggaactgctgcaccctagtctcgaactgatgaaaggtcgtatcctctgcctgagtgtttgtcactggatcaggtgccggcactgggtcctcaggggctggacggtagaagc

SEQ ID NO: 96050 - DNA, 620 bp, Zea Mays
cacttgtggtccctctctggctttgttctgctgaaacgttaaaatgcataatgtgtaggctttggctgcccttccatgtacacggcgtattctcttgtccggtaccccaatgcaggtacattttggtctccctccacctacctaccacaaaatagaattgcacgcttatcctagaacaattgacttggaatttgctgtactcaatgttttctggtgctgcagaatgatttggaagaattcttttcaatggtgaatttcacaaatccaggggttttgggggacgcttcatattttcgtcgttattatgaagtaagtatggagcttgacatgaatcaggctgtactgccaaaatacaagttacagctgttcattcgaagataatcagtacttttcatgcatgcttagaggtatttttggtggaacctagaaaacatgatcagaactgttgttcactactatttcttgcgggcctatagccacttctttctttttaccttggtaccatctatccttaaatgaaggcaccaatcatctgtgggagagaacccactgcaagtgcagaagaaaagaaattgggatctgagagatctgcagagcttagtgcaaaagtaaatcaggca

SEQ ID NO: 96051 - DNA, 560 bp, Zea Mays
gaagtaccaaaaccctaaatagacccctagaaaaccctggacagaaaccctagggggttatatgtaaattttgcacacttttggacctaagtgcaaaaaccatggaattagggtaccttaagtcatgtggttcacatatttgaagatttacaaaagaaaccatgagatttgggcctaaatgcaaaaggccactctagtgatcatatggttaagtctgaaatacaattgattgaggttgactttggagccctacatctcaggattcttgaagttttttctcaaagtaaatatagcaaagttgtagagctactataggagaacaactttgctatagggattaagtcttggtgccatgaaattttttgagaaaattggatccaaagtcgggctgtcaggcaaccttaagtctgaactttcaatgaaagtgaagttggatgaacttagggcttgattttgagtaagatatgttgctcgattgaggatagttgccatagtcgatttgtagctggattatagggctagaactttgttacagagagattaaccagttgccacacaaa

SEQ ID NO: 96052 - DNA, 394 bp, Zea Mays
ctccttgttccatttattcaaatttgagccatatattcaccactattcttgttattttatttgatgttatgaatacatatgactataccgctgctttcttatactcgcatgttgtgatcttgtaaatttgagttagtctattgttaggacaagtcaggtactcatcgggtctccaattcccgtcgtgcgatatgggaaaaaatcaatccctacaagggcttgttcggttcgtataaaattgaaggggattaaagaagattaaaccacttcttagttagaattaaataggaaggtatttaaatccctggatctcctccgatccggcgatctctgtgtaattgaacatggcctgataagagacgatgggagatttttttttccaattacatgtatt

SEQ ID NO: 96053 - DNA, 428 bp, Zea Mays
tgttgtcaaatgttgccttagtgtatgaaaggcatcctcacacttctggctccaatcatacttgactcccttcttcaacagttcagtcattggcttggcaattctagagaaatccggaatgaatcgtcgataataccctgccaatcccagaaaactccgaatctgtctcactgtggtaggaggttaccaatccattacttcttgtaccttctcaggatcaactgatatctcgtcctgagaaattatgtgacccagaagtttaatttccctcagccagaaatcacatttggacaacttagcatacaactgatggtcacgcagtctctgaagtacggtatgtaaatgcttagtgtgctcggcttcatttttggaatacaccagaatgtcatcaatgaaaaccaccacaaatttgtccagctctggcatga

SEQ ID NO: 96054 - DNA, 466 bp, Zea Mays
gttcaagttagcctagctctaggtatacttctccttagcatcgaagcaccgctgggtcaaagctggtaaagcagtagagaagagcacaatatatgaggtaagaaaggcaataagtagcaaaaaaaggaaactgtagactcactaaccaaggttgaaggccttcagatcttctatctgcctctgaagcagtagagggttccacttcatcaaagacaaaacttggtcgggaacaggagcaccacaggatttcagtcgggcagacacagaattgaagacattctgcaatttcaaaaattagcaaaagaaccaatttgctagcatgaacagtaaaaagcaaaagtcgactcacctgaagattggaaataaatagggaagacccaaagctagaagcatcgatgcactgcttgttgagggggcatcaacagaaacaatgttgagagcaatactcggggacgcctcagctcca

SEQ ID NO: 96055 - DNA, 497 bp, Zea Mays
ttaagcgtgagcatgtcgcaccgccttaagccgttgccgacttaagccgattgctctgtttgtagggtatagtggtcaccccaagttaattaagcgtgagcatgtcgcaccaccttaagtcatcaccgacttaagccgattgctccgttagtagggtatagtggtcaccccgagttaagtaagcatgcaggttgacagtgaacaatttgagggcctttgaagtctttttattgatgatatatttcccagtttacataatacattgtcgtcccaatagcttttgagatatagctaggggtaaaacctcctgagatgttctatgttccatgagttaccaatttccgtgccgtccatttgagtgagacgatatgatccaggccgagtgacttctgctactatgaatggtccttcccatagtggtgacagtttgtgccgcccttcccccgtaagaattcgccggaggacgaggtctcccactgcgaaggatcgatgatgta

SEQ ID NO: 96056 - DNA, 331 bp, Zea Mays
atgcaacacaaccgtatggatcctcagttaccacttgtgactgggttatccttgaattcgtcgggacacctttcctgccaacttcaacacagaccgaggatgttggttcactcactatgtctactgagccactaagtcgtaaacatcatgtgctatctggggcaagaccaactatctcaggtagtcgaaaccaacaatttgaagccgccatttcaaggaatgtggctacggtggctgaggatacaatcagtgacgttgtggaaggggacgattggacacaaccccatacaactgcagagatccacaacaatggtaatttctaaccaatttt

SEQ ID NO: 96057 - DNA, 358 bp, Zea Mays
ctaatcacttttactgaaattttatacatctctggactgggcatcaaattctgtaaaagataggggcaacgacgcaaaagtttctaagactctatgaacagtccctatggaccgcgggttcattctgaactaaccgaggggctcttatgctaaactgccctagcgaagaggtatcgcccaatctgggccgttagattctaaatcaacagatcaaattagatctgaatccgcaagcgctgctagcccatggatctaagatctatgcccaggttttaagtagctgaaatcgatccacatacaccggatcaagatcgcacggaccagatccgatccccatctcccgcaaactggtacgtca

SEQ ID NO: 96058 - DNA, 366 bp, Zea Mays
aaagatcgaactctctggtgcatgtcctgctgctgagctcggaggacttgaaacttcctcttgaggtgacccttttcttcttctctagccctttccacttgtatggccttgtttgagaggtgcgagaagctgagaaaaccttggctggcgaggatagtcttgagttctggtcttagtcccttcaagaaacaggccatcttcctggcttctgtgctgacatcatcaagcgcacagcgagccaattacgtgaacttgtggacgtactcactaacagatctccctccttgggttaattcccgaaattcttcttccttgagctggacgatccctaggggcacatgatgctctcggaaggcggcttcaaat

SEQ ID NO: 96059 - DNA, 683 bp, Zea Mays
ttttcgtcatactcaccagtgctccaaccgctacgacttggacaacttccccatcagacaggctcaggtacgtgaccgaaccctcagccctggcctcggctctctatagagtcaaagatgcaaatataggaaccagacatccccctcctgacacaagtcaacaacgagtacaagggccataccggctataggggctcgaccacgcctcctcaccgtacatggcaaactccggcacacctgaaggccctcctagatgctataaatagagacgtctagggcttcaggtagagggggcgaacacttcacggttttcacctccaccgcgatattgacacttgcctcaatcaactttagggacttgggatccttctctctcccaaccagcttgttctccctactgcaagcacttaggtgcaagtaatataagtctcatccccctctgctgaaagtaggcccatctcttgcatgaactagaacaaaagacttgtggcaccttgcatcacccatctaggccagggcacgcaacatcatttcactaatcagtagaatcctcgggtcaaaacaccgacaacatcgattagcactacactggactagtgccacagtctaaaccagtataaccctctaggcctcagctccttagctcggattctcatgattcaccattcaaagtgagttcgcgc

SEQ ID NO: 96060 - DNA, 707 bp, Zea Mays
tgcggggatggcgggttgattgcatggaaatgtaagggttcttttgcaaaacgcgttggctgaaggggtatcttcgtctgtgggccgttggattacgatcgagcgggttagattagattcaaaccccactgaaccggtatgcagtcctagccaaccgattttgatcaaacggccaggaatccatcacgaaagaggtacgcgatcatcaatctaagtcgtacgcatatgatccgacggtccatccttaaagcgtgaaggcaatggagtgatttaatcgggtccgcccattgagcatccaacggccgaggtcgaaccaacctcccaccgacctgagtccggtgccaccgacgaccagcgcggtggcgccatcaccggtgaaggtcgggacacgattctagcgcgtaaactctcggagtatcggtgttacatgcgaaggagacgatggcgaactcaagagaggggcacttaccgactgtggtgatggagagggggtcagccacgacgattggcggcacccaagctacggcgagcaattcaccgagacttggttacgccccgagttccgatgtccactgtatagtctccacgaagctcggggatgttcctaaacccgaaagcgagaacacaacgaccgtgtaggcttgattatcctacggcggatctatggtggtggcggcgctctcgagggttgatggaggatggctcag

SEQ ID NO: 96061 - DNA, 496 bp, Zea Mays
aggtcccctcaccaagttcaggcactacggtcgtttcaatataccgaggctagtgtgtcaaaaccttcattttcttgcccttcagcacatctgtgacgaccaaagcagtagttttcctcttttttcctttcctcaaggggtagctatagtcagggtatacgaagccaattgcgtcaaaaaccctgtttaatcttttcttgccccgacccccataggctgcttacaaggcatcatcttcggccttggataatgtcccaagtagctcgtcgctggtagcttcattgcatttcagccagtcatcatttggttcgtcaaacttctctctgaatctaaaggtatatttcaaacgaactaatccaccttcactggattcagcagtagtctccttcggcatttcccagctattcacaagtggccacaccctataggctatgtgctcttggactatatctcttgtgccaatgaaggcacaaacattgctaaaggccttctggca

SEQ ID NO: 96062 - DNA, 390 bp, Zea Mays
agtcagtgaccacagcttctgcagttagacccctttctttcaacaatccaacttctgctaacagagcccctgcctcagccacctcctggtctgtgggggattcggtccagctcagagtgcgaacatcccgctgtctccctgatcatggggggaaggaattcccatgattctccacgatgaaccattctaggcgccatcccttgatgctatccttgagtgggatgtcgaggtagtcggtcttcctcccaaagcgcatctccaagctcgctccccccaccagctggtgctgccctccggccatcccaggccgacagtggcacaaatacttccaaaggccaaagtggggcaaaacaccaagaaaggcttcgcataaatgaacaaaaacagaaa

SEQ ID NO: 96063 - DNA, 280 bp, Zea Mays
tattttcaaattcactagtgcagcttgatgacaattttgtcgtgcttctcttgtatgtatagtatgggaactgactagaaccaggtgatggcaaaatatggtagcttcctaagccagcatgaggagcagcctgttgagagtgaacaatttgttcttccagcggatgggcacgcagagggatcaacaccaccagctgtagctaagaaggataatcaacgaactaacctagcaaacttcactgctgatgaggacatgagggtttgtcacgcttggcttgctg

SEQ ID NO: 96064 - DNA, 352 bp, Zea Mays
cagggcagtcgtttgccacgcggtccggctcgcttaacacgtggtttgaatatatattttttactcagacacgcgatagaaaaaagatgccggagttagggagagaaaaagaaaggggaatattccttgtccagcgaagagctaggccacacccacacgatatggactgcactgcacgtactgggatattcggtatcctggtcaccccggcattatttggacaatatatatatgtaggggcgggtccgcgatcccaaagtcggacgcgctacgtgttatttggacgcctggaacctctctcgtttctcacgtgggactatcgtacccctactctacgtgtatctatatcgtg

SEQ ID NO: 96065 - DNA, 563 bp, Zea Mays
accatgtccttgcaggtccacggagctgctgagcggtgaagcgagtctttgcggcatcagggcaagctcctgtgagaacttagactccatgaccctgacccacacatcggcgtgcagtgtgtcttccgccttgatgaacaacggcggttgggtgctcaagaactcttgataagtagctgcatccagtgggcgttgttgctgccctccaccaaactgctgagggtagggctagcgctgcactagctgccgcatgatctcattctgcttagccattggttgctgcattgttggagatgggggaggtggtgggggaacttgctcattttgtccgcgatgaggtctagctaccatctgaaacataaattctgtcgttacattgacccaagatttcaagtagtgacttcatattatgaggagaatagtgacacaaaagtatatcgaaccaaacaaagataatcattcattcattgcattattcatacaggtcttcccgagttacaccatattaggagatccatcctatagcctagttcaaaagttggtaccaaaagctaagcttaagc

SEQ ID NO: 96066 - DNA, 338 bp, Zea Mays
catcatggttctgttaggatgccttatgctttgaccttaagcaatcaaatatacagatatatgtgtcgataagattcatgagttggtggagtatggactgatttggacagatgaaggagctttcgttttacaaccgctaggtaaagttttcttctttctaccaatatgaaaatgcagagatcacaatcacaagatgctgtatggtctagcgctcaatctgcagggataaaacactagaacttatgggttggatgcatccagcccacactgcaaaataaagtagactgtagcttaaaatcatatgttatagatatcaatcagccagatcctgagatcca

SEQ ID NO: 96067 - DNA, 548 bp, Zea Mays
tttcaatgatatttccagcggctcgaaatttagttttcacatgcaaaatcaatacaattagactctgattgagctaaagttttgcacttaccttaacaagtgagtttctaatgtgtacacaaaatttgagcttaaacggatttaaacttcaatagcaaatcagaaaaccggagaaagacttagggtttagttggggttttgtttggattttgtcaaatgaacaaatctgctagaaacctgtccatgaaatggaccaactcatacaagaagtttacaatgattccaggacggtttctaacccagagattatcccaaaacctgtcccaaactcttgaaagcaaagatcaacttaaaaatcaaactagggggttgagaggagaagaagcaactcaaaagccaataccatcagattttacacaagatgaaacaccatgagggttatgtgtggttacgaccacacttcctaaaaaaccaagaacttagacaccatggtttaaaacttctaaggatctcctagccagagagaaagaggtggattacaaactaaa

SEQ ID NO: 96068 - DNA, 385 bp, Zea Mays
agatccaatactggaaatggccatccccgatctaatcgtgaccctccattctcgatccaaaggccaggggctgttctcctacctccataccagtcgggcagcggcgcagggcataccgcagtggcgcctccccggtaaacacctgcctaggtgagcccgtgcacgaaaacgagcgcaaagagttgttgagcgatgcagcatcatagagaaaagggatctagggcttcctaccgggtcttgatgcagcggtggatgtggccacggtgcaaagcggaaccatgacgctccttaactctgatgagtaattctgattgcccccgatcgtgatctcccccgaagacgtgacacgcgactcccatagttgtcgatgaagcccccaatccga

SEQ ID NO: 96069 - DNA, 353 bp, Zea Mays
ggatgacgatgtttgccacctcttcctcttcttcggagctagaactctcttcatcggagttccattcttcaccaatgtgggcttggccatatttcttcttcttaaagtatcccttgttcttgcctccctttttgaacttatcctttttgtagtccttcttggcttcttattcctttttgtttgggcagtctgctatgaaatgaccggtttggccacattcataacatgccctcttctttccttttctttggtacttatcatttttcctcacaaacttcttgaaggttttgatgaacatagttgtgtcttcatcacttgaactatcttcatcacttgatgtttcgaccactttc

SEQ ID NO: 96070 - DNA, 419 bp, Zea Mays
tttgactttgcgtcaaggaggtggtgcacatggctatcgatgactagtggttggagctcgtcgctacagatggcgagcacgcggatgagatcaaacctagcctcgtttttagatgtaaacatagggttcaaagttaattacccagtaatatcgctcgtcataaagaaataacaattcattttcctcctattgccctccttgtcttgcagacgtcttcttcccatcaggccatgccacacaggcggtagagaggcttgcacgtgccaggacctctagctagagctgccatccgactatgcgtcgaggaggtggtgcacatggctatcgatgactagcggttggagctcgtcgctagagatggcgagcacgaggacacgatcaaacctagcctcgtttttagatgtaaacgtatggttcga

SEQ ID NO: 96071 - DNA, 1236 bp, Zea Mays
tcttcgaaattacacgaagaaagaagatcagctaatgactgttgcctttggcacccggccaaaacgaaggctaaatcgggtaatggatgccctgaatttcgagtaaccggactatgacagacttgacgaaggggccggggagcgaaaagaaaaagggttgtcagcattctgagcaggcaaactgcccggtctgtgaaggaagacgaggaggccttgaagaggatgaaaatatcatcggagccaaaggcgccagttcctaagaaacgtaaacttgacaaggtaccttatgccgaatcgaaggtacatgatgcaccggaaaaaaccttgagcccttcatcaccttctgctgccgaagcgttagaaattttgaaggtaatgactgaatccccaccattcaagctactaagtcctctgggattggaactgaccaaccttatatagaaaaaggaaatttcttcggctattgatggaagagacgggggacagaaaaagcgacgtatgatgaacatactccatgcaattgagcaaaacccacctctagcttcggcagacaagactatcaaatctactgatgctgaagtgccattgcaactaaaggcgaagatctcacaaccaccatgtccgaaattgacaagattatatcagacttggctgtggaaaaggaggtggccatagaagtgtcagacaaagggaagaaggctaaggaaatctcttcggaagaagcaaactttgacctacgacacctgggtggccaacagctttccgaagaagatatggcagagttgaaggattttgctatcaactgcggctactagccaaggtccatgctctttggtggggtggatgaagaagttataggatgcatccgtgatggtgccggtgcaaaaattataggcactctgtcaaagagcatcagattcccaaagcttgaaagggatatcagctgttacaggcgccagcatatcatagggagcctgttttattccaactttaaagtaagtactctcttttaagttactcctgatgtgtctgcattagcttaaatattctaagtttggacctgcttttacagagtttattactgagcaaagctttaaagatgcaacaagacgatgaagacaggaaaacgaaatcgctatctagggcttagaggataaggtcaaagaactcgaagactctttgaaggagaaagacaaaatgctatgttcagccgaaggatcgcttgccgaagcacaa

SEQ ID NO: 96072 - DNA, 446 bp, Zea Mays
gctaccacctcttggacatcatcggcgatgtcgttgccagatgacgcgtgagtgcttactgatacgtccaaccatcccagtttaccttcaccatttggttggcttatcatcgtgctgctgtcgccggcaagaagttgctgattatgcgtacttgtgcctctgttgatgctttggacccatgcctccctccacaacttccaccagtccaacgttggttactttggtgacaaaaagggctgttatccgcatgagctactcgtaggtttcactctagttgtagcatttgtaatgcgacattgctagaactgtcgggggatgttagtcttcgacgatttctagtctgacctgctatgactgtgtgggatgtttgagtctattcggtagtttaggattgtagtccaatattgtcatatgtttctggtaggcaacttgtccctaggcctttg

SEQ ID NO: 96073 - DNA, 401 bp, Zea Mays
attttgttgcattggatgtggctgcggcggagacttcgccacatgtggagggtgtcggggatcttcctagtgtgagtactgggtgtaggcggcgaagggtggtgggaaaacatagtgtgggtgaattttcgcgaagtggcaggcgccgtcgtatggggatggagcgtggccgtctccgagtagatcgggttggtaaacgagaattgttgtcctcgtcgattggggcgagcataggcgagggggatcttcagaagccttttgagggtgaggaattgagaataatgttgtttaattacagggagatgggtatcatcctgaaggttgagccaatgtaatatgtgatgccctcgtcgtgtgtatgtaattgtaatttgtatggtaatgtggcatgtttgccgtat

SEQ ID NO: 96074 - DNA, 395 bp, Zea Mays
cttctttctccagagagtttggcataaagtcaattatcgtcgttttgctcatatcctggggttctctaacaaagatatcaggggaaggaaccttaggagtttcaagattgggcacaatggatggcagctcgacatgagaagcaacgatactatgttcgatgagtaatttattcatttgcaatgtttccacaagtgagaagtctagcctatgtctttaagtaaaatagtagagagatttggagccttactctccttcactttcaagtccaagcattcgacaatactaacaacatattagctttggattaaagcgagccgtttggagtaatccatagaagacaaacattataaaagcagtagaaaccagtacggattagagccaagcgaacaggttg

SEQ ID NO: 96075 - DNA, 340 bp, Zea Mays
gtttgtgcttttcttccttcccattccatccttaattaattccttcgaaataagacaatggattgtatgtttatttgttgtgatgcatggcgatgacggacgatcatgctgtacttgcgtgctcccaactgttgagcgagtaaagctggttgcctgcaaacgaaaatttgtttttgtgtatgatgactgggtagtgtgcgggaatttgggtacattatatcaacaggcaccgccgtgatggcagcgtgccactgagctgctgtgccatcaccccatcgtttcgttcaggcccatcagaattcatgatctgcaccttctcatcatcaaaagtggaatttcg

SEQ ID NO: 96076 - DNA, 349 bp, Zea Mays
ccaccgctggcgatgaactgccgactgtttttccgagttaagggagcttcatcttcttcatcttcatcctccacagcggcaacgcaagaagcacacccattgggatcagcaacagtttggacacacccatcgggatcagtgtcagtaagaccagttgcaggcacttcttcagcagcaggagctaaggtaccggcgtcctcatcaaaactggatactcgccggaggcgtcttctctttttcttttgctcatcagcagaaggctcgggctgactggttcggctagggcgcctcgggcgagtgctgataggttttgggacatccaaagttgtatcaacctctggaaggggca

SEQ ID NO: 96077 - DNA, 736 bp, Zea Mays
gccaggtgcaatagttctggtgatctacccgttgctaccatcaccaccacgtccccacgccttggttgctacctccaccaccctctggcacaaccgtctcggtcaccttggatcagaaggccttcgtcacctcgtccattcagctgctatttcatgtactcatagcacttgtgattccctttgtcatgcttgtcaattaggccgccacactcgtttaccttttacttcttccacttctcgagcatcacgccattttgatttaatacattgtgacttatggacatctcctgttgctagcgtctctggttacaagtattatttagttatcatcgatgattgctctcactatttttggacatttcccttgcgcctcaaatccgacacctttcccaccctctctcatttttttgcatacgtccacacccaattccacaccaccatcaaagccgtgcagtgcgacaacggtcgagagtttgacaacctctcctcccgttccttcttcctcactcacggtgtttcacttcgcatgtcgtgtccctacacatcccagcagaatggcaaagccgagcgctctatccggaccattaacaatgtcatccgcacccttctcttccactccagcatgcccccacactattgggtcgaagctctccataccgccacctatctcatcaaccgacaccccaccaaaactctcaatttctccacccctcaccatgcgctttttggctcccca

SEQ ID NO: 96078 - DNA, 594 bp, Zea Mays
atttgctcctgaactcatgtgttgattagtcttaagattgaattttaaccttgcagtgttcctcgtttattcctgatgttgatccaagtttgaagcccatggtagggatggcatttgacaacatcgcagatgtggagaaattttacaaaggttatgcacatgatggtgggttctcagttcgtattggacaacataagaaggttaatgatgaaattaaaggcaaatatttttattgtgcaagagaagggtatagagtacagaagcgcaaaaaagatattgatcaatctggaaaaaagagaaagaagagacataacgtgatggaaacaaggtgtgggtgtgcggcacacatctatgtgaaccttggtaccgacaagaagtacacgatttcttcaatggttgagcagcataatcatggtcttgtatcgccgctccaccgacattttcttcgatccaaccgtcatgttacagagagggcgaagagtactttgtacaattgccataaagctagtattggcacatcccttgcattcagattgatgcatgttagtgatgggggatttcaaaatgttgggtgtacactgagtgatctcaaaa

SEQ ID NO: 96079 - DNA, 502 bp, Zea Mays
catgcaagtgtcctcccatttccaagatggtatgggaaggggttgcaaagggcctgctgccttcagatgactggctttgattctctggcaggtatcgcactcggatatgtacttgttaatttccctcttcattctggtccaccagtataaggatctgagatcatggtacatcttgttgctgccagggtgcatggagaattttgaaaggtgagcttcatccaatatcttctttctgagctcagggtccttgggaacaaccaatcgatctccaaaaccataaaatccccttgctgtcttgacggaagcacttgtatttctccgccttctgcttgatcatttctatgataacctgtacacccttgtcttcaatctgggccctgactatttgctcttgcagtgtgggctccaccgagatataatttaaatcactcgaagaaacaacctccaggttcaatttgcacaactcatcacacagggtggtaactcttgcatccatgctcat

SEQ ID NO: 96080 - DNA, 328 bp, Zea Mays
aagaataataccagtgttgcggtatttgcccctgaaaagtgttaggaaaaacaccaaacatccctggtcccaaagggggatagcgatcaccacgagaaggaaattgtggtccgctagataagtgggaaccaaagccactaccacggggtccttggctatatggcatatgaccaacacccttttggacacaaccaccatgtggtcttactgcctaaggcctagcagcaagaggcaaagccctctaggcctcacaggatgcctctaagcaagaaaatcttgaccaccatgagaagggtggttcgtgttccttctgctcaactcagatccc

SEQ ID NO: 96081 - DNA, 704 bp, Zea Mays
acggagggaggagctctccgcctctcccttgtcctttggtgtgaggccgggcccgcagcacgcagcacaatctattcaacggcccattttaagaatccccagcagccccatggcgtgaggcccacgcggctacaacactagagcgtgtacagagcgtaccttagaatgcgatgtttactttacgaagtttaaaataagtagtgagatacgaaggtttccaaaaaaaatataggctaacacgcacatcggtttctatcttaaataacagtccatcatccttttaggttgccaggctctaatccaaagctagtcgccgatctaacaaagcacctacgggctacggctttatcctttaacttccttgtgacgttctagcttttggtggacaccaggctttagcctttcgccctttcctgcccaacttgatttattgtatagtatataccacgagagcgcagtccatagggcgcacgcactagatgcaaccgtgccgtgcaggccgcggttcgcctctgaacaaatcccacgcagtagatttgctcctagtcctatataaagtgagagagagagaaaaaaaaaacatagcgtagtactagtagctttgcaaatggaccggctttgccccccaggaaattccgcgagccgaatctcacggcctcgatggaatcggcagtcacgtgtcgataccactcccccggtaaact

SEQ ID NO: 96082 - DNA, 358 bp, Zea Mays
aggcttcctgccattgtcttacaataaggacctctgacaccacactatgttaagaaatggaaaagttaaatctggggatgatacaacatggaactttgacccaattaaagcttgagtctattcttctgcaaagaattattgatgcccaaaaaagtgataagggtatgaaacatattcatgagaagatagaagtcggcagagctaattgtttcagaaaggatgatcaaggcatagtatggtttaataaacgcataattgtgcctaagaatgcggaagtccgccaacaaattttggatgaagctcatcttagtcgatattccattcatcccggaagcactaagatgtatcaagatttaaa

SEQ ID NO: 96083 - DNA, 401 bp, Zea Mays
ccatcaaagctgttcgttacttgttgcatcaaggtttggcttttcgtggccatgatgaattagaggagtctaaaaataggggaaattttaaagagttagtaaagcttttggcagaggaaaatgacaaagtatggattcagctttatgtctcaaatctaacattgataagttgtttgttaagtatggattaagcataaaacaagtcagaggacagggctatgatggggctagcaatatgagaggtgagttcaatggattaagggctttaatcttaagagagaacagctcagcatattatatacattgctttgctcatcagttacagttagtcattgttgctgtagctaaaaagaatgatgactgtagtgatttctttgacatgatatccctattgcttactg

SEQ ID NO: 96084 - DNA, 2254 bp, Zea Mays
cgagagctgattaagacacagctgccatgtcttttctgcagctctttctgactgcataggcacctgctctgcatgtgcaggctctacaacctgtgccttgtctggtattgtggcacggttgtcacctgtgagttgtgcatctggagccttgtctggtattgtagcatggttgtcacatgtgagttgtgcatctggagcacactggcattcaatgttccatcgtgaaacattgtctgtcacctgtgagttttgcataagtctaaactgatccattgttctagcaaaaaaatcatcatcgcgagctttaaagaaacattcacgatccttcgcgtctttgactaaatcataccatgttgaattcatgtccaaggatccacatgcagtgcctgtggaagaaataattatttagatgagtatgtactgggatcttgaattaactaagtatccaaaggttgatcctttgccaacaaaaaaaataaaatttaattaagccaacaaaaaggaacaaaagttaacatactttgctcttgtcaaagccacattagttctcataacacaatcaacaaagcctatattcccaccattattttgtctaactgttgaaaggattaatgtctttctcagcactttgacatgaatcaacaatgcatacttcaatagaaagaaagtcatgcttcttataaatctgaactctttcttgcaaagaaattacttgggctgcatatggagatactataccaacgttggttttcttcttctgctcggcgcatgctgtagtggttatagaccaaaaaaacatggatgacacttaaacatatcagctttaatgaaacttacatgttctttatcagctcaaatgttagacataccttccgcaaatctgccaacaatattggctaccacagcagcttcaacaatatttttaagccctgtttattgttttcttcgaaaccatcttcaacatggatgaatgaataaggaccatatatatgcacatcgagataaatattgttatagtccttaacgttcagaccatctataatttttccttcataaaatttttgatttggaaacttgctgatgaaagggtgcattctatattgaatatttagcatgtgctttgggaaatcaagtccacttaatctctcaaagaggcttcgcccaaacctgttctctttagcaatcttaccagtaaggagaaagtattagcagtctagaaataatcattggtaacacaaggaatcaaggatacattcaaatggtcttataagttataataaagacatatcgtgctctttaccactgattgtagttgtttgtcatccccaacaagcaccacatgttttatcccactagttgcaagagggatcaatgattcacattcttttaagtatgctgcctcatcaataaataagatgtggaatttctgattttccaaccaactagacctatagggagtgcaaaacacaagtcttgcatcttttgtttttgatttttttgaagaaacaattttgcttttaaatatttctgacaattttccattctcaactttcttcttcatgcggtcctcattaggtacactgtaaagtgtcgggaaggtatgcgtaaatttgtatctacaggatagaactgcaagcgatgaccgtttttggtcgaacgagcatatgaatctatacaacaatatatatagcaagaagtaatgtgctgacaataaatggatcaattgggaaaagatcagacaaattcctgagatgccagatattgagaaagcatgtcatgacattggtcttcatgaattgatggctataaaacagaactggcatgaagaaacaatcaaacagttctactccacattgtaaatgaaagtaggacctcgctgacatggatgacaggcaaaaatatgaagattactgtcacaaagaagcggaagctgcggatagggagatttgttgtcacaggacctgagaagagcaagatcgagagactgaggagaggaggatgaaaacctagtcatcaggagcagcagacgcgttctcggctgccaggagcgagggcgtgcctctcccgttgctttccttctttttttctttcttttgcccgttttcttattggccggagtgtccaatgtccagccttctctggaacttacgggaggatgtgagaggaaaaaaaagaaggcagagtacgcaccgtttaaaaggcatccaatggactctattgaaaggcgacgtggacaattttgtgtactccgttt

SEQ ID NO: 96085 - DNA, 475 bp, Zea Mays
agctaggaaggtaagagcacacaaccaagtttaaatactatagagatacaaactcacgctaatgtgttaatattgctactgaggtatcaagaaacacacaagcttctcaccaattctctttggagccccatgcaaatgccaagctcccactcagataactccatggatagctctagacctttccacgcacaagtggtgcttcggttgtggcctctcccgattgctctctaccgtatccactatcaactttctgcttgaaacatcataggccttattctctccattacatgatgacaaccacaccacagacacggttgatataatcacccaagacttacaagccccacttgatataactattacaatattgtgtgcaaggttcaaaggctaattaagaggcgtgtctaacctcacttctaatcacctgacaaaacctagagcaagcagtaatgatcatggcctaactaacataagc

SEQ ID NO: 96086 - DNA, 458 bp, Zea Mays
ccagaatgcggaggagaagaccctacgtgaacatccatggaagtatgagagggagaaccaactcggacaccctcgggggctgggtcatagctcgcgctaaccatccgagctggatcatccccgacaacaccctcgagggctgggtaagcgctagcgccatccttgagggccgagctctctgtaacagccacctctaaggctgaaggaccttcaaccacttccatgggagcagagcaatccagaccagcctcctgacccttaagaccgcactccaaggtcgatgaggcatgagacgccgctcgggataactccaacccggcatcaggcacatcagcacaaatatccatcatcccaccatctgccggctccgacaacagatcctctgggaccatatcttcgagaatctgatcaaaatttgccagagacaactcttgcagaccaacgagggtaggcaaagc

SEQ ID NO: 96087 - DNA, 337 bp, Zea Mays
cagttgcctcagcaaggcattttgtccattaacgaccaactccaattgtgatgccattttagggggcaccttctccatctgtagcacatcagcagcccttaatggtgaatgcacttgcttgcatatatcttagttcttgtctgttattttgaattgcatgttcctggaattaagtttagtttcgtatcacattatcatttgcagcgggcacgacacgtgagcgagcgagcatgcggctgtgcgggtgtgcggggtgcaagggcgacggcgcagcgcgctacaatataggcaagcatcagcaaacgatctttgcatcggtaatatcagttctcaattg

SEQ ID NO: 96088 - DNA, 339 bp, Zea Mays
aaaacaaaactttccacatatatgcatgagctagactaaacacaaccctcactagaattagtaaattacaacaatgtaccattacaataatcctattgcacaatctcacatgcccactccatgtcctgaatcctctcgcatgttcactctcctccctcctaaactctgttagtctctaaaatgtaaggttcctccacccactatagcaaacttgggccactagaagacgaaggaatcgtgccacatcgatggaaatttaaaacatcatctcttatcctacttactggtgctactccattctctcatgaagtctcctaccttctaaacccttagggtgac

SEQ ID NO: 96089 - DNA, 759 bp, Zea Mays
tgagttggactatacatctctgcatataaaaatctttgcttggcagcattggcctgatgccgtgcacttcactaccaatataaacacacacatttttcctatgtgcttaaaagcacaatgcaactagtgaatgtctttgtgagcgttagaccctgatggtcattttacttgttgatctgaagtcaactaatggctccaaattaacgacgaatagtatgcatgagcccctgaaggacccttatggataaaatagtgttgcacatatcagtctaaatcttaatgattgactatgcatttggtagtaataacaataattttgcagaattgtaaccatgaagcaacttgttgttgcgtgtctcgttagatgttgagactaactctccatgttgaagagcaaatatgtagtattcatgccactacattaatctaagtccaaagctcactgcataaaacctcgatctgtaatgtgcgtaagatttcccgaataaatcatcacaatagcatacattggccacaactggatgattgtggttggggattttatctatatgcttttagaacatctcggcattagggggaggaatgcccatatagtgtaatgcctcaatattctattaaacgcacataagccaaactgaacatgtcgtttggtgtgtactcctgtgtatatggagtttgccagaaatcgttgaggattaaccatattggtttgaatgcttctacctgatgtagatgtggatatacccgggattaatatca

SEQ ID NO: 96090 - DNA, 616 bp, Zea Mays
ccttaaacagagtttcccatggtacagtagcagaaatatctcagatgcaacgcatctcaccgccggtgaccctccgccccgattaacgtcgatcgtcgcgattcgtgcgccgtgacttgcggataaccgtgggcaaggaaagatctcaactcgtggaagggagagaggcttatcgccggactgttcaccatgacacttgccgcgcagtggatagtggtgtcctcatcgcagttcgctggcgattgtaaccgcgccacgtgcttagaagatgtaccacgtcgttgtagatatccgtaggaggtcagttcgtcgccggaggtattaccccggggagcgccatgatagtttacgccggtgactcacctctcctctcggccacccgtctcccctttcaaaattggacaccaccgcttagcgctcctataaattgtcggttgggtctgttgcgccatgttatcacgaagccaaagcagccattcccgccttcaattagccaccatagccagagaatttccttcttcccccaattcgatcgactgcgccaccgtgaaccgccttatcgcggctagctgcttccaggtccgccctcgctctttttgtccgtgttttagcgccc

SEQ ID NO: 96091 - DNA, 733 bp, Zea Mays
gtctaaagtgactagcagagaaggcctccgcgatagttgcaatgtgtagaagaacaacgaggaagcatgtgtcaatgcaccaatggttgtcggtgtggatgaagtagacgaggacagaggacgacactggcaacgagattgtgatggacgaagtcaaagaagtagatggttgacacatctagggacccagagtggcagtggtgagatctgcattgcgcaaggagtcatggtggtgctagagtgttgcaacagtggtgcttaaagaagatgacgaagagcatgaacggtccaggtataccatgtgagagaggcgcacaacgacgtagtcgacggtgatgtaggggcaatacaaggatgaaaataggcgacgatggcgcaaaacccgaccaattaggaagaaaaagggacccacaacaacaacaaattttgttacatcaccaagtacccacaaatagtccattctcctaactcaactcaccctccttatcctcgatcagaagactgaaagagggagaaagagataaaccacgatcacaaaggctcgacttggctaacagggagaggcacatagcctagcacaaccaacatcctctttttctttggcaggggtcttaatggctttgttgcttttctcctcaaataaatctccaaagatcgcatccattggattcactatgcaggggaggctaggcaatgcctctttgagcttgtcgcctgatgtatcctcctaggc

SEQ ID NO: 96092 - DNA, 739 bp, Zea Mays
tttcattaagaagaaaatttctactaaccatccaaaatcaaacatgaataaaaccaaaaattattctagatgcaaaataaaaatcaaacattagaaagaaaatttattaccctaattatcatcttaaatgtattattttagttgatggtttttatagtgttacaccctaaggagtagttttagcttccaaagcacacaattacgattataattggggttatttactggttacaaaattatctagattcgagaacagaactgctcataagtataacgagccatattaaacacccccttaatcagtcttcgccagattattttccacctgctgttcggatcaaaatcatacataatcagggagctgcatttttgctataccaattacacaattccttgcctatgaactaatcaagagagcttgtataccaaatcgtcataccaagaaaactcttcttcttttcttagattcgtctacagcgcttcgaaccctgatacagtagagaaccccgagaccggttcactggtcagatattgcgtctatgcacaggcactcacgcacctcgtacattcctgacgaataacagcaagatgagtgatgcaaaggtccaagcatagtgcatagatcctatccgacatccactaaacacacttttaatcgcgtccacggactgtccaaggccccttaatcgacgaaaagattgctgcctcgtctataaaaaaaacgtgcccatgtggatac

SEQ ID NO: 96093 - DNA, 358 bp, Zea Mays
gtttggaaactactacctgtgtgggacgtcttcaacctctttaggttgaatggaatatgaattttagaagcagttgggacgacttcaattggagatgatgagacaacgtcatgcaagacatagtcgaacatagatatctatgtagtcatcacattccctaagttgttttgttccttcattaagaatggtaattggaaagggtctaaaggtgaaaataagtttgggattatagtataaatttcatggttagtttgttaccttatgatctttgactctcgtttacatttcaatattatgttctattattttgtctagactcaagtttgttacaaaatcatgcaattttatccattctaat

SEQ ID NO: 96094 - DNA, 492 bp, Zea Mays
tcacgacatccattactcgattcaaccttcgttttggtcgggtgtcgaaggctgcattcatcagttgatcttctttcttagtatagttgcccaaaatttcgttgcacatagcctcaatcatttgtagccattcttggcaaggctctttgaattgtttcttgaacttgaagtgatagggcagacgaataagttcattctttttcttttctcccttaagcttcggcatattccattcactcaacgtcggaaataccccattggctaagtattcttgcaccagatctctagtgccgatctactcagtcacaactctgaattctgccatagcctgttggcatggtgaccccgatgacatgcggcacagcttaaactcagcgggctcattaccagcgtcttcaatttctctctcttcttctcatcagccttgatatagaaccactcacttttccagctggttggtcacttggtgcggtagcttagcatcggggcctt

SEQ ID NO: 96095 - DNA, 278 bp, Zea Mays
tatttatttacgcaacacaattacaacatcacaagcacgcacattttatttatttggatacgactttttattagttctcgtgatcatacaaaatcatctcaaacaacacaagtttcacagagtatctaggcatcaataactacgaaactcctatccatagccaactatagcaagcaagcacattaatcatggacacatgttaacttaagtttagacattacaaatctaagttcgttaagtgctaattaagcatttttagccaaaagggtgaactcaac

SEQ ID NO: 96096 - DNA, 759 bp, Zea Mays
aacttgaccgggtaaaaatccgaggcaggattgagctacggctaagaccgccgcacttcaccgccccagctcaccgtcggttgaatgatctcgtcaccgataagctaccgccgtcgtgcaccacgtgtctcagcgcggaacttcctcgccgtgactcaccggttgcatgcccggcgatcaccggagtcactgccacggtgaaagccgcttttccccggattgagctcgcctcctttctccggccgccaccgcgccatcctcaattcgagcgccaccattcctgggagctataaatcgagcccgccgttacctccgcaacctcatcacgtaccccaccgtccagtatcacccccaatcctgcaaccgggtgctccaatttcaaattttccccaactatgttctaaagcaccacgggatcgagctcaccgcggccggcccgattcaggtcaactcatgttgcgctgttgctcgttctagcatccctaagctcttttcaaactccccgaccttgtagattgaactacgagctctctggtcgccgggaacacggcgatcttgccgccatgctctcggtcaccgtggccagagctcgggggttggttatttgtgcaattaagttaggggaaatggttaggctagtcccaatttcatgtccgccgctcggagaccccagccgtagccccaatcggccggtatagaacctcgccggagctcctccgcgcgctgccgtcgtcgtggacgtgggcgtgtaaagaatta

SEQ ID NO: 96097 - DNA, 517 bp, Zea Mays
gtatgagaatgtccagaaatgagagatttaggtaaatcgacaccaatacttgagaataggttatagcagataaacagataacggggcagaatcaatgaaggatctagagattcggatgataaagccacaacatgattcacaaggaaaaagattaccagatccaggtgaaaggagaggtagtcgcatgagatcaatgaggatttatagaaggcttccaagaagaatttgggactgtatattgttttgcgaaaacagacaataaatcattttttgacttacacaagtgcacaaggaagctttagtcgatttaggggtcaagctatgggtttctacaagctgtgcaggtgtaacttcaaggatagaacacacaagggttagaaaataccaacacaagcatgaaaaaaatttaagaggtttcacttgctaaactcaaggttgtttggagggggttcttttcatgagcagaacagacaacactttttttgcggttcataaactagcaatacaacacattact

SEQ ID NO: 96098 - DNA, 435 bp, Zea Mays
cttcagcacaggcccaacagtggtgtccgaagtagcagctttcctctttttcccctgtccccgcagcggatagcggtagtcggggtaaacgaagccaatggcatcaaaaaatctgtttagtctctttttcccccgacctccaaaggctgcggacagtgcattatcttctgccttggaatatgcactaatcagttcatcacttgtatcttcgatacacttcagccagtcgtcatttggttcatcaaacttatccccaaacctgaatgtatacttcagcccgaccaaatcaccttcgctaaagttagtgatggtctccttcgtcatttcccagctctctacaagcggccatactctgaaggctatatgttcttgaattaaatctcttgtgccaatgaaggagcaaacagtactgaaggccttctgacatgcttcgac

SEQ ID NO: 96099 - DNA, 543 bp, Zea Mays
tgctacaaggagcttctgaacttgatcagtgatgtacttccggagaatcacaagatgcgacatgtatcagtccaagaagttgctctatggtctcggtatggactataaaaagatcgatgtatgtggcaataactgtatgcttttctggaaggagaccgcaagtgagaagaagtgtacagtatgtggtgagcgtagattcgtagaggttgaagacgatggtttgaccgtgacgaccgagatagcacgtaagcaacttcgttacatgcctcttatacctcggttgaaatgtttgttcatctccaagaaaaaagccagacacatgaggtggcacaaagaaggggtacatgagaatccagatgtcatggcgcacccagctgatacagatgcatggaaggcactagatgcctttgattccagctttgctaatgaagtgcacaatgtccacttcagtttggcaacatatggtttctcgcctttcaatctaactgcacggtcctactcatgctggttcgcctttgctgttccatacaaccttcagccagc

SEQ ID NO: 96100 - DNA, 440 bp, Zea Mays
aggagtgggagatgaggggttgggtgtgggagacgaggggctgggggctggacgcggggtgggagacgaggggctcatcccgccagcggtttagacctgaatatgttgtgttgtcttgtttggacaaaactgatatttaggattgagataaggatgaattggacagcaaatttagtggcctcgtccctatacgaaatatcaaaccttggactcctttaatgcttatccactagtgggatctcagctgcctttttctgtctgtagttgagaaaaactgatattttggtggtgtgagacaaaccaaattcattgtatttgggctgtgctgtgaacctgcgtgatagtagtgcatgtgtgccacatatttgagtccctgtggtgctggcaactggggaaagcacttcttcactgcatggttgccaaatcttgtgacacctgcc

SEQ ID NO: 96101 - DNA, 640 bp, Zea Mays
tgaaaatggatcaaccgcactgacgagaaagtaggtccactaataacggcctagctaggcagaaattcataaggatgaaaagactaggccacctcgatcaactcttcttggcgaacgggtcgatagtcgagcaactttgtgaggcggacacgtcgagcaaccctacaagacagatagatcgagcaaccctctaccgagcaactctacgagtcggagaagtaagggcccgcgacaaggaccaatacgtctatggaccctagtcccatgactcctcgtcatgcgcctgtacctacccggtatgaaaacgaggcagacactattggcccacgtcagccacgataaggcacctcgtcatcaaacaccgtctagaccaacgacacgacacgttgaagaagtgacggggagtctctgtaaacatgacgaggcatcaccatgtactgcccttaatgtctcccgactctgccttgttggaacaatcaagctccgctacaaggggcctcggcatcagagtctctacaataacccgtgaagcgatccaccatactagacgtacgcttacacgcgtatcagacggtgacatcaggggagccacgttagtaaggctcccgtagactgcaagtcccgctccgcttcagatcac

SEQ ID NO: 96102 - DNA, 1440 bp, Zea Mays
gaccgagcctcacatgtcgctggtagatgcgagctggattggcgaagcgagccaaaggtggttggagaggcggcacgacacagggtgtgttcggaggcaatggggccgcacatggcacactcaaaggtgatagggctgcacattgcgcggaagatgccgctggaaccaggggtagggaaagaggaggtacgtctatgggattggtatcaaggataaaatcaatgtcgagagatggggaggagccaacaaggggaaaaatgtcctgatcaaagacaacatgtcgagagatgatgacacagtggatgagaagatcgaggcactggtaccttttgttattggagtactcgaggaaaaggcaacgagtggaccgaggctcaagtttgtgtggagtggtggtggaggtgttgggatagcaggcacaacgaaaggcacagaggtgtttataggaaggggtggtgccgaagagggtgaataaatgtgtggggtgactgccttccttggaggggagacaattcaggagataggtggcagtgtagagacccttagctcagtaacgagcatgaagggaggcttgaaacaggaggatgcgaatgaggttggtgacgatgcaaatcatgccctcgaccttgccgttctaaggggaggtgtaaggacacgacattcgcagctacacgctgcgcgagacaaaaggcacaaaatgtcacattgaacaccctagatggtgcaaccgaactgagtctacacccaagcgaagaagtgggatatggtggcgaggggggaagtccactagtagtgggaaaagtcatccatgataaccaaatagtactggtaacaggaaatactcggtatcgaggatgtccaaaggtcacaatggactagatcaaaggggtagcggtttgggacatggaagaggggaagggtaagcgagcgtggcatccaagctgacaagcatggcaaggcgaggcaacgctgccgcgggggcaggggatggccgatgtgctcgagaatctggagaggacgtcgtgaccagggtggctaagacgacgatgccaagtggaggcagaggcaacaacagtgagggtgtatggtgtggcaacaagggaggggggggcgggaaatcaaataggatatagggggacggagctgtctcattgggtgaccacgacacgagtggtaagatctcgtatggtgagcccctagggatcaaactctatggaacaatgatcatcagtggtgcagcgacgaatcgagagatgagtctgtatgatgttgggggcaacaaggatgttgttgaggtacagaggaccaggaagaaccgtgtctcctactgaggtgacaggtatagtcaacccgttattgacaatgatggaagaagggaatgtggggctgtggggtggggtaaagaaacaataccagggtcaggagtggtgtggtacgacg

SEQ ID NO: 96103 - DNA, 339 bp, Zea Mays
gattattgaaaataatccactcaaagatcttcatctcatgcttttagaaatcatcattttttcttcgtctcatgctttagaaaccagtcttttatcatcagcttatgctttagagatcagcatattgtcttaatctcatgctttttgcaaactccaacaacgtggtttgcccatgcccgggtaaaggtgatcgggtgttctgaccaccgataggggcgggggcactggtggttgccaccagtatctgtcggtcgttgagcttctgttgccttttgttctcttgcgacccgtgtcctccgaagatgacgttgacctctccgtcgacgcgcgggaatgctc

SEQ ID NO: 96104 - DNA, 541 bp, Zea Mays
tgcgggatatagaagtcatccctgtatgagtaatcataattacgtcagatcgccttaagtcgctgctggcttaagtcgtttatttttgttaatagggcgtagtggtcaccctgaattgtataggcatgagcatgttgcaccggcttaagtcgccactgactttagccgattgctccattagtagggcatagtggtcacctcgagttaagtaagcgtgagcatgttgcaccgccttaagttgttgccaatttaagccgattgctccgttagcagggcatagtggtcgccccgagttaagtaagcgtgagcatgttgcaccgtcttaagtcgttgccaacttaagccgattgctccgttagcagggcatagtggtcgccccgagttaagtaagcgtgagcatgttgcaccgccttaagtcgttgccaacttaagccgattgctccgttagcagggcatagtggtcgccccgagttaagtaagcatgagcatgttgcaccgccttaagtcgttgccaacttaagccgattgctccgttggcagg

SEQ ID NO: 96105 - DNA, 433 bp, Zea Mays
gatgctaatagagtttatagacaatattgaagaacatcgtgatctttctattgaggaatggaacttcagagatactatgcaacaaaaagtggctgaattactagatattcagaaaatttattggaagcagcgggcgtctatcaaatggatcactgaaggagatatttgctcccatttttttcatgcacatgccacggtaaagcacagaagaaatacaattgcttcattgaccgatgagaatgggataattcactcggagcatgatcacaaatcaaatcttctttgggatgctttcaagagtagattgggatctcctgatttcttaggtattgattttgatctattagagcttttattcagaaatgaggatctacaatggttagattctccattcactaagcaggagattgacaacattatcaaatccctacct

SEQ ID NO: 96106 - DNA, 507 bp, Zea Mays
tttatgtttctgaaaatagttttcactggcggttttattacgttgtctgtcagttgtcggtgtattgactggaaggtctaacaaaccagtgaaataatgctgtgtgcccctaacccagatgggtgatgcaagatgatacaaatctttatcgtagttcgggcaagagaaggctctgcttccaacagagggagatgatacttatattacttgcacctaagtatttgcagtagggaatacaattcaaccgcatagtgagtgaattttatgcgaaaaatgatgcgacttgtgacttccgaggcttgtccttaaataaaatattttttgttgtttttaaaacctgttttatgtttctgaaaatagtttccactggcggttttattacgttgtccgccagttgtcggtgtattgactggaaggtctaaccaaccagtgaaataatgttgtgtgcccctaacccagatgggtgatgcaagatgatacaaatctttatcgtagtttgggcaagag

SEQ ID NO: 96107 - DNA, 406 bp, Zea Mays
taaagttaccagaccagcaagagccatagataaacatgtcaccatagcctctttggattggactggcgacgatccaacgtggacatccatggaagcagcagaaggggaacctaccgcaacaccctcggggactgagtcgctatcagcaccaccctcggggtctaggtcctccacgacagccacctctagggctggagatccctcaccacatccataggagctgggtgactcggatcagcatctttgtgaggaagaccgccctctaaggtcgacgaggcacgagaagctacccgggtgatctcttgcccgatagaatcatgtgatagaagaccaccatctgggacctctgcacagatagtgggattgtcagcttcaggaggctctgatagaaggtattcatggacaa

SEQ ID NO: 96108 - DNA, 1076 bp, Zea Mays
agtggttttatgttaaaatgatttaaaggcaagagaagacatcaaagaaatcattcagcgacccatatggtctcgcttcggcctccgaaggccgaaggtggaaattgatggcaatgtcgaagcatgccagagggatttcagcactgtgtgtgccttcattggcacaagggatttaattcaagagcatatatccttcagggtatggccacttgtggagagctgggaaatgccaaaggagaccaccgccgattctagtgaaggtggtctagtctgactgaagtataccttcaaatttagggagaagtttgatgagccaaacgatgactggctgaagtgtattgaagctaccagtgatgagctacttggagcatactccaaggccaaagataatgctctgtccgcagcctttggaggtcggggcaagaaaagattaaacagggtatttgatgctattggcttcgtataccctgattaccgctacccgctgcgagggcaagagaaaaaggggaagattgtcgcttcggtcaccccagctgagtcgaagagcaaaaaggtgaaggttctgacccaccggccgcgttatattgaacctgctgtagtacctgaacttggcgtagggtcctcttcagctgtcgaagcaaaacaaactgttccaatcatgcagagcgctgaagagccgactgtagtgccaaaggttcctacagtcgagccaaccttatctaaagatgataaagccgaggagccatagtcagaagaaacaatgaaaatgccagaaattctgagcccttcaacggaggcaaaactgccgaaggcacaaaaagcttctgccgcgactcccaagaggagaagaatggccaacgtgctggacgctgtgttggagactatgaaagctttgagccccgctccttcgaagaaaattgccaaagcgcaaactgaagccataactaggcaagctgaagtagaaacttggcaagccgaagccacaactgggcaagccaaagccaagactgggcaggccgaagccaagactgggcccttaatgcccagcgagatgaaggctgtcaagtctgaagtcg

SEQ ID NO: 96109 - DNA, 372 bp, Zea Mays
cggcatacttggtgatatttctcaatgaccagttctgtacttcagcacatgctcaatacaagaggctggaaatgcagaggaaaatataaaaaaaatcaatccctttagctgttatggatttacgtcccacactgcatttactaagggatatcagcgtgcacaggagtaagttagtatgaattatgcgcatgagaaatagaatcccacaaactatttctcacaaacatgtgacgtggtagaggaacaaacaaacatgtggcacacctgtagatatgtataaggcatgccacatatattttagatctaggaactaccacagtagaccttacgggaataaatgtgagatgagtacctctggaagcgggatcagcc

SEQ ID NO: 96110 - DNA, 416 bp, Zea Mays
atttccgccatcgcaaacatggggcccatacgagtcctcaagggtgtccagcgggtcatggggtgtttggcttccctcggccgcttcgtgtcgcgcatcagggagcgtgggttaccactctacaagctactgaggaaagccaaccacttcgagtggtcgacagaggtgcaggaggcgcttgacagcctcaaaagcctcttgacccgagcccctgtgctggtcccatcgaaggataaggagtcgctcctactctacatcgcggggatagcccaggtggttagctcagtgctcatcatggagaggcaggaagaataaggtgcgcgcccgctttagcatcctatctacttcataggtgaactcactcactaatgcaaaaactcgctactcggaggcacacaacttattgtacgtcattt

SEQ ID NO: 96111 - DNA, 324 bp, Zea Mays
ccggcgggaaacggtgaagacagtctgacggttctttctttcctgaatcaaaaaagggcggctagggcttcgtgattagggagttagggactacggtggaagagcgaacgttgcaggatctgattctctagcggctggctgttcatggtgctgactctacagaagcccaagtttgtattactgctctgcagctggcatcggaatcaaggttttgccagaattatttttggagatcggctcaatgaacatggtgaaggcctcgcactcggatgatccgggtttgtgcccttcctccgtcctctatagagaagtgcggtatttgat

SEQ ID NO: 96112 - DNA, 444 bp, Zea Mays
ctagccttttaaacaacccgaaagagtccacgacactattgttttgtctcactgacgtttacaccgaaacccctcacgttctaatcattcaccacccgaagtccttgacggcgagaggcgaagaaccaagctccggcgaactcgtaccggccaagataagcaatggccggtgctctaacttggctgagacctaattcaacacctaacaaatgtttcccctcgatcaattgaacaatccgagctctaaatcgccctgcccacggagacattgcgaacaatggatgaacacgggtgatcccgacgatctagcgcggtctagtttaattgaatgggtcaaggagcatcatgggcatgtaagggtgcggaaataagagagcagaggacaagatcagacctgaaatgagctagccgcggcgaggacctttttacggtggcggaaacccg

SEQ ID NO: 96113 - DNA, 897 bp, Zea Mays
gtcagttaccactgaagactgaacttggctgataatgaacactgatgaactttggagttgatttgagcttaatcgagtaagcaaatggccaaggttcctatgattgaattggagctggtatataggtgaataactttgctgtaatccggtcgatagcttttcacatagaaattaaagaaaaacacccctgaagatgctctgtcagacaaactaaagaagatcctgatggtacagtgaacaagaagatcccaggtgcactgaacctcgccgtcggtggcgtccgcacccgaatttgcgctggccgccacgatttgtgcccactgatgtgtggatcacgatcagcagtgaaagatcttcaccgtggatgagtttggggcactgtattgccctgtcgccgtacccacttgcaccggcgacatggctgcgcgaccgccgtcgttgtgccaccgtttcccttagttatgccacgccgtcagttgtttcaccatgtcataataggctgcggttgatggccagtctattgcctaagtcgttgctccagtgaatgccacggtagctcgcgccagggacctccctctctctccggccgcccgcgtgtcttcaccaaaattgggcgccatcactgataataactataaattgagcattcagctagctccgctaggttgttacgtgcccagtgcaccagccctcgcctctgattagccactgtagcgccccaattcccttcttcccccaaatcggttctccgcgccgtcgtgaacatctcgccgtgcctagccctctacaggttagttcaaacttctctgcttgatgttctagcatccattaagcctcctattgctcgtagacccgtttgattgagctaaaccgccctgaatcaccaagaacacctcg

SEQ ID NO: 96114 - DNA, 368 bp, Zea Mays
ataatttgtagtcttgcgtgcttgattggagaatttgatgtatgattacagagttatggagttttactttttttcccctgaatgtgcttgtgcattttcggattgttttttcaatgccgtggactgtgattttggcacattagttgaaatgtacgtcgtggtatttcaatgaggcgatagagtcgttataatttgtagtcatgcgggcttgattggagaatttgatgtatgattactgagttgtggagttttactttttttacctgaatgtgcttgtgccattttatgtggggaagataatcgtgaaaactgtgtgattatttgttacattattattatttttcttgagaagttgattgtgatttttc

SEQ ID NO: 96115 - DNA, 511 bp, Zea Mays
cggggatgagcatgtactctctgtcagcgagattgcaatctaatgaatgcaatgagtaagatatatgcatggcatgatatgcaatttgcaattaaactttgatggtgaatgatcaaattaatgaggtagggcttaatcttgctactgaagattcttgtggtatacttagcaaattagggtcagcttggttaagctaattggtaagtttattttggtgttccactgatttccctttaatgtcttagtgagagtttattaaggtgtttagctgaattattagagtgagatttattattccctatcttcttttctatttcttttatgcttttaaggtgggtttgaactacaagatagcttaataaatttctaaacattctgcaaaaattacagtggcttcttactagtgtataagtctctgtctcaaaatttggggtttaaaaagtgagtggttctctctgtataaaattatcaaatattagggcagagggggtgttttgaactacaaccttct

SEQ ID NO: 96116 - DNA, 385 bp, Zea Mays
gcttcgtctagggttggcaggccaccctaaacacctctaatcaacgtagagccaaagagaagcagagaatttagggttgacgaaggctaatctaggtctaaactagaactactcctaatgcctaaggtaaaaacaagatgtaaactgattattgattcgattgttgatgattaatcgaccgtagtcctctatgtatatatagaggggaggtttgcacccgtttcaatccatatcccgagctaaatccgcggttttagctaacaaattctgcaataaactcgaaaccttaactaattctgcgcgcgtggactgtccgcaccaccagtgcggactgttcggaccatccgctcgtacattttggtgcccaacatatgccccctgcctt

SEQ ID NO: 96117 - DNA, 844 bp, Zea Mays
atcagcgtcaatttaaaccgactgctccgctagtagggcgtagtggtcaccctgagtttagataagcgtgagcatgtcgcaccgccttaagtcattgccgacttaagccgattgctccgtcagtagggcatagtggtcaccctgagttagataagcgtgagcatgtcgcaccgccttaaggcattgccgacttaagccgattgctccgttagtagggcatagtggtcaccccgagttagataagtgtgagcatgtcgcaccgccttaaaccattgccgacttaagtcgattgctccgttagtagggcatagtggtcaccccgagttagataagcgtgccaattgacagtgaacaatctgagtgcctttgaaacctttttattgatgatatttttctcgatttacagaatacatcgtcgttccgagagcctttgtgatgtagctacgggtagaacttcctgagatgttctatgttccatgagttcccaatttctgttccgtccatctgagtgaggcgatatgatcccggccgagtgacttctgctactatgaatggtccttcccatagaggtgacaatttatgccgcccctcccccgttagaattcggcggaggacgagatctcccactacgaaggatcgatgcggtatggccttatcatgatagcgtctcagagtttgctggtatcgcgctgattgaatcaccgtattcagtcgctcttcttcgagtacatcaacgtcctccggcctagtagcttcagcttctgcaatgttatcaaagattaaccttggtgccccgaacttgagatcggcaggtagcactgcctccgaaccataaaccataaag

SEQ ID NO: 96118 - DNA, 398 bp, Zea Mays
ccactgttgctctaaaacgaattttattttgggataaagggagtactaaattacgttcaccacatagtaacttgatagatggatgcaaatttcataaaccgttagaataaatatattaccgtagcaacttagtgcaaacagaggtaggcccacacatttaagattgagtatacataaattcaaaggattaaaggaattagtgcttcgacctttttttatgttatgcatttttgacaaaataccgtagattagcaaaatcatgggtattcgaatgcatacccatgataatccttgtccggcccatgagtgggatcgctctaatgaacaatgcacccattctatctgacatggcctaggttgacatcgtcagaccaacgagtcagagtccaacactcatc

SEQ ID NO: 96119 - DNA, 385 bp, Zea Mays
gatgcactaagtcgcaaggcttcttgccattgtcttacaatgaaaacctctgacatcacattatgccaagaaatggagaagttaaacctgggaatgattcaacatggaacattgaatcaattgaagcttgggtcggttcttctgcaaagaataattgatgcacaaagaagtgatgagggtatgaaacatattcatgagaaaataaaggtcggtaaagcaagctatttcagaaaggatgatcaaggtattgtatggtttaacaaccgcatagttgtgcccaagaatgatgatgtccgccagcaaattttggatgaagctcatcttagccgctattccattcatcctggaagcactaagatgtatcatgatctaaagcaacattatt

SEQ ID NO: 96120 - DNA, 451 bp, Zea Mays
atggaatttacaagtttctattcatttttacattgattttataccttaaaatagaccccagggatctatttagaaagtttagggctggtttgcaattttaaaagttaacccgagggctttgctgtgaaaacctaagggtcattttataacaacgaggacctatttaaaagtctcactaatagaacttggacgacgggttagatctttataagaccggggcatttttgcaaacaaacccaccgaaggggtatggagcttttctggccgtgcgatcataaatcgacggtcccgattaaaagggccatccaccgaaccggtatgtagtgctagacgtcgatcctgttatcgatggatcgaatttaatggtcgaagccgtacgtgtattctaatcctagcccttcatctattaaccgacgaccatgattcactttaccaaaacgatatccaaaat

SEQ ID NO: 96121 - DNA, 674 bp, Zea Mays
gcaaaaggtccatgacacagagcgcccagagctgtactgggggtcaatatcaataaatccgggggtctcttatgtaaaaatgaaatggcgaaggggtatccgttgacacgagccagatcagattcagatcctatttcccgcaaaccggttggagcaggagccacacgattcaagatcaacgttcagggcttaatgaatcctagatcggatctccaccactggattctgcatcaatggtcgccactcgctccgattgaatcactaccaagcttttaatcccagtcgttcaacaaagatcgaacaacaaaggtttgtcttcttcctcccacctcaatagacggcggcgcaagcccgatacacggcagcccttgtgctggcgacaggatctaccacacatcggagcactgcccgaaccccgcctagtgctacatgaagaggaaactagggcgaacccagctgtggcccaaaaatggtgaaccagcgggttgctgagcctatccatagtagcacacgaagccgccacgaaatgcaaatttcggtgagagattcccagtgctcaattaccccatcccaagtcctggagtgttaatcgcgattacagtgacgagatgaacggattgcgaggactcataccagcgccaaagctctagaaacgattgtccacaacggcgttg

SEQ ID NO: 96122 - DNA, 1066 bp, Zea Mays
cacgtggattgagcaagaactaggtcaacaaacatagaaaccctacggcaaagcaaatcctgatgtcatcgtcgcatatacgaatcagccaacctttatttcctgcatttcctcctgtccacacaaaagtgggagcacatcattttaccttttgctccaagtgacaccatgatagcttactactcatcccgccatatccatccacacaattcacactgatgataaacaaattaaatgaagacgctttgctggagacgacagagcaaatcgattttgtgtagtctcgaacaacaacagagagggaccgggaggacataggaagacacacgctgagcgagctagctgaaattcgacgatgatttgatggcaaccaacgacatggctgatctctcccgcttttaattcgctaagcacacaatgcaaatcagtatcacgccacacatctcacactcttcttttgtacaaagctagctagatgctcatggatcgatggatatctgcttcatgaaatcagtttgttggtcagcggagggtcttgatgcatcagatagggaagagttctataaactcaaggcaaatgaaattgttgatatggtagtggacaaatatataactagatgttaatatgttattgccggtgtttaaaatagcgggctaacccatttatccccggctttctccagcggctacaaaaggatatatcgggatatatctgcagctaaatgttttagcggttttcactagacagtagacacttagacagatcctcccatgatcatgcctatcccaaattccacgaacagcctcgacggcccgatcctagttcccagacctcacactagccgctgattgcaacaagcaaagcagcccaaaatacatttatctcacaactagccgctgattccacaaacatccaagtcattgatctcacaactcacattctcacctacaatttaaaatgcacctcgaacaaaaacagctagccgctgattgcaacaagcaaagcagcccaaaatacatttaccattcacaaatgtaaacagctagcaaaacattcaccagaaat

SEQ ID NO: 96123 - DNA, 1088 bp, Zea Mays
ctgccaatccacacaaccagagggtacttagacaacaacaacaagcagatatgaatcctccaaatcctccaccagccggaactgatccagtggttgcagatgcaaatgctgcaacaaattgctgatactatggcaaatatacatgcgcaaatgcggtaggaacgccaagagatgcgccaggaaaggcaagatatgcaggaggagatgcgtcaagaaagaatggggcgatagcagcaacctccattgccaccaccgccaccaccacttccaccctgggacaagcactgggaatttatgagccacaagccgcctacctttgccagctctccagatcctctacacgccgatgactggttgatgtcagtagagaagatgctaaacattgcccaatgctccgaccgggagaaggttctctatgcttctggtcgtctgactggtcctgctgctgattggtgggattcttatactgctgcccatgacgctgctgatactatcacttgggttgaattcaccacacagttcagaaattaccacatacctgctggactgatgaagattaaaaagaaggaatttctatcaataaattagggcagcatttcagttagtgagtaccgtgacaaattcattcagctatcatggtatgctcctgatgaggtggctgatgatgagagaaagcaagagcacttcattgaaggactcaatgggccagtacaatatgcactggttgctcataccttcccatcatttcagaggctgcttaacaaagctctagctattgaacacaagtgtgttcaactgggtgacatgaagaggaaggccgttacccaggggcagggtagcagcagtattcgtcctcgctacgttccgccctagggtacaccagctcgtccaagaggaggaccgtgcccagctcagtacgctccacaggggactccatagacacccacactcgtcaggctgcccccactggcaccccggcgaggcctataggacagaggataggccctacatgcttcaagtgcagtcagattgggcaatatgcaaatgcttgtccggtggggatttccagcacactagctccaaacaag

SEQ ID NO: 96124 - DNA, 650 bp, Zea Mays
ctgccatgatactgggtcttgctctgctggctattggaggatggtaccttggaggcgggtgctggggcattcttggggccattcaccgagttggagtaagtaggcatggatgccttcaactgaggaaattttttcttgtagtgactggggtctccgcagtgccaacaggcattggctggaggttggttgcttgcaacggaggggggctgaaaggagctttgaccctgctgactaaaacatgatggagtgggtccagctgtcttgttgaagcttggtcccttgggtggaaacccaaaggatcgaattctttggtgcctatcctgctgttgagctcggaggacttgtaatttcctcttgaggtgacccttttcttcttcccttgccctttccacttgtatggccttgtttgagaggtgcgagaagctgaggaaatcttggctggcaaggatagtcttgagttctggtcttagccccttcaagaaacgggccatcttcttggcttctatgctgacatcgtcaggcgcgtagcgagccaattcggtgaatttgtgcatgtactcactgacagatcttccaccttgggttagttcccgaaattcatcttccttgagctgaacgatcccttggggcacatgatgttcttggaaagc

SEQ ID NO: 96125 - DNA, 908 bp, Zea Mays
tttgagtgagacgatatgatcccggccgggtgacttctgctactatgaatggtccttcccataagggtgacaacttgtgtcgtccctcccccgttataattcggcggaggacgagatctcccactgaaaaggatcattgtcgtacggccttgtcgtgatagcgtcttagagtctgctggtatcgtgctgattgaattactgtattcagccgttcttcttcgagtatatcaatgtcctctagcctagtagcttcggcttctgctatgctttcgaagatcaacctcggcgccacaaacttgagatcagcgggtaataccgcctctgacccatagaccatgaagaaaggagtgtttccatgcagagctcggctaggttgggttcttaggctccaaacgacgtagggcaattcccttatccactttcctacgaacttttcattcttatcgaagacctttttcctgagtgcctctaatatcatcccgttagctcgttcaacctgcccattggctcttgggtgtgctactgaggcatacttgatctgaatgcttttttgctcgcaaaaatcgaagaattctgaacttgtgaagttggatcctaggtcagttatgatattgttcggtatcccgaacctgaatattatgtcttgtatgaattccacggccttagctgaggttaaagaagcgatgggtttgaactctatccatttagtgaatttgtcgattgccaccagtacgtgagtgtatcctccttgagctttcttgaaaggtccaatcatatccagtccccagcatgcgaagggccaagttactggtatggtttgcagttgctgggctggtagatgttgttgctttgacaagtactggcaagcttcgcacctctgaactaactcggctgcatcactcttcgat

SEQ ID NO: 96126 - DNA, 374 bp, Zea Mays
gaactctgcatagggcaaactcttatcccaactgccaccatgtttaagagcacattctcttagcatatcttctagcacttggttggttctctcggtctgcccattagtttgaggatggtaggtcgagctgaaattcaactgcgtgtccaagcactcgtgcaacttctaccaaaagtgagaagtgaactgtgatccccggtctgacacaatcttcttaggcactccatgtatacaaactatctgggccatatacaactccgctaacttggcccccgtgtaattggtcctcacaggaatgaagtgagccacttttgttagtctgtccacaatcacccaaatcaagttataccctgcaggagtgcggggtagaccaa

SEQ ID NO: 96127 - DNA, 978 bp, Zea Mays
gcacatgcattggaaccatcgtacttttgttgtagtttatatccagacctgttgcacgggtgaagctttgaagaatcgactttagctgcagcatagccagttcgtcagctattgccacaatcagtgtatcgtctgcgtactggagaattgtgcatgaacggtcagctgtaagggggtgtcgaatggtgctatctctggccagcagctgttgtaagacacatcagcaagtagtatgaacatgtagggtgacagcgggtcaccttgacgaaggcctttcttgcaagaaatccatctgcccggaacaccattcaaaaggacagccgacttagcaaagacttgcagtagcttaatccagtcacaccaaagaggagggaagccacgtgcctgtagaacagtgagtagagcatcccagcttacactatcaaaagctttggcaaagtcaagtttcagaacaacagttggagctttccttttgtaacagcattggacaagctcagtagcatagacaaaattttcagaaattgagcgtcctttcaagaacccagtctggtccaaatcaacaagcgatgtgacttgctgttggaggcgagatgtcaaaattttacccacaatctttactggacaaccttggagtgaaatcggacgaaaggatccaggcgcaactgcaccaacaatttttgggatcaacacaatgtatgctctattaattctttccataccagcatctccatggtggaaggaagctaagaattgcatgacagtggacttcactatatgccaggaagctcggtaaaaactaggaccgaagccatccggaccgggggcactattatgattcattgccttgatagctgcccaggcctcagcttctattaattcagcttgagctgtagtggtggagtggagcctctatacagtataacattttttattttgtttttgcacgacagaaatacatagacaacactagtttaaaat

SEQ ID NO: 96128 - DNA, 432 bp, Zea Mays
gttggttcgtgaaatgggtgctcgtgccaggggatggggcccgtggcttggtttgtggtcggacattctcgttgtacagtttggaggcactggttaggttaggacaactccatgtggaaatctggatcgttggctaagattgggagacagtaccctaagaatgataactttaagtattatatttattcccttaacaaaaaaagataagtgtgcaatttaactcaaacgattttgaagtgttaagatgacctggtagatttttagacaaggcgctggcttaacattgatgaaagagaaatgtataataatgcatgaagcacaaaaggaacacatgtaaggtagcaagggtatcagatgaccttagtattaagaaggttctgatgtttcagaaatggagaagtattcattttcatcataaggtttcgagcagaa

SEQ ID NO: 96129 - DNA, 395 bp, Zea Mays
cgttcctcgtcgaccttggagcgtggtcttaagagtcgagaggctgatctagattgctccgttcccatggaagtggttgaaagtccttcagccttagaggtggctgttacagagaactcggtccccaaggatggcgcttgcgtttacccagcccccgagggtgttgccggtgatgatccggctcgggtgggtagtgcgagctatgacccagcccccgagggtgtccgagcgggttctccttctcatacttccatggatgttcacgttgggtcttctcctccacattctggttgcatggcagcagcacgggcttcgggtcaggaggtcgccttagaggccggcgtgcctgatgacagagttttgatttctgctggtgacgctgaattggtcccctc

SEQ ID NO: 96130 - DNA, 293 bp, Zea Mays
gagagtttgtcatcgaacttcaagaattctcgtgggccgctgtgcatcgtgaaaggactcctggcacgattattctcggtaagtttcgtccccaatgatttgatcttgtctcctcttagtttagggccaataggatgggataacatggagtggaggtgtgggtgcgaggtttgttggtgaggcaccgccgcggttgatgtgcggccactattgttggccgacgggaggtggaagatgaccatgtgtcgttgatccggtgatggagattagaaggagaaataccccttcggtga

SEQ ID NO: 96131 - DNA, 331 bp, Zea Mays
tggataaacctgtaactttttgtaagtcatgctatgtgcaattatgtcattttgtccatgttcacatgattaccctagtttggtactgtgtgaattttcaaatccatgtcgtgcccttttgagctatgaggtgcatgagcaaaaggagccctgaattggtgataacaagtgctctcataaaggcaaaggtatggaaaatggaactgtgcaattttattgaatatcttgaagttccattgatagtgatcatagctgcgttcttgtatttcattggtggtatcgtggcttaggagacctatgccttaaaatattgtttcttttggtgtaccga

SEQ ID NO: 96132 - DNA, 399 bp, Zea Mays
cccgtggccaggcgcgctccgcgcacttcgacttggattttggagtccgcaaggtgggacccgtgcaatgcttccttcgagctcgaaaggtcaccgcgacgtggcatcgtttgccattggcgtagatgcggcatagcggttggtctctggttcatgacactgggacatggagctcttggcttgttgttacacaacaagatcgaggaggtcccagatctcttggtgggtcttccattcgcttggtgtttaggccttgggagattgtctagaagagcagcagcagcgacgacgttttggctcacccgggggaaacacggcgctgcgcccctgccataaaccaaacaacgatgtgcttttattatcgtgttgtgttgccgcctcaccacttgtgtggtctcc

SEQ ID NO: 96133 - DNA, 495 bp, Zea Mays
gatagttttgggttctggtgcagtgagtttggggcctcaccggtgttgacatgggtggtatgctgctgctcaccggagtcgggctgggtgcacggttatcgactgcgagaagtatgttaatggatttgggaaattctagcctttatgcagagtcgtggggatcgaggtttaggcctggggcatcaggttcaccatatccggcgaactcgccgtcgctggggttagcgttgccaccctgcccttgtcttagtcgggaatgggggagatgaatccctgaccgttggatctgggggcgagggttgcaatttggaagcgcgcataccgtttcgtggggtgaatctgggccacagatctgtgaatggatgaccctgtttgcgccgtggttggtcaaccgatcggttttgctaaagagcccctgaactttatagaaatcaacccacgctcctctgctgctttaaagctattacagcccagtctaattttatcaaattaaac

SEQ ID NO: 96134 - DNA, 539 bp, Zea Mays
cttggtattgaagtctacactggatccccccagtgatcatgtgaatgaccctgcggtaaggttgctcaacaaagtcctctttcttgggtgttggcggcaggggttttgatgtggaggatttggatgatgtggtggtggggggaggacttggacctcttgatgatgacggtacaagtggttgggttggtgatggatttgctcgttgtggtatggttgctggtggtattgctgggggtgataagtatgtgcgacaactcgttggttgtcggctggctgagttctggccattatgtatttggtggatttggtttctaggcagtccctggtggggtgtgcgcagtcttcaccgtggaacaggcagtaaaatcttcgtgactgctgtgcctggcctctgcctcttcctcttgtgttgttgccgcagttttgctatgaggggtactcctgacgacgaactgtgtctcaggcggggtgttggttggtgatggtgtttacttgttgctggttgaggttttccctaccggagtcggactgtgccggcc

SEQ ID NO: 96135 - DNA, 520 bp, Zea Mays
tacccacatctacctacttgtccctaaataaattaatcagatcttaactagtttaatctagtcataccaacctaatctagattctatctaatctattatgatctaatctagagtgggttacttaatgctggtataaaagataaggccatactcctaattcacatacgcctaaattagtgacttagatcaactcggccacacccaacaacttgacctacaaaacagattacacagctaatcccatctagcatatagttacctactaaaccctctacccatctgttgcctacagatctatcttaacctcttgtcccaaacccggatgaagacatcaagactcgagaaggagatcaaactcgttgaggaataataagagtcaagccatacttccaaaggaatcaagatccactaagcatgatggagtccttccttaccgtactatgtcatacccaagcctatccatgctttaaagacattctttttctgacacctttggtggctatacatatatacccatgcc

SEQ ID NO: 96136 - DNA, 645 bp, Zea Mays
aacacgtggcctgattctattggccgaaaaccaggccacacaaggtcacaaggttgtagccacagaagatcccacaaacgggaaaggccaatcgaaggttgacacatgatggccacgattatgcatggttaggcaacaagccaacaaggattaggtaactaatgaaacatgaatagaggttgaatggaaacattataaaggaaactaaaagtagaagagtaaaggctgaattaaatacatatttgcatttatagtaagacactgtggttgtgctcagactatgctaagaaattttctttgtgattttttggaggcattgtgtaaattgatttttcattttcgatgtgtatgctaatgtccttgccgttgcttgaattgatattttttcgatcctagttgattacagatcacagaaagtaggtttcccgaatagtcgcttgtatggtgtcggactgagagttcaagtgtcagaaagtccgcacatgtggtttctccgagcttgtcatcgcccaaattttcgttgaggtatatagattctcgagtgagtatataatctttagaatttctttcccaatcatgttactataaggtctctagaactgtactcaacagtcatcaaactatataatatgtagcatatcttta

SEQ ID NO: 96137 - DNA, 291 bp, Zea Mays
attctaattaatccatgatttacctatgtgattgcaacagtaaacatatgataaccacaaattaattaggtttaatagattcatttcacaaatcagtcactgtttatgcaattagttttataataaactcatgtttaatcattctaatcgaaatgcaaacatcggatgtgacccagactaaagttcagtccgagatccaaacaactcctacgcctgaagtcacagatcccacaaaactaggtgtagaaccgaaacaaagctgtacccaaatcgaatattttgatttaaaac

SEQ ID NO: 96138 - DNA, 341 bp, Zea Mays
caatagacaacagaacatgattatccgagttaagaacagagaaagggttagcaaacgtaccttttgtcaggaaggcatctttagccatagctcttgctgtcgctttatctacaatctttatgtcgtcagtagattccaatctgctgctccttcttatgccatcaccataatcaacatccatgccagatgaaaatttttcagagtccattttatcagaaccatctttttggttaccaacaggagacttaagttttttcccttgcgcaggaggaatggttccctcatcatctttagcaaattcttccaagtcttgagaacttagaagatcatcttcactttca

SEQ ID NO: 96139 - DNA, 281 bp, Zea Mays
agttgtggcgggagcctttgtcaccttccacagttctgcctctaccggtgggctctttggcaacactattgttttttccaactctggctctttagccacaccatctttggcttcggctgacccgactataggcaccttcggcactacagtcgatccttcagcactccaaacagtgggagcagcttgtttcgcttcggcagcggaagaggtcccttcaccaaattcaggcactacagccgtttcaatatatcgtggccggtgcatcagaaccttgatctttt

SEQ ID NO: 96140 - DNA, 637 bp, Zea Mays
attgcctattaccataatgcatgggttagcttgtgtcgggtgtgataattaggggtacccagattatccctataaaaacgcactcaggagaggttaaggcataaccccgaaggtaagaggctaagccacctccttacctaaggcccaccacagatatctaccatccacacactgaaacccctcctcgagggtctctgatcttcggcaaatcttcgcctcgcccgaagtcacctcgtcctaccaccgctctgttcgtctcgcccgagctggtcttaggcagaaaggacagggacgcccaaagtccagcgggggacactcgcatttaatgcacacaaccactccacgcaaaggcacaatagcatagtgtctacaagacaacggtcatatctaggtgcaacaacatgattacgccctcgccactgtgcatgcacgccgcctgccatacccccgacgtgacatctaataagataggagaagcagacccgccctcagtgcaaatcttcgcctcgcccgacgctaggctctccctctggcacaatctccgcctcgcccgacgtagagcttggcctcgggtgatgacttcgcctcgcccaagctcagcttcggctacctactccaccacgaatcctcgcaggag

SEQ ID NO: 96141 - DNA, 514 bp, Zea Mays
tatggatacaacgttgatacaacatacattacacaattgcatctccgtggttaaagttctggtgttgactaagggtgcgttcgtttcttcagaattgaggcggggaattgtttcaggtgtatcaaagttttatacaaattaggtaaatcatttctggtcagattgatttatatatagacgatggttccgggacgatgtctcgaaattttgctgattgatgcttttgctccgtgcggcgatgcggccgactcaagccggtttccctggttgccccttgcctgaggaaacaaaagggatatgtggattctgaatgcctagtttatgtcagcatagtgcgtcctgttctggaatctggagcctcttgggtggggttcctgctcaccttcaccggccggttcagctaacagcgtaacacaatctgtacaagcctgcaagccaggccctgtctgagcttgagcgtcccttgaaaccttttttgttttgggttcagaacaccggagagacatcgtcagag

SEQ ID NO: 96142 - DNA, 276 bp, Zea Mays
gaacaaaaagaagattttgagatatgtggggcggcaagaacattgcaaagatgaaagggcccggagaaggttcctgttgccacaatgatagatggaggtggaaataagagagtatactagcatctagagtggtgtggtaggaggcactagaatcagcaacccagtcggtgacagcaggagcagtgagggtcatcgtgaggtagctagcaagggactgttgatcccaccccttgggccacggggtccaggacggagtggagtggtttggcagtggac

SEQ ID NO: 96143 - DNA, 662 bp, Zea Mays
gcctgtctgaagggttacgtcctatttaggaaagaatacacggaggcaaagtattgtccgaagtgtaaatcgtctacgttcatggaggtagactttggtgatggatagaagaggcagcttgacgtccctgtgataagcatatgccaccttccgttcataccgaggatccagcgtctatacatgactaaggaatctgtgaaatagatgacatgacacaaaaatggcaaacgatacaatcctgacaagatggtgcacatatctgatggtgaagtatggacccactttgatgtcattcactgtgagaaagccaaagcggctcataatgtacatgttgcactggccacagatgtttcaatccctatggaatgaccactgccccatacacatgttagcccgtgtttgttatccccatcaatctcccccagcgtatgctttcaaagacataatatattcatgtcattgataattcctggacactcggggaataaaatgggcgtgtacatggagcctgtgattgacaaattggttcttgcttgggaggatggggtatggcgtatgatcgagctacgaggacaaacctcaaaatgcatgttcgataccagtactccatgcatgacttatcggcgtatgagctattctgcacctagtttgttcacggtaag

SEQ ID NO: 96144 - DNA, 412 bp, Zea Mays
tgttacccagactcagcccgttaaactaaaaactctctgcttgaatacatgtacccatgggcggatacaattccacacccatacccggacacatcagttattctatacccgacaggtacccatacccatctagagtggtggagttatgcctgtctgcccaacttagtttagggcgaatggtgagtgtcgagcggcaacatttggccttccatcttccaggtgcgggcgtgccgttgcctaagtgcggcttggtcgcttcgattgtacaataacaaagagtcgcatactcgcgtcgcacaagcttggagccttggacatgctttactattttggttgttgtctccatagtgctgccatttgtcctaaggcctacgtagtatatagttgtgctaaggagctaggagcccaagat

SEQ ID NO: 96145 - DNA, 584 bp, Zea Mays
ggagaacggccagcggtggaagcggagaagaaatcgcggtttgttggaggtaggagaacgagctgtccgagcgggcccacctgacagagtcaccagcacacattgccggttcgtgaggctgaacagcagccccccggtagtagttagcgcgcgcgggccacttgggccgaggaagaccgcagctgggccgagccagggaagaaatcagcccatgcgcgttttccatttttcttttataatttctgttttatttccaaatcaaaaactcaaactaaattcgaattctggttttaatttcaagatttcaaacatcaaaccaaattctaattattctattacttgcactgaaattatttatttattattctccatattgtgtaaatatggaagaaaagaatgactttattaaaatttcctttctcccctatattttatattttcatttgaggtcaatttaaattatgattccttgattcaaataagatgcatcacataaataacatcagcatgaggtgcacatttctttatttatttgtttgttatttgcataatttaatgccattagttgagtatgtagagaaaat

SEQ ID NO: 96146 - DNA, 427 bp, Zea Mays
gtggaatgtatggcgagtagtacgaagatgtattgaacacctccttcgactgagaaggctgaggggttttgcttgttgattgtgtggtggcaagttcttatcatgtggctattgacctcaccacaaaacaaataaaaaggcttccttgggggtgcattaaatctaccaccaaaacttcagcctccccttctctgtcttggagtaggtggacaaaatgcagtgtttgaagagtgttgttgtgaacttgcttgttgctggcccgactaaccctaagactgggacgtcttctcttcggcttgcatcaggttttggatgctttgcacatgccttgggtggaatcttccctaaagcccctagcggccccggtgtatctgtgcaactcctgactttttggcggaagtcattatcggcccttatgtactcgtcc

SEQ ID NO: 96147 - DNA, 401 bp, Zea Mays
ctaactttgaagccattttgtgcttgatccattgagcgaatgaccaggatccttatgacaaagttgaagcccttacattggtgaataaacttttttcatgcagttagacctagtgtcgtttgaatcttggagaaaaaggcttctaaacttggtctatcaggcaaagcgatgaagcaattcagtggtgaacagtggactgaagaagatcctaggttctcggaaccttgtcgccggtgatctccacaccacaatttgggctcgcctgggagattcacactacgatagcacggacaacgcaggggggtaaaagatctcaacgtggaggggagctcaagccttatcatcggactattcaccgcgccacatgtcacgcgatcggccgaggtgccatcatcggagtc

SEQ ID NO: 96148 - DNA, 632 bp, Zea Mays
ggggtatgtaaaattacaaaaggctagcgcgtgcatttgataaattcgttgttgctaactttcccacgcacgagattggaaccaaggaaaatatgcatgattcatcggctgcaaattggcacgaccaatcccaaccactttacgggatgcagatgaactcatatctcgagcaaccacatccttctgcatagaatgaggtaaatcaactgatctacgcacaaccggaccgtccacacgcgagagcggagtgttcggggctgcaatggctagcccagttttccgaaccgaactagtgaaatatgtgccaaggctgtcgtactctacgcaaaacctaacatacacacggatcatccgcctacacggccggaccgtttgcgtgcatggccgggcagtccacgtgttatgctggacagttcggcgcttaagtatacaaaacaagatgctaattttattcacccatatgtatgctcgtcacagccatactttcccttactccttacatcacctcaacaccatagcatcacccccacagatgtgtttgggtgagcacttttcgtcgtccccaacgaggctagagaaagatgaccagctatatgagccgtcgagggtaagcattaatgccttgcaaaacc

SEQ ID NO: 96149 - DNA, 743 bp, Zea Mays
agcaggtagttgaacttgaatagagccatataggaaacaaaaagaaaaggtaatcaattgagcttaaattttaaacaacataatccattaaatgttctataagagaaatagagttaaaaaatgtaaatatcaattctttcctctccctctaggtagtcctagcattaagataaatatgcatataccttgagtggaatatgaattacaccttttacaaaagatgtaagcaataagcaagacttgcagttttgtagtgttctgtaaaagagaaataaaaatgatccatactgcgacaccatatttatggcccatattgcgaggacggtttggatctctaactaatgctaatgtttctccagaaataacaccaaatttatcaagtacacaaaacaaataaatccatggaaccacaaaataacagaggtagtgatgcttgtaagagcagtggacaactaatctccaatgaaagataagaagactactatagtggtctaccattgaattgttgggcaatataaaaggtcaaaaaagcttacaaatattcatagcagttgtaagaacacgttgatgattctcatgcagtgcactcaacttgcaaaaaaacactatcaaggacaatgatatgaactatgaagaagacttcattcattagttaattgattatgaagaacagttcattcgtaccaaccttctgatatgcttagataactgatagggaaacactgaattaaaagtcacatgag

SEQ ID NO: 96150 - DNA, 378 bp, Zea Mays
ggcgactgctctgtctctcttcctccttcccgttgagctatcgcacacagtcctcggtggccgcgtgttcgtcgtccccgacgagtctgctccgtgactgctctgtctctgtttgctccgagtctgctccgtgaccgctctgtctctcttcggcagtgggctcgaggattcgatggatagaggacacacaggaaatcggtaaatgtagcgggcgaaggacgagcgctatattttagcggagagggtagcagacgttgctggacggtttccggacgattggaagcgctatatttagcgtaccgaatcgtttacagtctcctgctggagacagcctaaggagtaccgagtgttccttttttacctcctctctcattttcc

SEQ ID NO: 96151 - DNA, 749 bp, Zea Mays
caacggtaaaattgcaactaaaaccgaaatcacatagttgagctacagatagcaaattaaagttaagagattcaactaagagtttggaatggtcatttgaaatagcaattttacacaaacctttaacatttcctttgcgattgtctccaaaagtgatgctatcataggttgagcaaccttcctcactcatttcggtgaacatcctcatatcactggtcatatgttgagtacaaccactatccaacacccaataattttctcccgccttataatttaccttagcatctcctttagccataagacaaagaggagatgagaaaagtgagggagcctccttgatagcaattccgacatttagtttagatgaagaatcatcatcatcatcatccgagcttgcatccgaatcccattcaactagataggctttgccatccctcttcttgtgaaagaacttctttttcttcttatcatctccatccttacccttgttcttcttgcttggacaattcatggcaatgtgaccgggttccccacactcaaaacattttctatcattgaaggcatttcttctatatgtttgtccccttctaggttgacccttctttttcctcatgaacttgttaaatttcttcacaaagagagctaattcctcatcactttcacttccatttccttcatcttcactttcttccttttcaattgcctttgaaactttagctttgagagctattgattcccctttcaccttt

SEQ ID NO: 96152 - DNA, 614 bp, Zea Mays
gtcccggggaggggattcagtagtaggtcgtctcgaccgtccccggaacggaccactggttgagactgccgccgactcaacttgggtgccgcaactccgtgctggtacgccgtgatccttgtcgtattcctcccgacgccttatctcattttcatgtcgttggtcgtgcgaaacactgatggtgctctgcgcgtctcgtcggctattgatggcatgacgcaggtcattcgcaggatgagcgatgggtagaagatgattagctgcctgagtaagcaacctccggtaaccttccgcgtctggggttcgcaggaggccatcgactatctatgccagtactccgccaacttcactcggcgtgttcagtgcttgagcaaaatccgagcaaggagagggttctctcgttgaagcctggcgtcttgttcggctatctctcgctcccgatcttgagcctgtcggctatcgcggtggtgggagttatgcctttctcggtgcactcgttcgtcaggagtttctcccacctcttaggctttgtctcgagacacggggtgcgcccagatgtcgttctctggcttcatgatgtcgccgcacattccggcatctgtttctccgtcgcc

SEQ ID NO: 96153 - DNA, 980 bp, Zea Mays
ttcaagcaaaaatccaaatcaaacattatgcaaacatcaccatcacatggttcttattataatgataatatcataaagtgtttcatcatctaatcgcaaaatctaacttattacaatataactaaaaaattttatagcagcctggtgatggatcctggttctccatagtggatcctcttacgaggaggggataaagccatggcagggacttgggcttcagggggatcccttccttccagttgagcttccagggctgcaatccttgcgtgtgtgtcctccagctctaaatgtaccttggagaggtctagggtagcactgtccaggtcggtgttaagacctgccaccacaccaacaagggtgttgaggcgatcttctccagcctcacctgaaacaatgttggtatggctttctccacaaagacgtagaggaagatgcttgcacttcatgtcatgcagctgttgccggtaagtatggctgagagaccacagagctcgcctagcagcattgctgaccgaagcagcataggtggatagcggcgtcagagactcatgagctgatagagtcctgaaccctctatcccctacatccatcaccctgacatgaatgcgagtgatgtagtagcaagcctgagggggctcagacacttgccttgtctcatatagggtcggacgtaggttcctaacgcatgcagaacattctacagcaggttagggaagtgccctgtctcgaacattgaggtataatgttcagtgacaggccatatccccatgaatttgtcctcttgttcttcattggcttcctcattgttgttatcttcctcttcttcttcatcctcgtcatcttcatcattgtcaccagaatcatctggatcgtcgccttcaggggcaggggcttggactgctggtgctggcggtgctgcaaatgacactccagctgcaaaggctagtgattctgccaatggggtgggcgtcgacagaaac

SEQ ID NO: 96154 - DNA, 344 bp, Zea Mays
agcaagtatccgaaaattcatacgggttcgggttgagcaggcagcagtaacccaatgtcacacacaataaacaaagaatgaaataatgtacataataaacaaagaatgaaataatgtacataacactgtagcagcagtaaattgtaaaccacatccccatatggccatgttgcacactctcacggtaaaggcatgcagcagtaaaacaaacaaaaatgaaactatagcacttaaaagtaagtccggctgctgctcttcatctgcacggctgttgcttctgtgatgcaggcactgctgttgcctgcttctgtgatgcacatgcataggcagcttgccactcgcca

SEQ ID NO: 96155 - DNA, 540 bp, Zea Mays
aaaaaatacagtcgcctagtttggagtcgttgctttaccgatgcagcaggcgattccaacgattcagttcctgtgaagatgacggagaataagaatgcagagccctacacactcaacgagtaagaatacttttcttttactcattacacgttgcttccccgtgtgtctgcttgtattttgtctagcaattatttggggttgattgcttgcaacagcaagtagctagctagttcttcaggccaaaattcgtaactagttcttcacgattattaggctttaatgttcaatcaacaacaggatcaatgtttccgctacttgtacattatttttgttccattagcaatcatagtattactaatgatttttcagggagaatatgttcccttgtttggttcctcatgttggtatgaaattcagaaatacagatgagggttggaacttttggttagcctatggtggtcaaagaggttttgatgttaggaaaagatacacaaacaaaagtaagattgatggcaaagttacatcatgtagatttgtttg

SEQ ID NO: 96156 - DNA, 402 bp, Zea Mays
atgcatgcacgtgtggttgattggattatgcgcatgatgagtttagtaaaaatccatcggagtcactggtgttaagttgaggtttgtttgtgcatggaaagtaatgatgtgttttatacttagaactcttagtcgatggtagaaattgtttcggcttaaatagagaaatggtgacatgccgaggtagtcatcacttcctctatatttataagtcgagtcaatacaccttatgcgttcattgaatttcacatcgcacatagtgttcggttatgttctacgcataaataagaagtatgtatgttttttgtagtgagtattcattgtgagtgagtatgtcgcaataaatgaattagtgcgcatataggagatgaatgggtgtgatgaaatggtgacatgccttcg

SEQ ID NO: 96157 - DNA, 536 bp, Zea Mays
caacgatacgagcttcccagttagcgtcatgggccgcgaacttcttatcaagctcggcgaggaacaacttggtttgtgcctccagagccagcttgaactgcggatccatggcaccgactgatttcgcgtggcgggtgaagtaatggaactctagaacgccgaggatcgacggaatctgataccaatctgttagcaccggttacacggagcagaactgaggaagggaatggggtttcgtggagaagaagaacaggaggtggaggaataaggataggcttcgataggtattttcttcttcgataaccattcctccacgtttcagcagtataagtatttacttattacatgggcagcactggccctcatttcacccactctgggccagacagaaccacattgggcttaagcttcctcttgggcctcgtagccatgccttggtgattgccagtttcttcaacagccttgtcttccactattacatctccttgtgtgctgacagatgtctgatattgccaccagttactccgatgattcta

SEQ ID NO: 96158 - DNA, 858 bp, Zea Mays
atgttctacaactattaagcccttagtgttcaaaggaaaggaacatataagtctacttcaaagagttaaactaatcaagtataagctagcataggacaaatatatatggtcataaatcaaacaggaaagtttagttactaggagagagctgtttaaaacatcatcaaccaatgggactcttgatcttcttcgggagtgtgtggtcaccatggaggtctggtttagattgctgtcctatcggccttcagggtttgcttgaattaagtgcaccatcagtggcagagtggtggatacaggcttgtgctctgctgccaagtgacctgtgcaaggacttcgactcactcatcctactggtgtcctggaccatgtggaaagagaggaacaatagggtgtttggttcacagacagttgccagcacccatctgtgacgaggtagtgcaccagaggggttcactgacttggcaacacttctgagattgatgagcgccttgggtctaagggacgtcgtgtaaagtttgcaaaatgtagtctggcaaacgcacaggatggtgtcttgccacgtgcaagcaaagtattaggcatacgctactcttgttattccgatatagttggccactttgtaatggtcgccttttttcctcttaatgaaacacgtgcaaacggacacgttcttgaaaaaaaatgggactcttggcatatgttagagcatttcccagagcaaacccttcgactaagtggtggaattgacaggggaaccctactggcctattgcggtacaatattgggtatagaaagggtgatacagagggaaaaactagacattatcctggtatatcatacttacctagcaacccttct

SEQ ID NO: 96159 - DNA, 449 bp, Zea Mays
ccccggtccctaggagccaccggtgagagagcgcattgggaaaaggcctctggcaagtggggttcgttggttacctagaagatatggataacgtctgccctgaaagaacctgccccggtcaaaccacgcgacaccgagcctagggtcgagcatggcggaacctaataggggatgggcgtgtcggaggcaaaccactcgagtggatcccgcgctcggcccctgactgactcgtcgtaaataaccgaccgcattaactactctagacaccgagccacaacagaggctccagtccgctttccactcaagacctatgaacccctcggaccacacagcactcatgacctacgaacccatcgacctatcacatttatgacccgcgcacccctcgccctgcgatgcattcatgacctatctgtattaggcctgagtgcgcagatcgctggtaggac

SEQ ID NO: 96160 - DNA, 689 bp, Zea Mays
gactctgaaggttaccatcacaaacgctgggggcaatcgcaaacaggtgtccgagcgcgggaacctattctgcgcatcacatacaatccggtacacagacgcggacagtccgggacctcgctagacagtccgggtcgttccaatagacggtccggcaacgccaaggagccacggcgaccacgtaccttcaaaccacgacaaccaaaactaggtacgtggaaaactaacacgttcaaggcagctagtcggttggtcaaatccagctcgacctttgatcaattattgtctaagtgtgtgaaaaagaaggccagccctagtgaccggccaccaaagcgacctcgcttacccacccaggagcggcagcaggttaggccgattggaccacctcgccaatcggaaaggacaggaggtcataatgttctattaaggcctaatgcacctgcgtggacacttccacctccacatacacccatgtcatgtcattatacatacataccactaccaccatatatcccgaatcagatgtggggcgcgccaccatatccattcgggataccacaatacctcgcctggggggcacctcaatcatctgtttttgacaggttgacacctccagtacaagaccgattgaaagcccctcaatctggttcgcgagcacgggcccaacaagattgtcggaccactcggac

SEQ ID NO: 96161 - DNA, 567 bp, Zea Mays
tcgagctctctggtgacgttcttgctgttgagctcggagaacttggaatttcctcttgatgtgccctttttcttcctcttttgccctttccacttggatagcttttggagaggtgagagaagctgtggaagtcttggctggcgaggatggtcttaagctcgggtcttaatcctctcagaaaacgggccatttttctggactcggtgctgacatcctcaggcgcgtaacgggccagctctgtgaacttgtgcacatattcactgactgttctcccgccttgagttagctcccggaattcatcctccttgagttggactatcccctggggtacgtggtgctcacggaaagttgcttcgaattctgcctaggtagcatctctgacggcttcactgaaagtgtcccaccatgctaaagccattcctgaaagctgatgagctgccagttgaacacgctgattttcgggacatgcgatggcttccaacttcctcttgatcgtgcgaagccagtcatctgcatcgaggggattgctggaccccacgaacgtgggaggcttgagtctcaaaaatt

SEQ ID NO: 96162 - DNA, 675 bp, Zea Mays
gaaaaaaaccacttgctagcatgaaaccaatcaaaacggcaagggaaatggggcccaaaacggcagcgagcaatagagaaagagggagatagaaaggtcaaaagatacggttggcttcaacaaagcttcagcacgagcatcaggctacttgcagccaggatgcttgtgcaaagaaaagctggggaagattagcgggggcgacagcaaatcgggaatgtgattcctttgttctcatcatctgatgggctaaacagcttcaacagcaattcatgaaccttcgagtccgaatcattcgtaacagggggtagtaaaagaaaagctcatacctttccggtttgtgaggcaccgactgtgctggataaatagtattatagctctgccatccttgtagcacaataagccaatggccccgcaaggaaccaggccaaaccgtgcccatacccataaatagttcatgcaacgcaaagcaagtccactagattccgattcagaatatttctgaaatgcacataataagtgacagatattacgagccccaattatgaatccatgatcgtaaacaggggaaaaaatttattgcaacatcagtccggaaagtgtgtaacattggctggatatggtcatcattacgcaaatgacctcatagagatccattataattaatttttataattc

SEQ ID NO: 96163 - DNA, 619 bp, Zea Mays
ctgatttactctttctgtctgaccatctgtttgaggatggtatgctgagcttctaatcatggttgttccaagtgacttttgtagctgctcccaaaaacatgccacaaacagtgctcctctatcagacacaatagtcctcgggattccatgcaaacacactatttggtcaacatagatctctgcatatttttctgccttgtgggtggtatgtactggtaagaaatgagctgtcttggttaacctatccacaatgacccaaatggaatcgtggtgcctggaggtgtttggcaatcccacaatgaaatccatgcaaatgtcctcccactttcaagaaggaatgggaagaggctgtaaggtacctgctaccttcaaatgactggccttgattctttggcaagtgtcgcactcagatacatacttagctatttccctcttcatcctggtccaccaatataaggatctgaggtcatgatacatcttgttactcccggggtgcatgaaaaacttggaaagatgagcttcgtccaatatttttttcctgagttctggatttttaggaacaaccaagcggtcttcaaaccatagaactcccttgctgtcctgacgaaagcatttgtac

SEQ ID NO: 96164 - DNA, 479 bp, Zea Mays
ctttgggatagttgcaacagctatggttttagcagggacggagtcagaagaatcctcagctaacatgtccagcatagcacttatctctgcatcgcttgggtttataggcatctcaaagtgaacttgcctctcatcattggggagatcaccaagtgaagcaaccagaacctcgacttcttcgggagagggtcgcactctaagacccaagccactgtcactagcaggaggattggacgcaaaactgaaaaaagtcttggaaggtggcagattccaggcagaatatgcaacaggagcaccaatattcgacattttgcctctaaggatcatctccagccggcttaccaaatccacagcaggaatcctcttgttggtaacctgggttgagccagtgacaccactatacaaataagccgggtacgctctgtccttcagtggctgaatgttcttaaaaacaaagtctgcaactacagcttcagcag

SEQ ID NO: 96165 - DNA, 411 bp, Zea Mays
gcactttacattgtgtatttgtttagcaagtatttgaaatattgccctagcattgttgtatttatagtattattatcttagtgctagttgttggggtgaagttgggctcttgcttaggttttaattagtgttgatttttagaaaagcccaattcaccccccctcttgggcatcgtgatcctttcacctgcgaatatgattcatcagccttaatcaaagcatatgttctgattacagattcacgtggtctgtgataactctcctccgattaattcaccctgatggtgatttgcctcattgagaggttcatcttggtgatgaaatttctagcaatgcgcgcaatatcattgtgctaggaatacagaacaatgaatcttttgtttttgggaaatgacgaagatcattattaaat

SEQ ID NO: 96166 - DNA, 528 bp, Zea Mays
cttcctgaaaagagcaagaaccagggctgcattttgtagtggaagagtgattgtaacagcgacgacggtgcaacaactcacggtgcgttttaaatggagcttggtgggtaatatgtaagtggaatgcgctgaaaaatgtagtgatgcaaaaccgaataataatccaagaacataagtctaaattgttgaatataaaggaaaagatgcacaaagaaaggaacaagatgtaggaagtggatagatgaacaccaattgcaccaaacgaaacttgttgctgcccaaacccctttttggtgtgctgaacacaattctcttttatttattttctttcctttttttgaacaagaactcgttgttttcagtccttcttttgaccaatatacatcttttcttttaacatttgtgacaacacagcacaactttcaactaagggggcgcacaaggatcaaccaagatggatggtgcagcacaaaaacaagaaactcaggaggggaatatgtggcagatagaaaataagggtgggacggg

SEQ ID NO: 96167 - DNA, 499 bp, Zea Mays
ctcaccagcactcggggcgcgtgcgggtgtaactagtgcgtgctcaaggccgactgacgatgtcgaacacatggtgatttgtttctaccggtgtccaagcgtccatttggtcatcctaacgtgcagatctcagcaaaaatcccttgtaaggtctgttcactctatcaaatcctatcttttatttgttagtcccgagtgtagataggcttggaacttggagaaatggctgggtcaaatcgggtctatctcactgcccgaatccaagagaaaatctatgccaactcgtgtcaacctgttttggatcgccttcaaattttactagggtcttcttagggtattttggtgccacattgtccattgatccatgtggttttgggttttggaactaggtgaacacgtgtggtcttggtaagggcctgaaaaatgaacatagagaaattctggtttccttttgtgctccctacttgagtaaccatttgggggcttttttgaaaccttt

SEQ ID NO: 96168 - DNA, 399 bp, Zea Mays
ctcgagtacatcaatgtcctccagcctggtggcttcgacttctgctatgttttcgaagataaaccttggcgctccgaacttgaggtcagctggtaatactgcctctgacccatagaccatgaagaaaggagtgtttccatgcagagctcggctaggctgggttcttaggctccagacgacatagggcaattctcttatccattttcctgcgaacttttcattcttatcgaagacctttttcctgagtgcctccagtatcatcccgttggctcgctcaacctgtccgttggctcttggatgtgctatagaagcatacttgatctgaatgttttttgctcgcagaagtcaaagaattctgaacttgtgaagttggatcccaggtcagttatgatgctgttt

SEQ ID NO: 96169 - DNA, 443 bp, Zea Mays
ccggctgcacccttaggcgacttttgcccctcgcggtgacttcgtgtttgtcgaatgccgaagaccgtcgatgcggtcttttttcgacgttgtagttttttgcgggggattttttgcgtgtatattacatggctccgcctcattaaaaacctcaccccccgggaggaaaagagtgcgggccggaataaagttgttttgcgaattacaagggcgagctggccctgaggagtcaaacaaaaaatttgcggagattgtcaatgttccaagaatgctctaagtcttcgccggatggcgttgtgagcctgtacacgctgggggacgccttcgtcttgacgatgaaatggccctcccactttggttctagcttgccccgggcctctgtccgagctgtccggactagtacgaggtctccttcgttgaattccctcgggatgactgtgtgg

SEQ ID NO: 96170 - DNA, 501 bp, Zea Mays
gcacacagaaggtacaagtgacgaaaaagaagcatgtgtgtggggccctaacgtacttagaccattcttagtgggagtttcatgagagttttattttcactaaatgacatgccactcaagcaaataagatgacatggcatgcaatttaatgaagacatatgtggaagtttcatgggagatgagtgagtttcatggagatgaaactctgtatacaccgtttcctagataaatattgatatggcagccttgaaagcagtgtcatgaaaccctccattgagaatgaccatacaagttatctgtatcctctaccgaccttgtgctctgatgattaattggattgtgtcggataatttggaccttagcccacattattagatgattgtcaggtttagattagatgccgagcgatttagtttgactctatatcgaatttcattgattgtacttggatgttccatttacgccgcctaatttatatgcaacccccccccctccccccgt

SEQ ID NO: 96171 - DNA, 489 bp, Zea Mays
gtccctcccttttttgtttcttcgcaacttgagatccccgaccacggcggcggagcagtggctcccgtgagccaagaccggccggaaaacgcaacgactatgcctctctattgctcaacacctaattataccctcaacgacattgatctctcacttaattgcagagttctagcccacaatctctctgtccacggtgatggcgcgaactgcggatgaaccgaggcgttcctggcaatctaagatggtttagttcaattggctgggtcgatgagcatcctgaacacaccagagtggagtaacgagagcgaggaggacgtgaacggacctacagaaggctggccacgatgagctcactcacggcggcgcagacaacagaattaggggaaatcccaaattggggagctatgggggatgattggaggtgagggctggttcactgggtgcacaattacttagcggagcaggctagggcaccaatttatagtgtcc

SEQ ID NO: 96172 - DNA, 339 bp, Zea Mays
ccacaacttcggcaagcattcaccttcatcatgccaccaaagaaggcaatagcactaggggatgccctgcagccactggacactaaccaagagacactctcgctgagagaagcccggagccagaaaaggaaggctaccagcccaacaccacacgacgaggagttggaccaagaaatcagagacctagaagccatacaccaacaagtgcagaggaagagagagaagatgcttcgtctagccgaccttcagaggaagatcgacgaagctgctgaagaaatgcgtcacatcacccaagatgaccaaggacaaaggcctcaacagagagagcttcatcaagaa

SEQ ID NO: 96173 - DNA, 491 bp, Zea Mays
tcatttttaggcacaactatgcggttgttgaaccatacaacaccttgatcatcttttcggaagcagtcggcttttccaccttctatcttctcatgaatgtgcttcattccctgatcatttctttgttgcaggatgactgactcaagcttcaaatgatttgaagttccatgctgaatgattcccaggttcaacttctccatttcttgacataacgtattgtcagaagtcttcatggtaaggcaatgacagaaagccttacggcttaacgcatcagccactacattagctttgcctgggtgatagtgaatctctagttcataatcctttatcagctcgagccatctcctttgtctcatattcagctctgactaggtaaagatgtactttaaacttttgtggtatgtataaatatgacagacattccccagcagatagtgacgccatattttgagggcatgaaccaccgcagctaactccaggtcatgagttgg

SEQ ID NO: 96174 - DNA, 523 bp, Zea Mays
ggaccataagcccacacgctccaccaccccgtgtcgggtgtcctagtatccggaattatagtcttgtaggtccggaaacctgaggtccggctctaaagaaagggcacacgtctcaggggaggtctagagctgcgtgactgcttagcccggtcccgtaccgtaagcctacgcactccaccaccatgcgacgagtaccctagtaattagaagccgtgacccaggggatccagacacacgggtcggccccccagcccagatcctataggccatgttgcgtaagacaaaggatgatggataccagttaatggttccgatgggtgcactactaaaactccctagctaaggctgtgtgcaggtccgggtcccagtcaaaataccctcctaggggccaggtcaccaactccttcttaagtatactggcatccagcctcgacaagtcgagaccacaccccagaggggccaagtaccagggaagaagttgacaataacacacatagcaaagggaaagtagcgtgcagataag

SEQ ID NO: 96175 - DNA, 617 bp, Zea Mays
ctagcttcatcatactttgagagtttacaggtgttatattccttaacaaagatcttttgaaccttatagatttcagagcatgatatccaaataatctttctgatccaagagtatttctttgagcacaatttgagagaaaatcttgagcagaattttagggcaactagagtatcacattgcttcagatgacaccatactttattttctttataaagattgtttaaacacaataggtgcgagagattctccaaatttattcatatatcacttagcacaattacaaatcttgagaggggcaacactttgacatttttttcgtgagacatactccttcttctagctaaacgatatattattcttccttgtcagatgtaccaatctgagctggaggtcggttgtcttcaactactattgtttctccagacggagtttccaagcacatggttttctcagtatgttggattaccgccttagttctttgtaaccaattctttccaagaatcacatcctttcccattgattctatcactaggagatcagctgaaaaatctatcccattgattttaacacttacattcggacatatgtagtttactaacatttttccttcaggtgta

SEQ ID NO: 96176 - DNA, 702 bp, Zea Mays
ctgatatcgcagttagatttctcgggtgcttcgctgggccaagaaaagggggaaagtcatgctcgagcagcttcctagactcattggcggattgacgctctccatggttcttcgctagctatcgtcggagcgtctagctatcgtcggagcgtcgcctgtagcctttgtcgtcatctctgttgccggtgagtatcttagttactgcgttgctgccttcttcattccgttttgcgcgacttggtcaggctagtacacagggacctctggttgccggccatggcaaccaccgcgggcaggacacagggcgccgcctctgctgggcaccgtgggggagaagatgaggttttgagcgttgatccggaaacggactgtctggattagttctagcttgccgtttgggcagggtgtgccccatccatcgatcggatgatgggtggccacgatgtgattccgatattttaaatctgagccgtgtattgcggatcgtgtggtacggatccgagtgagtctaacccttcgcgtgatgtaatctgggtcgtccagatctaatccaacagcccatggctcacgataccccttcgcgggtctgaattgctaaaaagtccctaaactccgtaaaaatgaacctgcagtcctgtctggtggaatcatgagtcttgggaattttttttaaatagcccctgatctttctggattttggcg

SEQ ID NO: 96177 - DNA, 341 bp, Zea Mays
aacagaagtctagcaacagaaaatttcggcagcacctcccctgcacggggaggtttcgaaatcctgcaaataaaactatcagcacgatggctgacatccacacataattcaacggcacgatgatcggtaatcacatctatatatattcaatctatcagagataacacaacaaaactacatttacatggaaactacattttcatgatttacatatttcattcacaaattctcaacgagactataatctaacttacatgatttacatcctatcattcacaaatttacataatttacattattgacatcctatcattcacaaatttacatgatttacattattt

SEQ ID NO: 96178 - DNA, 439 bp, Zea Mays
ctcatacatgacatcctcagggacaccatacgcaagaatgagaatagaggccaccaccttctagagtgcatcgagaccaagttgactagtgcagttaggtctctgcacgaagttggggtccacatgtcggatgacaacaacaatgcgaaggaacacatgtcgttgcattctaaacctacaagagtcatgcagacaataagtaatggtgtacacaatataaacttgttggttggtgatttgcacgtgtaataagccaccttctctgaaatcgagcttctatgtacaccggcatatcggagtagtccggttgaatcctcgtgtatctacttaaatgatcatgctctgcactcatgaaacctagaatgaaaccgtggcaacgacgtgacaagcatatgccatctgcttgaatgaaggccatcatttgccatttcacctcctc

SEQ ID NO: 96179 - DNA, 394 bp, Zea Mays
ttagtatcctactatacaatggcgcccctagagatcgtcgttggacatgtcaaaatcatttctactgatattagacaagcttttcttaaattggtgttactccttgcctgtcacgtgtatcatcatttccgacccgacccttcttgtatggccataaatccagtgcaacatacgtatttccacaacacatatatgctgaacatgttgtctttgtgtaggccaacattctacaacataatctctctgtagcattgatcctggatacctaacgatgtccttcataggcactatttgaccttccaaactaacacctcctacctcatgtgtagtggtgtcgaaatcacatctcatatattttattttagttcgactaagtgtaaaacttttggattct

SEQ ID NO: 96180 - DNA, 653 bp, Zea Mays
attaaattcatagagttatgaatttcctaagattgggactttacttttagactaaaaatgatttctgtatttattttaatcaattactcggctatctggactgggaccatgaataccgaagagcccggggtcaaaaccgcaaattctaggattcatgtgctctaatctttgtttctgtgtggactacgggtggattcgtatctccttcggggttttataagaaaaattaccacgacccaaggtatcatctaatcaccatccgaccacccaccgatgggacagattagacccgactccaatcgaaccagtatgcgtttgtagtcaccggattgaagatctatggctacgaatttaaatacaacgccatcgcgcacgagccaccggatcccgatccgaccacccgcgccctatacaacgaaaggctatactcgatctaatctgaaccgtccctcgccgaatcgacgacttaggtttcaaatgcacgagatctaatctcggtcgtcaatactgagatcaatggccaccgagcccatcatcaacccagactagccgacggcggcgcaaagcacaccgcgacggagatcccaccggcatcggccaatccgacaccccagagtgttatttcttacacggacaagcgcaacatgatctac

SEQ ID NO: 96181 - DNA, 850 bp, Zea Mays
tgcttctgaaccataaaccataaagaacggggtatttccatgcagagctcgactaggttgagttcttaagctccaaaccacatatggcagctctctgatccactttcctgcaagcttttcattctagtcaaacactttcttcctgagcacttccagtatcattccgttggccctttccacttggccattggctctcggatgcgctactgatgcatacttaatctggatgcttcgttgttcgcagaaatcgaagaattcagagctggtgaagttggatcccagatcagttataatgctatttggtatcccaaacctgaatattatgtcttgcatgaactccactgccttggctgaggttaaagaggcaatacgcttatactctatccattttatgaatttgtcaatggcaaccagcacatgagtatagcccccctgatctttcttgaaggtccaatcatgtccaaaccccagcatgcaaatggccatgttatagggatggtctgcagctgctgtgccggtaaatgttgttgctttgacaagaattggcaagcttcacatctctggactaactcggcggcaccactcttcgctatcgaccaatagaaaccacatctgaaaaccttcccaaccagagttctggacgcggcatgtactccacattatccagcatggatttcctctaacagttgcttcccaacggccgagtgaatgcacttcatgaggactcctgtctcacctcttctgtacagtacgttccctatgagggtgtagtgagctgattgccttgcaatgcgttccacagccgtcttgtcatccggttcctcttcattttttatgtaccttgtgatag

SEQ ID NO: 96182 - DNA, 821 bp, Zea Mays
acggctcttctatcggtgtatcttgctaatcataaggaaataaatgtgtcacctaaaattcgtgattggtgtctccctatgtatacagtgttcaacctcacttgtgagctgcgaccttttcattgttggagtaggactttcaaagtgcaaatccaaccctagattgtttttatctacaaattcgtatgcttgagcacctatccttcatttgttttgagcttgctgaaattcatatatgtgtagtaaattgtgttctacactgaccatagtgtacaagttcatatgaattatccaataaactaggattgtttcttatgagaaatttcataactcaaagttcattaattacacccccaccaagaaataaagttctattcattcaaaacagcagcttctgttcatatttaaaagcttcatttcgtaatgttgcaacgaaaacagtatctgcaatagcagattagtacagtacagttttttttaggaatttaagtacgattcagtaggtagggtgcctgtgtcaaaactcaaaacaacatatcagatataatgcaaagaaagacaacagcgtattcatctaaagtaacatatcagatatcaccccaagaccctcatttttaggaaagcccaaggaccctgttttgaaggctcttttataaacttgtcgcgcatactattcatccaaaatatcttgttactggacatatactgttgattttacttggacacagtagaaccacatagatccaaataggcttgcttgatgattataccggccatatagctttgattagcacatcattataaactagggcccacttgaa

SEQ ID NO: 96183 - DNA, 817 bp, Zea Mays
ctctcggacacttgtgtttgcaaatattagagttaattgcaaccaaattttagctagatagtaattagctcttgtatcaagagactcgaaaccaatttcacaaaaaatgataggttgtcaggattctaatctcactcaaaagcacgactcgcaacggtggagctacgtgccgaccaaagaggatagtggcagaacttgaaggggatgacgagaaaagtgttcgtacttccccatcttggaattcgatctttccatcaatctattatggaagttcaccattttttctttatagacgtcatacctagatttaaggacaaatccctatgcatttcacatatgtgccatgataaagtttgacacaaatggtgactcagtatacagaaaacaatatcatatctctattactcaatacatttttttaaataactaaataaaatacaccatatagcgacaattatccttcgaagcccctctcccggagcgctgggtccgcaggtcttcagcaaggccatccgcaaagcgccattcctgcctcggttccgagcctcgactactatcactaagtattcaggggaaacgaagccggagctctggcttgctgactaccgactagtctgccagctcgagagaacaaacgatgataaccttatcattcgtaatctccccctctttctgtctgactccgtctaatcctggctcgaacacatcccaccagcacagatccatgatagggaagacctggttagggccttcggggggaactttcagggcacgtacgttcgcacatggaactcctgtgatctccgaagctaccggc

SEQ ID NO: 96184 - DNA, 522 bp, Zea Mays
cttgacttgggggttgtaacatgttgggggaagcatgtaacacctctggtgttacgagaactaaaactttggcatgacatcatatgcactggtattacattgtgtatggtacacctagaatgcattcactaggctaaaatttcaaaacaaaacatgtgatgtgatgcttgtgtgatgatatgatctggtaaggagatccttaaccctgggaaggagtgaatctcttcaaggactagaagtatgtgaccttaggtggtaaacactaagtggtgatcttaccaagttggtagatatgttcaagaagtaatggcttggagagattaagcacttaatgtaccctaggacacttaaaaccctaattagtgacctatagagtgatttcaaattttatgcactttttgctaaaagtgtatacatcaaactaatagagtaacaaaaactaagcaacttttatatttggagatttccaagttttgtggtgaaacttggagtaatttgcaaaagtgcatgagcaaccctaac

SEQ ID NO: 96185 - DNA, 560 bp, Zea Mays
tttcccatcgtgttcctgacgatatagtaaaacaacatccaaattaagggcacagtaagctttagcgacgttccagagctcaagaacgacatctaggaaggcggttgaagggacaagacagtgggtcgacggaggggtgctcacggcggtgcggaaaacggaatttgggggaagtttgaaattcgcgagctacagtgactaatcggaggcaagagctagtgttctgagctcgtaataagttggcgaagcaggccgaggcatcaatttatagcagatcaaagcggtggctccgaatttggaaggagagcggagcacggctgtgacaagacattgtactggcgggtccgtcgtggcgctcaacggcatacaaacgcagggacagtaattctgagcgtgccacggttacgactacatggtaaaggatctcagcgtggcgcaattgagctcaccggcgacccacgatgacattggtcgttcggccacgtcgcacggtcatgagatgcatccgataagcccctgcccgcgaccgaatccatcccctgccagatcttttacccccc

SEQ ID NO: 96186 - DNA, 340 bp, Zea Mays
aaactacagtctttcagtttcagtttaatgctcctgatgaagcaatccaagacccaactacatctgatcaagttggtgagaattcggggggaatcatctgccacctccctcaccactgactccacaggtgcagccttcaacatcagcttcaggttcagatgcaaacaaccttcaaatcatcactatatatatcagtaaacagcaaaattattgcagcagaataaattcaaaaaagaggaaaaattattcaccaatctccagtcatccaaatgtgttggacagcagaggcttctactgtgtacctcgaggcaatgtcatccacactcatcagaccatggtg

SEQ ID NO: 96187 - DNA, 403 bp, Zea Mays
aaagcattagtctcactattctagttatagagagaatcttccttttgtaggtgtcgtagggatttgaattccttacatgacaccctattcttttaggaacttggaatatctctttatatctagaattatggcaataataagataattagtgtaaaacatgccatgggttacttacaacaatttaaagtatgtagattgcttatggtacgaaatgatgaatgtacaatctaccatatgagaggaatttcttcaaagaatggtgacataatttaaaaacagttgaggtgcttttctatgtgactacacgagacacataagaaatgataatttaatatacttgcacttaaaaacataaatgttaccatcctttggctttcctccatgttgtaggccttgatttttg

SEQ ID NO: 96188 - DNA, 442 bp, Zea Mays
ggcctaggcgatacccacttatcgtgaatcccatcgtcggatcggtgctgctgtcgaaggtattgatggatggcaagagtatatcgaatatcctctactgtaccacatttgatgatatgggccttatccagggccgcctccaaccaacgggagaacctttctagggtttcgtgctaggacggcaagcgatgctgctcggacgagtcgacttgcctgttaccttcaggatactgtccaactttagaacagagacactgaccttcaaagtagtggggttccagggagcttattgtgccatcctcggatggccatgctacacaaattcatggttgtccccaattacacctacctaaagctcaaaatgttgggtcctgttggtactatcaccgtgggcaccacgttgcagcacacataagaatgtgagttcgaatgctgcgactcg

SEQ ID NO: 96189 - DNA, 315 bp, Zea Mays
ctagtatgtcttacatacatgggggatcctcggtcgtcggttgaagatccgatgctcaagattgcataccggtttgatgaggtaatggtctaatctgggccatccaggtgggatcgggcggctgatatttaaccgtaccccttcgccatgccatttcactaaagagaccctatacttttaggtattcaacccgccgtccactcggattatttgctgtgtctgggaaaatttatgttttggccccttacctttctagaatttgacacccggccgagtgaaccatgaaaatagtaaaaataatgtagtaaatacttt

SEQ ID NO: 96190 - DNA, 418 bp, Zea Mays
cgagccgagtcacccccagcgacaccctcggaggccgggtgagcgccaacaccatccttgagggccgagttctctgcagcagccacctctaaggctgaaggtccctcagtcacttccatgggagcaggacaatccaagtcagcttcctgaccctcaagaccgtgctccaaggtcgatgaggcgcgggacgctgcctgggatgaccccaacccggcgtcgaacacatcagcacaaacatccatcgcgtcaccatccgccggttctgataacagatcctctggaaccatatcttcaagagtttgatcaaagttcgccagagacaattcttgtagaccaatgagggcagacaaagcaggagaaggaactccactactttccccactggctacgtagcgccgactgttcttccgaatcagag

SEQ ID NO: 96191 - DNA, 614 bp, Zea Mays
aaggctttgtcttcttctttcgtatagtttccaaaatttcattacgcgtttattcaatggcctctagccattcgtcatctggttcaccgaactgacttctgtattggtacgtatactttaaatttaccaaatcacccttctctaccccttgtttagacgggctaccctctttcatcttcggcatttcccactcattcacaagtggccatgccctgaaggctatgtgctactgaactagatccctagtaccgatgtagctgcaaatggcgttgaaagccactagacaatcttgagcttcattagtccttacaactgttagtgtcattataccaaagcgtgatgcaatgggcctctgaataatccctttgatgtattccctcatttttaaatcattcttcacatagaaccattgcttcgtccacaaagttagccacttgcttcagtataccaagatggggtattgggtgtccttctgatatgcgaagatatagcaaccgaagttattatggagctgctactttctagtggctttcatttggtagtggagctcatgaatattacataaatagttagcatttggctccatgccttgtcttctcactgcccaaataaac

SEQ ID NO: 96192 - DNA, 418 bp, Zea Mays
gggtggtctcctctctggcgaatcagacaagtttcctttcagcttccccaaaatagcccagcttcatcatcatgggcatgtcagcttcagacacagtaaatttctcaaaatctagatggctgggttttgttgggatcaaaatactataatcttcctcatcctcttcaatattttcttcttcagcaacggtctgttcagcttcggcaataggggtaccttcgtcagtagttccctctgtcacaactagacctgattgtttcatgacttcagaaattggtgttgtctcggtctcttctccttcacgagtcacccttgcagtcgaacgcactctggccatttgatggattttttgcggttttaacaaagttgatgcttctttttgcagttttgatgaagctcactcttctgacgaagttat

SEQ ID NO: 96193 - DNA, 1146 bp, Zea Mays
gtcaggttgtacaacacactaaaagatcaaacagaattgtgtgggggtagcaccagttcaaggttttcgtagacatggacgattgggtgtacaaatgcgagtataaacattgggaacacataggtaagttggttttgagaatatgtgatgcttctagtttcgttgatgtataattatgattgcataaatttatatgtggcgtgtaacgtttaaaaacatcatgatgaatgcaggtctactttatgtgcgtctaataagggccttcatgcatatgcaagtagaaaagatactgaaaaatgcatattgcagaggtacaccttgtcagcacgacaagatgtgccattcgaaaggatggatataacttttaagggcagagatggagttactagatcgtatagacaggaaatgctgctaacaaaaataatgaaggtttttcgatatgctagtatgtccaaagcaagatctaacagagcagtagaggttctcaatgatcttgttaatgttctctcgtgtttggaaccggacattgtgagcgatgattattgtgatgtagtgaaggagatgaaaaccaggtaataatattgtcgttgaatttgtgtagctggtaattaaactggtatatatgcatatgtaactggtgtgatggtgctatgttgcaagcagaaggagtgaataatgagattgtgatggccgacgaagctacttgcatgaacattgaagatcattcactgactgacgatatgagggtgggggcttttacattaattaatgagtactatgcctatatagaacaaagtaaatactaaatctggcactaaaaaagtgaaactttttttgtatgtgcacatatagttggttgctaatgaaggaggtggaagtggcgcaacattgaaactggtagggacagttgggaacatttcgacccatgtatatatgatgtgtgtagtaattacttatgcctaaatacatgaacaattattatattatctgcgaaatagtttatgactggtggattgttctttgttgtaaataaaaggttgctaaaatgtgttatgctaattaggatggaaacgacatcctgagaaaaatatgtggtgatcgaagttctccacgacatgaagcaaataaaggatatgacaacgtggg

SEQ ID NO: 96194 - DNA, 655 bp, Zea Mays
taccaaggatctctctgggtactttagatccctggtgtattgtttaccttcggcaatctgctctttcgacagctgcttccccgaagcatgtcgcacgataaagtccacctcttcaacaggtacttcgggagcaggaactttcttgggcacattttcttcttccaaggtcaaaggaatagattctgaagcatatgcctcgataggagctgatgtcccagcttcgacaatatctagtgtcatatcagcttcgctagatttctttgggatttcatactttctatcaggagatgaagcaagggtttgtacttttgaagattccataatagcgtctagtatgctggccattctcctcctttttggagttattgcaggaattatggacaccttcggcagctccggctcttgtggcaggcgcagggttttcggttgctctgccgacctccttaattctggatcttcagctgttttctccttagcttcggcagaacgcttcggcacttcggccatctcggttttctcctattccgctattaccatcggtttcggcacttcaaccgattctcccttggcttcagcaagagcggggtagtctggctcaatagcagaagaaggcccttcagcaagcttcggcactttggccatttcaatatacttg

SEQ ID NO: 96195 - DNA, 361 bp, Zea Mays
atgaactatagtatttgaataaacataaacagacaaatatggtacatcttgcctatcccctacaggctgtttccatcttcaaataccagacgaacaccagctgtttgaagttgaggtatgataccagacgaataccagacgaataaacagaaaagaatagatcaatctatacaatcatatgatttacacttgatcaacagaaacaccactgcccggtaaacaccactgcccactgcccagtaaacaccactgcccactgcctagatcaatagaaacaccactgcccagaaacaatcatatgatttacacttgatcaacagaaacaccactgcccaggaattgacccagtaaacagaaaaag

SEQ ID NO: 96196 - DNA, 342 bp, Zea Mays
gaggatggtatagcttcctctggaacatgtattatgatgtttgggcatcaacattttgagcttataaagattagtctgattaaaaattgaaacgacaagtaggtatacaaggttcctcttatgaatttcaaaagcaaatgttagctagtttgcactggtattagtatccattattcagccttcaccttatgattagctcctgctaaggaataacacaaaggctaacccaccttgcacaagctccaggtgcaaccagtctctaattggcatattaccacgttcaaggtaaagaaagatgcagtctaatgtatcagataagctataaagcctattttcttgttc

SEQ ID NO: 96197 - DNA, 895 bp, Zea Mays
tttgattttcccatgcggagtacagggcgcgtaaatattagtgacaatccaggattcattggacgaattagcaaagaattcaaccgaaagggcataatcattctgaaaaatcacagtgcccaccaacttagagctattccaaacagtaatgaagccccctgaatttcccaccgagggaacaaaagcgaacgtatccaaagaattgggacagaattttctaaggtcggccctgtcaaaaaattccttcttagtctcctgcaagcaaacaatatcacatctggagtccctaatcgcgcaacgagtaccattccctttaacgaccgagttgatccctcgaacattaaaacttaaaacggaccaatcagaaaaagtagcagagttgtaactattcatcgtgggaatgatctggtttgtcaacgaaaagaaacccaaacccatcagcagggtgggtgaaatagtgtttgttagaaccaaacatagcgcagccagaaatcacaaagtttgttgccacaacaactagccaaaagcgccagggccgaaacagccaaaaagcctggcgaagggaagtcctgcaaaatccccaaaactggagcaacaccatcaagttagttgtcttcatctatgggatcttgattctgatccccgctgtcttcattttcgggcttatctgagcccacacaaccaaagggattcttcttcttcttcttcagagcaatatcggacaggtcctcttctgacaggttacaaaatctttcccctaggcgtctgatgttcttggcagaaagggaggggggccctcagacttgtgctgacacatcaaacagttctttctctggcaggagccctgcctgaacccagcccgagcatcacgaagtctcttacttctccgaaggtc

SEQ ID NO: 96198 - DNA, 712 bp, Zea Mays
ctcgctcggggagattcctgatgatgaacggcaggtccattttgaggtgcctctgaatcctagtgatgcggagataagtgttatgcttgatttgctggctaaggactcttctgatgctgctcctgctgggacactggtggtggcgcccctctcagaggctggtacgactttggatattcagaagcctgccagtactcgcccgaggtgcccttgccgagccaatcaacctgatccttctgctgatgagcagaaaaagaaaaagggacgcctccggcgagtatccagtttggatcgggacattggtacttcggttcctgctgctgaagaaacgcctatgactgaatttattgacgctgaccccaatgggtgtgcccaatctgctgctgatcccaatgtggatgttccatctgttgctgatcccaatgtggatgctccatctgttgctgatcccaatgggtgtgctacctgtgttgctaatgaagacgacggggaggaagaggatgaagttcctttgactcggaaaaacagtcggcagttcatcgctagtggtgaaagtagtggagttccttctcctgttttgtctgctctcattggtctgcaagaattgtccctggcgaattttgatcagactctcgaggatatggttccagaggatttgttatcagagccagcagatgatggtgtgatggaggtttgtgctgatgtgcttgat

SEQ ID NO: 96199 - DNA, 325 bp, Zea Mays
tggttttaaagaaggcgggttagctcaagtttttaattcctctttgtgtttataatgcatgcatgctggaagtaacgttgcctctccaacaatagggtgctcttagggcatccttaaaaacataagtactggcccacgaggcctaattaattagccacctatttctccctctattcctatggcctttcgttctaggtctaacggtctagtccagacgatccgtagcagtttctaggcaagttttagatttttgaaaatggtattcatggtttattgtccttctctgtggtggaatttgctccgataccagttgtggcagaaccac

SEQ ID NO: 96200 - DNA, 406 bp, Zea Mays
tctatacgcacgtggcacccaagtatcgaaacaaagtaacaagctgtgtgaaccaaagatgcagcatgcatagcccgtccctcacaaatccaggtatctggaacccatcccaacacagacacacgcaccaaagagtaagaatccaccaaccacacacggattgtgcaccggatgaccgacggtaacacagttcttgcaaagagcaaacaccctaatgcagcaagcaccaacggagccgaccctaatgcagatgcagacgacatgagggggtctagcagagcaaacgtggacttacggagtcacagacaatgtctacggggcggcgggcagcaggagcagaccacacgctcccatgacgacggtgggtgcccaaaccaaagtggcgaacaacgacaaagacgggctg

SEQ ID NO: 96201 - DNA, 515 bp, Zea Mays
atgaaagttagaaacatatgataatagttttgcaaaggaaattattcaataggcggaatgaataagttagtagctggttataatctgaagattctttagtagggcttaatctttgttttatgtccagattggggtaaccagtcgtataaggtgaatatccaagggtaagatagaatctgtcaagatgagagatatatatgggtgagatagactacaagatgtaggttaaaagtttgtttgttgttaggtgggaatatatcatattcgttagaaggttatgatataagccaagtggttgggataagtatgcttgttagaacaagacaagtctctacgaataagacataatcttttgagattagttagatctattaagatgagataaaatctttttaagataagatgaatctattaagataagagagaatcttattaagataagatggatctatgaggcttgatatattctagtggtggtattcttaatttgtacaatcatcttatgatttttttat

SEQ ID NO: 96202 - DNA, 407 bp, Zea Mays
ggatctgtctatttacccttctgctgttatttgctctgtagggactaaatcagagtagtgtcgctcaatgaatttcctctactgaactacgcagcctgcagtgcctgagctaccaagaatttcagagcaaggtcaccagaatgccttacaaaagacgacttcgacattggagggtctcattgcggacgattcacaccaccagccctcctctgcccacagcgaagatggagctgctaataatgggtctagggatatcagtggggattcttcatctgttgatttgaaaagcccagtcccactagggacacatgcagatgtcatggaagacgaaggatggatcacaattccatgcagtttggtccctttgacttgcttgcctctttttttatatatcatacaggcataaa

SEQ ID NO: 96203 - DNA, 513 bp, Zea Mays
aattaatcaaagactatgatttagaagtgcattaccatccgggcaaggccaatgtggtagcagatgccttaagtcggaaagcccagtgcaactgtgtaactatggactctaagatcgccactttgtgtgacgagttatgcaagctgaacatagaagttgtttcctaaggtaccttgagttatatctcagtggagcccactttacatgagcaaatagtcatgacacagattggtgacaagggtgttcaagtcatcaaggatatgctcaagcaaaaggtggataagtaccaatgcttttgacaggacagcaggggagttctatggtttgaagaccgattggttgttcctaaaaattccaaactcagaaggaaaatattggatgaagctcatctttccaaattttccatgcactccgacagtaacaagatgtatcatgatctccgatccctgtactggtggaccagaatgaagagggaaattgctaagtgaaagggaattaggcttacacctattt

SEQ ID NO: 96204 - DNA, 376 bp, Zea Mays
catgatcctatgaaaaatgtggagaaaatctcaacccaagttggactgtcagtctggttctgtctgaatatcagactaacagattcatgccctgaacttcaagcccaatttcaaaccagattcagtgactttttgtgacaacaccatgtagcaaagttgtagctggtatgtagcactacaactttgatacagagacttggacctgttgtcacatgaaattggaagaaaactcccttgcaaatcgctctgtcagtcgctctgaatggggtgttcaccatggtacagtagcctggaatggatcaggctgccagcgcggaactcccaccgccgacgacacctccgccgtgattcgtgccattgccggcctgacttgtgc

SEQ ID NO: 96205 - DNA, 667 bp, Zea Mays
cggatgagagggataagctcccaagtctcttaagggttgcgcggattgggtgttcgctatcggctaagtcgtcaagtattgtttctctctcacacacacttcgtccggccaaccttccgccttttatagaccaaggcggaggttggttacatatggcttctcttggaagggatcgctgtggagtggttctccctcggtaaacgccttcacgtatgttgttatctgttccgcataactccctatcgactgttggagtgctggtaaagtgtgtccacgacgggagtctaagtgtcatcattactccgcatgtctatctatgcctgtgtcagcccctagctttcatagactgtcttcctgccttccttatgtcatcttgtctgttacgtaggacgttggaggactccggtctaggggccataggtcatgagcagggctcaagcgtaggtctagagcgggaggcagaccaattctctcacatgccatgactcaacgtcggacatagttaatgagagttgccctttggttagaagcggagtccattcgagtggttccctgacgctttgtctgaccctgtgcctgggctatgctttgcccaaccccgtgcgtggtgcgggtgttggaacaaaggtcgaacattacgtcgatcagcaccacgaaggtcggtccc

SEQ ID NO: 96206 - DNA, 472 bp, Zea Mays
cagcgagtgaggcaaactgattagttagcatatcaccatggtaatctggaagcagagcagcatccccaacttctctttgttacattgattgaacggacaagaaaacgaagcatcagcatcatactactgtccaatgtctaagctatcggttagcgcatcagtttcaatctttcaaagcgtcattggaagtcaaaggctaggtagcactagcacaagttgtttctagcatcgtccagatctgatgcatccgttaaacaggcgcacgagctcaaggccttcaccttggatcagggatgtgatcgacgacgcggtgcgacgtactcctcactagtaggagcattcactgtgatctcctgttgcttagcttagctgcaagaacgatctggaacatagcgaccggtagtatgaacctcctttgtcctcgcggagctagcggttcctctggcgcttcgcggcgccactggcggtcggg

SEQ ID NO: 96207 - DNA, 518 bp, Zea Mays
caggggtcagcgaggcgtgaactccggcgagcacagtcgcggcagctgcgagccggtaagcacatgtgatgttgtgatttgtgagcgagagagcgatcaagggcaaggagagaaggactgggcgcaaccttttatagccaaagggaggaggaatttgcaaccgcgaccattgaagccgaccttgaattacagaggtaaaacgactgccaataaaatccattaacggtgtcggatggtgaaaggagaagaggagggggtgctgcgccctatatagtggaggaaaggagggaatcagtgtcgattaagaccctataaagagaaattgatgcactgctattaatccgtgagtaattaacagccagaatcaacatcaatggccgctgcgggggaaggtaactgctgacggggatgccgcgaggagggagaaggggaaaatcacaggaggagaaacgtcgccgcaatggtgctccactacgcaggcgaggagacggaatggctggcaaacgggtacggtcgcg

SEQ ID NO: 96208 - DNA, 770 bp, Zea Mays
agggaatctaccgccgccatcgaacctatgggggttggcgcagggacctcgtcgagcttctcgtgtgtgcgctagggcaggaggggagcgtccgcttcatcaattggtggggtgtggtcccagagccatcacaattgctcgctggatcgaggaaatccccaccgtaccgccatcctttgtcaccagggcgctgcgtggcgcaattaccggtaagaaatccctaatttggctcacctatgtctctgctacgtattgcacacctcggactggagtttagaactgggaagccatgaatgttgtggcccggccatggtctctgccgtgcggacaccaccaccgcctctggccatcgggggttgtggactgggtcctggtcatcggatccaagtgaacggtggagattagaatgacgcgtaccccttcggccaggattgatccgggtcgttagatcttgagggtgtggtcctgatttcagtgagcatgtcgtttcgatggttcgcttttgaccatcaaatctggatctggtggcctctgttccataccggttctgggatggccctttttaatcagggccgtcgatttatgatcgcgcgatagaaaacctccataccccttcgaccccatcaaaatgcagaagagcccctgtcctctcttcgtatcaacctgcagtccatccctatattaggatcattacataacagtccaaacatttgtaaaagtaaccctacgcttctggaaaattgtggtcgtggcccaaaggttaataaaat

SEQ ID NO: 96209 - DNA, 313 bp, Zea Mays
cccaacccccgaagaccgaggataaagcatcatcttcggctctggtatatgccccaagtaactcgtcgctaatagcctcaatacttttcagccaattgtcatttggctcataaaaccggtccctgaatctgaaggtatatttcagtcgaactaatccacctttggtggacctggcagcagtatccttcggcatctcctagctatctacaagtggccacactctataggctatgtgctcttggattatgtctcttgtgccaatgaaagcacaaacattgctgaaagccttttggcatgcttcagcatcattttc

SEQ ID NO: 96210 - DNA, 327 bp, Zea Mays
cttacatcggggcagggcacgaagccataacaaccaaagttgttgtgatactgctccttgctagtagccttcgtctcgtacaacagctcgtgcatgttgcagaagaattttgcgcttggctccagcccctggcttcttacggcccaaataaaaacccccatcctaataatgtctttggagtaatttgatgtagaaaaatttcaaaggtcttcagcacttcgaccaggaatctgcttaatgggaaacgaagccctgccttcataaaactcctgtaaacaaccacctcatcctcttcaggagcaggtgcagcgctatctcctccagcac

SEQ ID NO: 96211 - DNA, 473 bp, Zea Mays
gggactgacgcgaagataggcaggcgccaagggtgacgccacgcatgaggcatgattgatcgggaaggaaatgagatggctattctgatcggtacggtcatcggttcggtcgtagcctgacacgtttctgggtcgctttggactttggacgtttggtgctgacgctgccttgggtgtgagtacgtaccctcgccatcccttttccagctctcgctccttttgggtttcttaacgtagggtgtggagcaggaacgtgttcgtggcggactcttgaggacgactggacgacgcgagtggcggcgctaaagacgccgctttgctactctctactctctggtggcggtgcggtgctggccacctacaccaagaaaaaaacagtgctagtacttccttgggtcatttcctttgccgttctgctgtcgtttcggtggtcgccattcgtagggtaccgatacctgtactgtcaactcacc

SEQ ID NO: 96212 - DNA, 356 bp, Zea Mays
gcattgtgtccactgtcttcagcgaatcatctgcctgaagaggatctggagagctggagaaggtaggtcgcatatgactcatgaactcccggtgcttgtccctggttggagctggtggtggtggaggtggtagttgctgtcgttcccaccgttcttaacggatttcttgacgttcttgatggatttgcgcttgcatctccgtcatggtgttagccatctactgcagtagttgcatttgagcgacaaccacagcatctatcccagccggtggaggattcatctccggttgtggtggggtaactatcctcctacgacaaatgcgagcaggtagatcgatactgcctcccttcatggta

SEQ ID NO: 96213 - DNA, 407 bp, Zea Mays
caaaaacaatagcacaactactccagtccaacccaatggttgtttcaagtgtggcgaacttggccactatgctaacaactgcccaaggcacaatcaacagacaccctagaggaacaacaaccaaagagctgatcagaacacaccttctcgtggatctacactaaacaagatttcgcagaaccatagtaagggaagagttaatcacgtaatagtagaatctgttcctgaggatgccgacatggtgtatggtatgtttcttattaactccatacctgcatcagttttatttgattctagagcatctcactctttcgtaacaaagtcatttgtggaaaagcataatatattaaactatcctttgacgacgaaactattaattcgatcaccaggaggtgaacttagatcca

SEQ ID NO: 96214 - DNA, 414 bp, Zea Mays
aagacacaaggtgatttggccagaagctcgacaatgattactgtggggagcggtttgggagaggccatattggagaccaacttgtacatggaggaaactcaggggctatccatgggggttacctgattgcgagcttggcccttgcgtgggtatccttgcgagaggctccaacgaggacaaggggaaatgtgagcttctcaatacctcagtacaaatattagagttgtcgtcaggagtttgtatctctatctcaattaagcttctatactttatgcaatgcttacctagattgtgggtttacattcctagtttagcttgctaggctagtgataggattggaacctaggtttcatatctcttttgtggtagagacaacaacacacacctagcaaaactatagttgctcatctagac

SEQ ID NO: 96215 - DNA, 282 bp, Zea Mays
aaagtatttaatgctgtacacaactttcttctggtactgctgtcctggtaggtaaactctgttaggctccaacttacaagccatataacatgactagatcgttttagttcagatgaaatgtgcacaaacaaccgttgtaacatgtcttaatagtactatgtcagcacagagctcattatttcttaccgactctattttatttctcccacaggttgaacatgtcataagggaagaaaagttcatgcaagcatatgacttgattgaagtatactgtgaacttat

SEQ ID NO: 96216 - DNA, 763 bp, Zea Mays
cggttaagtcctcttgtttcggtgctgctggtggtggtaacggctgatttggatgatgtggtggtggtggaggcggtagagctaggatctcttggttttgctggtgaggatggaaatgttcattgtggaattggtgttggttgtactgatggggatggttggtgtgggcgacaactctttggttgtcacccggttggtttctggccatttgatcctttgtggctttgatttcaaggcaatccctggttaggtgtgctgagtcttcgccatggaaaagataatagaaccttcgctgctgttggcctcgacctctgcccctacttctggttgcgttactgtcgcggccttgctttagagggtattcgtgacgacgagcggtgtccccagttcgctgctgaatggcgatgttctgcacctgggactgtggccggttaagtccgattgcgagggcttgacccatgtcctgttggactgcggagtgtccttgggctttcgttgtgacttgattttcctttggtggagctcttctaaccgggcatactttttgaacagttgatataactcctacaagtttttgggtgggtctcttatgcagtggctgtataaaataactgcgcgaaggccgttgattgcatagtgaatagctatttggtcatcaaccgaaggcagttgtgacttcaagaggaagaatttcttgtagtactttcaaagggtctctttttcctgctacctgcagagtggtaattctgccagggcatctgtg

SEQ ID NO: 96217 - DNA, 645 bp, Zea Mays
gccatggagaatcgcccactcaaaccgaggaggctcacgctagcccctggctgggaggcggcgctctccggcctggatattcaggtaagtgcgagcaacacatcgagtaacaactgcaaaggaccctggggcaagttctgggtgttggactcggacgactcggatgttgaatcgtgtggagaagatgaaacatcaagagatgatttcacctctccatgttcgacttcgattatgtcgtcgcaggcatcaaactcgattgccccgggggaacttttaagcagctctccgccgtcggtgaatgggagctccggggtaggagtcccaggcaagtgcggcggtgcaatgacccgaccatggataggctcattaccgaagccaagaaggtctcctaagttaactcttggggatgccttgttgatggctaaggcgggcaaaatccagggtggccggggcgccgtgagtgcgtcgaaatcgtgcccggccatgattgcagagtcgaggttgtgcccgtccatggccatggacagaacgcgtcaaaggtccggcacaacagcgggggagacgaagcgtggaagccgaacggaaaggaaccgatcgggaagaacaatcgcttcggttccctcgtctcaattggttgccacagcg

SEQ ID NO: 96218 - DNA, 763 bp, Zea Mays
atgaagagcactgttcatctatttataaaggatcgtacagccttgtataaaattacaaatatatccctaagaccagtacatatgatttacaaatgatgcgagggcaaagttgacttctgcctatttcatcttggatacggaatcgtgggcaccttctcccggctctgtccaccttcgtttccatatgttgttgtgacgaagctaacatctttatccttatcttgttctgaaggtactcaatgtcgaagctcctgcaatacttaaaaacatgctagtaaccaatagttatgtgtttttgaggaccttcgaaagatgaaggccccaacagaaggccataggtccctagtcttggtgtaggacagcacctaatccaaagcccgacgcgtcgcagtccaccacaaaggaacactcaaaatctagaagctacaatacgggcgctgatgagagggcctgattgagtgtttgaaatgctaagtctgcgtctagggaccacttgaggccttctttcttgaggagcttggttaatggagcagcgattaatctaaaatccttgataaatttccaggagtagcctgctaaccaaaaaatccccgcatacctcgtggtgattttggaattggccatgatgttactgcctcaaccttgttgttgtccatggtcacccccttggctgatattatgtttcctaaataaacaacagatgtagccctgaagtcacattttgactgtttgacaaagagcttgttggtgtgtagagttttta

SEQ ID NO: 96219 - DNA, 396 bp, Zea Mays
tcaatttggataaattttccatggtctttattttattttgagaaacgatgtgtcaaattgatatgtggtgttttccttgagtggacataaacaccatctaagtatgccatgaatagatgggattataggaaacctattatcacaaaaggtcattagctagcccactaacatcttcatccactatttgtactctaataccgtctcgtgcgaataaaatgccctcaataacatagaaacactatttttagtttcaaaggtgatctattgtgttgaattctttatattccaactttttagcaactgtatggtggaaaaaaggtgtcttacaaccttaacctatgtttggacagttctctcgtgcaatttggctaaatttcccatggtctttattttatt

SEQ ID NO: 96220 - DNA, 474 bp, Zea Mays
cctagggttcggattagatcctaggtctcgggcgggttggatcctgggcaaccgcacaatcgtgatctgagggacgcgaatggctcttgacaacattaaatcggggccatcggttttgcatcgggtggatcgacatagtggcggtctagatgaaatctttgccgtcggtttctaatccgatggtcattattgcgtaacgcttcatcctatgaatgatctaatcgtagccgtccgttgttgatctcacgaccaatatcacgccataccctggtagattttcataagagcccttatgtttttagaaaatagaacccgccgtcctgtgtaacagtaacctgagtctggggaattttgacaggttagaccccgggctttttattaattggcgcccaatccagaaacccaaggaattagttaattaattacataaatgagtttttaatataaaaacaattcctatatcttgtataaaac

SEQ ID NO: 96221 - DNA, 277 bp, Zea Mays
gaacaaccaaagatactaatgaaacatcaaaagaaggacgaggataaaaagtatgagtctcatcaaaggcatcatcccgagagatcctcatccgacgagcaattggatcccaacaacaatatcccttatgctcaacactatacccgagaaaaacacactcaaccgattgaacacgcaacttagtgtgctcacagggtgggagcagcaaatagcacacatagtcaaacagacaaaaacttgaatagtcaggcgtctagccacaaagacgctcaaaagg

SEQ ID NO: 96222 - DNA, 557 bp, Zea Mays
aaaagctgaaccaaacagtctcagtcacctgctcttaaaacactgcttgagtttcaaagtttgttattgtatttatattgaccattatatatttgtaagtagaactgtagaggcttactttattttactgcactaaaaagcagtctttttttcagttctgctatccaactgtccttgcacacttattagcatattaccgttgtactttatttcaggtttaagagatcttgcagatttcttgcctgcttcacttgctgctattgtcagctacttctctgcagaagtcactagtggcatatggaagccagttatgttgaatggaatggactggccaagtccagctgcaactcttccagtagttgaatcggagataaaagaagctcttgcatttgctggtgttcatatcaatatctgtccacgtccacgtatgttaatgcctgtttgtgtaatttgttcgttttttccccgtagatttacatcatcacaatctttagttttcagtatttaaggcagtactaacttttctcaggcatctcatatcacactattaaccgggc

SEQ ID NO: 96223 - DNA, 299 bp, Zea Mays
tgaacatctctgatctttagaagagggctgattttttacttagagaaaatttgggttgctctatagtgctctccacttgggggctgaatttgggggttttgtgggacctttttggaataattcccttactatttcttgtagatatataaatgtacttcaactttggtaaaaggtttaagtcatgaattggtcatttgcatagttttcccactaatccaatgcttgggggtctaatggctcaagaggggggttctagggtttgagcatctttttccaaggtgaagatacatggaaagcta

SEQ ID NO: 96224 - DNA, 814 bp, Zea Mays
ctcgaatgcgatgcacgatgggagtgtggcacgttgcacatcgaactcggaaacgagctgatttggtcgtgccgtgcgaaactgcactgtgtgtacatgtacatcacgatctcgcgcagatatcttcgacgatggtgttagcagacggcaggtgagtaggtgacagacaggtaactaggtaagaaactgttgacatcgaagggtgagagtgatgtaaggcccggaaagactttaaaagggccgagacttggaccacttgattgcgcgcacccatacccatgatgaggccagactattttcctcgctcgagagggccggattaaaatggtgcacgcccggcccatgagggctttcgattatcttcaccccctcccgtaccgtactcctccttttctcccgccactcatcatctggaaaacaagtactacggggcaggactccaaacccacacttccaaagccgaagcatgctgttcgtgcagcgaacatgacaataccgttgctgattcgtaccaagcgtcgcacaaaaaggaggcaaggactggagtctgaactctgaagggcacgcagcgcaggccctaggttccaacttacaagccagtcgtctgcctggaactctggacgctacagacctgatgagaacaaagcgtcgctgctaccgaagcgaagaacgagtaccgagtaagtactgtactgtactgtactgtcggtccgctaccgtttcagacagcgacgccttcgatgcgtagacgacccatggaccggagccgagaggcagcgaatgtacagggacaacatcgctgcgaccgttcgtc

SEQ ID NO: 96225 - DNA, 744 bp, Zea Mays
ggcagcatctggtctgcatcaagacgcgtcctccgatgagacaggaaacctcccagcgggctccggtgtggttgaggtttcctgggtgacctccggtgtggcagagactctccaacatggacatggttccttcactggagggtaaatttcaggaaccgcctcgcagtaaggtttcagtatggaagcgcctcgctacatcacaggatcatgcaacgtcggaagcaatcgctgaggaagacaagaagatgtgttctcggcccatgaggaaaaaaagacgttccaaacacagaaaaggtacaactgcgcatgatttgggtcccactcaggcatgcccacctctcccccccccagctggattgtttcagccctgaggtggcttggccaccctcagcctcctcttgtgttctggatttttctaaagtccttgctagggtggaaattgcccttcgtcgtgctctgttcgtctctgtggctggtacacatcctgggtttctggttctgacgtgttgaaggaggtgaggcattgttttggtgttaagttggaggacatgaggattcatcagacctaccctgaagacttcctgttgtttctaccggatgaagacacaacaaccaaggttctcaacgaaggaagacctctgaggggacccgtttcagtttgatgctcaaaagatggtccagatttgctcatgcatcctcatcgtcgatggctgagttggttgatgttaaattaataggcattcc

SEQ ID NO: 96226 - DNA, 888 bp, Zea Mays
gtcaaggtcccacttgagcacccgaccaaaggaaccgatagcattctgaatatgttcatgtgtccaaaaatccaagggaattccaagaagcagcagccaacattcgtgatttaaatacagcgctcgctgattccaagcctcattgtgcctaatcacagtgaaggagaagcctagggcttgctgcgggcccagagccacaagattgtctcggtcgaaagcaaacctgaatctcactagagcctgacccaaatgggagcgctgaattctcctaatctgaacgtgtctaacttccaagaggtactcacggataatgtcatcaaaaaagtggaagttgacctcatgctctggtagcggctgaacaagaacaatgccccaatcttcataagcagagggttgaggacaggtgacagtgcgtaccatgatttcctagtgatcaacttgttgcgccatgaagccatgaggaagaaaaggagcgggatcaactctgtggaaagccattccttccgagacttcggagggcgggatccgctggcacgacgaacacacgctccgcagatgagggtttaatagcgacggggtcacccatggcagcgaggaggaagagggttttgtaaacagtgcaagttccgtggaaggcagagagccacttatcgatagaaccgcctgagcaaactcgccaaaattattaaaaaaggcaggggagaaggcccacctgtaggcaagaggcgagcagacttgaaccacagccgcggggggaattcccaggagacatcctcaaacttactggggaaggaaagaaaatctcttttacaattctacccaggaaatccaaatagttgacagttattgcctgaaaaagaataatccccgagggaacaagaatcatct

SEQ ID NO: 96227 - DNA, 361 bp, Zea Mays
ctgaaacatattaaaaacaaaaggtaaagtacaagtttccttgttcagtcggtgtaactaaaagcagtggcttaacatcttatcaatcaggcttcagtacttgtttaacgtccgatcataggccaggccatgggcccatggcagtaccagtggataagcccattgaatatgtgaagagagaggaaaggaacttactggcaaggcacaccaaattaaataccaaatccagtttcacaaatgggagatggaatggaaaagctcataaacccaaatagtaactaccaagttttttgtccattaatcacgaaaggaaaatttgtaaaaatttccttgcagatagagaaaaaaaaagacaacaaaa

SEQ ID NO: 96228 - DNA, 1258 bp, Zea Mays
catcgctctgtctgtctcgcccgagctgatcctaggcagataagacaaaaggcgaacgaaaacaggtggggaatactcgcatttaatgtgcatattagaagatattagatattgtgcttatcggataagctaggattgttatcctcttggagctgcgtctccatctctatatctccccctgattttctccaaccgtgtaacagccatgcatggctcatctatataaagaatacatcggcaccatgttcaggtgtcgagtcttgagccatattaacatggtaccggagccaatggttcaatagatgtccatcatctcaactttttcttccgcctccacccctgccaccatgtctcactcgaccaacaacatgccttcccctcctaccatactgctgcatcatgcgatcaccatctgtctcaccaaatccaattatctactctggcgagcccaactcctttcatatctccgcagcataaagttgatggggtttcttgatggcaccctgccagcaccaccgacggttgttgcgtcgtcttctacagccggtgccgagatggtccagaatccggccttcatcaagtggtatgatgccgaccagcagctcctcagtgggcttctatcttccatgacggaagacattctccgtgatgtgatcacgaccacctcatctagggaagtttgggaatctctgcagcgccagttctcctcctccacgaaggcccgaacactacaactttgggttcagctcgccactgcgaagaagcatgatctttcggcagctgactattttcggaagataaaaggcatcgccactgaacttgctgttgccaatgaaatcctgtgtgatgatgaggtgattgcatatttactcgccggtcttcccgctgaatatgatccatttgttacgtcgctaaccaccagaaccgagcctgcttcccttgatgatgtcttcgcacacctcctagcgttcgaagctcgacaactgcagcatatcaccgacatgcagctgaacattggttcgtctgcaaattacgctaggcgtggcggacatggtaatcatggtcgaggctgtggtggtcgtggccgtagtcggggacgtggtggtgctccccgttccagcccatctgccaaatttgtggtaagactggccacacaacagttcggtgctggtacaggaatgatgaatcctacaatgaagatcccccttcggctgttgttgcctccacttcgtacacggttgacacaaactggtataat

SEQ ID NO: 96229 - DNA, 402 bp, Zea Mays
cgcacatttcggcatctatttcttcgttgtcgggcatcacgctaggaaggttcctccccttgcatggtaggctcattgtcggagatgggcgctgactccaatctccctggatgaagaggacgtcagggtagaaaggagccggcatgacggtgttcttcttcccatcctcctttgagggtggaggtatcagaaaggtggctcggtgtgttctccttccctgactcgggatgtttacttccttcttccgagtgatccatgtccactccttagtgggcgaggtggacaacagagttattcgggttagtgaagccctgactgattggtcttccttctcccaagggatcctgaatcccggcttgcaagggaccatcttcccccgagctgtgagcggggacactgtcc

SEQ ID NO: 96230 - DNA, 496 bp, Zea Mays
gtgagtggctctaagttcacctactagtgatcgaattaatagtttactcttcaaaggattgtttaatatattatgcttttccacaaatgactatgttacgaaagagtgagatgctccaaaatcaaataaaactgatgcatgtatggagttaataagaaacatacatacaccacgtcggcatcctcaggaactgattctgctgtcacgtgattaagtcttcccttactctggttctgtggagtcttgttctttgcagatccacgagcaggtgtattctgatcagttctttggttgttgttcctctggggtgtctgttgattgcgccttgtgcaattgttagcatagtggcctagatcgccacacttgacacaaccattgggttggactagagtagttgtgctattgtttttggccggtgtgttcatggcgcttccttgacgattttgctgataaccactagacctttgaccggtctgagtgttgttcctctgctggt

SEQ ID NO: 96231 - DNA, 484 bp, Zea Mays
ttggaaggttaaccagcgaccatgtcttcttctcttcgattgatgacatatcctctaacattgcttttgtctaatcagtgatcttcagagcttcatccactaaatatggctcctctccaatggctatcagtaattcttcaatcgcaacatcaccaccttgttctgggacattctctgccacgaggacactctccagcatacgatatctctgtggcgcgtcatcatcatgatcaacatctagatcagggggtgtggcgtactcaacacccacggcaccgggtgtaagcacctgctgctcaccctgaacatcccatgggcccccgaaatgagtgggagccccgtaacatgtactcttcgacgtgcttggtgacgaggacaacgagctcgacgagttcgtcaagtcatccatgtccagttgggtggtgttcccgattggcacgaactcggcaccgaatggggcattggcgtcggtcttctcctcctc

SEQ ID NO: 96232 - DNA, 506 bp, Zea Mays
tttgtttccaaatcatattgagttggaaacttatcaaatgtggtttaaagttgtttcctactaggataagatgttcatctctatatgtatgagaggatcacgctcaatggatgtatccaacatccaaccaatcaaaaatacatttgtgtgccaagggacattttctgctccgatggcccaatcattagcattcatcagaggcgaatccttcgcctcagggagtcgcatcacgtttggcacccttgacttcttcaccatggccaccggtgtgctccgcctcaccgccccagacatgcctgacaccgtgggcacacgacccacacgctccacctagaacaaggcagagaagcggtgcctaaaaaggcgcgccactaccttaaagaggtgcctcaacaggcacaccgatgtcatcgaaagaaaggcggtgggagcctcatcttcaactctagtggtcttcatcggtcaccagccaacatccgtcctcgacttgctcaaggacaattcaa

SEQ ID NO: 96233 - DNA, 570 bp, Zea Mays
gcatgttgcagaagcacttcgcgcttggctccagcccctggctccttacagcccagacaaatatccccatcttgattatagcttcaggggtaatctgatggagaaagatttgaaatatctttaatacttcgaccacaaatttactcagcgggaaccaaaggcctgccttcaagaagcttcggtaaataacaacttcgttttcctccggagcagggcagaactgtctcctccaactctgacaatagacatgtcgcgaaaatatctccccctcatggcgtcaatatgactttgcttgatagtcgattttccaaagatagtatgacttgggcgccatggccggtcctcagaatcttcatccccactttccacgtcataactatcattgtcatcagaatcttcggacaaaccctccatgatctccttagtaattttctctgtgtttgtcttcgccatagattcataaaatccaacaatgaaaggatctacaactttcttttcttcatacaacttcttctcctcagtcatcttctcctcagccatcttcttctcctcagacatggggcaaacgtc

SEQ ID NO: 96234 - DNA, 316 bp, Zea Mays
cgcttgtagagagctgggaaatgccgaaggagaccatcaccaggtcaagcgaaggtgaactagtccggctgaagtatacattcaggtatggggataagttcgatgaacccaacgatgactggctaaaatgcatcgaagctacaagtgatgaattgcttggatcatattccaaggcagaagataatgcattatcgacagcctttggaagtcggggaaagaagagattgaacagagtttttgatgccattggcttcgtctaccccgactaccgctaccctctatggggacaggggaagaagagaaaagctgctgcttt

SEQ ID NO: 96235 - DNA, 420 bp, Zea Mays
cttctctacaaacaatactggagcggcccaaggcgaggtacttggtctgatgtaacccttctctaacagctcatctatctgcttcttgagttccaccaattctagtccagacactcgataggctcttttagaaatgggggcggtgccaggaataagctctatggcaaattcgacttttctctcgggtggcatgcccgttagctcctcgggaaacacatccggaaagtccgacacaaccttgatagcctcgagcgggttggcctccttgctatcaaccgaaatctggtgacaatctcccttcgttgttttaggcatccttagctcagccactaccttctctccgagtggggacttcaatgttatgatcctcttgtcacagctaacattcgcttcatacttcattaaccaattcatccctag

SEQ ID NO: 96236 - DNA, 566 bp, Zea Mays
gcaggggtgatttggaactacctctgttgcggggtagccccccttatggctaggcggttacctctgtatagaatggtcgttgacgctctactggagggcatgcaagtgagtgcctagtctcctagcgacgcggaaataacccactggcttagagaagccatggaggttcacaaggttgtggatggggccatcattctatatgttttcctaatcccaggttgtcctctgatacgccctgggtcgggctttgtggaatttgtaagctcatcttcttcctcttcgactttgatttcatgtcccccaatccctcctcttcttcctcttagccttcttcttcggtattgtgagacgaccctgttccttcaccgaaaagcgtggctgagaaggatgtggccacgcaagggcagagcaacagaggagggaaaagataaccagggtcgataagaggcattgcaaggtcgagccttagatgcgtagggaccatggagactgcctcaactaatgaggaggaagacgatgatgtcgtgagtgcaagctctaattttttagccatttctatgggcgat

SEQ ID NO: 96237 - DNA, 741 bp, Zea Mays
agaatctagggttaaggcgcaattaatctggactcgattgtagttcattataaatagataaggacggtaggttggttttgattaacccgagggtttcttatgcaaagtttcatgctgaagaggtactggaaacccagattcgcgctattagaaacctacggttctgattataattacaatgcaccacgcgaaccggtattgaatcccacccctcggatctaaaaccaatggccggattttgatgactctaagtttaacctggcccgcccaaattgcatcggacggttacgatcaatcccgcgctgaacgacatcccgatcaaatgtacatcgtctgctgaagatcctgcggtccccgagcatcatccaagccccccaatcggagccatcgatttctggattgacacctcgggccttatccctaccaacgccacaccggcagctgcgcacaccaacatgaacactgcgtcgccattgccgtgcaatccgtccacacgatactcaaccctatacttcaagctgaggagagcgatagcgaggaagcgaggatgcagagttagcgaggatgcacccacagtgaagagtggaagggaggatgcgcctacgctccgtcgatcaattcccagctccaccgtactctagccttgatgggtgcggtgtgaacacacaccccggggttccgtaaagacccgaaggccagacctagcccccaatcgaccttgcagactggcagcaatggaac

SEQ ID NO: 96238 - DNA, 336 bp, Zea Mays
tcttagcttggttcagtgttcaaagtctgatttttaccgtaccgcatgtgaaatgacactgttcgttcgttaaggcatacacttatgaggtgcgtcatgcaaaagccaaatcgtaggtgtaaaaaaacaaaacattttattttatcagtgttcaaagtctggttttttaccgtaccgcatgtgaaatgacactattcgttcgttaaggcatacaattatgaggtgcgtcatgcaaaagccaaatcgtaggtgtaaaaaacaaaacattttaactctatcagatgcaagtttcgatcctgcgacctgtgggttatgggcccaccacgcttccgctgc

SEQ ID NO: 96239 - DNA, 408 bp, Zea Mays
ggaatacctcgtacgtattcgatacatcaaaatgcagccagtaacaactccgcatatctataccggcctatgctaggtgttcgcagtttagtcatttccacgtttaatttaatttagaaataatgtgacaaatttataaaagcatgtacgtgtacgtataccaggccatactggtgctcgtgacagtagcataatacatgtttacaaactatactggtcataattaaagttgtatttcatgtcacccgcagatttttacttagtgtatacatttcaacaataactcggctataagcgattaaatacatagaataattgagttatatttaagccttctcacgttgagcatctctttattaacacttaattatttttagtctttaaaagggaaatagggttaaccttttc

SEQ ID NO: 96240 - DNA, 488 bp, Zea Mays
agcgaggactactctttagctcccgcctccactttgacatcctttcaggccaccgagctctccaggccggtgaggtcctcaacttcttcatccctcatcacctatgaagacagcacaacaaagcgttagacaaagcaaacatataagacacccttgctaagggcacaagcatacctgtgcaagcgctcggtcggccctctcctggacgacgccacagcaatgaggaccccacattctatcgtaaagcaccctagccgcacgcttccacacgttgtctttgacgtggaatacaccagcatcaaagtccttgttgctctggtcaaaggcctcgaagtgcctacagccctcacgggccaaggcattcacagccccctcactggacatgaggcccgtcatgatggacgagagcgactccagctcctcctataaccacccgagaaattgggtccccacctcccctcccgacttgttgaagggagcagtttgcg

SEQ ID NO: 96241 - DNA, 824 bp, Zea Mays
gacccaatactgtatggagtaacatgcttccagtcttggtctgttagacaaatcgatgaagcattcagtggtgaacagtggactgaagaagatcccaggttcagagaaccttgccgccggtgatctccacgccgcgattcgggcttgcctgggagattcgcgctgcgatagctcggacaacgcaagggggtaaaagatctcagtgtagaggggagctcgagaccacgccacttgcaacacgatcggtcgagatgccatcacccggagttcgtcattctgcagccgtgcccgtactaggtgcgctaccacgtcgatgtaagtcgtggcaggtagccagtaactaccttgggccattgttccaccgcgcaccatggcaaaatgcgtctctatggaaatatcgtgtcatcgccgtggacgatctcatctcaaattcgcgaaacaagcaatcgatttctttaaattgagcactccccccgctccgcctctctgttacgcacccaacccaccctcagctaacccttctcatccaccgtagctcgagttcttcggaatccccccaaagtcggtcactatcgccgccgtaaggtgctccaccgtggccagtaggctcgtgttttagtatcccaatgatctcttttttgctcgtgaacttgccgattgaactgtaccatggtgagttgacgagaacactgtctcaccgtctatgagtgcgtccgtagccctcctcggtgtggccggttaattctgtcctatttcaggtcccttcggtcgttcttacagtaatcttataagctactgaagctcgccttgcctcgtgattgaac

SEQ ID NO: 96242 - DNA, 369 bp, Zea Mays
catatgtataggttcaagaatgccttggtttcaaccttctcttcctcagcgatctccttgaatttagccaagcgagaagtgctatttttaatgtatctaacagcagctcggacacgcttcactgaaatatctactagtttgagtccatcttgtacaataagattgacaatgtgtgcaacacacctcatatgaagaaacttgccttcagctatgcttgtctttgcaatattcattatcctcctcaagtaactaacaccactatcattagaactagcattgtcaactgtgacacacataaccttttctaaaccccattcagccaaacatctctgtaggttcttcccaatatcatctcctttatgccccttc

SEQ ID NO: 96243 - DNA, 374 bp, Zea Mays
caagttataaaatggactaatcctaattggggattaattactctctaagtgtttggaacatggttcaaaaaggttaagaggtaattaaacaagtggagattaaattataagatgaactattcttatttaggaattcgattatcttttaagtgccatccaaaattacctacctaattatatttatgtcattaaggacaaaaggttaagccaaaaataaatccatgtattgcataactctaatgtcaccagcttaaatatattttaactcctaaggctttcattttatttatttcttcaaataaaataaactaacataaacattaatcctatattctaagtgtaaaattgaagtatacaaattacagttgatcata

SEQ ID NO: 96244 - DNA, 1687 bp, Zea Mays
cgtccactgctgcacacttttgcacaggcaagcccattttatccactaaattttgactgacaaaactcagagaactgccagagtctatcagattcaccaacatctggttatgcataaaaccttgcaccatcatacatccatcactttccattccactgatagcatttagagacagtttatacaattcttcaacctccttgtcttcggactccagatgctccaacacaggatcagtcaacaccatgcccatgtcttccacagttaaggcatgcaactgaggcaccaccctcttgggacacttcccttggtgacctggctcaaacttttcaccacaagtgaaacaaagtccattcgctcttctaaactccctgagttgcctctcctttgttagatcacctagaataaatcctcccttattgtcagtcttcagattactgcccacagccttattagaagtaatactcctctgcatcttcaacctattcttctctaatatctcctgctgcatgtgagctaaaataactgctctatccacagactatggcaaatgacacattacacccccttgtaattatgtcttcagtcccttcacaaactgattgacaaaaaatctcatccatccccgggttgtgaacagtcgtggcatgccttgcttcttcaaactcttgagcgtactcttcaactccattcttctgatacaggttcagaagatgtctcatggccttgggatattcttccactccaaatttggccctaacagctctgccaaactgcatccagtttcccagtccttgcctcatcttgtacacttgaagccacctcgctgcattcccctccatgtgcatggatgctgatattgcccacaaagcttcaggaacctgataaatggtgaagtagtcttggcacttggccaaccatattccacgttccttcccttgaaatctgggaaacgaatatttgggcaaagatggatgtcctcgccctcccatcacttgatcttcttcttctcttactctctcctgttgtggttctcttcttcttcggatttgatcaccttgattagcaccctcccttgatgatccagcaccatcgccctccaagtccttcgccatcatctccaaacgcaactgcgccaccaccttgcctgtctcctccatttgccttgccaatatagtacgctcttcttctgccttccttgccactgtagctgagagctcgacttgtccttccagccgatgctgtctagcttccaccgtatccaacttcttcaccactcgatccatcatcttcatcatctgttcccacttctcctctcccttctgctccacagtcgccatagcctccagcacgagacgcgtctggacagacggtttcaccaccggcgctgtcttgacagctctgaagtcgaccgtcctctgataccaaattgtcacgacccgtggcctagggttcgccaaaccctagacgtgagccgcgacagcaggaaccgacagctttcctagtaagcttcggtggcgaggaagaagaagtagacaggtttgtggctaatcctttcttattcaattcgtcatctctgacggtttatcagtacaagtatttataggccattagatgggccagattacaatcaaagaaaagccacacaatggcccagattaaccctaatgcttctagaacctcatagatc

SEQ ID NO: 96245 - DNA, 305 bp, Zea Mays
gtgtcgtcgggcctaaggtaccatctcctcatggtcctgccgtggtctctggtggcgatgccgaagaagacggagctgacgaccgagatgacgatgagcgagaagaggaggaggtacatgacccggtccatcttcttctccacgttgctccgcttggacgggaccttcatggagttctgcatcaccttggtgtcctgccccgtgaacacgacgacgccgtacacgaagtcggtgttgcggagcttggagtccctgagcaggagctgctgcggcgacagggggtgctgccggccgtccatctcgat

SEQ ID NO: 96246 - DNA, 514 bp, Zea Mays
tctattttggcagctaaggatcctttaagactcagttttcactgttcgaagtcttggacaagctgtctatattgtgttgcgttcatagcaccaaataattgcaaaaaaattgaacactgaaacacaatttattcggggaaatttagtcatatattctcaccattttatacaaaggttacaatacgacctaaaatatattgctagattatttaattggtacatgtttttttttattttttatataataaaaacatatcatttctgttctaaatatgatttagtgtggaggttcgccagccaccaccaagctagtccgagccttattttccagctccaggcctccagctcgcaatacgaccgagttgagttggctcgtgtctatagctctagccccatccagctggtagcctgcacgccaccgtcgacttcttctactcaactactgcccttcgatgatatgcttcctccgcagaatttattcgatttaataaaataaagcatgggccaagcagat

SEQ ID NO: 96247 - DNA, 582 bp, Zea Mays
atagtctgacagcacgactttgggcacaattttctccaaattttccataacaacaatgtttaatcccttaaacaaagttgttctcctaacatagctctatatatttgatgtgttgaccctaggcaaattctcaatagttttggatctacagagccctaaagtcagccctcctatactattttcagacttaaccaatagagctccaatagggtttttttacaaataggtccaaaactcggggtttaggttgcaatttcacacacatgtgaaccatatgacttaaagtgccttactttcatggtttttgccctttagtccaaaagtgcactagttttgcacttagccccctagggtttttctagggttctatttagggtttcttgcactcttagggtttggatcccacttaagttcatccatggtgacactttatgactttttcaattgaaatttgaagttttctattgtttaggccttgtttgctctattaaacccaatccagggttgagtaccctactctagggttttattcacaaaatgtcatatcaacacaacttgtttgaactttttgcctagtgaatg

SEQ ID NO: 96248 - DNA, 285 bp, Zea Mays
cgcccatcgcaaagagaccataccgcatggctcccaccgaattagcagaactaaaactccagatcgcagagcttcaacaaaaagggtacattcgtcccagctcatctccttggggagcaccagtcctcttcgtcaccaaaaaggatggaagtatgaggatgtgtattgattaccgatccttgaatgaggttacaatcaaaaacaagtatccactccctcggatcgacgacctcttcaaccaacttcaaggggccaagtatttctccaagatagacctaaggtcag

SEQ ID NO: 96249 - DNA, 553 bp, Zea Mays
accgcgttagtagtcgagcgggtggaggaaggacatacatacccggtgcagcatctggtctacttcatcagcgaagttctcgggcccttaaaaaaatgaagtatccccaagtccagaaactgctatacgtggtacttctaaccgctcgcaagctccgtcactactttgacgaccacaaagtcatagtaggatttccaataggggacattcttcacaacaaagaagctatcggaaggatagccaagtgggcgtgcgagctgggagctcacgacatagagttccggccccgcacggctatcaagactcaggcactggttgacttcgtatctgagtgtactgaacaccaggtcctagacaacctggagactaccgaagtatggagaatgtactttgatgactcgctgaagttgcaaggagcaggtgcaaggattctctttattgctcctggaggtgaacaactcaagtatgcactccaactattgtttccggcatcaaataatgcagcagaatatgaagcactgatccacggattaaacatcgccgtatcactcag

SEQ ID NO: 96250 - DNA, 323 bp, Zea Mays
ctgaccaagaagaggaagacgagaccattgacatggggatgtctgggcatgaagatgatgaggacagattaatgatcaattatgacaaggacaatccttccctagcagaaggcaccatatttccatcgatggttgattgtcggaatgcactcgctacttattgcattaagggtgaatatgactttgaaattgacaagagtgagccaagcaggttgagagtgcactgcacatatgtgaggtgtagatggaggattcatgcctctaagatgcgagataggacactcattcaggtcaaagtgaacccttttcctcacacttgtcca

SEQ ID NO: 96251 - DNA, 403 bp, Zea Mays
tgggaacattggtggacaccggtggacatggaatgggtggtaccaattgtggttgaccgaaacatgtttgtgtaggaggacccccaggagttgtcataccaaaatatgggttccatggagtacgaaaggtatatgcagatgggtcattaggtccctgggaccaggtaggattggtcatatgggaatttgaaggagttgtaaatgttgaagcctgtgttgggtccaacccttggggctgccacatctgaggatcccacatgggtggggggaaaatttggttacctgtattggggctggcagcaggtggtcgaaaaggtgtgtttgtgttgttgtcagccattctggaatgaaatacataaatacattaagttggacaacacataacaaacttgaactgtatacg

SEQ ID NO: 96252 - DNA, 632 bp, Zea Mays
gacaaggctgcatcagaacgcattgcaagacagtcagcccactacaccatcatagggggcttgctgtatagaagaggcgtaggaggagtcttcatgaagtgcatccactcgaccaccgggagacaactattagatgaaattgatgtcgggcagtgtgatgtgcatgttgcgtcaaggactctggtgggaaaggctgtcagatccaggttctattggccaactgcgaagagtgacgctgccgagttagtccagaagtgcgaagcgtgctaattcttgtcaaaacagcggcacttgcccgcaaagcagctgcagatcattcatgtaacctggccatttgcatgctgggggctggacatgatcgaacctttcaagaaagctcagggaggttatactcatatactggttgccattgacaaatttacgaagtggatagaatacaatcccattgcttccttgacatcagcaaaagcagtggagtttatccaggatataatgttcaggttcgaaataccaaatagcatcatcactgacctaggatccaacttcaccggctcggggttcttcgatttctgtgaacaaaggagtatccagatcaagtacgcatcagtggcacacccaagagctaatgggca

SEQ ID NO: 96253 - DNA, 386 bp, Zea Mays
gtgaccctgctgctgtcgagcagctcatacctgtagaagtgaggctagggttccgcttgaaggcggatgtaataactttcgtttttgtaagatacttttgagaactatcaatttaacagttcatatcttgtatggtatttgttgttgctgtgtgcagtgttaccaactcctctcctggtacctggcccccctaggatgtagactcgacgtgttgagactggataccagcttattcaaggaagagttggtgacccggcctccaggaggtagccttgacctggacctggatctgtacacagctttggctagggagcgttagtagcacacccataggatccatcgtctggtatcagccatcctttgatttatgcaacaggacccgtagg

SEQ ID NO: 96254 - DNA, 641 bp, Zea Mays
gtaatagagtgcaatatataggaagttggggatcaacaaaggttgattccacaattattagaatatgcatgcatcatgttaagaatatactaataaatcttcccctcttatggagacatggcgcgtacaaggaaaacaacacgcaaatctaatggaccttttggcgtacaaggaaaatagcccccagacatgaagggagtagtagtggcagcaatgacccaattggagacctggaagccaaggtggaccaacttcggtcagagctacgtcaccggaatagggcatgagcacaggacagccagcgtatagctgaattgtcaactgacgtcagccgcttgcaatatgagaattcggaacgggattcgaccattgattgggccgtcaactcacgttcgatcgcttgggaccgcgaagcaaaagctcgagctcgtgtggcagagcatagtgcggcactcgacagcctgtaagtgtactgtaatactttacatgaggaagtacatgtactgtatgctcgactgcacccggatgtgccttctgacgctgctgcaatgggagctggaccatcaggaacagcaagtgaaggacctgatggggagttggacctttttaggcccctccttccatgaaccttgctgatgaac

SEQ ID NO: 96255 - DNA, 804 bp, Zea Mays
cctgccataacagacgccatttgactgttttttgggcgtaccatgattgccacctccacgtttttctcgccagcatgatttggctcatacctcatcttggctagtggaggctattcgtgaatcgcatttttcatcacttcatcttcgttttttgttctcttctcctttgtaatagatgtaagattcatcatatctagccctaacgaaatcagtttcgtaactgaaactaatttagtcattacctctaatatttttgtcgtgtccatgaatgaagatgaggcaatttctttggctttattcttttcattccctttgatcatcttcgggtcttattatttattctccttctggttttcttccgtaagcttcttcttaacaaccttcggcactgccaatgacttgctctcttcatatgatatgtttccctttataggcacgatcttcttcgtacgctttgaaatcacgttccccccttcacctacctagcaacctctcgctcaagtatgctaacctctctttttctttccaatcaagcttcgatctctttggccaggtttggatagtctagatacttgaacttatatgcatccattacttggttaaaccttttatttttctcgacctccaaaggatgttgtcatcaaatgatcttcttttgtagtgtaattgcccaagattgcattactaagtttgatagtctcaaactattctaggcatggcgtttcaaatagagcgtgatccttgaactgatatggaaacttaatcagaacaccaggctttgcttcctccttctttggctctagc

SEQ ID NO: 96256 - DNA, 283 bp, Zea Mays
ttggaagcaaccatccaacgtcagtgaagtacgaagctttctgggaatggcagggtattaccgccgctttatcaagggattctccagcatagcaaaacctatgaccgaacttctcaaaaaggacaataagtttgcatggactccaaaatgtgaggaaagttttcagatcatcaaggaaaagctgacaaccgcgccagttttgacactgccagatatacaccaggattttgtcatcttctgtgatgcttccaagcaaggcttagggtgtgtcttgatgcaaaat

SEQ ID NO: 96257 - DNA, 719 bp, Zea Mays
tttgaaagcaatgtgttcttttaccaaatccctggtaccgatgtaagtacatatgatgttgaaagccattaggcacgcttgcacctcattcccaattgcaattgatggtcttctaatgccaaagcgtgaccatatgggacgttgaatgatgcccctcacatcctccctatgattcatatcattctttacttagaaccattgcttcatccaagagcccgaccacttcttctgaaatgttggcacatgataatttgcctcagagcagagcacaaagctgtaacatccgaagttgttatggtattgttcctttccggttgcctttgtctggtaggataactcatgaatattgcagaaacacctagcatccagctctaccccttgactcctcatagcccatataaaacccccactttaataaaggcttcagggataagttgatgaaggtatatttcgaatgtcttcaaaacttcaaccaacatcttgtgcagtgggaagcgaagcccaactttcatgaagcttttaaagactaccacctcatcagcttcgggaagaggaacaatgctttctccctggccctcactatagaaatatcatcaaaatagttgcccttcatcgcttcgatttgcccttgcttaacagttgatttcccaaaaacaacatggctcggcctccacggccaatctttggtatcatcatttccactctccataacaaaattg

SEQ ID NO: 96258 - DNA, 302 bp, Zea Mays
gtggcacccgatgctcctcgtacagctgcaccgtgtacaaagggggtgtagggtaaccgacggagttgagcacttcccacaagatggaaggaaaaccatcatgagaaaggaaatcggaactgaaacgagtgtctcctccattggcgggggtgggtgaagtcatctgtggaagaggatcggatataaaggttatggtggaaggaagaaaaataacagagcctgggtggttaaaaggaagcgggttagatcaaattttttactcctttaatttctagtccttttaattctataatgcatgcatg

SEQ ID NO: 96259 - DNA, 293 bp, Zea Mays
aagtgacagtgccgaaggcacaaaaaggtcttgcagcaactcccaaaagaaaaaggatggcaagtgtactagatgtgctagaatcagtaaaggcttcaagctctattacttcatggaaaattgccgaggctttgaaaatgcaaatcaaagctgaaacaaaaccagccaaagttgaagttgcagtgagccaggctagcgccgaagccggaccttcagagcctgctgagaaaaaaccctcggaaattgaagagaaggcagcagaggaagaggctatagaacagactttgcctgaa

SEQ ID NO: 96260 - DNA, 620 bp, Zea Mays
gcgccggcgagcttaccaccgtggggtggggtcgtggggagctcgacgccgcctttgctggccgccatggaggtagccgcggtgagaaggataaaggagaggcagtcctggctatcgatatgaaaatagatggtctcgattacatcgggcaagtaccggttgagatttttgatccaggccgtcgttccaggatcgaagcgttgtgagtcgattgatgcgtgggtggtgtacggaccatggatcgcggatccgttggacagaatggcttaccgtttcgtttacaagatcagacggatatgcgccgtgggcttctgatccaatggccggtgatcactcataccccttcgccgtgtcctttttgctaaagagcccctgtcctttctccatataaacccgccatccacgcatatgtaaagaccattgcatcctgaccctgatttttgcaagttagaccctgaggaatttataaatagtggtcgccatccacatcacatgaatatctgtaaaattaaaatccgaaaatgattttaaggataaaagtaatcctagaagcttagatctgtactacttcttaagcacataacgtaggcgtccatagccgtccgtggcgcacgttctgc

SEQ ID NO: 96261 - DNA, 356 bp, Zea Mays
attttcttccatacagtgcttcgaaaggtgacattttgatgctggcctgatagctgttgttgtatgagaactcggcgtatggtaaactagactcccaatctctgttgaaggctaaaacgcaggctttgagtaaatcttcaaggaccttgttgactctttccgtttgaccatctgactgggggtgataagcagtgctgaaatccagcttggtgcccaatgcttgctgaaggcccttccaaaattttgaagtgaactgcgttcctctatctgatactatcttccgtggaatgccatgcagcctgactatctccttaaggtataatcgggcgagggctgctcctccaaaagtggtcttt

SEQ ID NO: 96262 - DNA, 483 bp, Zea Mays
attgcctcgcttccatggcaagtccgtcatcttaacggtcgtggaccgtttctccaagtacgcccacttcattgccctaggacacccctacaccaccacctccatcgcacgcaccttctttgtcgatatcgtctgcctccatggattcccaattccatcgtgaacgaccaggacccggtcttcaccagcgccgtatggcgcgacctcttcaaaatggcaggcgtcaagctgtgtatgagcaccgctttccaccctcagacggacgaccaatctgaggtcgtcaacaagtgcatcgccatgtacctacactgcttcaacggtgaccgcccgcgctcctaggtggactggttaccgtgggtagagtactgctacaacacctccttccacacagccctgcgcacgactccgttccaagtggtttacgatcgagaaccaccgatgctggcccctttgtgacgggcacatcacagacccagaccatgg

SEQ ID NO: 96263 - DNA, 343 bp, Zea Mays
gtcctttggtattgacatgcttgtatccctttaatactcttgtttcaagtacttacctctgaatttctactgcctacttaaacatttcagtttatatgtccatgatcaccctgtcttttgagaccctttcctattctgttgttaagtcactatcttttggctattcgtactcccttggtcttagtatgctcgcaccttcggaatcttgcgtactcttattttttatataaatgcttacctttttaccccaatgtttgtttaagacatttcaatttacatgctcttgaccacctttgtttcctcatgatctatgagcgatggttctattccacacatccttaac

SEQ ID NO: 96264 - DNA, 321 bp, Zea Mays
actaatctataccatctataccatataatccaccagtttaacctcgacaaaatctacccaaccaaatcactgacatactcataatctttcactaaatccgacaaacaaattgcaaccgaacttaacacaccatcaaaccaacatttcagattgttggataacctctatcccttacccactcaaatccaatagttaatattatttagatcatcgcacatccctcctctttcccctctcccgtcccctacatccctctctcattcgtgtcatcgccgtcgaccctccccttccctgtgaggccatgacacgtgacacctcttc

SEQ ID NO: 96265 - DNA, 366 bp, Zea Mays
gtaaaggcctatgatggtcatcgaaaacgtgaatttaccttacgtgttgtatatttgtggtcaattcatgatttgcatgcatatggtatttggtctggctggtgtgtccacagtcgactgtgttgtcccatatgcatgggggtcacacaagcatatcgattggagcatggtaaaaaggtctcattctttgattgtcatcgacggttccttccatccaatcacacgtttcgaaatgatacgaattcatttagaagaggcataaaagttaaagagggtccaccaaaacgtttaatgggtgaagatatcatgatacaacatcgtgcccttcaaagggctgcagaaggtcatgagtttgaaggctatggt

SEQ ID NO: 96266 - DNA, 616 bp, Zea Mays
aaagttctaacccatcgaccgaagtcatactactcggaaagagctgcagaattacctgctgctgaaacttctaaagtagaaactgccgaagtagttgaagagaccacttcacctctgaagggattgtgtttgtttttatttgatctgaatcaagccacttaatggtctaatgttaatgttggaatttttgagtatgagatgaaagaaagtgaagcgattttggtgagtgcaacacacctcattcatttggaatcaacttcagtaaagggacatggggtggaaaaatagccgaaagttcaagatccgctgaaggtgcaagaactgtcgaagatagcatccgttccagtgggaactcctaggaaaggcaagaggatggagaacatgttggaagctattttgaggcctttgaggatagcgacgcctgctcccccgaagatttccaaagtcaaagatgatgatccaactgtgaccacttttgaagacacctcttctgatttgggcaaggctaggccttcggaacccattccaccaatggaggaatctagaaaccgaccagagaaaacgacagtgccgatgctcgaaatgacgcaacttgaaaatcttgaatatattattc

SEQ ID NO: 96267 - DNA, 540 bp, Zea Mays
ggattattttgctgcattggatgtggctgcggcggagacttctccacgtgtgatgggtgatgaggatcttccgggtgcgagtattgggcataggcggcgaagggcggtggcgaaacagagagtgagtgagttgtcgcgaagtgataggcgtcatcgtggtgaggtggagggtggtcgtcttcgtgtagacgggactggcaatcgggaattgttggcctcgccggctggggcaagtgtaggtgagggagagctgcgaagtctttttgagggtgatgagttgaggataacactgttcaactacagggagatgggtatcatctctagggttgagccaatgtaatgtgtgatgccctcgctgtatgtatgtaactataatttgtatgataaggttgcgtgccttcgctgatccggccgcgcacgtaggcgacttgtgcacttgatgttgcacatttattgtgttagtccggctgcacccgtaggtgatttttgcacggagggtccggctgcacccttaggcgacttttgcatgggtagtctttt

SEQ ID NO: 96268 - DNA, 683 bp, Zea Mays
gcgctagctattcgtttgtttcggaggattttgtgtcgtgtgctggtcttttagtgcaaaggatgggtcatccaatcgtggttagttctgctaatggctccatttgtagctgtttagtctaccagggttgttcaatcattcttgttgatgaggtcttttcaactaatctcgtggtgatttccttggggtcgtttgatgttatcttgggtatggattggttaactcagtatcgcgcagttatatcctatctttggaagacagtgtcattgcaggcgtcattgggtagggaggtagtattcttggtgagttctccaaagttcactctctccctgttgacccaattacttctggatcgtcggtcaaggaagtcaggaattttcttctccatggtggtggagagtgggactgccttgtgggtgcaggacatccgtgtggtgtgtgattatgccgacgtgtttccagtggagcttccaggcattccaccgaagcgtgatgcggcttttgaaatcaaactgattccgggaacgcagcctattcataaggccccgtatcggatggctccaaaggagcaggtggaattgaagcgacaattggatgatcagctggctaagggtttcattaggcctagcaggtcaccatgggcttccccggtattgtttgttgagaagaaggatgaaagcaag

SEQ ID NO: 96269 - DNA, 323 bp, Zea Mays
cactaattgttcgggttgcgatgagtgattgttcatgagtagtgtcttgggttgagtagtgtggcctaaccggggcatgagtgtgtatgtgcaaccatgttctcaacttatggtgcatagatgtgcattttggagatggaggtcaatagtgaaggtgaaggtcaaggtcatgcaggttcgtgctgatgaacgtagatcagtgaaggacgggcactgagtcttgcccaagctggagaagctaggtgactagctatagtggctgacacttggggacgctgacaagcgtgaggatgtggtggagcggatcgtgttgctgacgcggt

SEQ ID NO: 96270 - DNA, 321 bp, Zea Mays
ggaattgctcttggggtctaaggttatagagttgacgagaactatgctctagctatgcctaatcgaggatccaattgttttgtagggatccctaacccaccttatatccgacagaattagggtttacatggttaagtagatcgctattgctatgccttcatctaaggagttgactcagactaattcgcaagtgtgtgaatctctatccggcttatcttgtcttatgcatgcacgggagttggttacgatgccttcacacccacgtattcgagttctgcatcatcctttggccgagttcgactaatcagtcttcgaggttta

SEQ ID NO: 96271 - DNA, 1285 bp, Zea Mays
ccgggtagaaagatccttcacggacaatacaaaaggataaaactcaatagagcaagagttatcaatggtaaactgacgaacaaataaaatattttgaatgatataggggccacaagaacattgcgaagatagaaaggtccgagaagaaccaaatcacctacagaggtgaccgggagaatgttcctatgatagatgaaggatgagacagaagcggtgggtgagaagaagaaagtataccagcatccagagcgatgtggtaggacgcaccggaatcagcaacccagtcaatgatagaagaagttagaataatcgtgctgaacgagctagtaagtgactgcaaatcccacccactaaaaccatcggttctaggaacgatgtggggtggtaggggtagtagcgggctaaggtgctggtggcgagagggtcgagaggataccttgagcggggtattgtcaggttagccgtctagggtggaggcagatgcaatgaaggtccacccaaggacaggccaagccaggccacatagagatgcagccggtccatgggttgtagggaaagggcgaaggggcatccctctagccacccccacccccatagtcacccttcatctgatagcaaagacccacctaaaactcgccctgccccgggcctgggctaggagggaggggcgtggagcccacggccaaagggacagacgagcgtgaagacaagccccccaaggtaggagtagaagaggacgggcgcaaggactggcactcatgggtggagctgtagagagcgatagcggtgtcgaagcgaggaggcgccccttggtgatctcctcgaggatgaagtcattgcaaaccttgtggaaacaagggaaatgggaccgagcgagtgatccaaatctagaggtaattgtagcgctcattgaagccacggaggaggttaaggacatgtgtgcgatcggagacaggctccccgaggtcacaaagggaggttgccagcctttcatctggcgacaatactcgatgatggagaggtcctcctagacaaaggtctgaaaggcgacgttgaggtgaagagcatgagccccacaattgccaaagaattgctcctcaatggcaaccaaggtctgcgggcagtgccgccacactcgcgaacgacatcctgcagctcaaaagtgaatgtccaatggatctagaagaggacccccccccccattatgcatccgtcgccaggaggggatagtgagggacgttatgtcaatgaggacatggtcttccagggcatagtgttgcaggat

SEQ ID NO: 96272 - DNA, 849 bp, Zea Mays
cccggatgcattggtcccgttggtgacaaaatatggacgctatccatatcacatgttgatggtgttgaatagtaagtgagtattcagagataataaggaacaaagttggattttgtatatgtaagctgaggagtctgatattacttctaataaagcagggaggggatattcgtatgaatcgtagtagggaaaaatctaaaaatttgttataggtagtttgatgagaaatgtagatgaccctaaatagtaattcaacatttggtgaacatcaggaaatcaaaaaaaacgatcgatgaatacaaaatggagtcaaagtgagcgaagctggagggaagccctaatcactcgtgcacggaggaggaagttacaaccaaaaacctaacaccaaagccctaatatttggccgtgttcgatggaatcagaatgaaatgaaaaaggcaaaacctaacacggagaacacatagccagagaagtctctgtacaagtgtggttcgtcagcacgttgaggattgggtgcactggagatgatagcacacgtcggaaacaccacgcggtggccgtaagtaacagtgtggttgctgatggggaatgcgacactccctttcccctatcgaaggcgcgatctattaatggaagaatcgcatggcacaatgaagagcgtaaacacgtggagaaggatggacagtgaggcaccatcgccagcgtacggagcaaacaagtgtggggaaggaggaggagcggcatgcagtacgttcggtacccagatctccacccgtagagaagccagcggaccaccgttttccttttgaccggatgaacctggcagccttatcttgaagcatcccatgg

SEQ ID NO: 96273 - DNA, 406 bp, Zea Mays
cgacgacgagggatggggacgggcggtgggcaatgaacgggccacgacggcaaattgacggatgatggggacggacaatgatcagttgaggaaggaaagtcttgctgtagaatgacgaagaaggagagtcatgggaacaatgaaagattgggcgaggggaagataaagccttagcaagatcatcgactccaagcagtcgcgcgtgcattggctctgccatgaaatatttttggtcgcgatttcacatgtcttggaaacatgttagcaccatgtcacggtgatgaaactgatatcttctctttgttatttaaacattgatatgtcatcgcaccatctaatacggtctaacaattaatgtgataaaatgtttggtgacattgttattgagaataacctaaaaattaac

SEQ ID NO: 96274 - DNA, 398 bp, Zea Mays
ggtatctgggaaacggtggccagtagcggtgatctgaaaaggagggtgatttgggtagcttcggctttctcccaggtagactgccatagagcacttctcaatcccgttctcgcggtatttcttctagacatactctagcttcttgcagatccccatgtgaagcacacaactccgaagaaggtgagaaaatccttccacctttgagcaataggatgtcttaaggacaaaggtgccctccatctggtagcaagagaagaagggttgttaatatcgggtaaaggagagaaggttctttatgagatttagaggtctttcttttgaggaaatctttttaggctagggctgcggtctacaaccagtcctatggctccgataccacctgaagtgcctcgatcctt

SEQ ID NO: 96275 - DNA, 373 bp, Zea Mays
acggcatacttatatagccacctataccctcctaacctctaaggcttcacgaaccaaggtttgtccttaacattcctatgttctatatccacacgacttttctaggttagttttgattggaacatgttcttgtgggttgttagattctctagtggtgtgttactgccctctgataccagctgtggcggaaccgccctgcataatccaacttaagtgcattgacttccaccccgagggtgacggcacactaaaatgggattaaactgacagtccgtcggatcacatccgatttaaccacatatacaggatcgataaccacgtctcattcgaagatgagaatagagaattcaaccatccacaaaggtaataacat

SEQ ID NO: 96276 - DNA, 344 bp, Zea Mays
caaacatcgagaagggccagaagaatgtgaaaaatcagcactgaaaactcgaccaaaaggggaaatctaacaaacaagatccccactagcatccaaaactcgagacaagccctttttaaagcgcacttcatagtcatcctcaaggagttgcaaaactgaaagcagattgaaatgcagattcgaaaccaaagcaacatccttgagaacaaagctctcattcacccaaatcgtgccacgagaaacaaccttacctcttgaattatccccgaatgtgatgtattccttaccaatcatggggccaaggctagagaaccatttggagctttcaatcatgtggcgcgaac

SEQ ID NO: 96277 - DNA, 425 bp, Zea Mays
agtcgctcttcttcaagtatatcaacatcctccagcctagtagcttcagcttctgctatgttttcaaagattaacctcggtgccccaaacttgagatcagcaggtagcactgccttcgaacgataaaccataaagaagggagtatttccatgtagagctcggctaggttgagttctcaggctccaaaccacatacgacagctctctgatccactttcctgcgaacttctcgtttttgtcgaagactttctttctgagtgcttctaatatcatcctgttggccctttctacttgcccgttggctcttgggtgcgccaccgaggcatatttgatctgaatgctcttttgctcgcagaaatcgaagaactctgaactagtgaagttggatcctaggtcagttatgatgctattcggtatcctgaacct

SEQ ID NO: 96278 - DNA, 452 bp, Zea Mays
agattggagattttagataacagaaataatgtcatcaccaaggtatggtcgagagatgggaaaggtcaaggcaacgctaaatagaggcacaacaaaggatggagttgaagactcacaagcgacgaggaagatgatacgaccaagggaaaagtaggtaaagtacaacgctcagattgagatggaaaagaggagattttaaagggccaatataagataaacgtcaaggtaagatatagaggtgataagggtaaaggtgataacgatgaaaagcataaccatggatagagttaaggctagactgacgaagtggagaaaacaagcaagggtaagataggtaaggttccaacaagatggttgaagtaaccgaaattattaccaagggaagttataaggaagcgatgagattctcaagggcgtgtgaaatataatggtcgctcatggatcatcaagaa

SEQ ID NO: 96279 - DNA, 444 bp, Zea Mays
ttgggggctataaatgcaccccaaccagcacattgaagacacaagagctacaccaaacatccatacattgattgcaacacctcccaagcattcaaagcaacacaagcgccacattcgatcgatttgagttagagagatttagtgtcttgtgttcttgagttgttggaagttcttgtgctcttgttcttgagtttcattctcactctctcccccactctcaactttgtaaggctatcaagagacaccaaattgtgttgtgatccttgcagggactaagtgtgctttgagattgagaagaacactcaaccagtctaagtgactgtttaagagagagaaagggttcaaagatgtccatccttagtggtctcctcaatggggagtaggttcttcggaaccaaaccttaggaaacaaatcactcatgttcttgtgttcattcttgtttg

SEQ ID NO: 96280 - DNA, 319 bp, Zea Mays
ctactgtgtataatttagagaaaaaggagttgcaaaactctctgtcacgcttagtgtagagctgtttcagttaactgaaattgggtgtgcagcagtttttgctctactttgggacatcataactttttctctttatggtatcagcctgggggtgtgataccaaagtggtagggatatagttggagtataaatttggttaagaaggtttggtctgttgccatatgggtttgtgcctaacatgacttaaacagggaacgtgctgtggacagtggtggctgattcagtggttcagtgatcaaattggaaatctgaagaagat

SEQ ID NO: 96281 - DNA, 1335 bp, Zea Mays
gctggattcagcaaatgtgggaggcttgagccttagaaactttcacattctttcctgaggtcttcctccattcgggcgctggttctcgaggcttctggtgaggacctcaatgagtcaggtttggttggccagaacttgggctaggtctaatggcagttccggaggtgcggggaggtgggtttcactcccttctccaccgacttctccttcaccaccgaggggagaccttgctccaatccctgaggcggtaggcgtggttttatccgaggccatctgccagaggggagaaagattactaccatgcatatgccatattttttcaaacacgttattttattcagcactcaagttcattacaagcatacaattgccacagttcacactacgcgcgagcgttttctagggtgtccccaaactccctgagaagatcgtcaaggctagccaggacacctcctcaacgtcggaaaagttttctatccctgagggaggcagtgttggtggggcttcctcatttcagtcggtttggcatccttggctcttgaactgtttttggatcttcttggcaggggcgagcttctttaatttctcagcatagtccatcttcagagtccagtatgcttcacgagtgttggcttcttcgcctttcgccatctcgagactgtcttgaagggacaccttttcttcctttagttccttgatttgttgctctaggctttctactcgggaatttaggtggatgcagtgggagaaaaggtcgtcatagtggttgtcaagggtatggagatatccggccatgtagactatggtagggtcatcttcattaggatctctccctaacaaggcctgaagtcttttcctccaggcaggagtatttttgttgctgggtggaaagtagcgaaggggtgtctcagagacttccctattgtagttttggcataactggcggagggctctttgggcatcattctggcaagtatctgggaagcggtgtccagtggcggtgatttggaagggagggtgatttgggtagtttcggctttctcccagttagactgtcacagagcatttcttaatcccgttctcgcggtattctttccagacgtacttcggcttcttatggatccccatgcgaagcgcacaactccacagaaggtgagggaatccttccacctccgagaagtaggacgtcctaatgacaaaggagccttccatctggtagcaagagaagtagggttcgttaatatcggggaaagaagagaaggttcctttagaggttaagaggtcttttcttttaagggaaacttttaaggtcagggctgcggtctacgaccagtc

SEQ ID NO: 96282 - DNA, 330 bp, Zea Mays
cctgtaacttttaatccatgagtattttggaaacagttgttataacaaacctgtagagtaactataggagaacaatgtttatgaaatgtgatagccctaaaaccatatgaaactaggagaaaaactggtccaagcacgagctgatagaaattgtggttttcagacttagtgcaataacctgaatctgaattttagtgttgtgagtgcagttttggagcttctttgtgcctaatccataaggtttttgactgtgggttctataaaagaattgaagacaatatattgatgaacaaatctctttgagaagatttggcttggagatgcatggaa

SEQ ID NO: 96283 - DNA, 598 bp, Zea Mays
caaggggaagaacctccccagcgtgaagcacgacaacagaggaacagacgccggaacatgcggcgacatcacaaagctggggaacgggatccgacgcagcttgtatcccgggatgaagcctcagaagtaggagaaattcccgacgagcgagtacaccgagaaaggcaaaactctcgccgctgcgatcaccgacaagctcaggaccaagaacgagagcaagccgagcaaggtgcaaggctgcgccgggagaatcctctctttgctaggaacatgtaccccgactttgctcatgcaatgaacacgccgagttaagttggaggggtactggcccagatagctgatggcctcccgtgaaccctagacgcggaaggctaccggcggttgcttacccaagcagctaatcacctactacccatcgctcatccttcgaacgacctatgttacgccatcaacagccgatgagatgtgtggagctccatcaacactttgcgcgaccgacgacacgaaaatgagataaggcaccgggaggagtatgaccgggatcacggcgccccggcacgaagtcgcaccacccgtgctgagtcggctgcagcctcac

SEQ ID NO: 96284 - DNA, 556 bp, Zea Mays
caaactattgaaaatgctaaataatcccttgagacggttttgaaagtggttttactgatgtgttatttttagaaatctatattatggggggtggatatccttgggtggccataactcgactatgatccgtgggtcgctcgagagaccttgttgggtcgggtggctaggcatcacaagttataagtcggatacgaccagacataggcggaaccgtggttacatgggcgtcaaggcgcgtggaccgaatcttgtgcatacatagggcacgatgtgctcctaaggactcgtcgacttccacatgggacgaagttggtttgggttggcaacggatgtgggacgtggtgcgtgggacttagctctcccatctgcataaggcagaagaaccacccctaagaaaaagataaggcatctcagtaggcatagtcatcttctacctccataactctctgtaattataaccaccaagcaaaacaacctcgcaaacacatagggtgttgggtcgtagtgcgagctgcaccggcacacgcccagactcaaggaccatgattcatccgcg

SEQ ID NO: 96285 - DNA, 343 bp, Zea Mays
ctggggtacagaaacatttgagaaacccaatccaagtcatacaacgaatgtcggctgattggcccatctcacatcaaatacagttcttcgtttttaacctcgatcacctggcctgaggaatcacaagtggtttcgccattttcttccatcaaatgtcagccgaagcacatggcgcggcatacagaaatccacaagcgtgcagtacaggtaggcatagtgtgcactgtgaactgattgtagatgggcacgtgctgctataattcccgattgcaaacacaaggttcatccagaagcacgaacggccaactagttttaccaatatgggcagggagccccaaaagcc

SEQ ID NO: 96286 - DNA, 289 bp, Zea Mays
tagtgacgctctttgaagggcgtcattgtgtgactagcttaacatttgacatgtttttggcgttcactgggagccgagttatgcagtgacgagagcgtgcgtcacacggtatcaatgagcatggggcatggctgaaaagttctgagtatatgaggctccactgcaccaggtcatgggcatcggatttgaccagttcatcactgctcgcggagtcacgggctaggaccatactgaattactgatccaccgggttgtcagttcgccagttcgaactgctatcagaacggcg

SEQ ID NO: 96287 - DNA, 585 bp, Zea Mays
agaaaagcctcgcaaagatgtacgaaaatggcaacttgaagaatagagttagagtttaagtgtgtcagatttaagtcgtaaaaatcaaggagaccacggaaaaaaggagagataggaagagcaagtccgcggataagaaacgacacatagaaaacagattcatgggtgtcctctattggaatagtgactccgcgacagattccgtgacagatccgccaagaacagagttcctttggtggcaaaaccccaacctcaacaaggtggaaaatatcagattcagagataatagacatgtgattaccaacaaacggaagctggctgttgggatcgatgggtgggatgatcgcagcaatgatgctctgcctcttccgcttgggagtcattgcaatctctcggggggaacgagcgggctcagaaattcaggaaagcaaagaagcggctgaggaaaaagtgaagttagggctcggaaataaaaaaggcacgtcagcgcgagtataaatgggtttcttgggtcaggcattatctctaaagtgctagatcaccactcgtaaaagtaaaagcctcagtcgtcactcagacattacc

SEQ ID NO: 96288 - DNA, 398 bp, Zea Mays
agagcgagcaggtaacgatttgtgatgattctccatggtaaaccactcgaaacgcgatcccttgatactatccttcagtggaatgtcaaggtattcagttttcctgcctcagcaaagctccagactagcacctccgaccagctgatgctgcccccaaccattctaggccaacaatggtaaaggcatttccacacaccaaagtgtagaaaaaatctgaggaaggcttcgcagaggtgaacgaacacggcaatttgaatcacagagttgggattcagatctgtaagattgagagaataaaagtcaaggaggccacataagaagggagaaactggcagagccaatcctctgatgaggaaaggcatgaaaataaccgcctcgtgagtatcctctgtcgagac

SEQ ID NO: 96289 - DNA, 343 bp, Zea Mays
ccgaagctatattaaggatgtggatttttgtgtgggcagtaaggagtcaagggatagaaccgagcgcaaagtgcttctgtagtatgcacgaacttttatatgagacaaaagccatgggtaaagaacagtaccacaacaactttggttgttatggatttatcgcccgtcccaactcaagctacccagtaccaacattttggaaaagatggccgggaaattggatggaggaatggttttatgtgaagaacgacttggtagctagggaggatgttaaggaggttattatgcgccccatttggtcccgcttcggtctccgaaggccgaaggtcgaaatcgatgaagc

SEQ ID NO: 96290 - DNA, 284 bp, Zea Mays
gtggccctgtgaatgttgtgacaatgttgttgagtatgttggccatgctcttgagcttgatggccctgtgaccatgctcttgagcttgatggccctgtgaatcctatgaatcttatagaagatgaccaggttttttgtaaactcactcatttagtgtagtttgcactgtgatgcataaatctaagggccttgctttgcataaccattgagtttttgattttataactgcacaaatcgtatcctcgtatatgcagtctgtccttgatggccctgtgatgcttgga

SEQ ID NO: 96291 - DNA, 438 bp, Zea Mays
tccgaatcggtaaacgggaaagtcagaaatggataacggccgataaattccagtatatcgaaaacggataaatccgagcaaaatagctcgaaattgatcggtaaacggtaactataatcggaaaagctcacaataaacaaatcctaaccacacagatgttcattcacatccacatacaagtctcattcacaaaagtacacaaaacacaatcttgtccacatataattagtcatacactcatacatgtccactcttaaattttaacacacaacacataagtcttaaaacacgattattcattcacattcacatacaagtctcaaccacacaaatatacaatacatagtcatgaccacacataaatgatcatacatgttcactaaagttttaaccacatactatataagtcttaaacacgtgatacataaactagaaatc

SEQ ID NO: 96292 - DNA, 430 bp, Zea Mays
ggtggcatacctggtaaatcttttgggaacacatccgaaaattctgacacaaccttgatagtctcgagtggatctgcctccttactatcaatagctatctggtgacaacctccttttcttggctcgggtgagactagcttagtcaccacttcttctcctagtgggaacaccaacttaattgtcctcttatcacagctgataactgcttgatacttatctagccaatttatccctaggataacagctattccctgagtacccattactatgaggttagcgggaaactctatcccccttatttccacacttacatccaagcaaacactatcagctcgaactttaccaccggctgaatcaatttgaatgggtgttgacatggtagttattggaagattatgcgcttctacccatgatgcagtaatgaatgaat

SEQ ID NO: 96293 - DNA, 718 bp, Zea Mays
tggaaaaagaaaaagataaagattgaacagtcctgggccgatttcagcccaggcagcccaactaccgcagaaacacacccacgcgcgcgcgcccgcggcaactttgcacagaggccctcggtttattagctaaatcgaagtaggtttgcttactgttcctctgtgccactgacaaattgcagaaatgccctccatcttctatctcttccccgcgaatgcccctgaccacaacgcacacgcagatcatccctgacgtggtccgtaccggccatggccggcgatgactgcttggaataactaacggggaggcttcactgacctaaggcgacctaggaacaaccactaaactaacatgaaccctattgggagtcgcttgtccacgatcacggcggacaccgatcatgggagcacacgttcccgcagattggggatggtctagttcgatcgggtgggttgatgagcatcacgaatgcacacaggtactgaaacagaaccgcagagagcatgatcagacctggaagtggctggccacggcgagggtgctttaatggcggcggtaaactgatttgggggaaaacggcgattctccggctagggtgggcaatcgagtggaagaacgggtgtgtgggcttcgtgatgacctaacgcagctgcccgggggctcaatttataggcagcttcgtcggtggcgcttaatttggccggaccgtgtgggcgg

SEQ ID NO: 96294 - DNA, 756 bp, Zea Mays
gtcttaagtcgttgccgacttaagctgattgctccgttagcagggcatagtggtcaccccgagttaagtaagcgcgagcgtgttgcaccgtcttaagtcgttgccgacttaagccgattgctccgttagcagggcatagtggtcaccctgagttaaataagaatgccggtcaatcatgaacaaactgagtattcttgaagcctttctttattgatgacatatttcccactttacagagtacattatcgtcccgatagcttttgaaatacagctaggggtaaaacttcctgaggtgctctatattccaggagttcctaatttctgtgccgtccatttgagtgagacgatatgatcccggtcgagtgacttctgctactatgaatggtccttcccatgagggcgacaacttgtgccgtccctcccccgttagaattcggcggaggacgagatctcccactgaaaaggatcgttgtcgtacggccttgtcgtgataacgtcttagagtctgctggtatcgtgctgattgaattactgtgttcagccgttcttcttcgagtacatcaatgtcctccagcctagtagcttcggcttctgctatgctttcgaagatcaacctcgacgccccaaacttgagatcagcgggtagtaccgcctctgacccatagaccatgaagaaaggggtgttttctatgcagagctcggctaggttgggttcttaggctccaaacgacgtagggcaattcccttatccacttt

SEQ ID NO: 96295 - DNA, 418 bp, Zea Mays
cttcctagctaggattggatcgcactgctttcattaacggagccggaatcctatggtgtctgtacgtccgcctccgtcaatagtcggacagtgtgtcaaaaaaaaacatctgtatagcggcgaatatttcagggctcttcgtttcggactcctgcagtttgaatccatagagacaaaaacactgagtagagacgtgtacaaattaaagccaggcgaacaggctcaaactaagggtgaaactgaagaaagcagcagaaaagcgccatcactatacagtcattgcactttgcagtcaattccattccattccttccttgaagagtaaagagaagaaactaaaccctcggacggacggacgaccgggtcgccatcgctattgactgccagccattctgccatcgacgtcaacacacgagac

SEQ ID NO: 96296 - DNA, 362 bp, Zea Mays
gggaaattggatggaggaatggttttatgtgaagaatgatctggtagcaagggaggatgttaaggaggttattatgcatcccatatggtcccacttcggccttcgaaagccgaaggttgaaatcgatgaagctgccgaagcatgccagaaggcctttggtactgtatgcttcttcattggtacaagagacttaatttaagaacatataacattcagagtatggccacttgtggaaaactgggagatgccgaaggagactgtcaccaagtctaacgaaggtgacctggttcgactaaaatatacattcagatacggagataaatttgatgaaccaaatgatgactggctgagatgcatcgaag

SEQ ID NO: 96297 - DNA, 487 bp, Zea Mays
agacgccgcccgggagggcatacaagatactgtggaggtggtggccgagcgcttccatcgggatcttgctgatgattagtagctagatctgcagaaacagggcaagggttccgctggggtgcggcttgtaatattttctgattttggtaagatacttttgggaagtattaatctaacagtgacagaacttatctgtatgttatttgtctttgttgtgtgcgtcgttaccaacttctccctggtacttggccccctaggatgtaggctcgacgtgtcgaggctagatgccagtatacctaagagcgaatttgtgacctggcccccaggaggtagtctcgactgggacctggacctgcacacagccatgtctaggaagctttagtagtgcacccataggacccgcttactggtatcttttatcctttgattcacgcaacaggaccagcaggatttagaccgggaagccaatccgtgtgtccggaccccc

SEQ ID NO: 96298 - DNA, 646 bp, Zea Mays
aacgaccggtgctctactttggctgagaccaaattcaatccctaacaagaatttcccctcaacaaatttcactattagacctctaactcactctgcccacggtgaccgtatgatcaaaagatattctaacgcgttctcggcgatctaaggcagcttagctcaattgagttggtcgaggagtattcggggcaggtatgggtgctgaaacaagagggcagggagcacgaacggacctagagtacgctgaccacggtgagccaacacacggcggcgcggagaaccaaattgggggaagagagaaattgggaggctctggtggataatccggggcaaggactggtgcaatggatgcgtaattatccaatggagtcgcgggtgcactcaatttatagcaggcttgagcggtggccagtgaatttgggttgggcgcggtggcgatcggagaaggaatgagtcactggtgcggtgattcgtggcattcaccgtggcggcctcatcggcgacgaaccagtagtagagagtggcttacggtgactcactgcgacgtggtaaaatgttgaggcacgcagccttaccggataactgcgactccgatgatgccagcgcgactaaccacggcgggacacgacgactggtccagccagcg

SEQ ID NO: 96299 - DNA, 279 bp, Zea Mays
tgccaagttggcaccttcccgttcacttatttgggctttccaatgggtctcgcgagaccaaaagtcaaagactacctccctctcatcaccaaagttgaaagaaggctcaacgccatcagttcttggttttctatggccggtagactcacactggtcaactctactttctcggcgatgcccatctttgcaatgtgcacccttaagattccaataacggtcatcaacgctatcgactgtattagaagggcctgtctctggcgcagcaatagtgaaatgcgc

SEQ ID NO: 96300 - DNA, 470 bp, Zea Mays
ttaccccaggtgagttcatgcgtactcgtgggggcctggggctgcctggtgtcgcgtatttatcgtagtggatgacgtaggggtggcgatagttctaagcactatcattccggctataccgacccctggcttctgtaacctagggcttggtgcatcccgtcgtgtagtgccctgtgggaggtctgcacactcatgcctagtttgacaggctatgagtgcgccgcggactatgcagcgcacagaccattaatgtgccgcagtccgagggctcgtaggccatgagtgttatgtgacccgaggggtccgtaggttatgagtaggaagcggaccgacggtcgtgctgtggctcggcatcaagtgtggttatgcggccagtcatttatggcgggtcagtctggggttgggtgcgggatccactcgagtggttcccttccgacacacctgtcccaccttgttagggttcgaccatg

SEQ ID NO: 96301 - DNA, 1589 bp, Zea Mays
ggaacataaaacaacttttcaaactcatatgggacattttgaatttcgtgtcatggctttcggtttgactggtgctcccaacacatttcttggagctatgaatgagatattgaagcccatactacgcaagtgtgttctcattttctttgatgacatattggtatatagtcaatcatttgaagcacaagtgttgcatctgcagactgttttgcaactattgaaggatcatcgatggaaggtcaaaatgtccaagtgtgagtttgcaaaaaaatcaagtagcttatctgggatatgttattactgcacagggtgtagctactgatctggagaagatcaaagttattgagaattggcagactcctactaatgctaaggagcttcgtagttttttgggtctcgcaggtttttatcggaaatttgtcaaaaactttggtgtgattagtagacccttattcaacctgctcaagaagtatgccttattcgtttggacccaggatcatcaaacatcttttgacctgttaaaacaagcccttgtgtcagcaccggttcttgctttaccagattttacaaaacaattctgcatctacacagatgcctgtcagacaggggttggagcggttctgatgcagaatggtcatcctttagcttttctcagcagagctttgggacctaagaaccagggtctatccacatatgagaaagagtatatggctatcctactggctgtaactcagtggcgttcatatcttcagttcgcagagttcatagtttatacagaccaccgtagtttgtcacaattgaatgaacagcggttgaatactccctagcagcaaaaagtgtactctaagttggtcggactgcagtatcgcattgtttacaaatagggcattgacaatggagctgctgacgctttatctcggcacaaccagggtgatctccagtgtttggctatttctcattgtacacccgagtggttacaagaggtggttatcgcataccataatgatcctgccactcgcgagttattgaccaagctgaacctgcattctggacacttagagcctttttcactagaccatggtgtcattcgccacaagggtcatgtttggttagcaggcaatactacaactcaatagcgagtgttacaagcttgtcatgactgccataggtggtcactcaggggttcctgctacttacagtagactaaaacaattgttttattggccaagtatgaaagcgacaatgaagtcatatgttcagtcatgtaccgtgtgtcaacaggctaagccagatcgtgctcgttaccctggttcacttcagcctctaccagtaccaccacaggcttggcattcggttactttggattttatcgaagggttacctaggtcaggtcagcacaattgcatattggtggtggttgaccgattctccaaatatggtcacttcttacccttgcagcaccccttcacagcgagtaaagttgccaaggttttcttagacaacatatataagctccatgggttgtctgttaacatcatttccgatagggaccgagtgtttaccagtggtttttggcaacacctgtttca

SEQ ID NO: 96302 - DNA, 562 bp, Zea Mays
ctggactatcactagctgatttctctattgtttgggtactgctagctgaagtatctaatacttcctccggctctgtaatgcatgaatttagatctgaacttttgccttttctattatccttcttcgctacataaacttgcttgaccatttgatccttattttgagctctagaccgattcttataaataaaacggtctttgtcgtatgatcgttcctcaaaatcagaattaaaatgagatgaatattctatgttatgtggtctaaaatatgaagaacaataagcatttgaatcataccagacccaagatggataaggatgaaagtacgaaggagctgaaccatattgcattagtattggcggcccaaaaggaggatatgttgctgatgcatgaaactcttctcctccccaatcctgatttctagatttacgcttcggaggtgattttgatggcttcaaaggtgctctagatggcttagcaatgccagtttgatcaacatcctttgccttaatttgctcatgatatttagccagaagttgctcaaaagtaacctttgcctttta

SEQ ID NO: 96303 - DNA, 288 bp, Zea Mays
ttaaattctaacatctaattacccctagacggtccacaaaataaaccctgcaatctgttttcctgttttgggcagcgacatactcggattcaaacagcgataacttttaaaatataattccgaatcaagcgcataagtacttgttggaaagataagaaagagcccttcatgattcttatactgattaacactaattactcccgaaaaatccccagaaactgctaatactgctgctgttcatcccccctgaaaatctgttttttggacagccacatacccggattcaaa

SEQ ID NO: 96304 - DNA, 300 bp, Zea Mays
ctgagttgtgattatgcagaggtaaatgttttacattattcattgttacatttttacagcagaggcttaatgttagatgcaatccccaagatgttatagtaagcatccagattttaaatgacagacaacgacaagccattgcatggaaggggttctccagtataattgatatgagagttgatgcgcttggcagtagatcacatttatcttggctgatggagaagcttgatcataatgatatgacaattcgagccggcccagggaaggagctaaaaattacaaaggaaatggtgcacctta

SEQ ID NO: 96305 - DNA, 677 bp, Zea Mays
acgagaatcaaaaaggatgacggtgggatagttggcaacgagaaacatcaccggttgtccttccggagtggtcaccacatgggtgtagtaaactcgcccagttttccttgtatttttgcccgctggagcgttggccacatttccctttccttgagtcgtgttcccagaagtctattgaaaatttgatttattctgctttggataggggcagtccttgatgaaatgtctggacttcccacaattaaagtagccattagagaaattgagtagagcagggaaacgggcaccaggggcactcaactgattgttctgggcgagggcaggagtgggacggatgaacactggttgcttgaaaggatatgtggatggacgaggagaagagcgatttgggttgaaaggaagaatgaccaaccttgaccgcttttcagacccttgagacaatccttcacccccatatctctttgtttttccttgtcccgaattcttggcttccactgaaagcgttgtgcttatagccctgctataagtgagatccaggcatgtggccatcttgcgctggagtcgatcattcaaacctctcatgaagcaatttttcttctttaaatccgtgtccacttggtcgatagcatgttgggagagatgattgaacttgttgagatattgcattaccgagtctc

SEQ ID NO: 96306 - DNA, 602 bp, Zea Mays
cgaatgaagaaacacatgaagatcatctaagactagtcctacagaagcttcgtgacaaccaattgtatgcaaagttctcgaagtgtgatttttggctaaagaaagttgctttcctaggacatattgttactaatggtggaattaaagtagatccaggaaagataagtgaaatactaaattggaagcaaccaaaggatgcgtccaagatcagaagttttcttggattggcaggatactacaaaagatttattgaaggttttttcaagttagtgaaacctcttacctcactactggagaaaggtaaagagtttaagtgggatgaagcatgccagaaatattttgaggaactcaagaaaaggttaactactgcaccgatattggtcatgccagacattcacaaaggatttgatgtgtattgcgatgcatcacaccttggacttggatgtgtgctaatgcaagaaggaaaagtaatagcttatgccttaaggcagtggagaaagcttgagaagaattatcctacacatgacttggagctagctgccgtagtgcatgctttgaagatttagagacactatatgattggaaacaagtgcaaaatcttc

SEQ ID NO: 96307 - DNA, 814 bp, Zea Mays
cttggctctcaacgtcgcgacatggaactctcggtctattattgcatagaaaggtagagaataccccggatctcgtgatgggtcctccgttcgatcagagtctcggccttggggagcttatcaaggagcgtcatggcgaccacaacgttctggctcacccggggcatcgcgatggtccactcccgtcacggattaagcgacgacgtacgttctccgttgtagcatgcactcgtccaacatctcgtcgtggtcgtaccgaccgctatcgtggtgcccctcatctaccagtcgggaggtactggctgctttgggaaggacccagtccttgtggcagcttttggtagggtagtttgagccacggtggagcggccgccgccgcatgtatcgtgacgctagcggtggttcccttagggcttcctgtgagcgaggagcggttttccggggtgtcggctatgaagcacacctgggccgagtcatgacttgctccactggatagggagttatgtccgtattctggccttgacatgaggaggtcatggaatgaatccctaatggggtacatcattcccacaaactcaacataagtgggtcttgtcacgcaccgtcgtccatcgtttccctgaggggaactgagctggaggcctccgaggcccctacaaacatcggccaagtctttcatttagggggattgggctttcgggaccctgatcattgttccctcgttgtcgacgatgaagtcgaggtttcaaaaatgaatggtcattccagggcccaaactacgccgtggccgaccatccagaacttggagaagtcg

SEQ ID NO: 96308 - DNA, 969 bp, Zea Mays
agaaggtcggggtttaattcgcaaaataacccagacacaggtttcccacgcattggacggcgggttcatttcggtgaaacccaggggctcttaagtaagaatgccaagcgaaggggtacggataagtcctggccgcccgattagagatggtgggcccagatcacatcgggacggcatcgaaccggtataggcccacagtcgttggatccgagatctacggtcgggattagaagcgcacagggggtatacacggcgcgatcccaagcgttcaactagcatcagatggtcgaggcttaatattttcacgatctaatcttgaccacccatttcggatcttgcagccacggcaccgtcctcttccctcagccgatacccagcatgatggtgaacagcccgcggcggcgccgccccgtcgtgaccaaatccagtgcccggagctcgacaaatcaagtggcgaggtgtcaaaatgctcccaatatcatgacggaccaacagagggtgagattaccttaaatcgagatgggccacaagcagaccacgatgcgaggcggtccgacggcggcggacgaatcccccatgtgaaattccttgttgtacctccccttctgccgcacagagaggacacagacgccaacccagtgcggccgcgaatgcccccgatcgatcatcccgagttcgtcggtgtggtacccacggcttaacctacggcggcatagattttctctccctcactctctctctcaggtgcgtggtgaagcttggcgatggtgcgctcggtgcgatgcggggttcggtttatatagtcgagtggcggggaggagattggcaaccgagagccgatttccacggccagcgcgaaacggccgacgcaaggatcccgaccaccacgccatcagtttcgcttcctttctgttgaagaagattatgacagatggagcccacaagttagtcactggatgcaacatgtgc

SEQ ID NO: 96309 - DNA, 409 bp, Zea Mays
agtgaggggacaatttgcccttaactttaaatctcctcattccacgaagtggtgacaccttgaggtacacatgatctccttcctcaaattccagtggtcttcttctattatcagcgtagcacttttgcctggtctgagctaccctcaaactctcccgaatcatatggacttgttcttctgcctcttgaataagttcaggcccaaagaactgtctttctccagtctgatcccagtatagaggagtcctacatttcctgccatataaagcttcaaatggtgacatcttcagagtggcctaataactattattatatgagaactcagcataagatagactcttgtaccaacttcctccatgctgaagggcacaagctctcaacatgtcttccaacacatgattagtcctttc

SEQ ID NO: 96310 - DNA, 712 bp, Zea Mays
gtagcccacatctcttcttttcttttatttaatcctcttgccgcacatgaggtcagcatgacacaagtgtgacatcaagcaagcaacacatgcagccgtatttccatgcacacgtccacttctacgtagtcgccgacatgtggacgatagaatcacgtacgaagctctgcacgggtaactagtttataggatctgatgtcaaccgcgtcttcctccccgtaacaaacccatgcatgccgtaaccacctctccgtaacagccggcccaggtggcttcctcctatagctattctcccgccgaggaccgctccagccgaataaagaatagtttcctgcgtgggtgacgtcggctgggcgtcataggtgacctcatccgtatacctttcaccatcactgacggctgggccaccatgcattggtgttcgcttgcttcctggtcttgggcgttgatcggaacggcttgccgtaatcccggcactagcgccctgctcgccctataaactcgattgaccccaggggtttgccgtctctgttaaccagaagagaaaaaaaaccaacgagtatgcgctgacgatgtattcgcgcagtcgagagagaagaaaggaagagcagagagagaacgggagcgttgccgggagggtgttcaacggtgccgcaccctggacgtccagggactttcctgtgcttgcggcgtggagcgttctgggcctcct

SEQ ID NO: 96311 - DNA, 684 bp, Zea Mays
gcgacccagacaatgttgcggaagcgcctcaaacagctaaacctccagatatatctcatcatatgtcgtcaggttaccttccgtcattgtcatttttttcaatttatgtacttaactgtatgcatttctcagttgtttatgtttaattactacaaccttttcattatagaggcacgcatccataagggtacctagaatactccggacctgactatgccatctacgcaaccgactacagagttgacaggcacccagtttgaggaaatacatgaaaagcaacaacaattgcaccgtgcatttgatgggtgccctgacgatttggacgttactgcgcccatggagacgaacacaaactcaaacgcggaaaagcaggtattatatacaatctcatcatggttacattatatgttaatttccaatttgcatccaaaatattagacaaaaccataataatgtcaacaggattaccattttaatgttggcaataatatgtcgagggacataaacatgtcacatcaacatataccagattgcaacactatgagctcgtatccgtcttcccacttgccgaagtttgacgccacaccgcaaaaacatgtatatgtttcatctttgttttgtccattgtaatctcaattatcgattaaatttaattgacacatgactgagggtttaaacatagta

SEQ ID NO: 96312 - DNA, 280 bp, Zea Mays
ataagagacatgtaggtttattgaagccgttggaaattcgagagtggaagtgggagcatatcaccatggatttcgtggttggcttacctcgttcccctcaaggcagggatgctatatgggttgtagtggatcgcttaactaagtctgtgcactttattcccatgaagaccacaaattcagcttcagagttggttcccttatatatgaaagaagtaatcaggcttcatggggtgcctaagtccattgtttcagatcgagactccaaatttgtatccaaatt

SEQ ID NO: 96313 - DNA, 484 bp, Zea Mays
caagtgcagtgatgcaaataagacttcaccacatgcctgttatgggtgctgctactatccaaaatctctgcagaaatgcagttagccttaacaacagatagatgtcctaatcccctagtccttgcttttaattgatgtattattgcaggaaggatccttccactaagtctttctccaataattctcctcttgttccacaacaccattaccatctgcctatacttgtcagcaagttcatgtacaggcaagtctttgaagtccttaatccaattattgaagacttctgcaagattgtttgtgatgtaatcacatttgatttctgggttgaattcactcctcctccataacagtttgtggtttttgtctagccaatccttggcatcaggggaagcctctacaacttggttgaaaaaatactgagacacctctttcctataggctcttgccgttggatacatctttgagaaaatatcaccaccaaacc

SEQ ID NO: 96314 - DNA, 298 bp, Zea Mays
gaaattagcaagtcaccacatgacttctaaaattaaaatctacccataagaacatctgtgacaaacaagtttaatgacaaaaatctagccacagaacttatgacactaccatgaccgacaggtccatagcaggtcattcaatgttgatgacttggtgctgaggagggtcatgaccaccaagaacaagtacaagctctccccaccatgggagggaccattcattgtcgcccaagtcctactcccatgaacgtaccggctcaacaagaacaagatcaatcatcctccatccaagctcaaa

SEQ ID NO: 96315 - DNA, 512 bp, Zea Mays
cattccatcaaccaaagcctgtgatcgaagatagataaacaaaagaaagataattcactaatatgaacaataaaaggcaagaagttgactcacctgaagattggagatgaacgatggcagacccaaggcaggaggagctatatcatggcttgacgagggaagatcaacaggaacaatttgaagggcattatcaggggtgatctcagccccgccagcaaataacaggcttctcgcatctagcttgccgacctctaaggcgacttgttcgttcaaagctgtggaagcatgcaccgccgtcgccccatcggactgaggtggagacgacccaacatggatgtccatggaggtgtcttgaacaccctcgggggctaggttgcagcttgcgctacccaccagagccggatcactaccggcaacaccctcgggggctgggtaactgccagcccaccctcaggggctgggtcttctgcagtagccacctctaaggctgagggctcctccgtcacctccat

SEQ ID NO: 96316 - DNA, 345 bp, Zea Mays
aaatgctctaactcatgacttagagaaggcctatggtggaaaggctaaattggattttatattaggaagccaacggtgctcacttaattgtgagggtcttgggtatgttcctaagaaaggaaagaatgcatttgtgaagcaaaagaccatgtttgtgaaagaatgtgacaaggtgtgtcacaagtgccacaaagaagggacatgtcaagaagaattgtcccaaattcaataatgtatcctcatcttgttttgagcattgctatgttctttcacataatgcaaaaggtgttcatgctaagtttgttggcacttcaattattggtaccaaaaagaaagccatttggg

SEQ ID NO: 96317 - DNA, 756 bp, Zea Mays
tgtgaaggaggtgttgtttgacctcttacagactttatcatgacatgaggatccatggttatattatgcaatttagttctatttcttaattggttctgcttgctcaattttgtagttgcacaaatttaggtggtttgtgtgtatgatgtcataaatttggtccataagttgagttcttttgcatgcctttgtttccatactgggccagcccctgcttacaattgttctagcctattgtggatgcttataaagcatccacatttatgataatgagctgatgttgcagcagatcataaaattgtttgtctttcaaggtctgctatagaatgaatatttcaattggtggtttttaggctacttttctttagttgatttagttgagttttatctctctttttaggattgcatgggaattgtcctatgattgaaatacatgtttgggcatgctccaaggaggagcaacaactccaagtactatgaggtccttggcatggcatctccaatactgccagccaggatgagctcaaaaaggcataccagatggctgctataaagagccaccctgagaagctaggggtggagacctagtaaaggtatgaggatacacagtgcttacttgcttgaacttgggccattttatttcagctgatttttgtttcatggataagaacatgctacgaatgtcatggtgtaggaatgaggactataacaaggcagataggattagacatgatccaacagatgaacacaataaag

SEQ ID NO: 96318 - DNA, 560 bp, Zea Mays
tgcaataatacttggcaaataaaacatttccaacttctggagggtgggggatgtcgaagaaaaaagaagaggggggaaaatatgaacttgtacggctccgctaccgcttcaaattccaaaagagttttggcaagccgtgtgccgagtggttggaattgatggagaagaagtgcaacgaaatccttggaaattatacaaagaaggaagatcaactaatgacagctacctttggcacacgggtgatgtatgccctagacttcgagtatcctgattatgaaagacttgatgacaaagccaggggattaaagagaaaaagggttgtaagtgtgttaacaaggtaagcacataggtctgttgaagcaggcaagaagaagaagttaacaaagaaaccaaagctgtcatcaaatcctttgacaccaaagaaaaagggaagttacatgttccgagcgtggggatgaagagggaccttctctgccgaagcatttagagaagaccccatcggcaacttccattggggtaacaaaaattttagaggtaatgactgcacccttacctttccc

SEQ ID NO: 96319 - DNA, 331 bp, Zea Mays
cctccaaagcgacctcctgatctgaagttcgagccatcgtcatgccgccagaatgtggaggtgaacccacatgaacatccatagaagtgcaggagggagaccccactcggacaccctcgggggctgggtcaaggttggcactgcccacttgagccgggttacccccggcgacaccctcgggggctgggaagtggcctacactcctcacctgagttgagtcctccccggcgacaccctcgggggctgggcacatgtcagcaccattcaaaggatccaagctctctgccgtgaccacctccaaggtcgacggaccttcagctgtttccacagg

SEQ ID NO: 96320 - DNA, 618 bp, Zea Mays
actgttctcttgtcacaactgacagtggcttgatttctgtgtagccaattcatccctaggatgacatctaacccttgagttcccattactactaggctagcggggaagtctgccccccttatttcaattcttagattcggacaaatcctatcggactgaacttttcccccaactgaattaactcttaaaggtggaatcattggttctatgtgggtgttatgtgattttacccaagatgtagaaacaaaaaatgcgtggcaccagtatcaaatagtacttttgatgggtaggattcgactggaaacatacctactgccatgtcctaagcatcctggattgctttggcctccaggtgattcacctttccacggttgtaggcttgaccacggacttttggtccttgctatggtgctccttgtcttgctgggacattgactgctggcggctgctgagctgctttcttaggacagttcttcgcccagtgattttgttctccacagtagaagcatgcacgacctcctacttgtgttggggctgcttggccattcgggttggttgctggggcaggaagacgagttgtctggttgttctgacgctggtactgatttcctctcggtt

SEQ ID NO: 96321 - DNA, 620 bp, Zea Mays
gggaaacgacttgtaataggtccagacctcccccttatatagatgaagggctatgaacaattgaaccaccacaatcaattaaatcaaatttatttatcggttttaccttttcgttctttcaattcctgggagtaggagtaatttagccttgggatgagatctagtttagtcttccacaacaatctctactcgactctatgccaattagagaagcaccgggcgtcctgccgacccagagcaacaccttggaactctccccctcgatgggatctctctcggggtgagttctagggtttttcgtggagaagaagaccctctgcactatcgtgaccgtgtggctctcgaagcagatcgtttgaaagtgtgcagaggaggagccactgctgcaccatgtcgtggaccgtccgcgcctccgcagagagcctcgctaggcggtccattctcatgcttggcacccggatcggtgccaacatatggtatgaagtttaagttcaaatataagtttcgcttagagtacttgttaaaacccatcatcgtgtaatgttatgttgtgtgattatatatgaggtaatcacattatgtgatatgtgtagattttatatgtaagttatggaagaaag

SEQ ID NO: 96322 - DNA, 294 bp, Zea Mays
tatacccaatagaaatgcaaaatgcattgtcgtataaattgtgggtttgaatatatgtaaatgcaacggttttattggttgtatggttcagttgcaatgatttttttgttgcaataagatgtaattaccatggatctatttcgatgggacttcagtagtcgccaccttttcttcttgttgcaacatcattagttacgatattttttgttgttgttataacggttcttaccacagataatttttatagcaaaaaggtcatgtagccacgagacacattatgttgcaaaatgatca

SEQ ID NO: 96323 - DNA, 351 bp, Zea Mays
gcctggcagaggcggtggcgaaggggagcaaccactgtcgaggatcgccatggagagggtcgtcgatgatgcaacacatcaaggtcccatccctctccctctctcacgctcatgcttctactcgacccctccatgccccaacgatccctctctgccccttcgcccaagcggccagctgcggctcctcaccgaacgccaacagcccccagcggctgtattttcatcccaatcttgtagcccagcagtagcaaaaaaatgactcaagctcccttgttcttttaggatcaacagcaacaacagactaacacttgtagttacgtgactccactaatagtggtttacatcagctgg

SEQ ID NO: 96324 - DNA, 565 bp, Zea Mays
gtctttaagaccgaacatccaccacagcgtaaaggcagtattacgaatgatccggcccccgagaccagagagtccaccatcacacaaagatcatctgattcctctgtgggggacatgatagaggaattcagagatctcgataaactaggacaggggtttacatcggccgatcctttggaggagatcgacataggagatggtaaaactccaaggccgacttttgtaaacaagaccctagagaccaatcctagaaataaaatgattggtctattgaaggaatattcagattgctttgcttggaattacactgagatgccgggattaagccgagagatcgtagagcatcggctgcctattaagtccggtttcagacctttcaagtagaaagctagaacatttcgtccagaccttctcccacgaatcaaggacgaaatccactggctgctagaagctgattttattagaccttgcagataagtagagtgggtcttcaatattgtgccggtggagaaggagtcaggtaagcttagaatatgcattgattttcacaatttaaatagaacaa

SEQ ID NO: 96325 - DNA, 309 bp, Zea Mays
tcgaaatccacactgcttagtcttgcattatatacaatccagcccctgaataactgaattgaggtccatgtttcttttggacttaaaaaggctgtcaaagaacataatccccgtactgtggttgaacagtcagtgtcttgtctggtagagttgcttgtcttcttgaatgggattgaattctgatatggctactgctgtcaacaacaaggggtacacacggagacacgacaattgttccctgagcccttttcatggcattcacgcctcactctcttgtgcattcgacctatgtagatatggcacattgca

SEQ ID NO: 96326 - DNA, 857 bp, Zea Mays
atcatacctttgttgcaactgagatatccttgagcctagatggtttgtataaagagatgcactgtatgttcaaatccctcatttccatctaagtattttctaccttgagttgccttacaacagatacagcaattgcattcttccactgcttagtttcttcagccttaactagattcaggggttggtggtgtcatggtcctctgaaatatgggcagcaaaaggacctacgcctttgatgatccttgcatactcactgttggtttataagggcgataacaattaacttcaagcttagctttgtgaccacaatgaattgtccccttggcttttgtgagcacacactaaataaaatctgaacaactgaaattgaatataatatgccacacgatgtgcgatggagaattgattcatagccttataggctggcttggcacaacgaaattcttgtcccaacgtcagtccaacctgcttacttgcttagatccagctaactttaacgaggttgcaagatgataactagattgtttgtcttctttgtcctgtagcttgaattttctattgcatattgccaggtagtagcaatcgttcgggctttatgcaggagctgcaggaacaacatagcattctcagaaactccatcgaacaacttaaagtgtcagaatcactcagggccaccctgatttttcatttgaaggaagcgttgaatgagcaggtgctgacgcaaataactctgtaaggtctgttttatttgttaaatggatcttccgatgcttacacagattcatttattttcaggagctcaaagtggaacacctcagaagccagcttcaggtaatttccttcaaccagcattgctg

SEQ ID NO: 96327 - DNA, 562 bp, Zea Mays
ggcctagaagcataatggaaggaatacattatgtgaataattaatgctgacagtacacaaagatctttgttggacgctgtgttgcttctccgactggctactgccacgtcttgccgtgtctgcgggtgggtgatggcttgttgcagtagaatacggagcagcctggtacggctattgtgcgtagaggcgtataggcggagccgtccagattccctccgccttagtaacgcataagtaatcagcgggagtcatgatgaatgcagtccatgcagcattgataggcagtgacccttttcttggaaacgcacgagtaatggtgagtcattgcccttgctatggtaacgtgtgagtaacagcacggcccacgcagcgtggactgggcacgccgcctgtcactagaatggacaggcgcacgtcttatccgtaatgaatgcaaagacgcgcgtagctcagaggcctcatgccaggttccgcccattggcttacgccgcgcgcagtaggccacgtggcagcatcgggtctccgcctgggcggggagcaggagtgtatgtgataaggtccg

SEQ ID NO: 96328 - DNA, 343 bp, Zea Mays
tgcacggtccgctggcgaaggatatgttttcacatggggagtggggtccaagcgccgcatagtttttgtgtcccacatgacagttactacggggtggacttggtggctctggcgtgtgagaagggatgggccgatgggactatgataaatgcacactgtccactactactagcagtgcatggcaagtggcccgccagatcagcgtgtgagtgggagcagcataaagttaccaaatggggtccacgcggtagtgtgcaagtctcaatggtgcgtggggcccgccgcccgcggagtggtgctcaaccgagtatcggacgttcctcgtcccgtcgtctgacggccg

SEQ ID NO: 96329 - DNA, 325 bp, Zea Mays
atacgatggtgcttaagcctaataaggtcgatgccggagacccccggtcctcagtggtcgccatcacggaggaaaaattaggttaggcgtcttatttgtcatagaagcaagccagcgatggaatggaaccgttgaagaggcatagtcccactccccgacggtcgtagtagtacgtaccgagggacaacggcatttccacggtacagcgttatccccattaaaatccagtgcctttccggccggcggggtcatgatcttgcgccgtcgtcgtgctcgcggtcatgcgaaaattgcgccatgtttgtgcaccatgcatgtccatgtg

SEQ ID NO: 96330 - DNA, 415 bp, Zea Mays
ctcctgagtagaatacaagtcctaactgtacaggtcacccttgagctataaagggctggacaaccttctttcttgacacgagcacacttgttctaacacgctcctgagcaattcatccatgaacactacattggactaggcccactgcctgaaccagtataaccccttgtgccatagttccttagcttggatccgcgtgattcatcattcgaagtaagtccgcgcttgtatccccgccaaacataaatctattgtcccctcagttttcaaaactacgacaaatcttttgcaagaaaattagaaaagcctaattcaccccatccccctcttggacatcgtgctcctttcacccatgtacgtaaatataaaagatatggttttctccccttccacccttcatacggagctatttcac

SEQ ID NO: 96331 - DNA, 601 bp, Zea Mays
ggggaatcctcatcccgcctgaggccccctctccacggaaccaccgtttccgcctcgcccgagcctgttttgggcaaggaagacaaccccgcgccaggcctcaaccaaaggctgtaggggacatgagcattcaatgtgcgtacctaccccacacgacatcacaggcgaacaggagagaaataaccgcggtcccatcggctttcaccaactacgatgatgcatgcctaggtacaacggctactgttcccccacgccatctgccaactccagatgagacacgcgtatgacaaagcatggtctggtcctcgggaggaaactgtgcctcgcccgaggctggcctcagcctcgaaacaaactccgtctcgcctaagcctagcctcgtctacatgtcccccgtgaatcccgcaggaggccactcctttaactctaacctgcacaactaccagccccagatcgggcttggcaatggccttgggaagactttcgccttgcccgagcatggcttcggcctcgatgttgccaacaagagaatgcccgacgtcaccagaagccgcagagctgacgtattaccaagagctttttgccatactcaccactgctc

SEQ ID NO: 96332 - DNA, 545 bp, Zea Mays
aaacgatcaatgcgtgcatcgataaaggtccaagaagcatgaggacgaaatcatacgtacctgaggcaaaccttggcggcttggcgctgaaagaggagacttgaatgtatccatggccgtgcccttcgcctacccttggcatgctgcctgagaggcacgcgaaacggcgttgggccacacgaatggcggccagacggttggggaggctgccattgccatggatgatgcattgtcgtcgtcctgggtccggaagtctcgtgcgctggtcctgctaaatttgggaagggcctctctgatcctctcccgtcctcttgcgggacgaataggataggatgcttggaattcaatgggtgctattcggttgctagctgtgcttctaaatttctaactcagccccctggtgcagtggtacgtggagggcctaagctactgctagccgtcagtgttcttcgaatgcaataccaatacttcatttcgtttcccccctactgcttgaaacacggctgtttgtttcggattaaaggcagctattgggactggctaca

SEQ ID NO: 96333 - DNA, 357 bp, Zea Mays
gttgaagatagcatgaggaggaggctgctatgtcgtgtatgcgtcgaagccccacccaacaagtgcgcgtgcgacagaaaaaaaatcgcgggagcctactcgcatacgagcgaggccgattgtggagaaatagcttacacataaatatgagggaggtgaggagatagatgcgggatgctaagggtctgtttggttcgtggctaactataccaaactttgtttgaggttaattgtctgagttgaagaactagaggctgtttggttctatacatgtggtgccaaaaattgccacacaattttatgccacacttgtctaaggtgcttaaggttagacgctcaaattctgcctcatatttg

SEQ ID NO: 96334 - DNA, 695 bp, Zea Mays
attttccagactcagagagatgaaggtctctggcttcatctttggtaggttggcggaaatcatggattttgatcttatcaccagaaatatcattgtcagtgaatccaagattgtgagcaaaccgacggtagctcaccttgtaccagctgccttcgatgtaaaagttaagataaggaaagttgtagggactttcctcatcggccagcttgatccatagagttgagtaaaactgggcaatgacttcatcattccaatcatattggaatgtcattatattctccatcttctttctttcacaggccctcaacgcctatgtcatctctgggtccccagtagcctcacatccttcctagttgatgtagcgttgatgtagtatgggctgatgtttcttggggaggatcactgagttgtaaaaatccacatgctggagagtccagaaacggttcccatcaatcctggcatcacgaatgcgcaatgcaggattctgaaaacggatgtcctaaagaagagcagaacccccgctagcagtaaaatcagtcactggctcattgccagcgtgacgggcctccgccctatggaggaccaaccctcgaataacaggggcgtgggtagggggaagatcaatctcatcatctttcccaccctcatcatcacttgttgcttcccaagcttggggatttgtcgcgggtcgggac

SEQ ID NO: 96335 - DNA, 683 bp, Zea Mays
cctgaaggcattacttgaaaggtcaggaaaaggcacccaaaagctggttttttactgtaaagggacactgttgccgcaaactgggtctttacccatattttcaggaacgcgcagctagggcgcaatttccttttttgcgagaaccagagtttgagcactggtcggtagcctcacaagtcacaactggacaacttagcaccatgctacaagcatgtcctttccatagtgcataagtcacatgtatcacagtgatagccaggtcaaatagaagcaaacaatttacagagataaagccatattattgctaaggtcacatgaaatttgcactgtgtgccattgaatttgtgttaggtccagtaaatcataaaatcgtaagacagaattaaaaagcaaaggaaggagataataaagttggaagcactctcaaaaaatgctcagtgtcaataaaatgcaaggtacagagttacagatataaaaaaaaacatgtcgatttttttaagactaaccttttcattgatgtatgcatcctatcagactaactatgaaagcttctacatggtaatcacaaataggaataccagatgaaaaaagaatgttaagatcatgtatctgattttgctagagtaaattaccaatgcagatgatcagaggtgcaatcacaaatatagagtttgttgaggcat

SEQ ID NO: 96336 - DNA, 806 bp, Zea Mays
ctgacacctaattccacccctaacgaccatagcccctcaatcaattgaggagttctaactctaaatcgctctgtccacggtgatggcgaaaactgagaacacaccgacgtgttctgggttatccaggtgatctagttcaattcaaagggtctatgagtactagagaacttgagggaggctagaacatcaatcaaggatgcttgagctaacctgtagagggtggccacgacgcggtggttcacggcgtgaagaaaatcgatttgagaagagaaagaaattggagctctctggtggctagttggaggtaggagcgggtgctttggcttcgtgatgacccaacagagctgatggcacgcttaatttatagggctcgagggcggtggctcttgaatttggaatggcgcgctggcagccggagagaggggagagcactggcgcaagagatgcatggctttcaccgtgacgagaccaccggtgatgaccagacatgctaaggcaagtcactgcgatgtggtattgcgcttaggcacgtggcacccgatcggaaggcggccaaatccggcgaggttatctggaccgaccgtaaggcaaggggggtacgacgtccagggcgaaacagtgtctcgagcacatccccaacgtgatattccttaccccgagcagttatctgtacttcaatgaacacgaatcgcaacagcagcgatgatcacggtgcgggatcaccggcagtgatacactgaatctggcgatcttcgtcagatcactgtaccattagaacaccattcagagtacctgatagagcttac

SEQ ID NO: 96337 - DNA, 410 bp, Zea Mays
tggtcacttagtccatgttgaggctagttctaggctaccactcctcttgttatctccaagcccacaagcttaagattacctcttaagatggctccaacttgagtactaaaccttgagccagaagaatcaactagatacccacataagactcgattatactagagatgcaatttgacttcctccagtgaggatgagctcaagagcccctcacaaagcttgtactgtcgcaaaaaacataaaacaatgtaacatggtctctaagacaagtaacccatcctaataagataaaaggaccatctttatattataatatgattataattcttctctattagtcgactaggactaaaatcatgcacctatcctctcgactatataaagagaggcaacggtactccccttgcaataac

SEQ ID NO: 96338 - DNA, 1341 bp, Zea Mays
ccgtaatgaagtgctgagtttcaggcatgtcaagattggtcggaaggcatcagttggcccttatgcggtgatccagaagggaactgttgtgcatggtggcgttgtcattccaccgttgcaaaaaactgagcaagggaaatcagcatatcctcctagcggagcttctgcttacacgaaggtagccagaaatatttgaatttatacactaagttcttgtgctaatcacctaagatcttaaaacaaatagaacttgagttgatcatttctaggctttgaagttagtgagctacagatatacacctacatacatagacttgtgaaccttcattcacctttttgttcattgatgaagttactggcaattgagttgcctaccgtccagcgtccagtactacaattagaggcaatatttttgagacataggaagcgacagggaaaaaaataccacggatgccaggccatagaaatgatttgttttccctctgtttttctcagttcatcatctgatgatattggaaattcccatttgcacgttggaaatatgctttgtcattttgcagcagtaccctcatatttatgtaatgatatattgtacaactaaagaatgtttttgttgtgttatcatttgaattttgaccgtctactctttttttcaggacgaagaagggacagcaaacatagcatttgaacacctcgttagcatctatgcagttggcttcttgggtgctttgtcgggtgcaacagtcttcatgttgtacacccgcttttcaggcacgacggcttcgcttcagcacttctcctttgcatgcgttgctggtgccttccattggttgccagctgtccttgccgcttatgccgtgattgtccgggagacaaagacaaccaagagcccagtggaatttgctctcttcattgccttcgcctacttaagttatgggatcatcgttagtcttctcgccagtgtcaccaacaaagctctggctacaaggtcagggaccaagaagaaggatgtagcacgtttgatccagcagcgcataaccatcgctgcacacctcagatttgcaaagatgatatccggtacagaagccttttgcatgtacttgaggcttcttggagcaaagattggcaggcattgctccatccgagccatcaacccggtggcagatcctcagctgatcagcatcggtgatggggtccatctaggtgatttctgcaacattgttccaggattctactcaaaggggtttaccagtgcagagataaaggtccgggacaacactgtggttggcagtggcagcttgctccttcctggctccgtcctccaagagaatgtcatcctgg

SEQ ID NO: 96339 - DNA, 592 bp, Zea Mays
atgccattcactgtgagaaagccgaagaggctcgtaatgtacgtgttgcattggccacagatgggttcaatccctatggaatgagcactgccccgtacacatgttggcccgtgtttgttatcccaatcaatctccccctggtgtgtgctttcaaaagcagaatatattcgtgtcattgataatttccggacacctagggaataaaatgggcgtgtacatggagcctttgatcgatgaattggtacgtgcctaggaggaaggagtatggacgtatgatcgagctacgaagacaaatttcagaatgtatgtttggtactagtactccatgcatgacttaccggcgtatgggctattctgcgcctggtgtgttcacggtaagttcccatgcccagtttgcaaggaagctctcaggttcatttggttgaaaaagggtggcaaatattcgtccttcgataaacattgacaatttctccctcctgaccatccattccgcctagacatcaagcactttacgaaaggtgtcatagtgatagaccacccacctgcaacgatgactggtgccaaaatttgtcaacagatagatgggctcgtg

SEQ ID NO: 96340 - DNA, 296 bp, Zea Mays
tataaattgagctcggactccgcttcttctccccattacgcatctcagtgcttaagcaatcgactcaatttcgccagagaacttgcgcagccccaattctctctctcctctgttcttgctccgccgtgaagaacttcttcgtagccagtgttcctctggtcagtaactctcaacttactccctgttttagttagtccttgatctcctattgctcctagatgtggcaatttagagtttggccgaagctcatcacaggaacgcacccgtgcgctgtcaaacaccgccgtgaccccccc

SEQ ID NO: 96341 - DNA, 322 bp, Zea Mays
tatctagtgatgagtagtagttatctgcatgcatgcatggtccttggagagcccatgacttgctgccatatctggtggtggtgggggtatgttggtatattatacatatatcaattttactattttaggcaggtgtaggtgcaaaagggacgacgagtgcccaaaaagtcctgatctgcagagtgcggacgcctagataggcgtgaccattattgaatgggcgggaccgtaccagctgaccatgccgtcggtgatccatagaacgaaccatcttctgagtcgatgatatgtatcgacgtggatatgcgtcagatactcccta

SEQ ID NO: 96342 - DNA, 277 bp, Zea Mays
cgcgtctttgtctaacagcgaacgagccctttcactattttgaggagtcactgacacttcacaaaaagaccctccggtttctatctattcacgatttgaagtccacgacgccgttcatgcgtggccgtgctctggcgagcatctacgtcggccgattagggcaacggcagggttctccgagcaccggacacaaaattaacactaccccgaccattttccccaacccaattgcacaaatagtgagctatcaagctctgtccgcgtgaaccgaatgggt

SEQ ID NO: 96343 - DNA, 1273 bp, Zea Mays
cttttgtcatcagatcagctttccacccaggtaactgggctgcaattttatcaacaattgcttgaacttgacttctcttaagctttctaagagaaagcgggaggccaaggtactgacagggaaactccgaaatggaacatcgaaggagctcctgaacacaagcaaggtccgccttagaacatcgaataggaaaaacattactcttctaaacattggtctttagaccggacacatccccaaaaatcctaaggatttccagaatcagaattatgtctgagggcaccggcttgaggaaaaccaccgcatcatccgcgtacaaagagaaacggtgctgcaaactgttcgtggaaagagagtgaagcagcccttcatcagaggccctctggattagcaagttgagagtgtccatgactaagatgaaaagcattagagataaagggtccccctaccgaagaccccactggtgagcaatgtagtccccaggaacaccatttaataaaattctcgtcgaagaagaggctaacagcccacaaatgatgtcacgccagatctacccaaaacccatcttctacaggacttccaacaagaaagcccaagagagaatcaaaagctttagatatgtcgtgtttgaaaagaatgcgggcttgcctttgacgatgaagaaaccttgcagtgtgttgcactagcatgaaattgtctaagataaatcttttcttaataaacgttgtttgattaggagaaaccatatcattcaaatgccgagccaatctgttggccatcatttttgtcactaacttcgtgaagctatggataaggctgattggacgaaaatctttcacttgggctgcaccctcaaccttaggcaaaagagtgataaacgctgaattgagcagccccatgtttctaaattttcgagcccaaacacaagagatcgctgcccttacatcagctttgattgttacccaacaagccttgtagaaacgaccggtgaaactatctgggcctggagctttatccgacggcatagattttacagtgccccaaacttcttcctctgagaaaggcacatccaactcatttagattgaaagaaggcatcccaagggcataaagattaagagagttttctctccccaaagcagtcccgagcaagccatcacagaaatggaacaaaccatcagccttatcctcatgtgatgtcaaaataagcccttcacttgtagataatgaaccaataaaattcttcttctttcttaatctagcctgagcatgga

SEQ ID NO: 96344 - DNA, 1361 bp, Zea Mays
cggacaacagccggtgcacggtgacacccattgggatcaacttcagcacggttacacccattgggatcaacttcagcacgatcacacccattgggatcaatttcagcacggttacacccattgggatcaacttcagcacggttacacccattgggatcaacttcagcatggacgccaccattgggatcaaccccaggaaggacctctgctggcacttcatcacaagctagagcagaaggacctgcatcttggtccaagcatgacagtcgctgaagccgcctcttcttcttcttttcctcaacaagcgcagtcgggcggctaacttggtgaggacgctttgggcgggcaccatcagatttttgggtctccactgctttgtcaagctcttgtccagccgtgatagccatcagctcagcatgggtcgaatcagaagatttcccagctaacatactaagtacaacatctatctctgcatcatctggactagctagcatctcaaagtgaatttgcttctcattattgggaagattccgaagaggagcaatcagagcctcaatgtcctcgagagagggtcgcacactaagacccagaccaccatcactagtaggagggttggacacaaaatcagaaaatgacctataaggtggcagattccaagcagaataggtaacaggagcaccaacatttgacactctgcccctcaaaatcatgtccagtcggctcaccagatcctcagtaggaattctcttgttggtgacccgagtagagtcattgataccactgtacaaataagccggatacgccctatctttcaaaggctgaatattcttgaagacgaagtcagcgaccacagcttcagcagtcagacctctctccttcagtagacagatctcaacaagcagaactctggcctccgttacctccaagggagttggagactcaacccagctcggagtacgtacatttggctgcctccccgaccgagggggtagggactcacagtggttttccacaattaaccactcaaggcgccaccctttaatgctatccttgagaggaatgtcgaggtattttgtcttcctcccgcgacgcatctccaaacttgcaccaccaacgagctggtgctgccccccagccatcccgggccgacaatgatacaaatacttctagaggccaaaatggggaaaaattccgaggtaggcctcacacagatgcacaaagatataaattttgcaagataaaattgggatttagatgggtcaagtttagattgtaaaaatcaaggagaccgcagaagaagggagaaacgggaagagcaaggccgcggataagaaaaggaacatagatgacgaactcgtggg

SEQ ID NO: 96345 - DNA, 368 bp, Zea Mays
tgaaaaaataaaaattttcggaagaacaaacaagtgcactgtatttgcattgtttaaaggtactctcagatacacagatagttggtcaacatataaaaggtggcagagaagcaccaatttgatgactgattcagaacctcatcccaggtacaagttccaattcatcgttttcacttctaaacttagccgaagacgacgaaagctatacaggtgtgaggaggtcaggtgaagaagcaccaattgcaagcctgctacaagaaaagatgatcctggcttttgccgggtaatggttggttctcactgatgggttagaaagctggtatgcgtaagtagaaaaagaggtggtgttaattcaggcaatacttgtt

SEQ ID NO: 96346 - DNA, 397 bp, Zea Mays
gtgcgatcaactgcaagggtgtctcgtgagggtgaagagaccgaggtcactaagacaacgctaatttcagaagtgagggaacgatcaggactagttgtgacagagggagctattgacgaaggtactcttgatgccgaagccgaacaggttgttgttgaagaaaatgttgatgaagttgaggaagattacaatattttgatccccaaaaaacccagccatctagattttgagaaatctactgtgtccgaagatgacatgcccatgatgatgaagcttggctactttggggaagcttaaagaaaacttgtccgatttgctagagaagagactacccctgcaccgaagaatgatgaagtagtggtttttaagagcttcttcagagcaggactgcgatttc

SEQ ID NO: 96347 - DNA, 630 bp, Zea Mays
aaccaccagaggaactgggaagagcagggaaacgagtacgagggacactcgactgattggtaggagcgggggcagtagtgggacgaataaagacaggctacttgaatggatatgaaggtgggtgaggcaaagaacgattttgattaaagagtcggatcaccaacctggttctcttctcaggtccttgatatgacctttcacctccaaacccctttgattttccatgtcctgcatttttggcttccacaaccagtgctgtactgatagccatactgtaggtgaggtccaagcatgttgccattttctgctgaagcctgtcattgagccccctcataaaacaattcttttctttaagtcggtatccacctggtcaatggaatactaagagaggtggttgaatttgttgagatactgcatcatcgtatctcctccctgcctcaaccagataaactcttctagcttcatctggattactccctctacaacataatgctcttggaatgccaacttgaactcatcctaggtaatctgatgtccaacaggctggattgctgagaaatttgcccaccaggtaccggcaggccctcttagctgttgtgcggcgaacaaggcttttgcgtctctgtgcat

SEQ ID NO: 96348 - DNA, 296 bp, Zea Mays
ataaatatcaggcagttatcagttgtgataagaggacaatcaagttggtgtccccactaggagaggaagtggtgaccgagttagtctcgcctgagccgaagaaaggaagttgttatcagatggctgttgatagcagtgaagcagacccactagaaatcatcaaggttgtgtccgagttcccagatgtgttccccaaggacttaccaggtatgccacctgagcgaaaagttgagtttgccatagagcttcttcctggaaccgcccctatctttaagagagcttacagaatatccgga

SEQ ID NO: 96349 - DNA, 534 bp, Zea Mays
tttgagtccagcacaacgaattagccatacatatagtacataagttatcgatattggtacacagtccaagctaaagtacaatataaactctatggtctaatcaaccgccctatgttctgggcgtgtattgttctgccttgaagtgagcacattcatagtcaatggaatatcaataagatcatggttgtaggggaactatagaactactgcttaccaccaagaccctgtaattagaacataataaatttaagcactaacaaaattcttgatggatactaaatctattttatgaagatataatacctaccgattccttaggcttggtcccaagtggtgcaccatctagttgcgaacttgtgatatgttaatctcatatgttgcaaagcatcccgactaaattgttgtatgtggaagtcatcatcattgcacatccatccaaatacactctctcctagcataattagaccttgccatgagtcctcatgtctaaagaactagctatcacaagcaaggagctagagagggagggactag

SEQ ID NO: 96350 - DNA, 611 bp, Zea Mays
aaatctcttttactttgaactggaaagttaaaaatcgtctcctcaaaataatctggaccaagagggccatcgaaacagatgggaggtaacttctctccatcaaaacaaatggcagcaatgaaaagaacaaagtaggcattcttgaaaatgatgatcagctggaaagagacttactgcagggggtgcctgccaaagggataccctcagtagaatctaggtagaggtcatgagtgccacaatcatttgtaggatcacttaatgggatcatattgggggcagattgagcatcaggcacagttggcacgacctcggcaccacgatcatagttttcatctccagggcgagaggcaactaacaaacggcgtaccactacctccatgacttgcttttgtatcttcatagctgatttaacataattatcccactctcgctgacacttaattgggatgataagtctttgcacgttgggtggaggacctacgtttagcaccccatcaacgtcaatgtcatcaacatcatgccaaccaatcttctccttagccgtagcaacaacctcactaaaggaaggtctatcattgaatatcacagccacatgttgcatgtcaacgaac

SEQ ID NO: 96351 - DNA, 460 bp, Zea Mays
cacaggtcccgctgtgaatatcctccaaaagatgtttcccctgttcgatcaggatgcagcgttaattcatcctatgtaccactttttgtatagttcttcgctaatgagaacaaatgacttggctcgtcgatggagccttcgtgcttccatctcatttgcgaggagcgagccattggtcaagtagttacgatatgacgttcttcaatctcctgtgggacttgccgaggcgtcttcgcccccaatgacaacaacgagttcatgggttggcgggctggcgctcaaaggttgcctgttttctcggtgggcttcgtcgtaacgagtggtcgactcaaagaggtcagtaacaaaaacccctagagggacggtcatccaaccagacaccatctttgcgagggcgtctgccacttcattatcctattagagaacaaggtctagctcaaggccatcgaatttgtcctcg

SEQ ID NO: 96352 - DNA, 371 bp, Zea Mays
aaacgctaagcctaacgatagcgttaggagttagctgatgaaggtagatcccaaacttcttcagcacatcagcaatcatcttgttcaaagggaatcttaaaccagctttaaagaaacttttgaaaattactacttcatcttttcctggcttcggagtagtttcttccccaccaaaacgaactagctctttctttgcttcacttaaatagcccaaattcaacatcttaggtaagtgaccttcggagatggtggattttccgaaatccagatggctgggtttacttggcactgcgctgctataatcatcttcggactcagtctcctcaacatcagcctgctctgcttcagcgacaggtgcatcctctgatgtt

SEQ ID NO: 96353 - DNA, 416 bp, Zea Mays
gtagttttgaagattttactctccaactgtataggtacacttcgatttaactgataggttgcaaccttgcccccaattggcatttgacactgaattttgcactaatgaaactatgtgatgcactagagtcaaatagtattattgctggttatttctttgagcgggtgctagaaagcgattgggtgcttgctactactgaggcggcctgatcatccatcttcctgattgctgctgaggtccccaattttgattgttcaaaacaatttggaatcactgaggttgtgacgaagatccagtcattggcgccttcctcttcttttctacctgatgagctaggatgtagtcttcttgagagatggccaagttgacaagctcattgtagttatccgctcttgcagtgttgaggtgttcccgga

SEQ ID NO: 96354 - DNA, 444 bp, Zea Mays
tgtgctaatccggctgcacccttaggcgacttttgcgcggagtgtcgcacgcgagggaggcttcgctgctccttgcggtgactttgatgtggtcgaatgacgaagaccgtcgatgcggtctttttcgacattgctttaattttttgcggaggattttcgcgtgtatattacatggctccgcctcattaaaaacctcaccctcgggaggaaaagagtgcgggccggaataaaactgtttggtgaattacaagggcgtgttagccctgaggatttaaacaaaaaatttacgcagattgtcaatatttcaggaatgttccagatcttcgccagattgtgttgttagtctgtacgcgctgggagacgacttcgtcttgacgataaatggtccttcccactttggctccagcttacctcgtgcctctgtccgggttgagcggacaagta

SEQ ID NO: 96355 - DNA, 619 bp, Zea Mays
ttcttcgtccactatctcgacaaaactatcaactgaaggcgccttcaaatctccaaaaaaagaagagccagatcagcagactacacaagtaacaaaccacatctcggctatgggggactagcgatactcacgcgcgcggatctggcagtagagcgaagcattcttgtgcgtgacgacgagtggcgcctcggccgcggaggcattggcggcgaggacgacgagggtgatgcgcgcttattcagctccttcccttagtccagatgttgcgattttgggatggatacgctacctcctcgctggatctttgacggcagtcttcaaatctgccctgagtttcccaccaggcaaggaattgctacggaaacacatctgtggaatataggagctagtggccgtatggggatggcattaaccgggagacggagcgagcagatgaggagggaagaatggggttggctccgtatccctagtaaggaatctctggtagatgcccacagacgtgtcgaacggcttagagatgactcacagacagacagcctcatactcactcaccgagacaatgtttagttaagcacaacacatagcttattcatcattcctaagtaaacgatactccaat

SEQ ID NO: 96356 - DNA, 815 bp, Zea Mays
aggattacccaaatcaaaagggtataactctattttggttatggtggatagattttcgaaatatgcacatttttcccactcaaacatacctttactacaaccaaagtggctcaagtgtttttggacaatattgtgaagttgcatggtaccggcccctaggtctctggtatctgacagagataaggtgttcactagcaatttttggaaggcacttttttcctcagtcaacaccaaattatctcttaccacaacttatcatccccagtctgatggccaaagtgaaagagttaatcagtgtttagagatgtatttgaggtgtgccatttctgattctccaacacagtggaagaagtggcttcctttggctgaattctggtacaattcctcataccattcagctctgaagtgttcacctttcaaagctttatatgggtatgaacctgtgtttgatgctgctcctgaggtggctaaagaaggggatcagttggtggatgagtggttggcagaaaggcaagcttatactgctttacttaagcaaaagttggcttctgctcagaacagaatgaaaatacaggctgataagaagaggactgatagagaattccaagttggtgaatttgtgtttgtaaaacttcaaccatatgtacaaactacatttgttagtcgaccttgtcctaaattggctttgaaatattttgggcctttcaagattattcagaagattagattggtggattataaactggaacttccaccttcctcccaaattcacccagtgttccatgtttcacaactcaaggcttttactccttctt

SEQ ID NO: 96357 - DNA, 416 bp, Zea Mays
acaaggagttgagtttatagagggtttgggagggtgtttctgtcaaatactcatgagtcagatatctttacccttccttgatccgtggtttgggtctaccgatttctccctttttcgtgaactcctggatcattattccatcaatttgacccatcttaacccaaaatcgattcttcaagtcgttgtcttcattcatctcagtcaaactttccttggaattgcaccacatttcagtttgtgcaggtattcgtatcacttacaaactaggcatgacaaatggacaacatcaggtggtcgggggagccagtttggaactctgatgaggtagaaaaattgtatacttggatattccgttgaaggataatatcaagggatggcggtacgattggtttactatggagaatcataacaactct

SEQ ID NO: 96358 - DNA, 334 bp, Zea Mays
gtgcagttaatcacaagtcaggagcatgcaaaacttcctgactccaaccataactagttggaaatgacaattcattactgatggtcatgaatgatctgaagttttcgaatctatcacagattcatcatatcctttatggatatcattctgaataccaagacaaacaatcatcattgtaagcacatttggtaaattcagtagtgtggaggctaatgtgctcaagctggagacattattacttaatggtcacgtgttgtccgaaggacacacatcaggtcatcatatagatgcaccaaagaaccatataaagccttcaatgtccatacaatctctg

SEQ ID NO: 96359 - DNA, 713 bp, Zea Mays
caaaattgtaagcacaatgcttggacctcttgcttttgtagttttttagatctcagttgtcaaaccaatttggattcctgagtgtggtaatggacctaacatagaccaagcatgatagatgatcagttgtccttgtattgtgttggtggttatctagacgctacctaattctcggcctcagactgaggttgtcatatttcgtttcctgcttgactgtccagtcagcagtcagcagtcacagtgcatgtttgtagcagttttgagagcaagtctgttatgtgatataattaaagatagaagattagttggatttgagtagctgatgtgtgggacagatgcgaatttggaaatttggtttcactgctagcctggtggtctcttggtttatatgttaaactggtactagcaagttaccgtcaatctgtcgatgccttcccatatactggcttgtggcatgattatttccttattcaaactagcatgtaaatcggcatggctagttcctggaggattaggtaggtcgttactggcaatgaagtgaatttgtttttgtatattcagattttacgggacagagatgtcatttaccttgtaatttgaaggactattacatgtgcttatgacataatatgtagccgtttcatttgcatgtgtcaaaatccatccatcatgactggatcgaggtcaaagttgtcatgttttggccccgtttg

SEQ ID NO: 96360 - DNA, 554 bp, Zea Mays
gcaaaaattggagcaggagaagatagctggggaactgtatcacctgtcttagaatgctattaagggaacagagtgtgatgggtgtatgagggtgcagtctctgatccaggatcaagtgttggtgatgttgatagattcaggcagttccactacttttatcagccaaaggatggtgggaaagttgggtttgagaactggagattgtcctgcagttaaggtgaaggtggctaatggggcagtaatgctaagtgactagtgtgtcgaggaagtggaatggaaggctggagggcatgtctataggactgccatgagggtgttggggttggaggcatatggtgtaatcttggggtatgattggctgaagaatcacagtcctatgcattgtgactggaacaacaaggtgttaaccttcagtgatcagggagtgatggtcagactgcaaggggatgcagaccatctgagggaagtgcagcaggtatctgtgctgcagttggagaagtagatgaaaactgataaggtgtgggtgatggtgatgctggagcaagtgccagaag

SEQ ID NO: 96361 - DNA, 344 bp, Zea Mays
catccatagagtgtcctggacttggtggctactcaactagaagcacatggtgctccagtggctgagcaaatttctcccttgtcgcagtggaaccctctttctcttcagaagcaaatagatgatctgaaatctgctaacgctggtgagtttgttgatggtacttcttgtcgattcttctttctattcatatcactgatggttgctagtcatttctttagttttgactcgacagtgctctgatgctgaggacaggtgtcctcgaagtcaggcggagcttgatcaagtgattatgtttcttgatggtgtctgtgccatgaactcttccctgcagtcaaagtttgatt

SEQ ID NO: 96362 - DNA, 744 bp, Zea Mays
gggaccaagtcagtgtcatcagcagaaatcaaaactctgtcatcaggagcaccggcctctaaggcgacttcctaaccggaagctcgtgctgctgccatacaaccagaatgcggaggagaagatcctacatgaacatccatggaagtatgagagagagaacccactcggacaccctcgggggctgggtcatagctcgcgctacccatccgagccggatcatctccggcaacaccctcgggggctgggcaagcgctagcgccatccttgagggtcgagccctctgtaacagccacctctaaggctgaaggaccttcaaccacttccatgggagcagagcaatccagaccagcctcctgacccttaagaccgcgctccaaggtcgatgaggcacgggacgccgctcgggataactccaacccggcatcaggcacatcagcacaaatatccatcatcccaccatctgtcggctccgacaacagatcctctgggaccatatcttcgagagtctgatcaaaattttccagagacaattcttgcagaccaacgagggcagacaaagctggggaaggaacaccactactctccccgctggctatgtagcgccggctgttcttccaaattagagggatttcatccacctcttcctcatctttatcaataatgtggacggtacacccattgggatcagcatcatcaaggtcacacccattggggtcagcatcagtcgggtcacacccattggga

SEQ ID NO: 96363 - DNA, 644 bp, Zea Mays
ctgagaaacccgcccctacgcccaccaaatccccgcgacgcactccgcaatgactcgctcgctcgcgatacccctctccccgcttacacacacaatcaacgcgtcgtctccctaaccaccgtctgacatgcgtcctgtttggtttagtttttttatgaggagtttttctaagaatctagttatagagagaatctggttatggatagaatttgagtatcgtaaagattacgtacggaggaaaataaaaaaaagtacataagatttatgatgtagaaagtgacgtttcctactattgcagcgactcgaccgattttatgttcatattgtttttatatggttttgactaaagtggttctcatgccctgaaaaggtgagtgtttatagtgtgcagaagcttggctaggaaaaagataaaacaaacagggcatgattctcggtggagtagcgagtagcgacggatccgggcgcccccgcatacgacccctccggctggcgagagctctgtctccgcttaactagacttttggacatgatgatgttattgatttatatatactagtgactaaggcgcgcctagcgcgcgtcaatttgtatagttttatagaaaaggagcaggggtataatgatttatgttcaattttgac

SEQ ID NO: 96364 - DNA, 678 bp, Zea Mays
ttagccattagtgggttgtgtgcgtcttgagtgccgacccaagcattatatcgggagggtggtctttctctccccgaccgagttttttttagtatggacagtaatttcgggcaccacacagtcagccccttttgcctaaactgatgcaaaaggggggaaacataaatggagttgacgaccaggtaatattttttgtaaggtcaagattttgacatctaacaacggtttgctcatagtgagaggtggggtgaagtctctaagagcattgtgcattcttcttgaaattatggccctacagtaatgaatcatctgaaagctgcaatgtggaagatgatgataagattttaagaacactagttctgcacatctaatcttgctgatttcgcacatctaatgttgccactccatctgccattgataagaggtactttgtagggttggccatctggaactttgggcacaatatattagtatcctgaatgagttttgcagcctcgcgttccaatgtctttatctcagagaggaaacatgttttgcctttgtcaagtactatttggtcaaatttactgcgcgcttgagctgcatttgtttgtggctgtatcttgttcacacttcaaatttttctgttacctcaatgagctattatcctcattagtggaactaagttactgaaacagg

SEQ ID NO: 96365 - DNA, 495 bp, Zea Mays
gttcgtgtgtgcttttcccaccttcaccagaaaaacttagagaagtctggtattctagttccctgtggatatgtcacagtgtcgaatcggtggctataaggcttccgatacgattgccctgtacctgacacactaacaccgagtttgtccctgaacaccccagctacttcgtctccgatcctctccgccatgtctggcgaccatccattgagtttgtgggtggaaatctcaggttgcctgacatcactctatcggctttcctcccagggatgtttgaggtgtgtgttaggtgtcctattaatgtcaccagctcctgccctatacctctcaggctctcttgtggtcgaacagtattcagccctatgtccatgaggtggtatggtatgattataatgtgttgctggtggggcaccataatgttgctgcgatgaatgtggaaactgtgcatattgcgcagttctcggctctgcgtacgcatatccggatggtccggcg

SEQ ID NO: 96366 - DNA, 341 bp, Zea Mays
ataacaggcaaagttcaagatgctcaagtcctcttctagcaagccagtccacagtccagcacctattgaggctcgcaagccaaatgaaaaacttacatttcggagggccccaggttttccaaacccttttagccggtttaaaggctactgaccctacgaagaacctttcatatgctgacttggaagagtagcacctggaagcagaaggggtccaaagatgcacgtcttgtacacccggagccaaattgaactcatttaggatgacctagagctgtagaaattccatctacgtttgagcattactgcacctcttatatgtctgacaccaacaaccattgttc

SEQ ID NO: 96367 - DNA, 278 bp, Zea Mays
gtgttccatgtatcccagctgaagaagtgtgttcgattgccgactgagatcatagcagaaccagaattggagatagagccagatctatcgtaccaagagtacccttccaaggttctggattgcaaagaaagatcaactcgggctaaatcgatcaagatgtataagatccaatggagtaatcactcagaggaagaggctacttgggaaactaaagaattcttgtgttccaacttccccgattgcctacctaaggaaattggtatgtaatcatgcccaac

SEQ ID NO: 96368 - DNA, 299 bp, Zea Mays
gaattttctaagttctctgtttattaaaaagattaaacagaattgattaaatggaaaactactttgcaacggggtccctggcgggtgttttaagttttccttacagactagtccctgggctactattcaaatgagtcactgacatctcagaaaaaccccctggattcttctaatcctaacctgaggtcctttctaaacagtacctgcggtggaataaagggcagaggggcttaccggcggagagattgctccggtgaggtggccgagggtgtaggggaggtcctgagggtcacgatgat

SEQ ID NO: 96369 - DNA, 569 bp, Zea Mays
tctgatggcggatttcttcatggctgaccagctaaccagccaggtaaactgtgctcagccgtacactaggcatgcatggagagctagccattgtacttattacgttgcggctcaaaatgtcttgttttgcagatcccactgctaagacacctcaagttcacggggtgctacttcatggctgaaactttcagaactcacgcgtatggaagttgtaccagcagctcccaatacaagaacctggcatatgtgctctctttcctgccatactactggcgagcaatgcaggtagattgatattgaacgaatctagcagatctatctgctcatcagactaactaaaatggtctactgctgcatgctagtgtctgagaaggtacttggaagaaggccacgacatgaaccagcttgctaacaccggcaagtacgtatcagcgatggtgtttaaaccagaaagcgtcccgtggcacggaaaaccatgggagctctgacttttggttggggtgaaagagtgggtagagatgttgtgttgtttatttcgagcatgggattttttttcttctgcaaaaatc

SEQ ID NO: 96370 - DNA, 501 bp, Zea Mays
cacggactgaacaggtatccctgtgtttaatccgtcccaatcatcaatcgatcaacgacgaggaagccccgagctaaacacttacactaggttcgatcttcgccgttcatcacaaatccaacgatagtcacccttttgtccacccctagcagcacgacacggagagataaccagggcaccgccccgagcttgccgacgcgatgagcctaggcaccagtggtgcactagatcacagacggataggtgcaaatcacaatttgaagtagggcgaattgatagaggtcgcaattactggtaaatccccaacgtcgaaccctcgccacgacaataggcaggaccacgccggaggagggagtgcggcaagaaattgccaccaaatctcggccaccagagcccaacaatactcgtaggcacgttcctcaagagaatgcgaagctctctgagtccaagttccaacccaaacgacgacgctccacaacttcacccgtggcgacgcttttt

SEQ ID NO: 96371 - DNA, 501 bp, Zea Mays
gagaactcaggggcctcggggtaaaataccacagacacagagcacagtcgcttaggacggcgggttgattcacagatattccaggggctcttttgtgaaacagacaggccgaaggggtatcgttgcgcttggaccgcacgattggagatagacggtccggataccccgatggtctcatacgcaaacaaaccattgatgggtatatcaacggtaccgatcttatttttcgatattgaatcacagtcaccggatcacgatcggacggttacgcctatccaatccaagcggtatgctgcaacagatctgacccgcacattcacggatcgacggctattaacctatctactaacttcgcctcaccgacccgcggcacagagactctgcacggcggcgcggcaatctggcgcagcggcgccatggccgggatctcccaaagcacagcaccgcgcgcaacgcactgctccgagatattctactcgatgcactaagcgtgatgaatgc

SEQ ID NO: 96372 - DNA, 272 bp, Zea Mays
cttctactttaacgaagaaagggggatgagtttcggagaattccacataggtagtgtatctgggagcctagttttgtccctggcctccatgctggtgaatttgatttcccaccatttcttgcaggaaatgagtattgtcagttgtggcatttaacaaggcaacaatggcctccaccaaagttggagttacttgcggtgggattggagtctcctccccactacactgagaagtccctgcctcatcatgaccagaggttctcattggcatctga

SEQ ID NO: 96373 - DNA, 385 bp, Zea Mays
cacccggtacccgaagtacccatattagtttgcacagtgtagctggctggctgctggcctgctacgcctgaggctgcgactgcacaccatggaccgtggtggtctggacgtctgttggagtggagaagtgggccttggacatcacgtgtaacacaaatgccaatatgccatggcccatgagcgtgattgtgtgaagcgtccaatggtccaagccaattagccaaggcgtgagcgtgagtgagtgacgctgcaacctgcaagacctagaagaagccagcggccagccgccacccgccaccgccaggcacctttctccaatctccagtattccagtccccctcgtcctcggtggcgcgtggtggtgcctgagccagacgtcggccgc

SEQ ID NO: 96374 - DNA, 390 bp, Zea Mays
acatcaacattcagtgggtccttaaccttggtgaacaacggcggctaagtgctaaggaactcttggtaggtggcagctgactgcagacgctgctattgccctccaccatgatggtgaggttggagccggtgttgtaccaattgttgaagaatttcattctgctgagtcattaactcctgcatcataggagcatgcggtggtggcaggggaacttgctcattttgcccacgacgcgctcttgctaccatctataaaatagaaaattttcccgcggttatactcaaaattcatgctttacagagtaacttaatcatggaaacataaatttttcattatgagctcgagactaaatattgcaccagccaatcttgaaccaatttgaaattaacc

SEQ ID NO: 96375 - DNA, 711 bp, Zea Mays
gctggattaaaggtagcttaccattcgagagaatttgacccgagccagtaatcttagatcgtaaggctgggggtgttcaggacttcattgaacccgaatcgatggatcgtgatccgatgttggtcatggcataccgcttcagtgtgggtacgatctaatcctgaccctcggatctgatccaacggtcggggatcaacgcgtacccccctcagccaccactttgcaaaatagatcccgccttcccttaaaataaacccgccatccccgcacagtttgaaacaagttacagataggtcccttggaattgcaataatacccctggagtcttatttaagtgcaaaataaatattaaaaataacctaaaacttgtttaacccataacttttacgtcttatttccgatttgatccattcaagttgcgttagctacataataattgtgcctacgcttccgtaacataataacttttacgtcttatttccgactcttttagcctcttctaaggcatcatgggactctttctctttctttctaatggcttcatcagccatttctcggactctcttcaaccatactttggaataaaacttcccacccaggttggtagcttcggctgaagggtctctaatgtcatcggctgagaaggtataatccagctaagatatagccttgacatgatcgcaaccaaccctctcccaaatagacacggcc

SEQ ID NO: 96376 - DNA, 446 bp, Zea Mays
ggggagtagtgatattccttctccagccttgtctgcactcattggtctgcaagagttgtctatagcaaattttgatgaggctctcgaggatatggttcctgaggatctgctgtccgagccaacagatggtggtatgatggacgtttgtactgacattccggctgtggggttagagtcatcccgagcagcgtctcgggcctcatcgaccttggagtgcggtcttcagagtcaagaagctggtctaggttgctctattcccatggaggtaactgagaatccttcagccttggaggtggctgttgtagaggactcggtcccctaggatggtgccagcgattacccagcccccgagggtgttgccggcaatgatccggctcgggtgggtagtgtgagctacgacccagcccccgagggtgctgccggtgatgatccggctccgatgggca

SEQ ID NO: 96377 - DNA, 457 bp, Zea Mays
ttttgattgatgacacgtgtttaatctcgcacaaatcttaaagtaacaaagacccagccgttcccagccgccagccacgtcccattatctcgcttcggctaaacggagacccagccatagcccactatctccttcctagcttcggctagttggcttcttccggctttagcgaatgttctgtttctgtttctctcatacgacttcagatccttttttatctcttggtgttgattagacaaggtagcgccgccattcctatcatcagtgccattgctgattagcgccaccatccctaatttattactatcactaattagtgccatcgctgctctagcagatcatccctgatccagtgttgtcatcgctgctcgttggtcacggcaagaacatggaggaccatgaaaatcttgtggttcttagagatcatggagctgacaatcaacatttacaatctccc

SEQ ID NO: 96378 - DNA, 1339 bp, Zea Mays
ctttccttttcatttattcacaaactccgatccacgacggtggctccggcacccctaagtcgaacacgtggttgcgcgctccggcaagggtcaacacaactatgcgttattcgagctcagcccgacatatcttttgagtgaatcggatccaaatgacctaaatcgccccagacaacagcgatggcagagacctgagctccgatgacatagaccggagtttttaacgcagtagcgttcaaccccaggctatggaaagctttagcaatctgtcaagcatatgatgctcaccttggttgggttagggaggatcagattcaatcggtcgacatggaaggtgtcctcggcggcgttcaccggatggctttatggtgttccggtgaaactactgtcgtagagttcaaaaggaagattttgtgagcaacactatgaccctatgtcctgaaacgtgagcacattgaacatgttaccttcccaaaaaggttgtccacggggagatgggagatttggtggtgatggtcaccactgttagtgtctgcacggcattctggcctcctcatcgaaacagagaggtagagagggcttgagggtttgtcttagatgctgagggatggcatgacatagtgagcaggccaagagctcaattggaatatatatacagattcagattccttctcttatcacctctttctttaactagggtcaaatacatgagctgcactggttggggttacactgggggctttcaccgtggccaactggggttaaattgttcctctatatcaactgcaggcttcccacacagagccaagcatagaggaaactttacttctgcttttgttgcatgttggatagcaagacaaatagtgaagaagctgagtcactatggccaagattcttattgccttgctctgatccatgaagtggtaaagctgggacaagttatcccccctaggctacaagttccttttgtggcaatcactagaaacctccagagcactggttgagatggatatgtttcttagatttttgcacaaacctgaactacttcagtcgacaacagtaccaacctcattccctcctttgctcccttctccaaacaatgatagacctatattactcaagcaattttgttccctaactataggtccataagtttactataattttccagggtcaaggatacaagaatcacaaactataggtccccaaagttggctgaaattcacaggaagcatacccagttatctaagactgagcacgaaccttatagcctgactgggcactttcaggtagttgtttcttcaccttttgtgtgggatcacacccaactcacttaagg

SEQ ID NO: 96379 - DNA, 467 bp, Zea Mays
atttatttagagcctgtagagcgaagactcggtctccatcgatgagatccttcgaagttggttcgtccacgtcgaggacagctgacgaaactgttcgcgagggacccatgttttatttcttgtggggtcatggcctccgattcatatagaaggcggaaaggggtgaacccagtcgccctgcactcagtcgtgtttagcgcccagaccgcctcaggtaacaaatcggcccacctgccctttttcgtcgaggagcatctttttgacagctgtgaaaaattttccattggcgcgttccacaactccgttggactgcgggtgatagactgaggcgaaggcaagcttggtgccaatggagaagcaaaaatctttgaagtcttggctgtcaaattgcttgccgttgtcaactgttagttcggacggtactccgaagcggcaaacaatgttttgccaaaataatttctgtgcag

SEQ ID NO: 96380 - DNA, 441 bp, Zea Mays
ccctcgcgaaagcagggaaagaaaaggaaaactgccgcttcggccatctttattgtgccgaagggcaaaaagattaaggtcttaacacaccggccgagatacattgagacagccacagtgccgaagcttggtgaagggacatctttcactgccgaagcagagcaacctgctcccaccatccctggggaagacctgactaaattgctgaaggttcctatagccggtctagccgaaacaccaaaacacgatgccgaaaccaaagagaaggcggccaaagagccagagccagagctgccaaaattcttgagcccgccagcagaggcagaattgccgaaggttgcaaaggctcccgcaacaactcccaagaggagaagaatggctagcgtgctagacgctgtcatggagacgacaagggcattgactcctgctcctgcgaaaaag

SEQ ID NO: 96381 - DNA, 379 bp, Zea Mays
agaaataaattacaataatttacatattcgattcaaagttacacacatcaaatattacagtcttgttacaataaaagcacaatgtccattctagtgtctcatacattgaccatttcaaaatgtttttacagtaagtgctattcctctttaaggactttctctgcaacttcgtttagtaatttgttaacgacttcatcgacaatagattcagcaatgtttatgatctccagcgcttccttcatttttggatcagctaggggatcgtacagttccggtggtggagatagttcagctgaagtaggaaaaattgattagctcgaagccataaagcaagtaccgaagctaaaaagccaaaaataatacctatacgcttttcgcg

SEQ ID NO: 96382 - DNA, 384 bp, Zea Mays
gttcttatgtcttacacattgaggataaacaattattttttgaatttgacaattgtgcttgtgttgttagggcttggctggatagtaatttcaccggcaaagatcgtgtaaggcaagtaaataaagtgttgggcaatatctgtcatatgagatggcctgtattggtgattgaggatggtattgaggtccctgtcacaagatgggatcaatacggccttgcggttaacgtgcaacatgggaatgcacaaggtgcaatttgtcacgacttctgggtatgtttatctatcttcttgccaagttatcagctcaatgattgattcatattatggattcttgactatgtttctttttcataaatattataagttgcctgatggagatact

SEQ ID NO: 96383 - DNA, 1312 bp, Zea Mays
cttagggcgttttcgactaaagctgattgctcctttagtagggcatagtgatcaccctaagtcatgtcatgccgatttcgagtcgtgcccaatctaagtcggttgtcaatcaagagattgaatgcctttggaagatgaaagctttattaatgatgaaatcttctgattacagagtacaacttgccctcgagacttttgaggtatcactaagggtagaatttcctgaggtgctcgatattccatgagttccccacctcggtgccgtccatctgaatgagccggtaagaacccggtcgtgtgacctcggctacgacgaatgacccttcccatggtggtgatatcttgtgtcgtccctcccccgttagcactcggcaaaggaccaagtctcccactgcaaaggattggtgccgcacaactttgttatggtagcgcctcaaggtctgctggtacctggccgactggattactgtgtttagtcgctcctcctccagaacatcaatgtcctctagcctggttgcttctgcctcagctatgctttcaaaggtcagcctaggcgtcacaaagattagattggcaggcagcactacctccgacccatacaccatgaagaacggggtgtgtccatgcagagctcggctgggctgagttcgcaggctctagactacgtatggtagctcactgatccacttccctgcaagcttctcactcttgtcgaatacctttttctgagtgcatccagtatcattccattggctctctccatctggccattagctcttgggtgcaccactgatgcaaaatcgaagaattctgaactggtgaagttggatcccaggttagtgatgatgctatttggtattccgaacctgaacattatttcctggataaattccactgcctttgttgaggtcaaggaagcaattggcttgtattctatccacttcataaatttgtcaatggcaaccagtatatgagtataacctccctgagcttaattgaatggcccgatcatgtctagccccagcatgcaaacggccaggttataggaatggtctgcagctgctgcacgggcaagtgttgctgttttgataagaattggcacgcattgcactggactaactcagcagcatcactcttcacggttggccagtagaaaccggatctgaaagcctttcccaccagagtccttgatgcagcatgcacaccgcattgcccagcatgaatttcatctaatagctatctcccggtggctgagtggatgcatttcatgaggactcctcctgcgcctcttctgtacagcaagccccctatg

SEQ ID NO: 96384 - DNA, 454 bp, Zea Mays
ggatatccaaccgacgatgagctgggggatgaagtacggcatgcttagccgcaaccgagctcgagtggatcagacgccaagatctttactggactgtgcttatccatggccacggcgcacgaatcacggcaagcacgatcaacggcgacggtccaccggtgacgagcaggggggtggaatcgggatcttattcagtttaacattcactgtaccatggcaattgcaggcagccggtctgacagagcactttggagcccgattttctcttaatttcaaatggcaacataagtcaagctctgcaacaaaccggtagagcattataccatctacaatgttgccatatgattctgccacaaaaacccattggagcatgcttaaatttaggcttaaagttgatgtcagttcactgctagtctgaaaattcagaccttagcagcctgacagcctgattttg

SEQ ID NO: 96385 - DNA, 1049 bp, Zea Mays
aatttaataaaataaaaataaaaaatgagcccatgttaaatctaacacgaattttacatagtcggtttgacttataagtagtaattttggatgaagagtttataggtttatttagataaaatttgctaaaaatccgtttcaagttattaattagttaagattagttttttactataaataatgtttggtattagatggagctatgtagaggaagcgtgaggaggggatcaacgccggtagaggaatgaatctacttttttgctttcccaaaaggctaaaagatgtttttactctagttcaaaattgaaaacagtttttctttgttttacctgctatgaaggtatgaaacttgaaaaaaactattcacctatcactggttatgaagatatcaatgtttattttttttctttcttgtctccaacctcttcttgtccatgagacaacaaacctttctagctcgtctcataggtgtttctggtcacaggtgtgactccttcctctcccgcacctaactccgatgacccctcctccctctttggtctgttcgggacgacgccatcccctgaaacatatgtggatgtggatcgagcccctaccccgacaacgggaatgtccctggccattgcgtcgggaccttggccagcacatgggcgagagtaggtctaccttcatgggtgagcatacatatatactactcgagtcacagtcgttttcattggcacaagcccggacgctcgatcgttctgctcgggagttgagtccgccaataattctaaatatttggtttagattatagatttttggcatcgaatctggtttaggatgctaaaccaaacataaccttaaaacaaatgtcaattatagattctttgtagcatgatattttggtaacatgaataacaataatatagaaaatctgagatagaaggtgattataaattgaataagaggaatctagagatttttataaatctattataccgttgtatctgtttggttgaggttctaaatttttggaagtgaatttgcttcagaaagataaaccagac

SEQ ID NO: 96386 - DNA, 466 bp, Zea Mays
ttgattcgtttgtggcccatgctctttttgactctagcgctagctattcgtttgttttggagaattttgtgttgcgggctggtcttttggtgcagaggttgggacacccaattttggttagttctgctaatggctccattagtagctgttcagtttgtaaggggtgttccgtcatccttgctgatgaggtcttttcgaccaatcttgttgtgatttccttgggggctttcgatgttatcttgggtatggattggttatctcaatatcgcgcagttatatcctgtttttggaagacagtgttattgcaggcgccgtcgagtagggaggtggtattcttgggaagttccccaaagttcacgttatccttgttggcgcaattgcttccggatcgccggtcaaggaagtcgggaatctttttctccatggtggtggagggtgaggttgccttgcgggtgcaggacatccg

SEQ ID NO: 96387 - DNA, 870 bp, Zea Mays
gtcttgtagcctcagcttctgctatgttttcaaagattaaccttggtgccccaaacttgagatcagtgggtagcactgcctccgaatcatagaccataaagaaaggtgtgtttccatgcagagctcgactgggttgagttctcaggctccaaacaacataaggcaactctctaatccactttcctgcgaacttctcattcttgtcgaaaactttctttctgagcgcttccaatatcatctcgttggctcttgggtgcgccaccgaggcatatttgatctgaatgcttttttgttcacagaaataaaaaaactctgagcttgtgaaattggatcccaggtcggttatgatgctattcggtattccaaatctgaatattatgtcttgtatgaattccactgccttagctgaagttagagaagcaatggatttgaactctatccatttagtgaatttgtcgatagcaaccagcacatgagtgtatcctccttgagctttcttgaagggtccaatcatatccagtccccagcatgcgaacggccaggttacatgtatggtttgcagttgttgcgctggtagatgttgctgttttgacaagtactgacaggcttcgcacctctggactaactcgactgcatcactctttgctgttggccagtagaaaccggacttgaagaccttccccaccagggtcctggatgctgcgtgtacctcgcattgcccagcgtggacctcatccaaaagttgttttccagtagctgagagaatgcatttcatgaggactcctgacgcgccccttctgtatagcgtttccccaatgagagtgtaatgagctgactgtctcgcaatgcgttcgactacatttttgtcat

SEQ ID NO: 96388 - DNA, 543 bp, Zea Mays
cttaatatctcctgattcattcaaccattggacatgatatggatgaaggtgtctctgcaacttcaaggcaagcttttcaaccatctcacggcttacaagattatggcagctccctccatcaatgatcacctttattaccttgtcttgcacttttgctcacgtttgaaaaagattatgtcgctgtccaatttcagcttctttcatttgaacactcaagatttgtgtaaccacaagagtagtaccatgctcaaattcacatctagtatgttcctcaattttatgagtgacatctacatttcttgcttaagcttcctcttcactagctgatgtatattctccatcatcattcacaaggatcacacgattatttagacactcctttatgacgtgaccatgacctccgcacttgaagcactgaataccactactcttggctgttgaacccactgatgttgaagtggatgttgctggtttataacccatgtttggagcagcatcgttctttctactacaatttcctttattattggatcgcaagcctcc

SEQ ID NO: 96389 - DNA, 303 bp, Zea Mays
agcaaggctataaggggcgaccaacaatgggaaattaggagggttaggcgtggggttcatggtgttagggtttgttctttactatgtaacatgtgctaggccaaaaaaacactatggatcgatttcagatatccaacggataacccgcgggtagaatgtaatatcctaatccgtgcccaccagacttcggatcggatttgggtctgacccacgggtcaaaacatgtatccatatccggctctgtcagatcggatttccgatggatatccaaatccacggatcaaattgccatccctactggag

SEQ ID NO: 96390 - DNA, 691 bp, Zea Mays
agaaaatatgtttccaacaataagagaactgggatccaagggaaaaataagcaacccattgatgcttgaagagtttatgtgggaaaatgaatgggttgaagaaaataatgaagctaacggtggtaacacatatgacatgttgtggatgaggcattaggaacaactcaagctctccaaggcaggatttcgtcaagaatagttgttgcaagtgctggttcgtcttctcagcctcaacggacatatgttaggacaaggaagcgttcaagaaatgcaacaactcaaggtattgaataagatgacagtgatgctcaagaagatggtcctgccacagcagatgcaaaacaacaaccgccaccaaaagcaactcaagatatggagcaagatggatctgaatctattggaggggaagctgatgttgctttttgatcggatgttgatatgctctaggtagtagactagcaggtactacattattgcttgtactttcaatatttcagtttagacttaaatagtgcctatcatattggctattgcagtattgtttgtatatacatatattatgttatatacatatacatatacatatgtccagaaattatataaggcgagtaggagacgaccagaggttgactacacgtcctaattgtttccctaatcacgattaggtgtctggttggttctttggaacaac

SEQ ID NO: 96391 - DNA, 933 bp, Zea Mays
gcgaggttgattgcaagcaaacggtttggaggacgggagacagagagatcacagcggcagcatgcaattaagaatccaagaacagcagacgctaggggggttgtggggaggcaacgtggatgctcacacagtgagcagagctgctaggccaggcgcggccgggcggctgcagcgagcggtggcttgagctttataacgggcggaggagtggaggacacggatggatggatggatacaggaagcaaggagcaaccccgcgggtggggtccgagaaaaggcgggcggcgaaggaagaggaagagaaggcagcagggtaagtggtggttggagacagcacaggaagaggacgatggcggaggtgggggacaatttactgacaataattgccgggaggcgagctgctgtccactgctcactcgactcctttgttgtacctagcgatggcagtaaacatatatacggtgtgcgtgcgtgatgcctggtcggggatgcatggtagggcggagggagaaggaactcggagagacagcaagcggatggaatggatggacgtgggcgtcgcaaaagattcagacagggaagggggatagaaaaggaaggccgaaggagaagcagcagctaccactctcgtcgtcggcgacgaagcagcagctagcaagaggagggagaggacggatcggctgaggcacctcttcgccttcggtggggtgctgcctttcgtttccgttgctttgcttgctccctcagcagcctaggactaggagtttcttgcagggctgggactgggttgcaactttgcaagcaagcaagtaaaggaagctcagggacgggacctttgtaggacccaagtgcagtgcagggctcctcgcttcaacttttgcagcgggaggtggaggcaagggtgggtacaaaagttgggaaagaagatggatg

SEQ ID NO: 96392 - DNA, 772 bp, Zea Mays
tgttcaaacaccaatctgacatgtttcacatgctcagcccatgaagcactgtagatgagaatatcatcaataaaacccataacaaatttcctttgaaaagggtcttggaatgagttaattgcacattggaaagttgttagagcattggtcaacccaaaaggcataactcgaaattggtacaacccatggtgagttttgaaggcagtcttgatctcatctgcctcacccattctgatctagtgatagccagctatgaggtccagactagaaaaatactgagttcctaccaattcttccaggatttcctcaactaaaggcattgggaatctgttctttatggtcaagtcatttgattttcggtaattcaaacaaaatctccaggttccatccttcttcttaaccaatagtactggtgaaccaaagggacttacactcggcactataagtcatgtttctaggagagccttcacttgcttctctatctcattcttatgaaaaggtgagtatatgtagggcctagagttcataggtactgcaccagaaacaaagggaatgtagttatcatattgtctggagggaggtaactgctgtggtacttcaaacagatcagcaaactccaacagtaagctttgaatctcctccttctgatcacaatcctctctgtcttccacaacttccaacaatacaaatgcccagacctcatgtcccttcagccatttatgcacttgcaatattgacacattttgtatagaagtttgaggctaagaactat

SEQ ID NO: 96393 - DNA, 364 bp, Zea Mays
gctctgcctcgccgtcgtgcgcagactgcctgtggtgagggaggaaagccgggaccgttgactcctcaatctacggtggagattggtctggggtaccgcttctggttgcggtgatctttaccgtcgatcgaccgatggagggattagggccgatcgtggtatggcttatcgtgggccatgggatcttgggtgtgtggccaagattgggagtgggcaatgtagatcgtggttgttggatcgcttatgtgctgtgcagatgagatcctagtgtaaccctgcatctcttctaatcggcgccatcggatccgtatcgtgcggtcctgattagaagccacatagtgtgtcctcctctgttgatctcggc

SEQ ID NO: 96394 - DNA, 372 bp, Zea Mays
gttcgggtggaagttgcggaattacgtgttgagtgcgccgcacgccactatctggatggtggttctcccacccctgtcgggatttagcacccttaccgttcaccgccccgtggtcgcttcgactatggtccccagactgtaggacccggatagatttggatccatagatcgacagagtcagagtctgtaataatgcttaattcagtgtcttagtctagtcagtcttagttagagttagtttgcttatcatatgttgaaattcttgtcgtgatgaacatgtaatgaagttggatctttgtaatgattgtcatcaaggtgtgggtaacccctgcaacttggtgtggttattaataaagtcagtcatttagttgg

SEQ ID NO: 96395 - DNA, 396 bp, Zea Mays
cgagagacggaggatctcccaagtctcttatgcatggttagacctaagaactatgaatttggtgctctctactaagtctttctcgttgtggtggttcgctccttggcttcgaccttcgttatggtggttcgctcctgggtctcggcgtggccgtcatgttgcgggccctgtagacggcaagtgcacttaggcctagggttaataggtcatgagtgggccgcatgcctaaagcatgtaggtcatgagtagaaggagggctgactctctcactgcggctcggtgccaagcgtagttaatgcggtcagtcacttacggtgggtcagttctgggtcaggcgcagaactcactcgagtggcttgctctcgatccgtccgacacctcttctagctccgcctc

SEQ ID NO: 96396 - DNA, 297 bp, Zea Mays
ggtataccggaatggcccccaattgttgaatcatgcatggcatgtaggacacgttgctgaagttcagaattatcggccaaccaaactcgtcccttgtaccgaatgactccttggtgtagagaaaatgggcctgaagaattcgagtgtaggaacagagttgttagtaattgttgagcagctggatttgttgcatacccattgaccacatcttgtaaccaagccggagaacagtgtgacattgcaagacagtccgcagtttgatgaggcagcctagatagggcatcggctgcagtattg

SEQ ID NO: 96397 - DNA, 812 bp, Zea Mays
ggcttactcaaatggacggcacaaaagtggggaactcgtggaacatagaacacctcagaaagttctacccttagcaaggcctcaaaaaactcttgaaggaatattgtactctgtaatatgaagacttcataaagctttcgttttccaaagacattcagattctagacttacagctgactttgattgggcttgacttaaaatcggcatgcttacttgacttagggtgaccactataccctgctaacggagcaatcagcttaagtcggcgacaacttaagttggtgtgacatgctcatgcttacttgacttaggatgaccgctataccctgctaactgagcaattggcttaagtcggcgacgacttaagtcggtgcaacatgctcacgcttacttgacttagggtgaccactataccctgctaacggagcaatcggcttaagtcggcggtgacttaagtcggtgcaacatgctcacacttacttgacttagggtgaccagtataccctgctaacggagcaatcggcttaagtcagcaacggcttaagtcggtgcgacatgctcacgcttacttaacttagggtgatcactatgccctaccaacggagcgatcgacttacgttggaaatgcctttagtcagcgcggcatacttgcattcacatgatttagggtgaccattgtaccctagtagcataatgaccagctaaaattaagaacacctcgaaaaaagaaaacatctcgcttgcaagtgccaggggtgtttcccagcaccctgttcacggaatgatcaagttctaacataactatcgcgtgc

SEQ ID NO: 96398 - DNA, 513 bp, Zea Mays
ccgaggccatcttctggtatgtattagttaagataatttgacacaagttttcaattggaggcattaggtttaaggtttccatcttaatgaacacttgaggtttagttggaggggctgatttttggttatagaaaatcctaaatttcttttgctctctccttttttgtggtatttttggggactttgccaaaccttttttggggtatcacccttactaacttttgttagttatttgatgagctacaacttttattaatgatctaattcatgacaaggtgatctatttagttttctggcttatttctttttggtgcacctattgaacttaagtaggggtgtatagggtttggtcacttcctctcttttgattagtatgagatggttcaggtagaccttctatgatgtttagcacttagccaaggctctaatccaagtgtatggtgagtttttcccaaagaaaaacacatgtgataataggtcaaagtgtgtgtgttgagttaaactccacaagtg

SEQ ID NO: 96399 - DNA, 318 bp, Zea Mays
tcggtgtgagtgtgggcgcatggaggaaaaagaaattggctgcatgcggcagattcggagctgcgtgagtgccgtggggccatggcggatgcaggtaggcctagtagtttctttttctatggtttctcctctttcaattcccacgactacgcatgatgtttcttcttcatcgagttcacggcatcacgcatggcggcatgcaggcacagtgaggccaggtgcacgacacgaacaaggaacggacatgagcatgatgaacttctcacctcggaatggagcacacgtgtaggaggatggggacaacagactcgacgggct

SEQ ID NO: 96400 - DNA, 680 bp, Zea Mays
agtaaggcaaatgcagtgaaacagacggggagaccggtggagcaatatgctagtgagctttagtacttgtgaggagaactagatcactacgcttctctccaaatggtctatccacaagatgcataggctagtcataagtgggtagaggacaaaagagtgacccgcttcctaaagaatttggatcctgtgtcaccaggagagtcttcctaccatggatgaggctgtgtcaatcatgattgatgaagagagcagacttcgagtgatgggtagtggtaatcttgtgaagttgacctatgtcgtaactgaggatagggagtgatataattgtggaaaaagggggcacttgatttacaattatcccaatcctagaggaattgacgatcgaggtggatctcatggaggtcgaggaggtactcgaggtagctattgaggtcatggtggctatgttggaggtagaggtcattgtggtccttgagccaatatggtggtcactgaagaaactcctatcactctgacgggagaagaagctaaatagtgggaagattggcaaaagggcaaggattcagagtgttcaaccaccacttcatttgcttatgtggctgctacatccacccagcacttcagtcgctccgccaactatgcccatttgggcataggtactcagacgcaagcacttgcat

SEQ ID NO: 96401 - DNA, 286 bp, Zea Mays
ctcataaatcaaaagcgcacgtcgacacgagtataaatggggttttcccgggttgggcgccatttctaaaaagtgccaagtcatcactcgggaaagcgaaacttcagacttaactcggtggttacctctaaaaatgccaacagtatcagccatcactcgacggttacctctaaaacaccgataaagtcaggcacgactcgatgtttacctctaaaacgccagtgtcatcatttgatgctcgacggttacctctaaaaaacactggcagaattgaacacgactcggc

SEQ ID NO: 96402 - DNA, 349 bp, Zea Mays
tgaggactttgctcttggtcaacatagcaaacttgtagagctatgttaggagtacaagttttattaagtgactaaacattggtattgtacaaaaagtggaaataaaaggacttaaagtcgagccgacagtcagtctttgaactgaacattggctagtagtgaagtgaggtgaactttgagattggatttgatcatgatcccgtaattgttagacaatgattgctataacaagattaaagctggagtatagatcgataatcttgttacaggaaggttgacaagttatcacataaaaatttgagatcaagaccctgaaacctgctctgtcaggcgcctgaatcaagctccc

SEQ ID NO: 96403 - DNA, 431 bp, Zea Mays
cgaggctgacccaccataaatggctggccccattaactacgcctagcaccgagccacagtagaaaattagtctacctcccactcatgacctgtgagccccatggcttgcagcgcactcatgacctacgagcctctcagattgtagtgcactcataaactaccaagactaggcatgagtgcacaggccatctatagggcccacaacacgataagccacatcgagacctaggctatggaggccaggggccagcatggcgtagaggtaataatgaaggcgctagggctccacatctcccacaacgtccatcaaaatgagcacgagcagaaacaaccaggtgaccaaggtgtatacagataacgcggcttcatcagggtgaaacacttagttttaccacatcatagtggctccttctcgaggaagccataggtgg

SEQ ID NO: 96404 - DNA, 289 bp, Zea Mays
cttctacaaaggaggtcgataggccgttttgtgataaataggagagaagtttggagttctttttgggtctagaagagaagatacattttatagctcctacgaaggagcacataaagtcatgtcaaccaatctcttaggctcatatccaaaaccctagattcggctgtctcctccaagcctagccaaactccatcttcgatcttcctcatgcttgagctcgggcaggtcccaacttcaagccacccaaactccaatcgtcctaacttggttgctcagactgactccaata

SEQ ID NO: 96405 - DNA, 271 bp, Zea Mays
acctgccgttcatcatcagggatcgccccgagcgaagctaccaaagcattgacttcttcagcagagggtcgcactctaaggcccaaacttccatcagtcacaggtggattcgacacaaagagggtgaaagctttgggaggaggtaagttccaagccgagtatgccactggagcaccaacattcgaaactttacccctgagaatcatttcgagtcggctcaccaagtcaacagaaggaattctcctgttagtgactcgagttgagtcggcca

SEQ ID NO: 96406 - DNA, 349 bp, Zea Mays
gcggtgacttcgaatcggtcgaatgccgaagaccgtcgaagcggtctttttcgacatggtgatacttggatatttttgcgggggcttttcactggtatattatatgactctgcctcgttaaaaacctcaccccctgggggaaaagagcacgggcctgagcagcattgtgtgtagaattacataggcgcgtaggccctgagacttaaacaaaaaatttctggaggctatcgatgttccaggaatgctctaagtctttgccggatgatgttgccagcctgtacgtgctaggggatgccttcgacttgacaatgaatggaccttcccatttcggctccagcttgcctcgtga

SEQ ID NO: 96407 - DNA, 280 bp, Zea Mays
ctcaatacgaccaagcaaagatgactagccctcaagacgaggcagaaagtgggctcaacaccactagcaaataatcagaaccaaatccgagcaaaagacaacaaaagagctgtaagcaaggctagtccctctagaaagaggcaaatggctcaacaaaactagtaagacacatttcgcaaagactcccccctgaagaaatactcataacctcacaaagaattacatgcatcctcaacaaaatttgtgtgggtgtgaaaaaatttgccctccaaaattctcc

SEQ ID NO: 96408 - DNA, 623 bp, Zea Mays
tgtgctctatcttagggctgactcaaattagtggcaaggaagatcgctacattttaggccatgtatctgcttgctgctaatgcaggggtcgccctagaggaatgacgttgttgggcaagctcataggtacccactcagtctggagtggaccagggttgtgaggtgcggtgttgccctcgagttgacgtgatatgttgtagcggacagccacggtggctatgtgtaggagggggcgaggggtagggtggctcaccaagacatgtatgtccgcattgtcccgcccacgcagaagccacgtcgccgctccagttccaaaggtgagcaaggaagtaaacagtcggaagggtagtgggcacgcgagcttctgagctggggctcagctcttttgtcttgagggggctcgtatgggccgttggggtgtttctcgcgcttgtaatgggctttgttgtctttattcgttgtaaagatgagcacgtggtgaataaagaaaaacaatagattattttcagttctagtttccattattatcattctatagtttgttgggttgattttaacactgtgtatttatctgctataaattaagttttatagttaacgaaatcaccaaatgttaataaagc

SEQ ID NO: 96409 - DNA, 565 bp, Zea Mays
catatcagagctaaaagaatttgctatctcctgcggctaccagccggggtcaatgctcttcggttgggtcaatgaagaagttgtgggatgcatccgcgaccgcgctggtgctaaaattataagcaccctgttcaagagtattggtttttcgaagcttgaaaaaagacataagcttctacagacgccagcacattataggaagcttattttactcgaacttcaaagtaagatgcattttgcgagttactgttgatatcttcatgttgacttaggtatcctaacttttaattcattttcatagagtttgttattaagcaaagctttaaaaatgcaacaagatgatgaagatagaaagaacgaaattgttgtcaagggtttcaaagatagaatcaaaaaattgaagattctctaaatgaaaaagatgatttgttgcattcaaccgaaggatcacttgccgaagcacaagcgcggaataagaaattgagcaaggagctgaaagaggcttagacgcttttggaagaaaactctagccaattcaaccgtgaaactgaagctttgaatatga

SEQ ID NO: 96410 - DNA, 792 bp, Zea Mays
accacggggtctctttagcaatccagccaaggcgaaggggtatggaccaaagatatccgttggatcgcccacggacggcatagattagattgttatttaatcgaataactctttagcacgacccatccgatcaaatatctacggtggagattttacgagggctaatccagtatcgcccgtccaatctaaacggacggtgatgaactcccagatcaaagcgtcaagaaccgacccaatcttggtcgttcgttggccaatcaacgatccgaactctatctcctacctttggcagactgggcacgacagcgcccacacccaccgcggccatgacccgccgaagaaacgccacctaacgcgcccgcaaatgaaacccggctttgaccagagctacgcatagaggacggtaaggtgaacttagcaggggctcacataccgagagtcgagttgcgtagcacctaggctaccgaacacagcacgagtctgtggtggcaagcttcacttccgccacccgccacatcacccactgcccccgtccgtagaggatgaagacaccaaccatgcattctggcgtgccacgagactttctctaacgcctcgctgaagatatggacgcaccacgatccctcatcctggttcgcactgttccccggcgaccatggcttctctcaatccagtggcatggtgaacatggcgagatgaggcgaggtgcgaagggcggctttagatatatatggccagggctacggcgagccatgggtttatgcgccatgcgcggagtccgttcgatggtgc

SEQ ID NO: 96411 - DNA, 373 bp, Zea Mays
ccaaaatatgtaatagtctcactagcttcatcgtctatgacctcgcatcgaacaccactgttttgtgacatgctccttttgtccttgtacttggtacaaaatgtaaatccactaatttcataggtttgccatgtcgtgacctggcatgatggtccagatgtcaaccccttgatggtttgttcttctattgtttctccatgtggaatgtccttcaccattagccatgtgttgaaccgctgcttatgttgcttcattacctaatcatctgtatgcacagaatttttcttgcgaagctcattgatgtgttgttggataaatggctccattatcactagctgatgtaggatgttgtgatgtgcctcaagtactatat

SEQ ID NO: 96412 - DNA, 273 bp, Zea Mays
ctacaacctcttaaagtaccagaatggaaatgggaagaaattggcatggatttcaaagttggattaccccgtactcgtgatggttatgattccatatgggttattgtagacaggttgaccaaagttgcacactttatacctgtgaagacaacttactcaggagccagttagcagaactatacatgtcaagtattgtttgtctgcatggagtaccgaagaagatcgtatcaggctgaggaacccaatttacctcgtgcttttggaaaagattac

SEQ ID NO: 96413 - DNA, 476 bp, Zea Mays
cctggaacatcgacaacctccgcaaattttttgtctgactaatcggggctgatttcgcccttgtaattcgccaaaaaacaatcttgtaccggcccgcactcttttcctcccggggggtgaggtttttaacgaggcggagccatgtaatatatgtgcgaaaaatcccccgcaaaaacatgcgtcgaaaacagaccgcgacgacggccttcgatattcgaccaatccgaggtcaccgcgaggctaagcgctagccaccctcgcgtgcgacaaatccgcacagaagtcgcctaagggtgcagccggactaagcacaacaagtgcgaaaaaaaaatctgatgtctatcgcgaagactatccgcgcagaagtcgcctaagggtgcagccggactaagcacagcaagtgcgagaaaacccgaagtctgtcgcaaagactccgcgcagaagccgcctaagggcgcagccgaaccagtacaaca

SEQ ID NO: 96414 - DNA, 869 bp, Zea Mays
tacaccctatctcagggaatcattcgttataaaggacgcgtgtggctggggagtagcccggatatacaacgccaaatcatttcggcccttcatgattcacctattggcggccactcaggttttccagtgacttacagcagaattaaacatctgttctattggaaaggaatgaaacaagcagtgcgaaattatgttcagtcgtgcagcacctgccaacaggccaaaccagatagatctcgttatccaggactgctggctcctctaccggttcctcctcatgcgtggcattccatttccatggacttcattgagggacttccgaggtctggtacagtggattgtatactggtggtagtggaccgtttttccaagtatggacactttctagctttgtctcaccccttttcagcccccaaagtcgccaaactctttttgaatcaggtttatcgactacatggtatgccagacaacattgtgtccgaccgtgatcgtgtcttcaccagcgccttttggcagcaactgtttacattgtccggcacacaactttgcatgagttcatcgtatcacccgcaatcggatggtcagacggaaagggtgaaccaatgtattgagacatacctcagatgtttcgtccatgcttgccctagcaaatggagtcactggctaccgctagctgaattctggtacaacaccaactctcattcctcgctagaccgatccccatttgaggtgttatatgggcatcctcctaaacacttcggtctacatcacaactcagctattcttgtgacagatctggatcaatggatgcaggaaagggaagtggtttcaaaactagtccagcagcacctcctcagagctcaaagtcg

SEQ ID NO: 96415 - DNA, 386 bp, Zea Mays
tttgaatcccagtgatgcagagataagtgccatgttggatatgttggctgaagattcctctgatgcagcccctgctgaaacactggctgtaccacccatccaagaggctggcaaggctttggatattcagaggtctgatagtgttcgcccgaaacatcctcgccgagccaatcaaccaacttctcctactgaggggaagaaaaaggaaaagagacgtcttcaccgagtgtcatgcttggatcaggatgctggtccttctgctcctgctgctgaggaagtgcaatacaagtttttgctgaaactgacctcaatgggtgtgacccgactgacactgaccccaatgggtgtaacccgactgatgctaacccaaatgggtgtgatccggc

SEQ ID NO: 96416 - DNA, 383 bp, Zea Mays
agaatggacatcgtaaaatatttatcgtgccatctagctgttttgttgctttgagccattgagacttacacttgttttagcatcggttgtttttagtttgagctaacatggctaagggtagaagagtgaagaccttgtgattggcgagttttacgaggccatgtagagaagcaacaccgtgaagatcactgacgagatactggctagactgtcggatgattctaaggatagcgaggattttgattttgagagtgatgttgatgatgacaaagaacgaccctggagaccaagccatgttgactttgataaatcaactgtgaagagagatcatattgaagctatgaatggtaaatattttcacgatgtttctatagtgaggcctg

SEQ ID NO: 96417 - DNA, 497 bp, Zea Mays
ttggaaatggcggcatttgaactgggacatcgtatggctctacgacagtttgttgggtgaaatacaactccatggtaccatttagatgtcaaaaattaaatgcacccagattaagaccaaacactatgttgggcatcttgtagacatgtttttcatggagcaaattgttgaagtctttgactatctcataccgagttgcaatggcctcgatcttggctccctaatttgatttcagcacaaaagaggccgtggtacgaatattacatatagttatataaatgaaacttaaagagatgttgtcttacattgatgtcagacaaaatgtaatgttgcctgtcacgataacgtggttccatcgagaatttaacttcaactcgagcgacaatactatacttccgttgtagcccataaaaatcttcatcgctatagtcgtcgaacaacctgaagctatattaaacatgcgactaaataacgttcataaatttgatagcgaaatc

SEQ ID NO: 96418 - DNA, 1123 bp, Zea Mays
gggagctttaccaagggaatgaagaacaactatcagaagccacagatattgagtccctgtggatggtcaactctgtttagccgtttcagtggctgcagttcaaggtagtgatgttattcagaccattaaatttcgaggcaaaattcagggacaagaagttttggttctggtggattccggtagttctcattcatttctcagttcgcgggtggcgtctaaattggaaggtttgtcagagatgccatggccggtgatggtgcaagtagctgacggtggtagattgttatgtgacaaacaaattttgggggccacatggtcgatccaaacgtgtgaattctgcacagattttcgagtcttggatatcacagcttatgatattattattggaatggattggttagctgtgcatagcccaatgaaggtggactggggacatggctggttgttgattctgtatggcacatcgtcagtcttattacgcggtggtattgaggatgttcaggccactacagctgtgcggtctactactttggaatccttggctatatcatgggctgatatggggttgccgcagcagatggcctcgttgctctctgaattcagttcagtgtttgatccaccatctgggctaccgccttcgcgcgactgcgaccactcaattcctttggtggcagggtactctcctgtacatgtgtgtccataccgttaccctccacttattaaggatgaaattgagcgccaaatagcagcaatgttggctgaaggtattattcagcacagcaccaactctttttcctcttcggtgctcttggttaagaagaaggatagttcttggcgtttttgcgtggatttccgtcgtctgaatgctataacagttaaatctgtgtttccggtgccggtaattgaggaattattagatgagctgggacaggcttcttggttcacaagtctcgatcttacagcggggtatcatcaaatcctattgcgtccagaggacacatttaagacagcattccaaactcactcgggccattatgaattttgtgttatggcgtttggcctcacaggggcaccggctacatttcaaaaggcgatgaatgcaacgttgtcttcactgctccgc

SEQ ID NO: 96419 - DNA, 355 bp, Zea Mays
tctgatagttgcttccccgaagcatgttgaacaatatattctaaatcagcttgggaagatgcttgaggagtatgcaatgttgacttttccttcgctagctctgttggcttggcccctgaagcttcagcctcagtgtgagtaggagcaatgtgtgtagcggttacttctctagaagcttctgtagaagcaggagttgatatctttgaagattttaaaatagcatgcaaaacgttggccatcctccttttcttaggagtcattgttgtggttccagcagtggttagcttcggcaactcagttgtggttgggcgactcagcagtcttgaatgctcttctccttttgagctctttatct

SEQ ID NO: 96420 - DNA, 545 bp, Zea Mays
cggcaacctggatggtgttccatggcaatcgggcataggtctaaggacacttgccatctcgtggctcgtgaagcgctaaggacactatgctcggtctaccgagaagaagtgggaaccacccccatgagattctttccacctctccacaagacccatcaagagtggaagacccgagtgcaagctttgagagagcaaaggcacagtggagatcccacaacagcataccttgccctctatctgcttgccttggatgaaaagtgtgacaagatagttgctcaattgcggaaaacaaccatgcgagtggagaaagcagaagcccttctgttgcagtgccaaaaggatctggtcgatgcccgaagtcagaatgcagccacaaggaacttggaactaatggcactcgctgatgtaacgagaagtttaagagaaactcctgtcgtcaccagcatccaaggtcttgccttcacagcaggcatggcctatcaagttcttggagaatcagcagagagctcgtctgctcaagcaagagtctcaaggcaacccctcaa

SEQ ID NO: 96421 - DNA, 348 bp, Zea Mays
cggccatctatcgacgatgcaatggaggaagtgccctgctggtgggtgtctacgtcgacgacttggtgatcaccggcgccaaggatgtagaggtggcagcgttcaaggaagagatgaaggccaccttccaaatgagtgacctggggcatctctccttctacctggggattgaggtgcaccagggagactccgggatcacacttcgccagatcgcctacgccaagcgcattgttgagctggctgggctcaccgactgcaacccagctctcactccgatggaggagaggctgaagctgagtcgcgacagcacgacggaggaggtggatgctacacagtaccggcgtcttg

SEQ ID NO: 96422 - DNA, 420 bp, Zea Mays
cggtgcgctatgatagggaggagtggatggaaggtgcggtcagtgatagcacgaacactgaacaccaatgcgacacgactacccgatgatgcgtacgtccttgccaaacgggtgcaagcaagttctgatggacaggcactagactgatgtcctcatcgcaagcatccgctaccctatctggctatctctcactcagtcatgtaacaccgcttcaagttctgtctcaagagtcaccgagaatgaaatgacggagaattaggcaatcagcgagcgacggcaagatccagtataggataaattccttgctaatcatgactagctaaggattataaatccgctgtttcttttgggagtgctccacaccacacagttatctctaccaacagctggtcggtcccgatctcccgcgctgcgactgcg

SEQ ID NO: 96423 - DNA, 347 bp, Zea Mays
atgaaaccgagcagtccatgaaaaataaaaaaagataaatacaccatttatacaggtggccacgtactacgacaagcctcttaggcgaccgatgaccaggagcaaagggttgcagctagtatcgagatcagactccgtgtggcctccctcctggaactattccattcatgtacgtacgatcatcatacaaacaaagaagattttgttcatctcttattcaatctgactgttccaacacaattaggcaaaatcttattcaatatgagagcaagttaaattgaacagctagctgctgggacaatggcctgttacttccctttgttgcaatgcggtgggctagggatgcg

SEQ ID NO: 96424 - DNA, 396 bp, Zea Mays
tgaaggtggacctagtaataatcgctcaacattctttcagccaacaaaatagccaatctagtatatgtaatggctatatagttagctataaaggacatatcaacggcttacaaccagcaagcaattggctatagggatgacgggttgggtaagttgtgagtaagccatttacttgtccgacaattctattctttgcttgtgcctgtaaggggctgcgggtaaaattctccacccttgctcataccagatagatattagtggatatgggcaacccatcatctgacaaaaaataacatgtcaacatgttcatttgaacaagaacatcaacaatttaaacgagaacataaaaaatttgacaagaacaaatatagttcaaacttcaaagttcacaaccag

SEQ ID NO: 96425 - DNA, 528 bp, Zea Mays
tgaggatattctcggacaccatcgagttgactgagttagagtttatcctactcccccgtacatgtgaatcacgtcctgatcgtgggcgagatacaccgtattaatagagacaggatcggcatagatgctaacgcattctcgcgctccataaacgatcttagccaccactttcacaggagttgatcccctagctctcttagctatcatattaggtgcagtccatggcggcaacataaccatcatctccattggtgatctccattgctgtcagggaccaagaagcccctattatcgtcactcaacaccggtggcgggcgacgacaaggagggggagcaccggtgtaggacacggtgacacaccaaaacagttagccttggtcaataacgtacgcatgtttcccctccccatgcattaacctctcaaaattagattaggacttgtttcttcatagaggttgtggcggattggtaaattagggattaggacttgtttcaacactaaaccattgtgaggaagaggtgaaagat

SEQ ID NO: 96426 - DNA, 435 bp, Zea Mays
tagaatactccggttttgtttcattctactttcggccagaatcacttccatggtgtcagctaaaaatatcagaatacttcccgtaaatgtggctacatttgtagatccaagcagccaggttggaaagaaaaccaccaatcatgcctgtgtagacgagtttccctccacacgttattgcctgccttatgtctgtagtgtgaatgccatatttacctccgtaattttagccgaggtggatcccttcctatattttctctgctttgtttccttgaatgtgtggttctctttcctttccaactttccccattgatggaaggtggaaatcggctatatgtcctcaccggctataaatgtagccacacccctcggtttctatctgctctccctcctttcgcgccaccagaatttgtcacctgtcacaacagcttctcaggt

SEQ ID NO: 96427 - DNA, 401 bp, Zea Mays
tatgcacatgccatattttttttcaaacacgttattttattcatcacacaagttcattacaagcatacagttgccacagatcatactatgcgcgagcattttctaaggtgcttccgaactccctttctaaggtgtccccaaattccctgagaagatcgtcaaggctagccagggacatctcctcaacgtctgacaagctttctgtccttgagggaggcagtgttggtggggcttcctcttttcgttcagtctggcatccttggctcttggtccgcttccagatcttcttagtgggggtgagcttctttaacttcttatcgtagtccatcttcagggtttgataggcttcacgagtgttggcctcttcaccttctgctatttcgagactttcttggagggac

SEQ ID NO: 96428 - DNA, 491 bp, Zea Mays
gtggcacaggggcgtcgatgcaaggaggtcaagaggttagcagcaccgcaacagttataacccgaagcggttcgatcggctggctccctgctgtccgaatcccaggtagttaggcatatcttctcctaataacaaacttctgttgtgcctaccctgagattcgtggcgagaagatgcacaggaacacgaagctatcatcagggtccctcatgctatcgaccccacgtggacgcagcacgcaccgagcgaggaactccaacgcgcatggccaaaggaaaacggaagcagattcccacgtggagcccacacgtcattgagatattgatgttttcatgaatgagcttgcgatgatgtcattcctggcaagcaaaaagatatacgtatgaactatggccaagggtaaatcatcccacccggagttttgtttttgttttttttaagatttcagtttatacttctttaccaatattcaagcctaaagttgatcaaaa

SEQ ID NO: 96429 - DNA, 654 bp, Zea Mays
taaataaaaaatgaagttggttatgttagttatagggaaatgtatatttaatgagtagagggatatgtagggtaaaatttagggggaacggttgcaggacgagtgaatataggggagggaatcttgctgacgtggctgcatagtaagatttaggggggaaaatttcgggggaacgcctgcggacaacctaagggagaagaagaaagaagaggagaaagagaggaggggagaaagaagaagggagaggaaggaagaagaggaaagagagagaggaaggaagaagaaggtgaagagaaaaaaggaagattatgaggaaaaaaagatagctagcttctagctccttgccatagatcctggatccgccactgctattaatgaaccatccgtttccttaggaacagcagtagagctactgtgtgctttcaattcacagtatatatagagcatcagtaacataatacacacagtacagaacattttatatgaatctatttgattgaaaaaaagggaggagtaatattgtgtacgagaaagtgactcgccgcgccacaagacatgcatgagtactctctagtgtctagtcagtcatggagaagattagtactacgtatacaacggtcacttttttgcgcactgcatgtaccatgcatacat

SEQ ID NO: 96430 - DNA, 366 bp, Zea Mays
caggcgcagtcaggggtagaaggaggcctgctgaccgctcgattctatactaacggcgaggattagatccggggtaacggttcggtatatggatggttctgtccgtcgattcgtgatcgaacgaatgctaatagatctcaggtgattaaatctcatccgcctatctatccatcaacgaccagtgagtgcataccggttcggagagccgagatctaatcttaaccggtagatcgtcattcaacggatggcgcgcgaggatacccccttcggtgttatatttttgttaaagaacccccttggaacagcagaatcaacctgtcgccccctctgtgtaaagagcatagcagatgggttctgactttaaca

SEQ ID NO: 96431 - DNA, 299 bp, Zea Mays
gtgctgagccacaacgttagaggaattaactctaccactaagtgaaatgctattcgttgttctattcgggatgctggttgtgaggttgtttgtttgcaagaaacaaaaaaggagttctttgactcgacctacctcaaaaacttttgccctgcccattttgactcttttgattttgttccctcgatggggaactcgggaggatctgttatcatttggaagagctctaggctttccgggaatgttatctttcaaaataattatgcccaatcggtggaattcacttcaaacttgtcggcttg

SEQ ID NO: 96432 - DNA, 483 bp, Zea Mays
actcaatttggagttaaaatgtatttactatgcactttacaagtttccagatttctttttgtattaaaacgaatttctataaatatttctctgtttttaaacatctctggactgggcctcaataacagggaaaactggggtttagagcgcaaaaatgcctaagacacagaggcgctccattcaaggacggggggttgttttctggaaatcgtaggggctcttttaagaaaagttccacggatgaagcggggcgggcaaggtcggtcgtccgatcctgatccaatggatccgatagaacgacgaaggggtacgcgctattgaccaccagatctagatccgatggtgaggatcccaccaacctaaacgttatattgcgattaaatcctgagcgcatgatggctgatcaacggtcaagagaagcccggccgaattgatacctctcatctaatcctgaccacttatcgcgcgatcgacggcctaggg

SEQ ID NO: 96433 - DNA, 465 bp, Zea Mays
aaaaaaacagaccctccactaaactaaggactgagacatcaaagctccaaattgatagcaataatctgacaaagttcaattatcatcaaccagagcgctgcgaggacacaccacctaatagcagaaagcttcactcgattaaaccacctaacagagctagaaacaagccaagcactaaaaaatcctcatacgacatccatatcagcatcaattccacgcctgggacaaaaattatgcggccacggcttcatggatcctagcagagcctcttcattgttttgtaacatctttcaattcaaacaaaaagaagggatatcttccacttcagaccactccaatgtcactgcaaattttctcaaccgaatgttgttcccgtaaccacttcttcactgagtccagtatatcttccaacatcgcttgttcccttgtcttgagtagcacgctccagctctgcaagaaagacat

SEQ ID NO: 96434 - DNA, 617 bp, Zea Mays
cacaaaataaagaaagttcttgtatccatacgaagctcactaatacattttctatcactctcacgaatgagttcatttaaattctccatcctacgctctctatttcttagccttctttctattctcagacattttcttctatatgctaatcccatgagcaaccagacataatagtacgtgacaaggagagaactcaagatacccctaaatgccatattccttcgtcgagttcttgaggataaatatgaagttcttgagaataaatctgaaggtcaacaaatgagtttcatataaatctgaatatcattgtgcacatcaaataaattaaacagacggcatggctgcccactgcggtcggtttcagaataaattaaacatacccctaaattgatatgcttcattggtgcaagtaaacacaagctcgtgcaacaatgtaattgaattagctccagcagcgtgcagtgcgtaaacagaaatagctcagaaaggagcgtgtgtgtaaacagaaattagctcggggagtgcagtgtgtaaacggcaacagcaatggctccagcagcgtgcaaacagaaaggagcggacatgtacaagccccggggcatgacccgtagatcggc

SEQ ID NO: 96435 - DNA, 612 bp, Zea Mays
tgttgagatggccaaaacgattcttgatgagcataggactcctaggcatttttggtcgctgcttgccatgtgtccaatcgcatctttcttcgggcttttctgaaaaaaaacttcttatgcgctgcgatttggatggccacccaaggtcagccatttcagggtgtttggctccagatgctttgttctgaaacagggtaatctggacaagtttgagtcccggtcttctgatggggttttctgggttatgcattacattctcatgcttatcgtgtgcttaacctagagactgaccacatttggagacttgtgaggttatattcgatgagactacaccttgtccatcccttgtctttgagcctataggtccagatcagatgggacaaaccatctttgttgaggaggagcacgacgacactgattgggttgctctcgagccaactccaccagccgcccatgttgagccttcttccactactacggctgacggacccgaccccactccttccaccacttggggtccacttgagccagctcctgctgagactggaggagttgaagctgttgttgagggggaggccacttcctcaagggaggctccacagcatattcagc

SEQ ID NO: 96436 - DNA, 585 bp, Zea Mays
atcgggatgaactgagggcgtcccagactgaattgtctcgacttggtaagctactatcttcaaaggattctgtcatcaaggagttgtgtgcttcaaagaagcttgtcatgcaagagttggaggccgcccgcctcaacatcaagtccttagagaatgatcgtgttgttatgaaggcgatgtgcgacaaagccatggacaaggtcgttcgctccgggcggatcctgatgaggaggcctggcgttgtagtgcccgaagatattgttcccgatgttcttgctgttcctgttgtcatgagccgaccttcttcttctactactcctgcagttgaggcttcctgcaaaaatgctcctacgcagtgatttgctcggattgaaacactttttcattgagttagtagtgtactatgaattccatgtgcgtgtaattgtgctacatttgaactgatctttctgttagcagagtgctgaaaccacccttgggcatgtgaacgagttacttttctttgaagtgctcccgatttgagttggttattttgctagtagggtatagtgaacaccctgagtcgcgcaggcgtgagcatgttgc

SEQ ID NO: 96437 - DNA, 297 bp, Zea Mays
cttcttcagtgcatcaagggcttcctgagcttctgaggtccactggaacttgtccaccttcttgagcaatttgtagaatggtaggcctttttctcctaatcttgatatgaacctgcttaaagctgtcatgcatctagtaagcctttgcactttctttttgtgaacgtggtgcctccatcctcatgatagcctcgattttctccgggttagattcaattcctcggtggctgacaatgaatccgagcagcttcccagctggcactccgaagacacatttttccggattgagcttccatc

SEQ ID NO: 96438 - DNA, 536 bp, Zea Mays
aaggcatcatgctgcactatgtggcgcaatgtcttctgcacattgtgatctgatcagtctttttagctaaggattcagctatctgccttggtctgttggtcacacctttacttgtcgtgggttgctgggcgctatctcttattatccttcagttttataatatatacttgttcgtacaccgactatgctctttgtgcatggcaccatcgatcatgcatggtgcgcgtggatcgggtcgcatgatctcatccatctgcatcatgcatcttcagttcagagttccgtattctccagaacaagattatgcattagaattcagacagagaaataatgcctctctcagttgttgtggcattaatgatctctcgtcttgcactacgctgaccaccagcagcgcaaccaaacttgttaccgccgttacttaagtgtgaatcactaccgttactattcacgttacatttgatgaaccaaacaacactctagtgtttagagcgcgacattaagctccacactcatgcatgctatgtggttttctc

SEQ ID NO: 96439 - DNA, 457 bp, Zea Mays
atttgttaaagggtggaacatagaaagttaaagatatgtacatgtgatctatcaagggaccgactcgagaatgaatcattccctaatggggagcgcaatcctataccatggctatgaccctcggcccacaagtgctacataatccgaggctggggccatcatggaacacaacggttctcgtgctttcgctaaaccctagctatcacatacacccaatcgagattcaatctctctctagcgcctagtgaccaaaattgtccaaccaaaggagccattgtccatagagatcaatgttcctacaatgccttcgatcaccagcacttgatcccaaggtcctagtatgtaagggagaggaggagaactgagccaggatgcaggcactcaacattcagatcctatgacaaccctaaccgtcgccgcccatctcaagcccaaaggtatgctatctacactccct

SEQ ID NO: 96440 - DNA, 293 bp, Zea Mays
ctaaaagaaaaggaggctaaatgaattagtgtgtcgacacctataggtgtaagttaattcaaaatgtattataacataacttatattaagttgtgtggattctttaaataatagtcaggaccaaccaagaaaagatagactacatgttcttagacgatgtagactatgttgtagaaacccatacgaaatgaatcgatttagacatatgtatacatcacatgcacccatacgcatcatacatctcttgcatgaagcatcatatatcctcacgccgcatccatacatcatacagg

SEQ ID NO: 96441 - DNA, 542 bp, Zea Mays
cgttcaactaatccccctatgtcattcgatgataatcccttgcttactttggtaatggtttggctactgcacatacactattgttgctctgaatgttgcacggcgtcttcttcgaagaagactgggttgattcggctacagcctttaaatgcagctaacccttggtgcttctccagtagtgagtagtccagcgcatatgcttcagttatttgtacaagaacttttttgttggctgttgtactcatgccagttgcagattgaccatgcagagtagtgaatatcgaggatggctgatactataattttctcgccatttgtctgctcataggctctcaagaatcgaggatattcttttcaggcatcaaatcatgtctgtcctatgtagggaaagaagacctgggtaatgccttgctatgcccatatgagattacgagcacagtgaatttaagctttcttctacctttgatcatgttctaactactagcatgcatattatcttaactttgacatgggaattaagtagttccaagtgtgcacattat

SEQ ID NO: 96442 - DNA, 603 bp, Zea Mays
ggaagaggtccgttggcgatgtcattgacataccttgcttcttttaccatcatgcgcccgcttacaaacttaccaaggatttcctcggccgacattttggtatacttagggttttcacgaataagattaataagatgaggatcaataacagtaaatgaccttaacatgaggtgcacaacgtcatgatccatccatcttgtgctttcataccttcgaattttgttcaccatggtcttgagcctgttgttcgtttcaattggctcctctcccatcttcatggtgaacctccctagctcaccttccaccaactccatcttggtgatcattgtagcatccttaccctcatgagagattttcgtcccatcctcctgcttccatacaatctaccctcatgtcgtgacagaggcaaacctattgcaacctggtcttttaggatacaattgcagaatggacctacggactcaatggaattttcggtataatatccctctatcatggatgccttaggacgagcacgagttgatacatagccatccaatattgacatgaaatgctcatacatacacatttcatgcaagtaaatgggacccaatgcctctattt

SEQ ID NO: 96443 - DNA, 836 bp, Zea Mays
cagagatagagctctttccaggacagaagcaccctgcgacctcagctgaccagccatttcatcaaccaatgcctgacgttaaaaacaaatgagtgcaagaacaatatcacacccggggtacagccagatcaggaaaaaccaaattacctggaggttggagaagaacgaaggaactcccaagtcgtgggaaatcagttgatggctcaatgaaggatcaacacccggagcaaccctcaatgcatcagtggtgaccaagtcagtgtcaacaggagaaatcaaaactctgtcatcaggagcgccggcctctaaggcgacttcctgacccgaagctcgagctgctgccaggcaaccagaatgcggaggggaagatcctacatgaacgtacatggaagtgtgagaggaagaaccaactcagacaccctcgggggctgggtcatagcttgcgctacccatccgagccggattatccccggcgacaccctcgggggctgggtaagcgttagcgccatccttgagggccgagttctctgtaacagccacctctaaggctgaaggaccttcacccacttccatgggagcagaacaatccagaccagcctcctgacccttaagaccgcgctccaaggtcgatgaggcacgagacgctgcttgagataactctaacccggcatcaggcgcatcagcgcaaacttctatcattccaccatctgtcggctctaacaacagatcttctgggaccatgtcttcaagagtctgatcaaagtttgccagagacaattcttgcagaccaatgagggcagacaaagctggagaaggaacaccactactttccccgc

SEQ ID NO: 96444 - DNA, 755 bp, Zea Mays
tgcaaacttctgaggtggtccggccatggcgatgtggtgagacggtggcacagtcaccagacaaggagaagataacgcgcgacggacttaggcaaaacgaatggcgaaaccaggaccattgctgattgtgagggcatgagcgagagagacccacagcgagcctagcctagtgagcacaaggtggcgaaaggcttcattaagccgagcaatatggcaccggagaaaacaaaggccactagctgcatgcccatatcgcgacggggaacgctctcgagggtgccagctctaagcaaaacaaggcacgtggccgcaatgcaacggcgcatggataactgaatttcagcaaagcggtaaattttggataaccatcgcattcaccaatcaggactggaagcactgaactcactcggccttacgtaccatccattcaaacctcaacttgcctaatgcacgtggggcacagcaggcgtggaaatccttctgctcccaaggactaacccaagcttcggtcaccagaaactgagctcaattttcagccatcgatgccacgtccacctctgcgtgtccctccaaccttatgggccatgcacagctcggcactcaactataggaagtaaacaagcagcagtaggcgacatgcaaatggagcatgccgaccccttcgtctctgtccaaactgaagcaacgtttggttacacagaatgcgtggccacgacttggagcaaagctttctcccaattatcagtggtcatagg

SEQ ID NO: 96445 - DNA, 351 bp, Zea Mays
ggtttcatttgtttgacattattggttcatgagcctagtttagtaggtgtggatttagcaatacatatagcactagtcttattatagaaaagtgcaacattattgaaattgtcacatatcataccctttttaagtgtagctatcgtccaaataatttgggaccaacaacaaacaaccaactaaataatcgataacagtgcaaggaggtaagggtgttggagcatccctagcctccacgctagatccgtccttactaaactaggtctatgaaccataatgtcaaacaaatgaaagcataaatcgaaaaaaggagaggaatgataaactaaacctaatatgaatcaacaaacg

SEQ ID NO: 96446 - DNA, 364 bp, Zea Mays
agaaatcaggagcaatgatgttccaactttttttcataaaatctttgttgaagtcatcaggacccagtgacttattcgaagggagtgacccaatgattgcctcaatttcctccatggtgaaaggggcttccaaaacagacaaatcttgcgttgtttgaataaaagagttaatgttaaatctcattgatgtatcttgagaagttcctagtctggctctgaaggaatcgaaaagaatctttgccttttcatcatgattggagattttagcaccagcattgtcatgaatagaagcaattgaattttgcatatgcctagttgttgctatatcatgaaacaatttagtccctgcatctccaagtgtagc

SEQ ID NO: 96447 - DNA, 341 bp, Zea Mays
cgatagctgagaactggggccttcatatccttccgatacgcaaagttgtaggagccgaagttctcatgaagaccatctgctctggccttcgtttggtagtgcaactcgtgcacccgacagaaagcttcggcattgggactcataccctggcttcagagggcccatatgtagacactaagtctaacgattgcattgggtgtcagctgatgaaagtatatctcaaaaattttcaaaacttctccaatcatctcatgcagtgggaaacgaagtcctgccctgaagaagcttttaaaaactacgacttcatcgtcttttggatctggaatcacctcttccccagc

SEQ ID NO: 96448 - DNA, 418 bp, Zea Mays
caagaaatgagctgtcttggttagcctatccacaatgacccaaatggaatcgtggtgtcgggaagtgttgggcaatcccataataaagtccatacaaatgtcctcccatatccaagatggtatggggagaggctgcaaggtacctgctaccttcaaatgactggctttgattctttggcaagtgtcgcactgacatatgtacttagcaatttctctcttcatcctggtccaccaatataaggatctgaggtcatgatacattttgttgcttccgggatgaatggaaaatttggagagatgagcctcatcccaaaattttctttctgagttctggattcttgggaaaaaccagtcggtcttcaaaccataaaatgcccttgctgtcctgacgaaaacatttatacttatccactttttg

SEQ ID NO: 96449 - DNA, 785 bp, Zea Mays
ggggcaggtgcgtagaaagggaagtacttgagcatcgcaagatccgggcggggctggcgtgtagaatgggaagaatgagatggtagggtggtcctacacttgcaatgggatgcaggccgatggtggttctgtgctagatggcgacgaggggattgggttgtgattcattccatggcggcgaggcgtggattgcatttggggcgtggaggatatgggcggggcatccgcggtgcatgggaagaacgattgggcagtgtggtcctgcgcgcgggggtcgtcgacggtgggatttttgcgtgttggattgctacgaggcgtggatagcggcgaggggatgtgtttccttctgtggcagtggcaggatttttgcttccataaccgaggcattgatcggtgaggggattgcagcgaggaccatgcacatgcagaggtagaggggagagggtgtgcacggggaagaaaggagacactaacatgtgggccatatgcgtcgtgaggaagcagaaccatgcactgcaccatggtctacattagattattatagagtagtatagatttggacagcagccccaagtcttcaacacaatggcatcacaggaccgcgataaacgcccaccgcccagctccctctaaaacttaacttacgcgccagtgccctgctctagcgacgcgatcaggaagtaaattggcagagccccgctcgagcgattatcgacgcgcttcccgacgagcgacatcagacacaaggcatcaaccgaaaacgaggaggcggcgtaggatcagtg

SEQ ID NO: 96450 - DNA, 407 bp, Zea Mays
aacaattgctatttcatggattctcccaaaagaaattgggctgcgtgcggtagattcggagctgcgtgcatgccgtggggcccatggcggttttacggatcgtgatgcatgcaggtaggcctaaccgtatccttttcctatggtttctcctctttccatacccacgactacacatgatgtttcttcttcatcgagttcacgacattacgcatgccgaaatgcaggcaacagtagggtcaggtgcgcctgtaacaccccagatgtttatcgtctgctcgatcacgagtgcggatcttaacacgtgatagcgatgaataaaatggacactaaattttaattatctcgcaaaagttcgagtttggtgtcatatttatttccataatctaagcaattaaaagggggtcgag

SEQ ID NO: 96451 - DNA, 850 bp, Zea Mays
gagggtgagcatgttgcgtgcgatggcgaagttgggtagcaccatggaattggtgatgatgtcgacagtgttggagaaatgatgttgaggccacagagaaggttgaggacatgctcaaaattctagactggatgaccaacgtcacggagggtgtcggtggtggtctttatgcgctggtagcagttgatggaagtgtcgccctgctgcatggagtggaactcatggcagaggaagatgggctgaggatccttgttggctcgtaagaggttctcgatggtgacctagagatcatgcgtagtctggtcgttgccatccatggtgaggttgaggatggagtcatcgacggagccgaatatccaactacggacacaatagtttgcttgatcccattaagggtcagtgggattggcagcgcctgtgctgtcgatgtgtgatttgaggccgaatttgttgcacaaggtcttgaagtgggatgcccacttagttggacttttgcatcgccaatgtcatggggacgtgggacttgacgtaggcagtggcatagtggtgggcgatcaccatcggctgctcctagttgttggagggatgtcctctgtcgtggatgtggtgaatgtggtgttgggagtctggtggcgccataagaacaagggtggcgacgattgggagtagtagcagcggcgatcagtacctatgagaggagaccagcggcttcaactggagatgtagcaggaagggagaggccactggtgccctagggtttggggtcgacggacagagaggggaggggagctgccggtaccctagggaaagtgttggcggctagggggtggggtgcggcagcagagggaag

SEQ ID NO: 96452 - DNA, 343 bp, Zea Mays
acgcctccgacgacgtgccgacacaaatggaggaggacgacctactgggggaagacctggtcgactacgaagcttctccagaacacccaggtatggatataaatgttattacattctctactgattgtaacattatttggcgatggtgaacctattgttgctcaatttgactttggtcctaaagaggtcgtcttcactaaaccaaaggaatcggtaaatcatttaaagctgctcttcgtgcgcagtcacatcgatgggataccgattgctaaaatattggtggatggggggcggctgtaaatctaatgccttattcattgtatagaaaattaggtaaacagga

SEQ ID NO: 96453 - DNA, 565 bp, Zea Mays
actttgcggccttggatgtggctgcgacggaggcttctccgtgtgttacggatgctgaagttttgcctggtccgagtgctgggcgtaggcggcgaagggcggtggcaaagcgtagagtgagtgaagtggatggtggtcggcttcgtgtgggcagggctggcaagcgggaattgttgtcctcgccagttggggcgagtgtaggtgagggggagttgcgaagtctttttgagggtgaggagctgaggataatgctatttaactatagggagatgggaatcattccgaaggttgaaccaatgtaaggtgtgatgccctcgctgtacgtgtgtaactatagtttgtatgatgaggctgtgcgccttcgcgcatccggctatgtccataggggcgttgcgcacttggtctggcacgtttattatgtcggtccggttgcgcctgtagtcggtccttgcgcggacagtttctcgatgtagacttttgcacggatgtaatgtgccttcgattttgtgcactcgttgtgctagtctggctgcacccttaggcgacttttgcacggatagtcttt

SEQ ID NO: 96454 - DNA, 459 bp, Zea Mays
cgaggaggcaaatccttgccaggcaaattccccgggtggacaccaaccggtcgggctgccctgtcctgctgccctttggagccacggggtgtcatgggtcatcgtcaaaacgcaagctcaattatcatcgaaacatagtaaaaagatagcatgtacgtcagcaaagtgcctgctcgcttcaactaacagttggctggttgtttcggtatatatacaacaagtataaatacaaaaaagtttatgagggatatacaggcagtcatacgggctcatggtcatcaaaacacaagtacaatagaaaattaaaattcagtaaaatcaatccgttccagatcactttaaatacagatacaaaatattttacgagagatatacatgaagccacacaagctcatggtcatcatcaaaacacaagtaaaatagaaaaaataaaaatcagcaaaatcatttcattccaga

SEQ ID NO: 96455 - DNA, 501 bp, Zea Mays
gcatgtcatttcctatcaaagcatcaacacttgcccacccaacagttgcagactattcctataacctgtcctttcgcgtgctgggggctggacatgattaggccattcaaaaaaaagctcaaggaagatatactcacatactcgtcgccattgaaaagtttaaaaatggatagagtacaagcccatcgcctctttgacctcagcaaaagcggtggagttcattcaagaaataatgttcaggtttgggatacctaacagcatcatcacagacctgggatctaacttcactagctcagagttctttgatttctgcgagtagaggagcatctagatcaagtatgcatcagtggcacacccaagagctgatgggcaggtggaaagagccagcaggatgatgcttgatgcactcaggaaaaaggtgttcgacaagagcaaaaagcttgcaggaaaatggatcagagaactaccgtatgtggtctggagcctacaaacctagccaag

SEQ ID NO: 96456 - DNA, 288 bp, Zea Mays
attaccatctcaacaccaggaggcagggttgccacctatcagatcaataggcacgtaccaattaagctgggtagtctcattttcaaaaccactctattgataatgggattggatagtggtggatattcatcttagggactgattggttatcacgacaccacgtggtgattgatgtcgcagctggagccatagaaatccgctcccctttggatggcgagatcaccttatatctacccgaccagggatgcacccgttcttgtgcctttgttatgatagagtccccagtgg

SEQ ID NO: 96457 - DNA, 404 bp, Zea Mays
ctggttgatacccgctggatatggcctattctctcaactcttctttcttagccttcgacaattcttgcccaattatgttttgaaagttaaagtttttttcttccgaagcatcttcagctatttccttctccttctcaggtactgtagacatggtttcttcagcggctgcaacagcttcttctgtgaccatgtccaaaagtatcttatcaatgttagaaagtgtgctttctaaatttgcatcttcaacaggttcagcttcggcagttgcagcttcggccggtgcagcttcgacagctgtagcgctctcaacagctggtgcttttgaagccgaagctggtcgtggtgtctcttcgatagcttctgtcacagtaataattcttcgttttttcggcccagctgccttc

SEQ ID NO: 96458 - DNA, 581 bp, Zea Mays
tagtacaagcaagataataaggttatctacaactcttttatatgacttttctacagaaaacatgatctagttcatcaaacatacaacacaaggaaatcactgcgtgcagtccaaaacaacaaatttctaaatttcagctcctatataattcaagaattgccatgttttagagacttgaattattctaacactttaccatttgttagagttaaattaatcaaatgaagactaacaagtagacttacaatttttactcaagtcatttagtgcactaaaattaccacatacatttaacaaatgcattcaccacgtacatagcatcatcacacatgacctcgacttaaccgcagaggaagcgatgactacttcggtaagtcaccacctctctacaatccaatcaatattaactacatcgatcgacctcatattgcgcaactcttataatttactatctcaaatacaaccatagcacggcatgcacttgagactctttgttcaagttaacgcaatcactactacaacgcacttcggcacacatgtttgataacacacaaaattatgatgaagtactaatatttatc

SEQ ID NO: 96459 - DNA, 756 bp, Zea Mays
gggttaaacactgtaccctagggtttcacttatgaaatgccacaccaatacaacttgtttgaacttttgcctagtgaatgcattctatgtgtgacaaacacatgatatgccaatgcttatgatgttatgctcaaattttagtaacagtaacaccaagggtgttacatccttcccaccataaaagaatatcgtcccgagattaaaagtcctagggaaagtaatggaaaaggaaacacggcacatctttatttccttatctttggtacaaggtaggggtggtatgggctaatccctttattacaacaattgtatacactttacaaattacatgaggctaaaaagcctgggaaattcttttctaaaaagttctgagtttcccatgtagcctcatcttctgaatgctagttccactgtatcttgtaaaacttgagagttttccttcgagtaattctgtccttttgatccaagactcaaatagggtgctctgaatatgtcaagtctggttctaaggcaatatccgttacttcaatggttcgatcgggaacccgaagacacttcttcaattgagacacgtggaacacattatgtactgcagacaaggtttcgggtaactggagtcgatatgccactggtccatatctttcaaggataggaaaaggaccaatgtatcgaggtgcaagcttcccctttaccctgaaacgtaatacccccttcattggtgaaactttcaggtagacataatctccaactagaaag

SEQ ID NO: 96460 - DNA, 449 bp, Zea Mays
cctcagcacaagagtctcaatagtggcccgcatatcggaaaagacgggacatcacaccacaccaagcgtatctaccacgtatgatggaaggtgatgcgggtcgcggggcatacaacgggcgaagacatgccacatatgaccgtgtcctaggatatactagcaggacctgtcatgcactaccagcagggcgacaacagctgactcgctacaggaaccagcacaatggacaacaccataccgagggtacgaccacacataggaaagaagaaccaactcgttgacatagggagatatgcctctctctccctccctctcctccctatctctctctcttttctcgtcaagggcgagattccactataaggcttctcccttgagatataaaagggagaaggttcctttcttcacaacacaatcacacctgctgaacacgcctcaaagtaatacta

SEQ ID NO: 96461 - DNA, 317 bp, Zea Mays
aaagtaatgaaaatttttactatcgatggcccaatttgtttagtgctatcatagagaatttaggattgcgggaaatagaaatgttgggacaacaatttacttgagcgaatgacttggttccacccacttttgaaaagctagatatggtgttaatgagcccggagtgggaaattaaattccctaacataacaatttaggcgcttgatagatctcggtctgatcatacgcctttattacttaatggcaaagttcccacgagcatggaaaatcactctaaatttaaatttgagttatgttggcttattagagagggcttg

SEQ ID NO: 96462 - DNA, 556 bp, Zea Mays
cgcgctgtggagctccggcgagctagtaggccggccgattggggcaagtactggcgctgtacgttggtctaaaccgaattcagggccgagtgaaggttttccccaagttaatttcataaacaactacaccaatgtctctggccatggtgagcgcgcggatgaactaacaacctacacgttcccggtgattcatgggatcctagctcaattgggcgagttggtgagcatcaccagcacacagagatgctaaaacaagaacaaggatggtatgattaaacctgtggaggactggccacggtgagctcgaccctgcggtgtttcagaacataattgggggaaactagaaattggagctcacggttgcaagattgggagcgatactagatggtgtggtgcgtgatgaggttgcggagctaacggcgggctcaatttatagattccaggggcggtggcgcttgaattgatgatggcgcggtggcggccggagagggaaaaggctactggtgcaagtgaacttgtggcaaccgtcgtggcgacaactccggtgatcggcggg

SEQ ID NO: 96463 - DNA, 335 bp, Zea Mays
aaactctgaggcgctatcacgataagaccatgcgacatcgatccttcgcagtaggagatctcgtcctctgccgaattctaacgggggagagacggcacaagttgtcacctctatgggaaggaccattcatagtagcagaagtcactcggtcgggatcatatcgcctcactcagatggacggcacggaaattgggaactcatggaacatagaacacctcaggaagttttacccctagctgtatttcaaaagctattgggatggcaatgtactctgtaaactaggaaatatatcatcaatagaaaggcttcaacagcgctcaaattattcattgtcg

SEQ ID NO: 96464 - DNA, 998 bp, Zea Mays
aagagatcaggtttggttggctgcatatagaataaaaaataaaataaagtaaaatttatgtaacaagtgtagtctagttttgtcgataaaaatgtcatgaccacggtgatggaatcagtttattagtttgatatatataaattaagagatataacataaaatctaaaaaaacacatctcaattctcgtgcccacgtcagtccaacttgatttgggagggaagggaagggaaggtcatctcccacgtgcctgttgggcctagccgagaggtgctttgggaaccaattcggtttggccacgaagactgtccaagcaaccaaacaagcgttgactgcatctaccggacctgacctcaagttgacgcagccggtaccaatcattccatatatatccctactcccaaactcactgtcattgcactcacaggattatgtatacttttttacagttcaacacaatacatctaaatgttaatccatcacacacaacagcactttacatcactttcgacggtcagacatattttcgatgcccagagttaggccaccgaaaataaaaattaatttttaagagttttaagagaagttcagcattagaaaataagaaggatgcgttcttggtggtagggcttgaagtcccaagtggtcgacggtaaaaaaaactgttgtagaaaagaataaagccaatcacttacaatcacaatagtctgcctaagaggagacatttcctatgttcaataaaggtgggtaccgactgaatggaatgcaccattgttttgttttcctttttttaaacaagcactctttctttctttcttggtggcggaaaccgaagttttctatcattctgatagtgcctaccatataggatacaacatcctttcaaatgtggcattggatccaacgccactgtttatgtctacgtacacatcagtctaacattcagtgatacatacaaggccacagcatattgacgatttggcatatagtactgaaatac

SEQ ID NO: 96465 - DNA, 497 bp, Zea Mays
gtcaacattgccaattatggtgagtatggtgtagattcaaactggtacacagatactggcgcctcggatcatgtcataggagagatggacaagatggtgatccgtgaccgctatcatggtggtgatcaggtccacacggcaaatggagcaggtatggacattaaacacattggtcatgtcatccgtcatgcgcctggaagaaaaattcatcttaaaaatgtgctacacgttcctagtgctgctaaaaaccttgtatctgttcataaattagctgcggataacaatgcttaccttgagtttcatccaaatttctttttttattaaggatcgcatcacaaagaaaatcctgctggaaggaacgtgtagaggaggtctctaccctatgcctgtggctgctttcaaaaataaacaagcttttgttgcatccagtagtttgccgtccctagaaatgtggcacagtcgcctaggccatccttcttttgatgtcgttcagcaag

SEQ ID NO: 96466 - DNA, 1060 bp, Zea Mays
aacaaagttagaaagggattatagggcaacaattttcctgctggccgacgatcaagttgttacgcaaaaattgaagaacatagcattgtaaattgctttgtcagaacgactgatgggggggtgaccatggtaccgtacaaaaaaatcttcagatacatcacccttcgccactggtgacccccgttccatgattggtgccgatcgccacgattcgtgcttcgggtttgtggattgagctcgacggtgaaaagatcgcatcatggatgagtttggactactgtggcctcgctgttccccgaccacttgcgccggcgatgtggccttacggccatcaccagagtccacgtcgttcaccgcaattgcaccacatctcaggcctttaaccacgtcgcaatagctcgggtaatcgatatcgagtgatcgccggagagctgccacggtagatgccaccaatcgtttgcaccagtgaccccctctttctccggctgccaccgtgcgagaccaaattcattggccaccgcttaaaggccctataaattgatggcccggtctgttgcaccatgttatcacaaagctagagcacccatccccaccttcaattagccaccatagacagagaatttcattcttcccccaaataatctatctgcgccaccgtgagatgtcgcgttgtgaccagccgcctctaggtctgccctcgctcttcttgtccgtgttttagcacccacacatgcttgcgatcgtcgtctgctcgacccattgagcttaacctcacttaatcaaccggaacatcttgatctgtgtatggtgttcgccatcaccgtggtcaggctaagccagggccgtaataaccccgtttaaagcttgttctagacttattttgggtcagtgatgcttgcccactagttaatttgggcagccaccgttgttcttggccggtccgggcaacggggtggtcggcggtgagcgcgccatggccaaggggtcgagttagagaagaaacagaagtcgagggccctatgggcaaatgtcagcgagacagaggaacagtggggtgggc

SEQ ID NO: 96467 - DNA, 550 bp, Zea Mays
cctcctctgcagcggcgcgatccggcgcttcaggagatcgccgaccacgtgcattgatgtcaggccgcccgtgtccaagacctttatcctgtccaatacgggcaggaactctggcaagagggatgacttggtcctccattgcttgccctcgagggctggcccattgctcggcaggatgaggcggtcgttggcctcggtgctagcaatcacccagtcgctgcgtcagttttcccacctcataccaccaaaggtggtgatgtagactatggccagatctggcctcgtatgaaagtagtaggcaccgatgtggtccctagccttcccggacctgaccagcacgaagaagtagcggaagagggaagtgcagggggccacacctacgaacatatcgcagaggtggacgaagattgctgcctggagaatggagtggggcgtgaggtgtggaagctaaagcctgaactcctccagtagtagcaggaagaagggcaaaatcggcagcgccaacccgcaagagatgtaggaggtgaaaacaacacaaactccccggcgg

SEQ ID NO: 96468 - DNA, 351 bp, Zea Mays
gttcttgctgcacctgctgtcatgagcagaccttcttcttctgctactcctgctgctaaggcttcctgcaaaaatgctcctgcatagtgatttgttcggatgaaaaacacttttcattgagttagcaattttagcgaaacagtgtatcatggatttcatgtgcatgtaattgtgctacacttgaactgattgttctgttagcagggcgctgaagccaccctcaggtatgtgagcgggttgcttttctttgaggtgttcctgatttaagttgattattttgctagtagggtatggcaatcacccctatatcgcatcgacttaaggcatttccgacttaagccaattgttcct

SEQ ID NO: 96469 - DNA, 965 bp, Zea Mays
cgccgtcgatcaccacgcggcgtggactggcccagaccggcgatggctgccctaaccagctatggggtgagcattaccgattccaggcgacctatgaacgagcttcactttggcttgcatacgcagagaatgttctacccacgcacacggcggaacccgcgttcccaatcaatcatgcccgaattggtcaaatgggtgtcacgataagcttcctgggtatgcagagctactaaaacaatacacgaagaacacagaaccataccggaatggtccaaccatggagcacgaagaactagcggttgccggtgactgagaaaggggaaaacgtcgcggtgacgaactcgagtgaaattgggagatgaggttaggtctatatggtcgcaaagtgctacgattcaccgtgcacactcaatttggagagaggtggagaaggcagtgcgaattttggtttttcccaagcttgtaggtgaggctgtgagtgcctcgccgtggtccatgctgctattcaaagccacgacggtccggctaatgatcagcggccacggatagcattgttagcgcatgtttaccacgtagaggagaggtacagtgagggaagagcaaggtatggatgacaccgcggcggaagtgaccgagccacggtgaccgccggtgagataactccggccacatatggctgggttcgcggaattgtgccacgtccaaagttatccttctccccgattgattcccccgctgattcatcgaacccatctgattcaatagtgcctagatttttgtttcagatatttcagtgtattggatcttcagtgtttatttgaaccggctctcttcaacccacttattctcttgattcttgctaagaacagggcaaacttcattaataaagtttgttctcgaatcaaccgtcttcaaacctactacaggatactcgggtcaaaactgagtgaattcaaagatatgtc

SEQ ID NO: 96470 - DNA, 698 bp, Zea Mays
caccattctcacttttttagaagtcaaatattttaaatcttaacagaacatatataaaaacataataagtttatctagaatacaaatattgctaatatttttttcacaagcttagaattctttaatacaagagttaagttttatctagtagaaaaatagctaaattaatctagtgtattcaaacatctgtactcctttaaatcacatagatatgttttgtctcccatgtcttgcctaacaaccagataagatgtgccatatctcttacatgcgcaaccaaccatgcaaccatcatgagtgcttcctcctccttcttgttgttatcgtcgtatattgaccccccaacttcccatcttttcccatctccatctccctcacccagttgtatcaccatagaacattgacctccctccattggcatactttcgaaccgctgttgtgactctctgcctccatgcacccatgtaggcagcggtgcaagaacaaccgagggagaggagaaaggaggtgtcgccgctgacgatgtgtggttaaacagttgagggagaggagcatgcatttcagatcccgagtttagttttgtattggatattaataaattatttgtaacatattaaggttgacgataatatgtattgctcgttttgatataatcgttgtacactaatattttgtcaaattatgtgcttcaagggaag

SEQ ID NO: 96471 - DNA, 687 bp, Zea Mays
tagcatcaacggatcatatgtgacactcattcccaaaaatggctctcctgattctgttggtgactacagacccatctccctccttaacacgagcatcaaagttttaactaaaatcttagccaatcgcctgcagctggtgatcacaaagctcgttcatcggaatcaatatggttttatcaaggatagatcgatccaggattgcttagcttgggcttttgaatatatttcactgtgtcacaaatccagaaaagaaatggtcattctaaagcttgactttgagaaggcatttgataaactggagcatgctgctatcctagagatcttgagacacaaggggttcggtaataaatggatccactggatctctatgattcttggctccggatcttctgaggttcttttgaatggagtccctgggaaaagatttcactatcgactcggcgtcaggcagggcgaccccctgtccccgcttatttttgttcttgcggctgatcttttacagtctattgtcaacaaggcctgcgaaggtggcattcttcgtctgccattaccaaacaattgtggcctggatttctctatcatacattatgctgatgatactattctcataatggaagcctgccctagacaacttttcttcttaaaagcaatgctcaactctttcgctgactccactgggctccatgt

SEQ ID NO: 96472 - DNA, 501 bp, Zea Mays
ccctgtgggtttctttacggcaattggtgtccagaaacatatttttaacattcccaatcatcaacaatggagttgctttgatgtgcgcttatgggtttcgaattacagtatagttttggggatttctgcatgctgaccaaagaggctgagagatcacacatatagcagttgttgattctcagtggttaattagtgtgctctccagatctctaaggatgtatcattggcattctataagttgtcaaaaaaatgcatctgtttatttcaggtagatcacacatataacagttgttgattctcagcagttgttgattctcagtggatacatatgacaacaaaattgttatggaaattgttatcgtttgactcatgtttttattactttctcacctgaacaatataggtgcaatagttctgtttaaatgtgggttaatttaaattgcgcttgtgtcttttgataactgcacaacgatacaccttagtttttagctgcagttttgc

SEQ ID NO: 96473 - DNA, 439 bp, Zea Mays
tttgttggtggtccctaaaatgaaggcgctgatgacacctgtgtcatcaaggttggtcattcggttaaattatcgtgaaaagcatcggatgtgatccctcagagtctcgtccaatttgtgtcaacaattcttgagattccatgggttgcctgggcatacgtacgtgctctagaaatttctaatgaaggcttcctcgaggtcacccagttttggatgcttcgaggactaatgttttcgagtcatgaccatgccgaattcaccagatacaggtggacgttctagattatgaagtcatcacaatttgcccctcgtgccttacatgccagccggtagtgtcccagccaaaggtggggatcttattccccggaatacctcgtgatgtttattgggggcctgtagcgctgcagcacgggtgcccgaaggatgcggtagctaaaag

SEQ ID NO: 96474 - DNA, 596 bp, Zea Mays
tcaccctcagaagcaccctcgggggctgggtcaccctcaacagcgccctcgggggctgaagtatcctcaatcgtacccacaggaatcaggtaacccttgcatgtaacatcaggaaccaaggtgtccacatggattaggccgccctcaaaggttgaagaagtatgggaaactgttcgggttatttcttgcccgacaaattttctagctaagggaatgtcatctggcacctctgcacggatgccaggactcccagtttcaggaagttataataaaagatcttctgggataatctcctccagtgcatgatcaatggcagacatcgctaacctctgaagattaaccagccctgacggagcctgaattttggacatcgttgttggtcttgctacggcgactcttgcgaactaaagggggaatttcctcttcatcctcttcatcctcgtcacacacacatccaccgattctagtgccaccatagctctcaatatcatcttcgaggttggcactcgccgggttagcaccgaggactagggcagcagagtcagcccctagctccaattcagacaaatgctgaagtcttatctttcttttcttcc

SEQ ID NO: 96475 - DNA, 278 bp, Zea Mays
taaccttggcaatagaatatcccttgctagaacctggtgtttgctgcctgttctgaactggtgtagtagccatcctctgtgggcagacatttgcataatgaccagtcttcccacacttgaaacaagtagtgcctggactctgtcctgaaaacttcgtcggggtgccagtaggggtagcctgtcgagggggtgtcctcagtggtgactgctgaactgggcgtggtcctccgggtcgagtcggtgtaccctgcggtgaactatagcgaggacgaacactg

SEQ ID NO: 96476 - DNA, 390 bp, Zea Mays
atgtcgactccgagaaccatcttgtgttctttgacgatgttgggatgctgaagatagttgcaaaaacttgtacgtgtcattccccaaaggtaactgaaaggatcacgatgcccaagaggggggtgaattgggcttttcaaaaaaatcaacactaattaaaacctaagcaagagcccaacttcaccccaacaactagcacttaatagaataatactagaaatacaatagtgctatgacaatacttcaaatacttgctaaacaaatacacaatgtaaaatgcttgaattaagtgcggaatgtaaagcaaggtttaaaaaactcctcaattttttctcgaggtatcgaagagtcggcactctccactagtcctcgctggagcacccgctcaag

SEQ ID NO: 96477 - DNA, 482 bp, Zea Mays
aggaggaagaagctctagaggaaggttcagctcccaacctagaatgttgttctgcttattttgcggggaggataaaggacatacaacaaggacatgccaagtcatgatctagaagcaaaaagaaatagctgaagtcgaagcgcggcagaatcaaccgaagcaggtcctgcataccgctttgtgctattctctgtatattccagagtatgtgcacaaccagcagcccacgacatcagttgcttcaacaagtcattctcaagctgcacgggctccgctgccaccaccagcacctatggcaacaaccttgacccacaatcagcaactagaagggcaccgtcaggcacagcaacagcgcgacgcacgtgaataatctaaagctcgcacagtcaacaacattatgctcgagtcgaggcacatttactaaagttgcacaagggcttgattagaaaattctcatacttaatgtactctttacttttctg

SEQ ID NO: 96478 - DNA, 536 bp, Zea Mays
gtcgagaagtcgtttcttgatggcagtgaagatcttgtcgttggcgcactcgacgatgtcgttggattgcgggtggtagaccgaggcgaagacaggcttggtgccgatggaggaacagaaatccctgaagtcctggctatcaaactgtttgctgttgtcgactgtgagttcggacgggactccgaatcggcagacaatgttttgccagaagaacttttgggtggtcttcgacgttattgttgatactactctggcctcgatccacttggtgaagtactcaatggcaatgaaggtgaatttgaggttcccttaggccgtaggcagtggtccgacaatgtccagcccccagcgttgaagtggccatgtgtgggcgatcagcttgatgaactgcgaggggttgcttgagcgggggaaaaacttctggcatgcttcgcaagacctcatgactcgattcacagtacagattattgcgagccagtgaaatccttgacagatcaccttggcggcgagggccctgggtcctgagtgggagccgc

SEQ ID NO: 96479 - DNA, 587 bp, Zea Mays
gtttacttaagatacacatatcgctatagaagtcaatttgacgagccgaatgatgattggcttgaggctgttgatgccaccagcgatgagttgttgggagcttattcaaaggcagaggatgaagccatgacaattgccttcggcgctcgcggcaagaggaggttgaatagagttttctatgtgatcaaatttttttatcctgattactgctttcctacccgaaaacaagggttaaagagaaaagtggcaacttcatcctcttccgccacatctaagccgaaaagagctaaggttttgactcgcaggccgaagccacgtcctttagagaggatagctgcagtgcttgatacagaaaagatggagattactgaacatgccaaagctatccccttagctccggagacaattcctgctgcgacaatcgaagctagtatcggtcaggcagaagagcatccaaagctgctgagtcccccaaccgtaactgagttaccaaagctaacatttgctgcaaccataacaatgcctcctaagaaaaggaggatggccagtgttttggatgccgttttgaaatccacgaagatgccaac

SEQ ID NO: 96480 - DNA, 369 bp, Zea Mays
tcaacacaaacctggagagtggagacagatactcgacaggagaccgtgtcgatgcatgcgtagttggattcatgcttggtttgactcctgatgtctcgtgcttgatgtgtttttgttccgactcgcttaattatggcgcgctgctgcaacatttgacgcacgggttctcttccttactgttcatcttctccaaccaccgtatgctcttcttctttgaggaaccctgccagtttgccctcacctccgacctctaccgccatccctatccggcggttcacctgccgccggctgtctacccctgcccacctctaaatctagtcggagaagaaaagattgccatctcaccgcctccgccaccaacaccgtcca

SEQ ID NO: 96481 - DNA, 645 bp, Zea Mays
aagatgacgtatgagcagatgcatgcttgtccgaagggctgcgtgctatttaggaaagaatacacggaggcaaaatactgtccaaagtgtaaatcgtctaggttcatggaggtagactctggtgatggacagaagaggcagctcgacatcccattgacaatcctatgacatcttccgttcataccgaggatccagcgtttatacatgatcgaggaatccgcaaaacagatgacatggcacaaaaatggaaaatgatacaatcctgacaagatggtgcatgcatccgatggtgaagcatggaaacactttgataccattcaccatgagaaagccgaagaggctcgtaatgtatgtgttgcgctggccacagatgggttcaatccctatggaatgagcgctgccccgtacacatgttggcctgtgtttgttatcccaatcaatctccctccggtgtgtgctttcaaaggcagaatatattcgtgtcgttgataattcccggacacccggggaataaaatgggcgtgtacatggagcctttgatcgatgaattggtacgtgcttgggaggaaggggcatggacgtatgaccgagctacgaagacaaacttcaaaatgcatgtttggtactagtactccatgcatgact

SEQ ID NO: 96482 - DNA, 516 bp, Zea Mays
cgcaacatgtcttcgagtatctggtttacatattgattctttggcaagtgtcgcattcagatacatacttatcattttccctcttcattctggtccaccaatacaaagatctgagatcatgatacatattgttactgccggggtgcatggagaatttggaaagatgagcttcatccaatattttcttcctgagttcgggattcttaggaacaaccaatcgggcttcaaaccatagaactcccttgctgtcctgacgaaagcatttgtacttatccaccttttgttcgagcatctctttaatgacttgaacacccttgtcaccaatctgtgccatgattatctgctcatgtagagtgggttccactgagatataattcaaggtacccgaggaaacaacttccatgttcaacttgcacaactcgtcacacagagtagcgatcttagagtccatagttacatagttgcactgggtcattcgacttaaggcatctgccacgacattggccttgcccggat

SEQ ID NO: 96483 - DNA, 420 bp, Zea Mays
cgaaaactcatgacaaatgtgcgaagaccatatccgagcaaaagtcgcctaagggtgtagtcagaaacacacgacaaatgtgtgaagacagtctccgagcaaaagtcgcctaagggtgtagcctacgtgaagacagtctttgagaaaaagtcacctaagggtgcagcctactcgaagacagactccatgcaaaagtcgcctaagggcacagccgaatcaacaagacaaaaacacagacacaagatgcgaagattgtacccagacaatacctctgcatccttcaccgatcgccaaaggggcgagggtagcatttgaaatgctaaattgtcgatcgatgacatgcgaaggaaaacaaacaaaaactcattacaatgccatcccacgaacagtacaacacgcgcaagaagagcgaacataact

SEQ ID NO: 96484 - DNA, 516 bp, Zea Mays
ttactatatcgatggcagccggtgggagaccaccagctctttggtccaatatgggtgagtttgtttgtatgttggtatgttgttttcctccccattggtttgggttttgcgatacgttaatacatgccctatgaggctcataggactggccattcctttctggccttctgggggccggaaagtactcacacccacgggtttggtagattatattatagtgctggcgtgtcgtatggtgagatggggagtctagctgggacggatacggagttggatatccatcctcctcaaaaaactctgtgccggaccgtccggttaaatacgcggactgtccgaccatgtggccggaccgtccgacattatattcggactgtctggcgccatacgcagacggtctgaatgggttatctagggtttgcacggcatgtggcggcttggttgcaggtctcggtaattcgcttctaaaaatgggatcgaccgtcgctggcccggacggtccgcgctcacgtgcggacg

SEQ ID NO: 96485 - DNA, 480 bp, Zea Mays
gtcattggtatgtgctcatttctgctctataatttctctgccctgtcactctaggactctgtttctgctttgatcatggccaccaactgccatgattgaatggttcactttgtatgtgttttgaaaccagtgtaacatttggctcatgtttccattgtttcttaccggtcatacggttcttgttttcgaaattatagttctgagatatatgacacgagaagtcactctatcacatttatctagccactgaggatagtgttaagtgataagtcaaaccctaaactcagaggtaaaccttaccatggaacacgtcatttgtttttcagtttctaattactattggaatgctcttcagtgttttttttaaaaaatacccactgttgtgctaaccatgaggcttcaagattttttaaagaaatcttttactatgtacatagttgtcagaaatcttggaagcactactatataaacattttaata

SEQ ID NO: 96486 - DNA, 486 bp, Zea Mays
gctgagtcgagaatcttcactggcttttctcggtattggagatccttttgaatctgaattgcctctgcctcgatgtggttttctggtacttgcagacatttgcggagctaggacacatggaacacattgtgaatgtctgacatggattctggtagctcaaggcggtatgctacgggtcccactcggctaatgacggggtaggggccgacgaaacgtggtgctagttttcctttcatttggaaccttttgacaccacgcatgggggagaccttgagataaacgaaatctccttcctcaaatctgagttctcgtcgtctgttgtctgcgtaacttttctgtcgactctgagcttcaagtaacctcttgtggatcaaggcaactttctcttcggcttctttaacaaagtcgggtccttcaattgtcctttcccctacattggaccacattaggggggtctggcatcttcttccatacagtgcttcgaac

SEQ ID NO: 96487 - DNA, 420 bp, Zea Mays
acactgtacagaaggggtgcgacaggagtcctcatgaagtgcatttcctcggttactgggaaacaactattagatgaggtccatgccagacagtgtggaatacatgcaacatccagaactctggttgggaaagtcttcaggtctggtttctattggccaacaacaaagagtgatgcagccgagttagtctagagatgtgaagcttgccaattcttgtcaaagcaacaacacttactggcacagcagctgcagaccatacccgtaacatggccattcgcgtgttggggactggacatgattggacccttcaagaaagctcagggaggctatactcacgtgttggtcgccattgacaaattcaccaaatggatagagtacaagcctattgcttctttaacctcagccaaggcagtggagttc

SEQ ID NO: 96488 - DNA, 553 bp, Zea Mays
gttgtgcaagctgaacctggaagttgtttcttcaggtgatttaatttatatctcggtggagcccaccttacaagagcaaatagtccgggcacagattgaagacaagggtgttcgggttatcaaagaaatgatcaagcaaagggcagagaaatataagtgctttcgtcaggacaacaagggaattctatggtttggagatcgattggttgttcccaaggaccctgagctcagaaagaagatattggatgaagctcacctttcaaaattctccatgcaccctggcagcaacaagatgtaccatgatctcagatccttatactagtggaccagaatgaagagggaaattgccaagtacatatccgagtgtgacacctgccagaggatcaaagccagtcatttgaaggcagcaggccctttgcaaccccttcccataccatcttggaaatgggaggacatttgcatggactttatcgtgggattgccaatacctccaggcaccatgattcaatttgggttattgtggacagattgaccaagaccgctcatttcttgc

SEQ ID NO: 96489 - DNA, 394 bp, Zea Mays
gaaaaagaagaggctaaatagagttttcgacgctattgggtttatgtaccctgattaccgctacccgctaaaagggcaaaagataaaaagcacaacttctggaaaaggtgatgcttcagttgctctaagtgaggccgcgccaaaaaggaagagggtgaaggtccttactcaccgaccgcgcttcatcgaacaggccttagtgcccgaatttggtggtgagacctctactgctactgaagtcaaaggacctgctcttactcagaagaatgaagagctggccattatgccgaaggctgataatattaaagaaatagaggccgcgaaaacaaggataatagaagttccaagccctccggtaggagtgatagtgctgaaggcacaaaaagacctcacg

SEQ ID NO: 96490 - DNA, 391 bp, Zea Mays
tatgcgtgtagatttacttcctgtgtgcatcggtaattcggtttcctttccacttgtgagattcgttggttcaaacttgtgcttgatgttttttaaaaaaaatagtactagtttggtagtttgctagcttagtagcttttgtgtggattgctataatgcagggcttgttctgattgcttaaagtaggtttgtgaatgcgtggctagacctgtgactaaattttttctaccaatatagttctggaaattagttggtaaatatgataattgcatgtagatttgtaatttgaagtactattatacgatttcaagttattaaatttaaaccttcctttgtaatagtgcatacatatgctacacccacctccgccagcatttagcatcattgtatt

SEQ ID NO: 96491 - DNA, 836 bp, Zea Mays
gctttgtatactcagactattgttatccctcgcgaaagcaggaaaagaaaagaaaagttgctgcttcggccatctctgctacgtcgaagggtaaaaagattaaagttttgacacaccggcccaggtacattaaaacggccagagtgccgaagcttgctgaagggccttcttctgtgttgagccagagttccccgctcctgctgaagccacagcgggatcagccaaagagctaattctgaagacagtagcggagcagacagaagccaaaatagccgatgtgccaaagtgtcctcccgaagctaaggcataaacggtcgaagagccataattgtggaaatcggtagaggtatcaaaaattcctgtagtaactccaaagaggaggagaatggccagcgtactagacgttgtcatggagtcgacgagggtaccaactcctgcctctacagaagtgcccagcatgagtgagaaaaatatgaaggagaccgctgaagctgttacaactcgtgttgaagctgaagttgggcccttagttcccgccgaaacatggcctgctgaaactgttggaaaggatactgaacaaggaccttcggatgccgctctgatcttggaaaaagaaggcgcatccaagaaggttaaatctcctacccccgaagcatctactaaagagctagactttatcatacgacatgcttcgggtaaacaattgtcggaagagcagattgtcgaagctaagcactatgctagggatttaaagtacccaaaaggagccttggtgtataatggcactgatgaagactactttctgtactgccttccggacaacaaggagatatctg

SEQ ID NO: 96492 - DNA, 336 bp, Zea Mays
acagagaggactaaccaagtgctagaggatatgttaagagcttgtgctcttaaacatggtggaagttgggataagagcttaccatatgcggagttctcttataataatagttaccaagccagtttgaaaatgtcaccgtttgaggctctatatggcagaaaatgcatgactcctctatattgggatgagactggagaaagatagttctttgggcctgaacttattcaagaggtagaagagcaagtgcgaatgataagggagaatttgagaattgcacaatcaagacagaagagctatgctgatacccggagaagactactggagtttaaggagggt

SEQ ID NO: 96493 - DNA, 423 bp, Zea Mays
ggggcataggaggcggaggcggaggaggaaccccaaaatcatcatcatcatcatcaactgctgcatcctgagcttcgaactgacgaagagcagcatcctcggcctgagagtcaaaaactggagcagaagctggcacaggagcctcaggcgcaggacggtaggatccaaaaacaaggcgtgaggcctcaagtgtgccctaaaactatggaggccgaatcagctgcgcaaagatgtggcacaagtagtgagcatatggcaactgtcgacgagcacgaatgccatccaaaacggtgtcctcgatctcacaaataaggaaatccacgacgtcaaactcagagtgagagaccagggcaccaaggagccagagctgaatatgtgtggtagcctccctgtatcccatcctcggcagaagagtccgtctga

SEQ ID NO: 96494 - DNA, 474 bp, Zea Mays
tgtggcttgatcattaccttggatgttaccttgtatggaggcatggttgaggcttttggcagaggtattgattttcttcttttgttccttcctcttgatattcctcatatccttgacattttcctcgagggattcagtgcatgctacggttgttctcgtctcaagcttcttcaccatgtcatcacggttatcttgagaaggttgagcagtgcacttccctttcaattatgtcaagctcgctcttagcttcttattttcttccttgagctcttgatatacaatatcatctattcctaggaattctagctcaaagaaagattttcttgctaacgagcaacaagcattagcacatggtaatatagtttcaatttgaacacatgtgcataactgaggttggtgagattttaaatttgttattacaacctcatgagcaacatctaacatgatatgatcatccataagatttttatgaga

SEQ ID NO: 96495 - DNA, 367 bp, Zea Mays
ggaaaatcgcctccattctgggaacgcaggaacaaccttgtcccttccttcacaagtagggtaatgtgttccttgatcccagttactcagccgcatcggcccgggaaaactggttatgggcaagggtggggaacaagggatgtagtttgagatgcgcatttagggttcaaactaaattcagaatatctgttgtgatgtgtttacactcgcgtcatattacaattttatcaacttgagagagctttccgtggatctgatccatgtaaaacgttcaattggttgccttatctgcttgctttagtgggtaaatcttgcccacagtggggattctataatgggatgagtcagattgcaagtgccaagtggg

SEQ ID NO: 96496 - DNA, 291 bp, Zea Mays
tctccttgcttttcttgattcttttgcatctcccttttgcctttagatcattaggtggatgtatgctaacttcattaggaatctttgtaccaacaaaagactcgaattcatcctgctttgaagtggcaccggaaggaatcatggttagcagaggtgcttccaaattcgataaaccagaatttatgaaatctattccttcgtttgagtgcttggacttctggataagatcttcaaacttgttgcgtgcatctgaaattttctttctcattgctacctcttgtggatcattag

SEQ ID NO: 96497 - DNA, 976 bp, Zea Mays
cagccctcttatagccaacctgtcaactgtccagcataattcaacgagccacagaaaaaatttgcatttccccggagcccaagacttccaaatccgctcagtcggcccaaaatcaactgctccaaggagaagaactttgtaggcgaactagaagagtagtcccccaaagcattgaacttccaaatatgcttatccggaataccaggttgaagaactagaccttccaacaggtcacaaagatctagaacctgcgcaaacgccctaactgaaagcgcaccccttatgtcagccaccaaatttagatcagttagagcatctttcaccaaccttttggaagcaatacgcctaggaacatgctcaagaacctcaggtgccacctctccgatgcatctaccgttcagccaccgatccttccaaaaaaggataacatttccatcacccaaatcagacacaactgcaatattgatcaaagcctgcactgctccacaagcctgaacagggaggaccgaccatggcttagagtggccagttttttggagccagggccacctagcccgaagagccacgctcaacagccgcagatcagtgatccctagcccacccaagtctttaggcctagtaaccttgccccacgccaccaaacagtgacctccattggcttgttttcttcctttccaaaggaagcctcttcttatcttgtcaatatctttaacagaccagctagggaggtccaaagccatggcagcatagatcattttcgctgtaagaacaaactaaacatacacaggtcgacctgcttttgtcataaggtcggtcttccaacccggaagcacactagtcgctttgtccaccaatgcctgcaactgaacctttgaaagctttcccaaggacagaggtaaaccaagataatgacaagggaaatctgaaaagggacatgagagacaatctcggacccgcaccaaatcatcttcggtac

SEQ ID NO: 96498 - DNA, 358 bp, Zea Mays
ttgcagttgattacttggcacaaataaagatgaagcgccacttggaaatggaagttgaagagggaaggtcatcctacattttctaggagaacctagcaagcagcaatgcattggcttgatacgtacgactgtatatttaaagcacaaccactaccattttgatttttagaatgtataatttatctagtgtaattattagaacctgtatggtgcacgtgtgttcacaagcctagatgtgagctgacatcttccgctgtgatgtcaccaagtaatgtatcaccctgaaatcatccgattaagggagcctcgtgatgaggatgcaccggcgagacttagcttttcatggatcgcagttgat

SEQ ID NO: 96499 - DNA, 274 bp, Zea Mays
cgaaaccaaacctcaataaaacaaattgtgtgtctattgtattctttactttgtcttgtgatttgttcttgtctctctccctctattagctctcttaattagactttgatttatatcctagagttgctcccaaagtaatctctacattcataagagcaacaagtccaagagtacttccctagtattctcatctactttgtgttgatcatattgagctaacctctaatttgggatcaagtttttgttaagtgttaaatattcaggtgttgcctat

SEQ ID NO: 96500 - DNA, 1007 bp, Zea Mays
gcaggtcaaggaacttaagaaggagaaggcatccctccaagagtgtctcgatatagcagaaggcgaggaggccaacacccgtgaagcctaccgaaccctgaagatggattatgataataagctgaagaagctcgcccccacgaagaaaatccaaaagaagaccaagaaccaaggaggccaagctgagcggaggaagaaggcccctccagcaccaactcctgccaggatagagaatttgtccgacatcgaggatatgtccctagctagccttgatgacattctcaaggaatttggggacactttagaaaaagagttcggtggtacctcaaagaacgctcgcgtgtagtacgacttgtagtagtcgtatgcttgcaatgtattagtgtaatgaataaaataacttggctgaaaacaattggcatgtgcataatagtgactctctccccctggcagatggcttcggataaaaccacgcctaccgcctccgggattggagcaaggtttcccctgagagctgaaagagaagccggtagagaggaaagtgagacccacctccccgcacctccagaactacccttagatttagcccaagttctagccaaccaaacccaactcatcgaggtcctcactcgaagtctggaaaatcaatgcccgaatggtgggagaccacaagacaggatgggggatttcctgaggctcaagcctcccacgtttgccggatctagcaatcccctcgatgctgacgattggctgtgcatgattaaaagaaagctggaagccatcagatgcctggaaaatcagcgtgttcaactgggtgctcatcaactttccgggatggccttagcctggtgggataccttcaatgtcaccatcagagatgctacctgggcggagtttgaaacggcttcccgagagcaccatgtgccccaagggatcattcagctcaaggaagatgaattccgggaactgactgaagacaaaagatctgtcagtgagtacgtgcacaa

SEQ ID NO: 96501 - DNA, 404 bp, Zea Mays
tttgggggctttggaaaagatcttagagatttatccttgttaggggctgcaattgtttgttgggcgatttggctaagcagaaatggcataatttttgaaaagaaaatcaatcattctcctttgcatgttatccatactatctcccattggcttcgcacgtgggctgtgctgcagaagtcggattctcgccttttatggtggagtctacgcaacgtttgatgcaagtggccaaggtcttttttcccaggaacatgggtggtggtctagtctcggattgatagtcactagagtgtgcgtaagtgtgtgtgtgtgatggttcttctaaaagctatgtgctttcattagcagaggctatgagaggtttcaaggacttgtatcctctcgatgtaatgttcttgaaatta

SEQ ID NO: 96502 - DNA, 705 bp, Zea Mays
cgattggatagcaccaacgtccctacatgggcccccccattcgtgcctcataggggagattaagaatcaaatgttgtattggattgaagaagacgggtggaaatatcttctcaagcttacacagtaacacgggtgccaatctttccaagtctgcaaccacggtctgagataactcttttgcacaaagctgacggaagaaataactcaactctgaaagcgctagccagacatgctcagggacatagcctcgaaccatcgcatgaagaatccgttcaatccatatgtggaagtcatgactcttcatccctaagactcgcatagtagataagttcaccccctactcaggttagctgcatacccatcagggaacatcaacatcttgatccactgaagtacttccttcctctgtgccctgcttaggacgaaatcagccttaggccttctccacgtctttcccccacttggcggcttcatctctaggtgtggtctatcacataatgctgtcagatccactcttgccttcacgttatcctttgaattatcaggaatgtccataattattgcccatagtgcctcgacaacattcttttcagtgtgcatcacgtcaatgttgtgtggaaggagcaggtcgtcataataggggagccgagtcaaggcagacttatgtgtccacatatgctgctcaccatatcccataaaaccacc

SEQ ID NO: 96503 - DNA, 724 bp, Zea Mays
gaagtgggccaccttggtgagacgatcgattattacccagatagaatcattccctttttgcgttcggggcagtccggttacgaaatccatgcctatttcttcccacttccattcaggcactgggaggggttgcagtaggcctgcaggcttctggtgttcggcctttgttcgctgacaggtgtcacacaaggccacatactgtggtatctccttcttcatccctttccaccagtatctggctttgaggtccaggtacatcttggtggttcctgggtggatggagtaagctgagttgtgggcttcattgagcaggacttcccgtgcctctcccattggtacacacagacggttcttgaaccaaagaactccttgttcatctgtcctaagatccggaagttgctccttgcgagctctttccataagtctggctgtctctgtgtccaggcgttgagccttgcatatgagatcttctagcattggcttgacttccaggctaccgttgtcccccagacatgcatttagctgagctgattcctccttccaatcttctaaaaagttgatcccctttatcccgaaaggttttcggctgagggcgtctgctaccacattggccttcccggggtggtaatggatctcgaggtcatagtccttgatcaattcaagccatcttctttgacggaggttgaggtctggctgagtgaagatgtacctcagactcttgtga

SEQ ID NO: 96504 - DNA, 493 bp, Zea Mays
cacaaatccggtaatttccgacaaaaaccggtaaccgaaggaaacggtcggtaaaacaccacgccgatttcgataccgattccaaaagaaaattccgaaaaccgattctgttttcgaaaaataccgttaccgatgaattcaatcgaaaaatttcgaaatcggtttttggaataccgaaaaattccgaaaccgttttcatccctaaccaaggtgtgggtatcccctacaacttggtgtagttattaataaagtcagttatttagttgggtaatccatttgtttccactctcctctttatctgagaagctaacagtgaagttggtcaattgttcaattctatgaagatcttctatacatctcttcttatgctgaaagactgcagagtcagatttgatatatgtgtgtgatttctacagatgtctgagaacaggcgcagaggtgcgaggcgtgctcagcctgagcagcaggcaccccaagaggaagcagccccgca

SEQ ID NO: 96505 - DNA, 543 bp, Zea Mays
gttgtggtacgtggataacggctggcggtaaaagatctcgcgcgggggatgagcttgggcagtgttactcctcagttcgccgtacccacatgcgcagcaatgtggccagatggtcatcgccgtggtggtcaccgttcatcacgattgtgccacgctgtgaccttttcaccacgtagctatgaccgtggcaagcctggaattaccatccttgaaccgttgtatcagtgagctccacgacagatagctccggtgactcattctctcatcactttgggctcttctccattcaaattcgtcgtactagcaatcatccgctataaattgacgccccggcctgctccgatagcttgttatgaactcagagcaccgctcctcgcccccgattaccaccgtagcgcccaaatttggattttcccccaaatcggtctgccgcgccgccgtgagacactctactgtggccagccatcctcaggtccgttcatccccttctatgccgtgtttaagcatccttgactgttaatgttgctcatcgacccaaccgct

SEQ ID NO: 96506 - DNA, 781 bp, Zea Mays
gtgaaattggatcccaggttagttataatgctattcggtattccgaacctgaatattatatcttgtatgaattccactgccttagctgaagtcagagaagcgatgagtttgtactctatccatttagtgaatttgtcgatggcaaccagcacgtgagtgtatcctccttgagcttccttgaatggtccaatcatgtccagtccctagcacgcaaatggccatgttacgggtatggtctgcagttgctgtgctggtaaatgctactgctttgataagtattggcaagcttcacacctctggactagctcgattgcatcactctttgctgttggcagtagaaaccagacctgaagaccttcccaactagagtcctagatgctgcgtgtatcccgcattgtccggcgtggatctcatctagtagttgcttcccggtagccgaaagaatgcactttatgaggactcctgtcacgccccttctgtacagtgcttccccaatgagagtgtagtgggttgactgccttgcgatgctttctgccacagttttgtcatccggctcttcttcattctttatatatctgatgattggctccctctagtcatctgaatctgactctggctggctaagaacattgcactcttctgcctgatctaaggaaatactcgggcgtggcacttcttggacgaaaaccccaggtgggacctgggtccgactggatcccagtttcgacaacgcatcttctgccgcgttgcgatatctctctacatgatgaaattccagccc

SEQ ID NO: 96507 - DNA, 480 bp, Zea Mays
gtggctatgtccaactgtctcttttcttgccccctgctgctcaagatatactgccttgcccttgtcatgtctgaaagggcgaggagggttctgatcatctcctcccctgacggtgtgacattatttgtcttcaccatcctgcactgatcaatgacacgctacacgataatgaggaaaggtaagcaagtgcaatagagcagcaggtaagtaaatatgtagaatggattagctacctgggtacgtctcgagagagaataactaggcaggagaggagtctcgcaggcaggcaagcaggcacactgaaatgacagaagaggtgagcacatattagtcacatagtcataagcatatgaaatgtgagtaaatacataaacagagagttatgacatgaaatctgagagatttgggaaaacagaggtcaaacgacgcgagaacggtgtttgaacaatgaattgtgtcatagagagttagaaattgaaa

SEQ ID NO: 96508 - DNA, 439 bp, Zea Mays
attagttttatttgtgtgacatgttaattttaacctactgatctgctagccgtttgttaggttgattgtaacatccggttatgctacctcttgctggcacgtgccaatccggcatcaacaacactggtatgtccggttggccacaaaggtaaggaaattccaagaaatccaagacagcagtgccatggaaacgacgcaatccaaggcgtaaaaaacgcgtgtacaaagtggcgaagcaatcgccgatggattttataatccgaaacgccgcggcgaagcaaaccaagccaattccgaaaggggaaagccggaaaggtaacctacaaccgggtgttttgggtagcggaaagaataagcagcagcagagagcaggggacaacgagtgaaattgcaagcttaattattcaatagtagagtcgaattaaattgcttattagag

SEQ ID NO: 96509 - DNA, 750 bp, Zea Mays
gttgctcgacagagacttggtcgacacttccgcctcgctgagttgttgacaaagacttagtccgcaccctcgccttgctgagttgctcgacagggacatggtcgtccgctccacctcgtagggttgctgggatttggtcgacttaggtgggccgttagggaccatgggcttactttaggtacccgttcctgggtacgattctataattatttgatatttttaaaaaaaataagatctttgttggataaaaaatggtgttagagtcctatatttcaaaatatcactccgtttagaactcctactagagttgcttatgtccctacactcgaccactataaagcaccagttttcataattgttttgtgtcaatatttttgtaaaaaatcctttatatttcttcgtaatcaactcgtagtccaaggctctccatctctgcttcctctccacttcacaaaaaatatctcatatttttttaatcaacccacagttaggggtgacaatgggactgcacatgtggtgttcgccgacgggactgcatgcatgttaggttggttggttcttaactttttttcttctagttctcaggcagcagactatactgccatgttgtgttgcctctgtatcgaaatggaaaatatgattatgccgggttattgcaacttggcttcctgcatctcgataccgttttgatatgggtggatttctcctttgacgaacacaaggacattcttgtccatcgcattgtgaact

SEQ ID NO: 96510 - DNA, 565 bp, Zea Mays
ttggtttcatattgcaccaggtagcataggtggggaactactcgagcgtgagatttgggttactacggcgaggatccaccgtgggcgctgggcggcgccgccgtaccatgctcgaatggggaagaaaggcgttgcccgtcgatttgattacgagcggctgtgattagagaatcgtgtaccgcttcgggggtgtgatcgagagcgttgaactgtgatcgggtggatgagattagacctcggccacttaaaatatgtgccatcgattcgagatccaggggatcttatgccatatcggttcagtggacaactcttttaatctggaccacccatttgggatcagatggctgagatctatgcatacctcttcggccatgtacttattaaaaagagccctcgggtttataataaaccaacccgcagtctatccctttttaaagagtattacacagagaccctgaaattagctaaaacaaccctgccctccctagtatttatgtccctagtccatgcagcgaataaacggagtaagttaatttaaaaaaaaggatttctagaataaaaataa

SEQ ID NO: 96511 - DNA, 481 bp, Zea Mays
aaggcatggcaaggtcagatcatgcggaaagatgagctgatgagtatgtagtagtaggtaagtggaagttcaagagttgtatatatcatggcaggcaccagatgactgatttaacatcgacgtctcccgatccttgatccaagtggtcggtttccatgtccaccacggcatgccacgcccacattgtagccgtctccaaactcaagtatggccactcgttttaaatttgctcatcatatattatgggtgtgttcgacaccacttaaaattaaattcttgatgaaagaaatcgaaaatcctagatgagaataatcgagtatcctccatttggttggggaggaaggtgaggtttctatacttggttgggagcgaatggggcgaatggatcaaacagagcgattggagcgtgagcgactctgaatcaggaatattatcatcaagtttgggacgagattgctccaaaaaaactggtggaatctca

SEQ ID NO: 96512 - DNA, 941 bp, Zea Mays
atggacgcatcgacggccggacctaaatagcttgaacggaggagcagatacgacgaccatggagatgaggagaggacgagctcgagggggatgccgagccaaggacgagtgtgctgggagcgatgtccaggacggagagcgacaagctgacgaccagttggatactaccgcgggggtgttgcgcaatgggaagaaaggaaatgcgcctagtagtgaatatatctgcgtaggaggagaagacgttaaggatatttcacatgagcgagggcatcaggaggataagactgaataaagcggtggtgagatacttctgggcagcatgggataaggtcgataaaaataacatattgaaatttcttgtttttgtttttatataaaccttggttccactaattcgtatgtttatgatgccaaggaaatataacagagaaagagcggtgggaaggatgaggctcaaccgttcaagggaaaaaatcaatctgatgaaaaatatcaggaacgttgtatatatcaggaacgttgtggagactaatggagagaaaatacaagagggagagggacgtgtgcgagcttctaatgccgagcaagcagagatttgtgagggaggacttcatgtgcagaaaatatcagctagaggataggaacgtatagaaaataagaaacgaatcaagctgaacatcagactaatagaagacgtgtggagtaattagaggatgaggccaagtctacacgatagctggataggatagaaagatattttctgcatttagttaatgtagatatagagacaaatctaatttctagggtttaaaagaggcacaaatgtgtttgatgaaaataacatcagcgaattcaatatggtgaacactctcggaatcagatgaatttttactagttatttatccgaggttttggatcggtcaagaaacgacagaccgaaa

SEQ ID NO: 96513 - DNA, 512 bp, Zea Mays
gtgtaataccctacttcctgtggtgattcttgtattgggggagagattacaagttgggaactatgagtgttgtgggtcaaggtgagatgaaaatggtagggatgcttcctagccttatatacacgaccgaggagagctatcccgcacaagtgattaacgtaatccattcgcctatctccctgtttgtagcgaaccgtcttcctacttctctagaatcctcttcattcatccgcccgagttaccgccgggggcttagcctatctggtgattgcaactgtccgcccgatatgctcgtgctcctgtagcgcttaactcgggtattggcctttatcggttccaagtgggcttgcctcgcctcgttgccttcagctggcccatccgcaggatgacccaggaggaaacctatcgggtgacccaggacacgttttagtgtacgtgaggacccgggggatatacatcccccacaataggatagtcaggatagaagaatctgatggcatcaaaaacacgat

SEQ ID NO: 96514 - DNA, 615 bp, Zea Mays
accagccgccgcctccccttttctctcctctccttccctctttctctctttactctttcatttgttacagtcgtcgatgccttcacccttctctctccctctctcaaaacccacactccaaatccctcccaagccatcaaatctttgtggagtttgttggagacttgttcccctcggactcctccatcatctcctcactcttcgttgggattttcgtggtcgattcgtcagatcgaggtattgactcgttttccccattttagactcgattcaacaccgttcttgattatcttaagtaccttttcaaggatattgtgtagtttaggtgcttggcacacttaaactgttttcattgtctcgaacattgtttgagttaagtagtttggtattgttcattgtagttaaaccgctcacatgaacggttgaagtgcatgctcaatatcatacgtgtctttcctcaaacgtgttcgttaaaatccttgaacatcgattacctctctcaccatatgttcttctttttatcttaaggatggtgcgtcatagaaatctgtctgtagttgagtccgactcagatgatgacgctctagagattcgtgaagaaactcctcctcgtcg

SEQ ID NO: 96515 - DNA, 464 bp, Zea Mays
cggtggtgcagtactttcccattgaatcgttcgaacagtcccattctttgtttatctggcttatgactaccagagaatctccgtataccatcagtctcttgatgcccagtgatatagcgatgtttagttcatgaatcagagcttcatactcggctgcattattagaggccggaaataacagctagagggcatatctgaggtgctcgcctccaggtgcggtaaagaggatccccgcgcctgctccctgcagttttaacgagccatcaaaatacattcgccatacttctgcagtttctgggttatctggtatttgttgttcagtccattctgatacgaaatcaaccaatgcttgagttttgatggcagtgcgaggtcggaattcaatgtcatgagatcccagctcgcaggcccacttggctattcggccaatggcttccttgttatgaagaatatcccctatcgga

SEQ ID NO: 96516 - DNA, 1010 bp, Zea Mays
gtcagcattggtaggaccacacccattgggttcagcatcgtcaaggttacacccattgggatcagcatcgtcaaggttacacccattggggtcagcatcagcagggtcacacccattggggtcagctccagtaaaaagttccattggtacttcttcagcagcaggagcagaagggccagcatcctggtccaaacgtgacactcgccgaagctgcctctttttcttcttcttcccctcggcaggagcagttggatgactggccgggcgaaggcgctttgggcgagtactatcagatttttgagcattcaaggtttttccaggctctgggatagttgcaacagctatggtttcagtaggggccgagtcagaagaatcctcagccaacatgtccagcatagcacttatctctgcatcacttgggtttataggcatctcaaagtgaacttgcctctcattattgggaagatcaccaagtgaagcaaccagagactcaacttcttcaggagagggtcgcactctaagacccaaaccactaccgctagcagaaggattggacacaaaatcgaaaaaagacttggaaggtggcagattctaggcagaatatgcaacaggagcaccaatatttgacagtttgcctctaagaatcatctccagtcgtcttaccaaatccacagcaggaatcctcttgttggtaacccgggttgaatcagtgacaccactatacaaataagtcaggtacgctctgtccttcagtggctgaatattcttaaaaacaaagtctgcaactacagcttcagcaatcagacctctctccttcaacaaaccaatttcagcaagcagaaccctggcctctgttatctccatgtctgtggtggattcaatccaacttggagcacaaacatcgggttgtctccctgaccgagggggagggacttgccatgattttctacaataaaccactccaagcgccaacctttgatgctatccttgagtgggatgtcaaggtattc

SEQ ID NO: 96517 - DNA, 323 bp, Zea Mays
tcgtcagcgccggatccaacggaccacggcgttcatcttccccacggcggtctggacagcagtgccgcccacccacggcggagcatcgccggcggacgcgcaatctgtcgcccggacgcccctaacctgaaattagccggtgctaaacctagacggggtgatggcgagcacggaagggagattcttacccgcgattgaaggagtagcgagctcgtccacggttcggggcggatctgcgacatgaacagattgtcggtgagggattcctagttcctagtcatgaatcctgttcaacgaggctagggaaaccatccatgtgtcac

SEQ ID NO: 96518 - DNA, 607 bp, Zea Mays
cgaaactagaattccatgtggcatatctgcatggtctaatgaaccctatcttggtcatcttctatatttcatctttgatgttgcacgaggaatttggggttgaatttgggtggagcttgagcgaatggtctatatcccgactttatatgtagttaatgttctactatctattgactaagcttggcatctcatggtactcctatacaaataaattgatgcattcctttagtagtgttataatttgtgctctgagttttgggttgagcttcttactgatattagtggggcatgcctgatatcgtgtaatgactccctctagggagttgatcatgatctctaactgttgcaccatggcatggtggatgatgtagttcatttcctaggagagggcgatagtgcgcgcctctaatggtatcgagagatcaacctcctccaatagcatctccggtttcctgatgagccgaacaccaccagagtgtgtccatgtgaagcaggtgaagaggttgtcaattaggcttttgaggcttgatcatagcattcttgcatatatgtactaaagtactcaagctacggtggtccagtcttgcccactgggtagtgttgggtg

SEQ ID NO: 96519 - DNA, 339 bp, Zea Mays
aggatgacatctaacccttgagtacccattacttctaggttagcgaggaagtctatcccccttatttcaatccttagattcggacaaatcctatcggactgaacttttccccaactaaattaactcttaaaggtggaatcattggttctatgaggatgttatgtgcttctacccaagatgtagaaacaaaagaatgtgtggcaccagtgtcaaataatacttttgctggatgggattcgacttgaaacatacctactgccatgtcctaagcatcctggattgcttcggcctccagatggttcacctttccacagttgtaagcctgaccacgacctcctg

SEQ ID NO: 96520 - DNA, 502 bp, Zea Mays
cctcccaccaatccaccaatggagaatgcagcacaccaaaggaggaaccagggggcggctagggtttagagggacgtgggtgcagcaccttggggaggagaggagcggctacaatggggaagaaggggggcggctgctgcaaaaatgagggaaggatgggggacggctgctgctatgagggaaggggaggggtggctagggtttttgagaagaggagggagcgatgcccccgatgcccttgatgctaaactgacggctcacaaccaaatcccccatccatgccccgattcagacaaatgaatactcaaatgatatcgtttaaatgagatcttcacatctgcggactccgaacttctaacggcccacaaccattttcccacatccacgcaccgaagatcaacttttggtcaacattttttaggatattacaaggagcactacctcggggtctgcatgatgatgccatcgtcgcccaaggtcaagccccggtgactggtcaggg

SEQ ID NO: 96521 - DNA, 401 bp, Zea Mays
tttttaatataaagtttatcttcaatctaatcttatacatatgaagaagtcataatgtcttttttatcaaaaaaatcagccactgtccactaaagtcatgacaaccaaaatatattgatcaaaactggatatgttgtgggtaccattagggatgaaaacgatttcggtttctcgccgacagcaagagccagagtacaaaccaaatgaatctgtctgcatgcacgacgaaccagatgaatccgcgggtataggccactggatggtgtagatgcgaagcggagcgtgtgtgggtggcatagagatgaatccacgggtacacctaggccccaaatcttacaagtgacaggaaaaaaagcctagcgcgcgggaaggccggatttcacatggcgtacggggtaggg

SEQ ID NO: 96522 - DNA, 787 bp, Zea Mays
gggggggtaaggtaaggataggcaggcaacgaatatgccatgcaacttgctgttaatcttgaccggatttctttggtacgcagatcatgctccatccatccgccggtgatgatgcttctcctctcctacatacctagccgactttagacagaatgtatatcccatatggttatgatagcagagatcacattcttgatccaaagcagcagccacttactcccaactgtcaataaactagtttgtaatccgtctcgcgcgcgacagaataacatggctagctagtgtgatccatcgatcaactaagcgattctctcagcctcagcctcatccaatgacctccctctagctagctcatttgcaattcacttggcttccttccaagccttcattaattaggtgctgttgtagtacatatatactagcattaagaagaagaagaaaaaaaatgttctctgtagtggatggggacttgaaaatgcatgtaaaaagaaagagaaggagcaagcaggttgggttattaggctcctctaacctaatggagaattggatctctgacggacgaccactaatggacggatggcttcaggcctttggatgtgcgtgcgtccacctgtcgacgcgcagtgggatgctggctcatcatcatgtttatatatttcattccacaatggcggagtatatttctgcgcgccagaataaagcgaaagacagacgccttttatttatttacttccttgcgccttcaattcattcgcctctgtttctgctaatatattttatgtctttc

SEQ ID NO: 96523 - DNA, 325 bp, Zea Mays
ctggatgactgatccttaaacacaagtttgcattccaatggttgatgtatagtttagataaatatagtgcagctggttaataatagttttcatgtgaacttttgttcattaagctggaatgcaagaaactgtcagttgtgaataatacaccacatccgtcaaaccacaccaaaataaaggatatgaactaaaataactcaactctcctcaaatcacattatgacagggcagagtcatcactatacacgtgcttcgatgatcttgtcgtactggccgaaggtgcgctccgtggtatcctaggacaacccaccgatgaagattcgtc

SEQ ID NO: 96524 - DNA, 558 bp, Zea Mays
ggccgcaggacgtaacccttagcctgatcaaaagtttttgagtccaaactattttcttaaaaaaatcttgctctcatcccttcatttcaaaaatgctttccccctttccttctctcagaagtcagatggaggtcagttgccaaaccagcttgtgccagaatgaagatggtttccccaagttgctgagagcatgcacaattcgcctcggaatcagaagtcagccagagtatgatggtcgtgaattcgtcgagcatggcacagagaagtgtgtcgtgactatattcattggatccagtccacaccatgtggaatggagtgtcactgctgctgggcacagattcagagacacctgccaagtcgtcgcccgcaaggcattgaggaccctgtgtcagatctatgaagaagaagtggccgacaccccgctcagattctttccgccctttcagagagaccgtccagtttggatggccaggatgcgtgcattggaaggtcagcagctgcttgaggacgaccccacaatcgtgtacctcactgcatacctgctcaccctggatgcac

SEQ ID NO: 96525 - DNA, 737 bp, Zea Mays
tgcgggcgcgtgaaccatcctcgatagtgcgatagaccatccacgtgtgcatagagggcttcggggtctctttcagcacctggatatcaccccctaggagggaccccatcagggagaaaagatcttagggtctagacaacataaattcgaggagaggtgaagattgaggatgaggaagactaattactgttactcctagggcaagaaatgtaaagaaactgatgaatagattgatttagatcgattgtgttgtgggccaatcggtcataccccttcgtatatataggggaatgtcccaacaaattcccacgtggttagccggatatgcaagcacgaagattctcaaccgagtttatctaattgtggaccgtccagactatatatgtggatcgttcggggcgtgtaccatccgagccacatagtcgaactgtgtagtcatgcccaggtaccaaatctagtgctcaacagggtggtaatggatcgtgatccaaattgatcttcataatttatttaagcccttaattaattttagtttaaaattagataaaaatatggtctgatcctaattcgatttgattcttgaattttgtaatgtaaaatttaaagccctatcaccctgatggttacaaaagtacattgaatatcgaattcttgaggcgatccaccttatgagaagtaactaatcgcatgcgcatgttttaacaaagtataaaacgtgtgcctcatgtggcaactcc

SEQ ID NO: 96526 - DNA, 625 bp, Zea Mays
agcaggggcattagttaagccaaaggacatgacgataaactcgaagtgcccatacctggtgctaaaggctatcttctcaatatcctcctcgtgaatcctcaactgatgatacctagagttcaaatcaattttagagaatacctaggcacctctcaactgttcaaagagaacgtcaatacgtggtagcggatatttattcttgattgtcaattggtttaaagcacgataatccgcacataacctcttgcttttattcttcttctcaacaaataataccgggaaagcccatggtgacctgctaggcctaatgaaacccttagcaagcagatcatccaattgccgtttcaattcaacctgctcctttagagtcatccgatatgaggccttatgaataggctgcatacctgaaatcagcttgatttcaaaagccgcatcgtgctctggtggaatgcctggtacctccgctggaaaacacgtcggcataatcacacaccacatggatgtactacacccgcaaggtagcctcactttccaccatcatggagaaaaggattcccaacttccttgaccaacgatccggaagtaattgggacaacaaggaaagagtgtactttggagagcttcc

SEQ ID NO: 96527 - DNA, 700 bp, Zea Mays
aattatagaaaggataatatactaagcataaattagacaaatatttatttccagaaacatgttacttgctagaataatgttactaacttgtagacaattttattacgagactagcgcaactggaacggattaaaactgagttaaaacgaattaaataggaattaaacaagtttctggaattttctttataccaaaaatcctttcctttatcaattttattcattttattttatacttggacaacacgcattaataccacagagctcggggtgcgtctaataaaatttaggactaaaccgcacgactcttcccacagccccggacggcgggttatttttagaaatcccggaggggtcttctgcaaaacagatgagtgaagggggtatcgtgatatatccaccatccgatcgaaccttggcagtccagattagatcggcgccttcgcgaaccggtacaccactaacaaccctccgatttcaaattaacgcctgagatttaaaactctcagatctattttcaagcgcccgatccagatcagacggctcacatcggatctgggcggaccagtatacatagatctaatcctagcctttgctcagaagatcaagggttcacgacgctctgcccgaacacaacgccgacgacgacggcaaccccacctcagcggcggcgccattgccaggatctaccagcactcgac

SEQ ID NO: 96528 - DNA, 567 bp, Zea Mays
cttagaaaaggagtttggaagtaccttagaaagcgctcgcgtgtagtgtgacttgtggtaactgtatgcttgtaatgaactggtgtaatgaataaaataacttggttgaaaaaatttttggcatatgcatagtagtaactctctctcccctggcagatggctttggataaaaccacgcctaccgcctctgggattggagcagggtttcccctaggagctgaaggaggagccggtggagaagggagtgagacccacctccacgcacctccggagctgccattagatttagcccaagttctagccaatcaaacccaactcattgaggacctcactagaagtctggagaatcaacgcccgaatggtggaagaccacaagacaggatgggagattttctgagactcaagcctcccacattcgctagatccagcaatcccctcgatgctgatgactggctgcacacgataaaaaggaatttagaagccatcggatgcctagagaatcagcgtgttcaattggctgctcatcaacttttcgggatggccctagcatggtgggataccttcagc

SEQ ID NO: 96529 - DNA, 363 bp, Zea Mays
ataatagtgactaatataattggggttatatataagtaagtagtacacatctcactaagttagtgaactaatttggttaaggtctaataagtagcttagcttaatcaacatttagcaagtgcaattatatattagggaaacaaaatgaataatgtcctgtctttggctttctgctaatactactaagtaaccaacgtcattaaagtactataatttgtaattgtgattaaaccatcttctctggggtgtatgcttgcagtagaaggttgtgaatgattgtaaaacccgattaagtaactattcctttttaactaagtctgtctatgtgtaagtcatcataaatttatgtgtacttaactagtt

SEQ ID NO: 96530 - DNA, 599 bp, Zea Mays
cgacaggaaggttttggataattgccaaagctagattcttgtgatactgaaacgggtcgaccctggatgttgataaggcttagggatcttactcagcctatcctattcgagactagtcacgagacagaggatgagataccgaggaggagagagataatcagctgatgatattgtagtcatgcagagagtacatagtctcagatatacgatttgggtgaaccgtccgcagaacatgcaacaaaatagtagtaataattacagctactagaataagatatataatttggaaacaccgaaacaagttgccacaatattctctgctgtaatcaagctgaaatagtctagacactggctctatagagggtgtaacatttcaaagcacctatgattttttatatactatccagagtagctaattaggctcaagaagtcaaataactttaatgttatctccttctccataaactttttctacccaaccatatcatttgtcgagaagctcaacgatacaaaccataggttatgcaaggcataggttcttgctgtggtacgaggagcacacctagaaggccacctcaccgccgcaaagccacgataaa

SEQ ID NO: 96531 - DNA, 381 bp, Zea Mays
agatggtcggggagggacgagacgatccagcccagcctttgcctttcttgcgttatccctgtgacacacacagttgcatgaagtgatgtcatttaaagccaagaaatgtataattctcagataaatccctaggaaaatatttttccttccaatcatctaattgtgagaaagataaaaagtacaggcgggctggccgttcgctagctgttgtgcgagtgatagtgtcgtacgctagcaacatggtgatctttttctgtgatggacttgacagccatcactaccaccaatatagccctacactacagaaaaatggcaaaggtccgacgaccgccttatgtctgacggcctccaaggcatccgtcggacatagggttatctccg

SEQ ID NO: 96532 - DNA, 496 bp, Zea Mays
catcatgtacccccgtgtcataatttaattccgtggattccgctctaatgacggccattatagctctgttttcacagcgaaccagcatgggtcgtcaaattgcaacctggatgactgaatggcgtggccagtttccctctcaatcccctccaattctcccgggatccccgatcactaaatcagctctaacggtgtaagctgggacgaaccagctgctgttaatcactggtggagagaaccgtagcatcgcaattatgccctatcatctcccccgtctcataatttaattccgtggattccgctctaatgacggccattatagctatgttttcaccgcgaaccagcatgagtcgtcaaattgcaacctggatgtcggaatggcatgaccagtttccccctcaatccccccctctatttctcccgggatcctggatcaccaaatcagctctaacggtgtaagctgagacgaaccagctgctgctaatcactggtggag

SEQ ID NO: 96533 - DNA, 539 bp, Zea Mays
cctaacttcggttcactaaccttcgacaccatcaccgtgaagaatgatgaagcaaggggtaatgaggaatctggttacaaaaaaattaaagtaaagaataaaggtaaagatgtatactttgttaagcaggtttcgggctttgtttccagcaaactcatggtcgcccttagcctagatttgagtgatgaaccagttgcctatgcttcgggctttggctggaacatcaaccaggttcgatgatgaatggctgaaattcgaccagttcacagcccttgcgtgattacacccggcttttatgaaagcggagaccgtactacgagaagccaccagcgcacagaagtatccatggacagttatgacttcgtcaaggacgtcaacctctttctcgacgcattcgagtgctccggggacatcttcggcagagaggctagcttcctaggatgcagctccaactgaattgaatatacttctcaatcgagtggtgtattggcttgcaaaattaaaacatctctcttatgagttctcagcgcttcactaag

SEQ ID NO: 96534 - DNA, 660 bp, Zea Mays
ggttttctcggttgaggtggcgaccccaacctatttagattggtcggaccacgccatcacctttgaccgagatgaccacccggattacatcacgaaccccaggaggtacccacttgtcgtcgacctcattgtcggcaacacgtgcctcacgaaggtactcatggatggaggcaacaacatcaacctcatctatctagacaccttagacctcatgggggtcgggggatcctagatcaggcctagggccgcaccattccacgggatcacccccggcaagagggtgcaccccctcgggtagattgacctgcccatctgcttcaggatccctgccaacttttgaaaagaaatccttatgttcaaggtggtggggttctcaagacacgtatcatgatttgctcgggcagccatgctacaccaagtttatggtcgtcccaaactacacatacctgaagctgaagatgtcaggggcggcaagcgtgatcaccatcagcccaacatgttgtcacgcctacgaatgcgacgtcgagtgcatggaatatgccgaggtgatcgtcaactccgaggcactcatcaccgacttggagaaccttgccagagaggttcctgaccccaagaagcaggccaacaacttcgagctggccgaagccacaaaaactgtcc

SEQ ID NO: 96535 - DNA, 360 bp, Zea Mays
agataatctgctagagatagtcttagatcgagttctttatactatatctatgaggtattgaatctgaactagcccgtgatggagttcgtagctgtggtgggaggccactggacgacgtacgtccatcttaacttcgctgccttgaagccaagttaagcttggcacaaggccactagaggccgaggagcccagcccagtgtgtggcgaggaattgctaggctattatatgttttgtattaggaagaaaatccattttacaatcttttaaatcgcatcgctctggtcgactacagcaagtgggatttcctgcatgcccatgtggttgttgcatcgggaatataccgaaacaatatcgtgaat

SEQ ID NO: 96536 - DNA, 941 bp, Zea Mays
tgctcatgtgcacgacaagaagcagcatacctgcaatgaacccgagtatccgagggtatttctgcctggaactagcatcatatttttttttgttattgcaagaacttgagtcttgctgtacttatctgctctcaaatacaaaacatctcaagatgttcttgtttagattaactgaatctgtctaccttttccgattccttatatgcagtctgcctgtccgagctttagcctgagttcctaatatgtgcttctgcaccccccctgtccgagctttagcctgaatctgtctacctcttccgattccttatatgcagtaatttaagatgcatctctctggctgaggattatccacactgattgtagcatattactcattaacagactcagtgattttttccccattttctactgctacatgtacacttgaaaattaacaacgatacccattatattataggaccatttattgtattattgtctcatattctttttttgttgcaatctactttggtttattgtgcatattcgctcgtttgtctcatggtgttatagggtgggagaaagcaatcggatcagagaaagaggaagtaaatttatattctgccagttgaggcatctttaggcttgatgtttgtagcacttgaaggtaacatgcctgttgatacatatcctgtgctgttgcagcatatttgatcattgctaaatgttaaattttaccattttgtgatttttttatttagcatgcgtcaaatctgtgtttaattcgaacaaagaaggattatatgtgttgggaattgtatgactgggatgtttaattttttttggagagagcatagtgatatgttttatgtttaaacttgtggagcaatcacagggttgcaatccctgcgttaaccgaacagatggtttcaaagagagggattagagagggagaggggtca

SEQ ID NO: 96537 - DNA, 346 bp, Zea Mays
tattaatcgaccgagttatggcattggctgagcactggctgcgccctggcaacacgacgcagtatttgtgtcgtacgaacttggctgcgtcaggtgattgctatgtcgcgctctcgcttaatcggatcgctcccgttgagtcagaccgccatcgctgagtcgcgtattttttgcatgccctgtaggcactgtctctctgccgcgagccacgattgcgcctgttgtgcatgttatgtggttttatcgtgtaccccaattatcgagccataattgtgcctgttgcgcatattacgaaggcttcctatactgtcgtagccctgatggccgcacacgcgttgacgccaga

SEQ ID NO: 96538 - DNA, 557 bp, Zea Mays
gttttgaaaaattaagttacactgtggatctccctatattccatattcccctccacccggtgtttccaaaatggtgactgaacgacgaacactgatcacgagcgctgatggcgggcgaagatccagtgcatgtcgccgatgtgggtgtagcggcaaccgatctcatcactcagttcagaagttccctcatcaccatctgaactatgggtctcagagtaagcagcttcatccccttggttgtcaattgactcctctgctgcccaatcaggaatatgcgaacatatttcagcatctatcatttctgcaatcgcagttacatcttgatctgtgagaatattttttcagtgactttagcaatgcatttaccaatctgcaatattaccaatcatgctagcggctacttatgtaatttctaggcacagccatgcttccagtacagtactcacagttgaacaagtctgtttgctcatttatagccatgtcagaaaataatgaagatcgccctaactaaaatgcatatttatggcttcatgtttagccaagatccatatggaatt

SEQ ID NO: 96539 - DNA, 320 bp, Zea Mays
cgcgcgatgactgaagcttttaaaaaatactaggactctacggcgacatcctatgagcagcttgatcgacgagttgctgaacttgttacacgcatggatgtactggaggctcgtcccccaccaccaactccagccctagctcactctcctatggacaacgatgtcgatgacaacgatgtttatgcaccgctacgacaacgcctcacacgtaatcgacaaggtatgggaggtaatggtagacatcgtcatcataatcctgaaccagaccatgatccatttgctaagattaagttctctattccaccgttcatgggttctta

SEQ ID NO: 96540 - DNA, 775 bp, Zea Mays
aaccatttgaacgcctgccgcctttgcttgctggtcttttgaaatttaatggaggtactcgctcgaggcgtttcttgaggcttatccggtcctacaattcattgtttgcattcacctctttcggtgcagctatcgacaaaatgataaataacgacactgcaccttatgttttcaaaattaatggggtggtgcaccataggattggcaccctacttccacagcgtgggacacagccaaaatttgcccaactgtacacatatgacaaggaacatgagacccagaataggctaggcatttttgagaccgatgatgctgctgctggccagctagaccctgaaatggtgtcgtcgctgctcgatatgttgaatgaaaacaactcgcttgtcaaagcattccgatgcgcgagagaacaccttgagcgcgaggatgatcaaaagataacactcagattgttaggctgtaacacacgacatgatgtacaatacaacctaccctcaaatggtgagattgctgccattattgttggcgactacacgaccggggaatacacatatgatgttcttgtgcatgatagagagtgcggcctcaaatgtgtttcatgcttgcatccagcatacatgcctttgcaatacccattgttgtttccttacggtgaacatggcttccatcttggtattaggtactttggtgatgacgatgttggttcatcaaaacgaaaatacgtcacgatgcttgagtttgtaaggcgacacatgcactacagattggacgagcc

SEQ ID NO: 96541 - DNA, 618 bp, Zea Mays
gttttgcgaattacaagggcgagctggccctgaggagtcaaaccaaaaatttgcggagattatcaatgttccaaaaatgctctaagtcttcccggatggcgttgtgagcctgtacgcgctgggggacgccttcgtcttgacgatgaaagggccctcccacttgggctctagcttgccccgggactctgtccgtgctgtccggacgagtatgaggtctccttcgctgaattccctcgggatgactgtgtggtcgcgccatgcttttgtttgagcttggtatttgtttagagcctgtagggcgaagacgcggtctccatcgatgaggtccttcgaagtaggctcgtccatgtcggggacggctgacgggactgtccgtggtgacccatgttttatttcttgcggggtcatggcctccaatccatatagaaggcggaaaagggtgaacccagtcgccctgcactcggtcgtgttcagtgcctagaccgctttaggtaacaggtcagcccacttgccttttttgtcgtcgaggagcattttcttgacggctgtgaaaattttaccattggcgcgttccacaactccgttggattgcggatggtacactgaggcgaaggcaag

SEQ ID NO: 96542 - DNA, 503 bp, Zea Mays
ggtacttgttcttgattgtgacctcattcagagctcgataatcgatacacatcctcctagtgccatctttcttctccacgaataggataggggcagcccaaggcgaggtgcttggcctgatataacctttctctaatagttcatcaatctgcttcctgagttcaaccaactctggtccagatactatgtaggctcttttaaagatgggggcggttccaggaagaagctctatggcaaactcaactttccgctcaggtggcatacctggtaagtctttcgggaacacgtccagaaattctgacaccaccttgataatctcgagtggatctgcttcactgctatcaatagccatctgatgacaactccctttccttggctcgggcgggactaactcggtcaccacctactttcctagtgggaacatcaacttaattgtcctcttatcacagctgataattgcccggtacttatctagccagtttatccctaggatacatctattc

SEQ ID NO: 96543 - DNA, 285 bp, Zea Mays
tagtgctgatctgttcagccaccaccctgaattctgctacagcttgttggcatggtgaccccgatgtcatgtggcacaggggcctagtcagtccgaagcttaaactcagtgggctcatgaccatcgtcttcaacttctccctcttcttctcatcagccttgatatagaaccactcacttttccagccggttggccacttggtacgatagctgagcaccggagccttcgtatccttgcgatacgcgaagttataacaaccgaaattttcatgtaacccgtcttctc

SEQ ID NO: 96544 - DNA, 395 bp, Zea Mays
ccttgaataattacatagtatttcggtgcacattgtctcaatcattttcagccactcggtgcaaagaccactggaagtatcgtagaatttaaactgataaggtaatcatacaagcccgaacttattcatgtcatgtttcaactttgtcatcccctggcagctcagtgccgggaacaccttgttggcaaggtactcttgcactaagtcctgtgtaccaatgggctcagcgacaaccctaaaagtaacttcatccacttatgttggagagcctatgctcatgttgcagattgcctcgtaaagccaaagctcaatctcatcagactaatcatgatgtctttaaacttttctttgcctacctatcagccttcatgtaaaaaccattcgctagtccatac

SEQ ID NO: 96545 - DNA, 503 bp, Zea Mays
cggtgttataccaaagaggaagggcccaattaggatcctgaagaagtcgccacaagacctggtccggtggtgcaccgaaccagtccggcacgctagccgaggctagattttagcaagcttttagaaggaagaagcaacagctatgggtgtgtttgagctataaagcccccattttacctcctttagttcccaagcacaccaagagctattgatcacttccatactccgccacaacacattcatgacattctagtgagatccgagcactgttctgagctgttcttgtcattctgtgagggtgcactcttgtgatcttctttcttgtgttgtgtggctatgttttgcttttatgtgtgtattctcctctctctctctcttgttgtgctttgaagttgtaactcattcttttgtgtacgactgcaagagactccaacgtgtggacattccttgcgaggagactaatattgagataagaaagaccatagcactcaagttgctcattg

SEQ ID NO: 96546 - DNA, 562 bp, Zea Mays
cgttgaaattatgaagcatcgaagtaagcgaactagtttgaaacaacaccattatcgctaattgatggcaatattgtgcctccatgagaacaaaatggaggatgagcacatatatgggaggagaaccaaacaggggagggaacagaggggacagaggaagggcgccatatgatctatatagaagagcaccatataaatatccatataggtataaaggaggaccattggtggtaggagcttaagaggtaggagaaggagcttcagtggtaggattttcattgggaggaggacaagcatctatgggaggttggtagggatacaaaggaggagaatatgtgtatagaaatagaggttatggacatagggaacacggatggtcagaaacatcctcatggtgacaatgcatgagagaaaggccatcgaagaaggtctgtcccacacaagtacgggtgccagaatgttgtgacgattgatcgttggccaagtcagtaaatgttccaaactttggactctacctgtgatcttggaataaagagtgttcggctacaataaatgaaggaag

SEQ ID NO: 96547 - DNA, 409 bp, Zea Mays
ctttgcttcacctcgatgtaagcttcgtgatgacgccacatgcatgtcgcctcccattcatgctataactcaagtaggattttgaggcccaaaccactaaacccctcatgagtagtgtatctaatatgctccctccagaatcttggcacatgtccctccaatcctcgaccacctaatcacttctataaggtccctacttgacttggtcaacatggtctagtccatatacaattgcacttgtcaatgtccctacgtgtcataatattataaatagtgggctaaggcatttagcgatcacccttattaaatagctaatagtgggttgaattgggctatagcggtgttggtgtttcgaactagcaccgatgagtaaatttttgtatgcgcgttttaggctcggatagtttgc

SEQ ID NO: 96548 - DNA, 634 bp, Zea Mays
tgtaataattgctttaattgtgtattagtgggtattatgattttctagggaaaattatcactagattttgaggagaatttactagtgatgagatctggtgcctatctagttataggcttgctatggggcatggaaatgcttgtagcatgatcacattcagtaactttggttttgaatttattttggttgttgatgacttaagaagtaaggactatggatgcgttctagaggtctgacaccatctttttctttgccaaggttaaatttcatggtacattaagaggatatatgaaagatgataattagtggaaacttatttatcagaccatttgtaaagctataaatacatatgttaaataccattctgttagattatccatccactgaccagtgcgaaatatataatatatgtagtatgattcttcggatggtattgcgtcaagcagttttgaattgcatttggtgtttatgaaggttgcaaactagactaattggtagttcgcagtaactatgcaccagttttgaattgcctttggtgtttatgaaggttgcaaaatagactaattggtagttggcagtaactatgcaccaattccaagctaaaccactctctccgatcattggtggttctgtt

SEQ ID NO: 96549 - DNA, 937 bp, Zea Mays
tttgtgcttatttatattcttcatagttctattgtgtcatgtgaataactaattaaactctccaacagtaaaatccctctctttcttgaatcttattctcggacctgtaaatagtgttctgctttctttcactaaatgcagcagatagatagattagaatgtgccaattcacaagcaaactttgttgattactttccggttgttatttccgagctaaatgattaacactgctacaaatgggtaaaatcagatttgtgcttatttatattcttcgtagttctattgtgtcatgtgaataactaattaaactctccaacagtaaaatccctctctttcttgaatcttattctcggacctgtaaatagtgttctgcttcctatcactaaatgcagcagatgaaactctcttgttttttgaataatggtattacgtccaggctaaaggaaatgtagagagtacctgtcgtttctccttatattttttgtatgcagtcaagttctattgactcccaacaagaaatggagttaatataaggagtgctctgcttacaaatatcctgtaaatagtgttctgcttcctcttgttgaaccatgatgaatgcattttcatttaaactttctttaattggtaaaggtacatcaccgttgtcggcttctcctgctcactgctcctcttgtgcacgtctctcatctccggcaaggtattgcttttaatttgtagcgcagcctcctgtacagcttctgtttctgctaactcggtgcaaggtacgatgccgccatcccaatccctacccccagatcgagttaatacccataaatacagccatttcttttaatcgaagaaaggtatgatgcaaattgttaattagaatgtgccaattcacaagcaaactttgttgattactttcctaaaagttccctttgcccgggaacaggat

SEQ ID NO: 96550 - DNA, 618 bp, Zea Mays
gtgcagccggactagcacatcaagtgcgcaaaatccaaatcttctccaaaatactacccatgcaaaagttgcctaagggtgcagccggactagcataacgagtgtaaaaatcgaaggcgcattacatcagtccgaaagtctacaagcgcaaccggaccgacacaataatgtaccagaccgggtgcgcaacaccttacgaacacacccagatgcgcgaaggcagtcaaccttatcatacaaactacagttacacgcgtacagcgagggcatcacaccttacataggctcaaccttcggaatgatccccatctccctatagttaaatagcattatcctcagctcctcagcctcaaaaagccttcgcaactccccctcacccatactcgccccaaccggcgaggacaacaattcctgcctaccagccctgcccacacgaaaccgaccatcatcaaacccgctcactctacgcttcgccactgcccttcgccgcctacacccaacactcggaccaggcaaaatttcagcatccgtaacacgcggagaagcctccgcctcagccacatccaaggccgcaaaataatctaagccttcatccgaagactcttccgtccacaaaac

SEQ ID NO: 96551 - DNA, 344 bp, Zea Mays
gtgacaaggtgatgacagatgttgcacataagcagcttcgctacttgccactaactcctcgagtgaaacagttgtttctatcaaaaaaatctgccatgcacatgcgatggcataaaaaggtgtccgtaagaacgatgagctaatggtgcacccttcagatggggatgcttggaaggctctcgacatgtttgatctagacttgttgttgaacagagaactgtttgaatcggtctcgcgaccgatggcttcacaccttttggccaaatggcatcatcatactcatgttggcttgtgtttgttattccatacaaccttccaccttctctttgtatgaagtatgagtt

SEQ ID NO: 96552 - DNA, 471 bp, Zea Mays
acgacttcttctactttccttgcttcttctaaagcagtatgagattcttcctcatttttcctaatagcttcgtctgctatttctcagccacctttcaaccaaacttcaaaataaaatttcccgctaagggcaatagcttcggttgaaggatccttgatatcgtttgccgagattgagaaatctggctgaactacaacctttgcatgctcacaactagctttttcaagaagcaagacgacccctcaagcgctggtgaaggcacaaaagtctcctctatcgctaaggatttcatcaaaagcttcagcttcgccaccgatccatcggataaccccatcaggatcaccacaaataaagttctactttgtagagaatgcaccaattttagcaaaactaattttcaacttactgcaacattccgtagcaacattgtagcactcctctttcgcccgacgaagctcctcgacatttttc

SEQ ID NO: 96553 - DNA, 293 bp, Zea Mays
gaacatccctaatgcttcacatgactccacttcttgtgttgactttaagccgtgacacctcactaaagtatcatgcaattctagaaaagcactcggagtcatacggaagttatcttgacacttcctgaagtccctcaaattatattccacccattatcgtcccgtcacatgcggcaatgaaggaggaggattaaccaaaggaggaggagtagacaaaccagaagcaaaagcagctagaactgctgctgcacccgctgactagacttattcatacataacatggttcactaaca

SEQ ID NO: 96554 - DNA, 442 bp, Zea Mays
ctctactccccgacggaatacctcccgggagcgagattcagatgttgttgatgaacgtcgtcgtctctacgcacacgcggacagtccggcgactccagccacagacgtggaccgtccgacttcaccacatagaagatccgtttctgtaccaggttgcagatcgaccgacctagccgtgttgtcgcagagagcaccgccgcttataaatctaacttcatccgctcgactcccattccatctaactgcaacgcaatgaaagttcatgcaggaagagcaagtgtcatgctcaccaaaccatttgaaggcggcctactcagctccctctccccagatgcctactgggctgggctggcttctgtgtgaggccgcaagtgagaaagcaaacacagccagaggagccgccaatccgatgaagacgagaaacatgtggtgttcgattccc

SEQ ID NO: 96555 - DNA, 369 bp, Zea Mays
aggtttagctgggaggaacttcaattcagagaaattttgaaagaaaaaatgatctctttgctcatcagtgagtagcatatcgattggaaatgaagaaggaaggtcagatgagttaaatttggtgccgctagaacaatcccttttcacgcaatgcctgatagaaaactgagacccattggatgtatctaactacctaaatgaagatagccaactcagcaggtaagggaaaacacacataccttcttgaccgaggttgagggtggccaccttgtgctgtgtcggtccctccacctccatcttataggtctccacctccggtgttaccctgttcatgattagtaacaataggatcctcggatccggctgctg

SEQ ID NO: 96556 - DNA, 653 bp, Zea Mays
ctgcaaatctctccccctcggtcagggaggcggccagatgttcgcacacctagctggatagtctccaacctctttgtagatagcagaggccaatgtgctgcttgccgagatctgctcgctaaaggatgggggtctaactgctgaagctgtagttactgacttcgtattcaagaacattcaacccttaaaggacagggcttaccccgcttacttgtatggcgatgtcaacgattctacccgggtcacgaacagaagaattcccactgaagatctgctgagtcgactagacatgatcctgaggggcagggtttcaaatgctggtgctgatgtggcctattctgcatgggacctgccaccacttaggccattctctgagtttgtatccaaccctcctgctcgtgacgatacctgggtcttagagtgcgatcctctcctaaggacattgatgttttgattgctccacttcagagacttcccgaggatgagaggcagactcactttgaaattccagctagcactaatgacgcggagatagatgctgtgcttagcttgctggctggggaatcatccgactctacccacaccgagccgatggccatcacaactaggcaagaatttggtgaagaggtggaaactcggaaacccgaaggtgc

SEQ ID NO: 96557 - DNA, 1015 bp, Zea Mays
caagaagagcatattggagtgtagagtggagtgtctcgaccagagttgcattttgtgtccaaatcacacgtgagttctctttttgaccgtgtttttatggtttgtagatatttctgttgtgattttgattagtttttcttatcaatttggtattataattttagtgtgatggtattagatgtaaatgttggtactgggaggaagagtgttagctacctaggaaggaaggaagaattctgggaaggatacggaagggagggagttcaggagaaggagaagaaggtagacgaggaaggcatttccatagagtttcagatagtgttccttacaagcataatcctgaagacagacatcatctactacatatacttcacacacaccagggacccatcaggcagactaacagatagataaacccaccacacagagacctgcatcaagcccacttcggaccactcgtacggacattaggacgacgcttgcgagctcctcggtgagtggtttcctttgtgtgcaccggcaacggaggtgtaacattccccggctcttgaagacctgcttgaccccaagcaggggcgaatggaaagcactgttggagagcttcacggtcctcccaagtggcgagatcgagcggtaggccagaccattccacaagcacttgctggacaaggtgatttcccttggtaatacctctggtttgaagaatctgttgaggaacactgaactccggaagagctgatggcaaggtagcagtagtggcatttttgaagcctgaagcaagccggagttgagaaacatggatgactgggtgtattttgctagaagcgggtaaggccaagcgataggctacattacccactctggctgctacctgatatggtccaaagtacttgtagctgagtttgtgatgagcccgcggcataaccgatgcttgtacatatggttgaagcttcaagtaaacccagtcaccaaccgcaaattcccgctcagacctgtgtttatcagcctgacgctg

SEQ ID NO: 96558 - DNA, 678 bp, Zea Mays
gctaaataaaaaataagaagaaaaaaggtaaggctcagcattttttgtaggcacggttggcattcagtcactcacaaagttcagccatcaacataccaacggtgactcaaaaatgaatccaattgggatccatgataagaaagcatggagtgtcgccaatgtagcacggatgagctgtggcctttgcgttgcagataagacatacaagcatagctcatgaatgagccggaattcactgaacaaagaaaataacatataagttaaaacagaagtatccttgactaaagagccaagtaacttttttgttaaaacatagattcacgaataaattatcacacagcacatccaaggtagccatgaaaatatagaagttgacaacaaacccaacctattaagtgaagacttcagttctttgatcttttgttgtgtcatttcacctcttgagaagtcaaaaatttcttcacttagaagctgcatgttattaaattggatatgcataatgggtccaatatgtaaattaaagatgtcaacgaaaatgtcaaaactgaaaatacagacaaaataacttgccttcaatatagccatgcaattttcacatatagtttcactactctttgcagctgcaacaagatcaggtacgaaggatgaccatctggcaggccactcatgtttcaggac

SEQ ID NO: 96559 - DNA, 606 bp, Zea Mays
attttctaaagcagatgggttgtacagactgataaaggttcaatttttcattaaagccacacatgattattttcagtactgctctttgacttttaaagtatgatagtcactgtggggcaaacatatctattcatagaaagtaaggagtgttaaaagtgctagtgaacaggactgaagaaggatgaatgaaaatatatactttgaaacatgtctaagggaactccaaagcctaatgaagtaacaatctatccatttactatggtgtttcttttgcaggtttgatacttcatcgtttcattgccaccatcgattagtaacattatcaactgcatggttccttgatcttaggtttaaagcacttgtaggcgttacggtgaacaacaaagaaaaatcgttcggtggaaaaaattgcaaatgcagaggaatataaaacatcacccaccaaaaacatatgaacaatgtagtgtttgtgtggtgggttacaaacaaagcaactccccgatgaaggcgcaaaaggacactatgtgcaggatgggaggaagaagagaagatgacgattttctctatgccactttgcaacgtgggcatgagatgagtgatgagttg

SEQ ID NO: 96560 - DNA, 416 bp, Zea Mays
aaatcatgaaccaagaacagatatgcaacacgaagattgaatttctacttcttgaagcagtcataggcttccactccttgccatagcttctttaactcttcaatcagtggttgaagcatcacgttgaggcatacgccaggatgcatagcccaggtataacaagacataggaacataaactcatatttcatgcaaagagcaggtggaaggttgtactatatggcaatgacatgccaacatgaatacgacgcaacggtcatattgaaaggcgtgaaatcatcagttgccaagccgatacaaacgtttcttgcatcactggcaaactctggattaaagttgtcaagagccttccatgcatcaccatctgacgggtgcaccattaacccatcttgtctatccgtacaatctttatgccac

SEQ ID NO: 96561 - DNA, 566 bp, Zea Mays
gtaggccgccggccagtagcccattaggtgacccattcatgcacgtttgttttggtcttccagttacgtttgccagtgccacactacactacactttcagtatacaaattaattaggtgactctcacatctcttcctctgaactagtatacaaatgttcaccactggtaaagtgtacttatttcttgtttactatttcctgtctgtgctttttcccggtgcattctacgagcatttacttcgttcagttgagtctagggatgtgtgaactatatatgaagcgaactgttgtacgtcgtccgccatgacgtacggactgggctgtgtttcctaacgatccacacgcaaacagtgacgtgattgagatgtgtgtatcatccatcaggctaccttcgcagcaaatcttcgttattatctttatatattctatttgtcacgtagggtgatgaggtgcaccacctgtaacatacgatccaaccgaataagccagtggatcgtccggttgaaccagtccattacactagagatgataatggataaaaatccactagggtatttcttcctcaa

SEQ ID NO: 96562 - DNA, 877 bp, Zea Mays
ttatgaggcagggcgactgaccaagtccccgccgagcaagtctacgaggcaaggtgaacgaccaagtccccgctgagtaagtctatgaggcagggcgaccgaccaagttctcgtcgagcaagtctgcaaggtgaggcgaacaaccaggtccccatcgagcaagttgagctggtcgggtggccgaccaagcccccgccgagcaagtctacgaggcgggatgatcgaccaagcacccgtcgagcaagtctgtgtggcggggtgaactaccaagtccccgtcgagcaagctgagctagcgaggcggccgaccaagcccctatcgagaaagtctataaggtgaggcgaccgaccaagcctcggtcgagcgattctacgaggcgaagcgaatgagcaagtctccaccgagcagatccgcaaggaaggaacccggaccgatgctatcgacccacgacagccgcaacaagacacaacatcaccaaacaatggctagcccataccaatagtaccaaaagacgtaagacaaacacgatagaacaccctcgagtgtgtcgaccgatatgacctcacctactcgcgggaccgatcaactccagtcacggaggccttagaaccaaagtctctacagtgacccatattccagaaaggatgagataataccccatacctggcgtatacctacgcgtgcttgatagtgacgcaaggggtatgatggaagatgaatatgtatcaaacacgaccttgaaccttaccataagctcactttgcggaacctgcatggtaccgcaacactggcaccaagcaagctacaaggacttgtatatcgaacagacaagatgaaacaccatactaggggtatgacagcgcacgaccctacggac

SEQ ID NO: 96563 - DNA, 467 bp, Zea Mays
caagtttggtgggaacaactcagcggataccgatgaggacaattggtgaacatgagcaggacacaccacacattctcgaaagccatgtaagttcaaaggaacacacatgtatttgctatacagtccgtgcaagttatgatttaaccgaatacacatgtattatatatatagtccatgtaatttatgaattcctataaattcaccatgctgcaatattaatttttatatatgtgcactgcatgatgactccattaattgaataggatgatagtatagatcaacgattagtacccaaggtcggtatgacatttagtaatgtggacgaggcgtaccaattctatagccgatatgcatatgaagttggatttccattgaagagatatagggagagaaaaaattgcaaatggttgaattgttcaatggaaggcaagcgtgccgaaagaggatatggtaatccaaaagtgcga

SEQ ID NO: 96564 - DNA, 435 bp, Zea Mays
aatgcataacatctcagtagaggcaatgatgccgcccatgaggattaattcggttggtggcaaggtgcaaacagataaaatatgctcaaatataagggtggaaataaaggggatggggttccccagcgacctaatagtaatagacactcctgaggtagatgtcatcctagggatgaattggttaatgaagtatgaagcgaacgtcagatgtgacaagaggaccgtaacattgaagtccccgtccggagaggaggtagtggctgagctaaagatgcctaaattagcggagggaatttgtcaccagatttcggttgatagtaaggaggccagcccgctcgaggctatcaaggttgtgtcggactttccagatgtatttcccgaggagctaacgggcatgccacccgagagaatagtcgaatttgccatagagcttat

SEQ ID NO: 96565 - DNA, 541 bp, Zea Mays
cccatggtcctcttcagttttctaaaaatctgttcgccagtttcaaaaaccggctcaaccggactaaaaaccggctcaaccggtttttgcactgttccctctctcactttctgacctaccagtctgcctgtcagtcctatcagaaaaaagtcatgtgcagactgttggaaaatcggttcaaccaattttgggccggttcaactggatttggaaccggtccactctccggctgagttagctagtgaaccgagaaacacctttggtggaaaccggttcaaccggttttcagaactggttcagccggttttcagtcaggattccccaacggccaccaacttttgggggctcctttatatacccctcacactctctctcttcattcacttctgccctctccacgaattcttggctgaccaactctcaaacaagagcattcaatccacctctcacacccaaaatcgcatctccttcaattgattgaaggacccttggtgtgaggtgaagtcggtctaactcgttgttgatttcatctcgattctcc

SEQ ID NO: 96566 - DNA, 415 bp, Zea Mays
agaatttaaacacaaaatatatgttccatccgtcctaaaaaactggtctgtagtttataacaaaaatactatcaacaggtatggttatatataggaatatgtgaaaggttattttgaggaattcaataactcttatttaatatcattaatatttatacatttttaatagaaaatggtcaaaatgaagattgtttgacctatcatcggagtgagaagtataccatttttaggacggaaaagtatacactaagattgtctctagcggtttctctaaagggccccttgtcctatatctggagaaaattcttctcctctatacgctctagcagtgtcttctagatatagatgatgtttctctatcctctctctatatagattctctcttctatctacttattttatagcaaaactaaac

SEQ ID NO: 96567 - DNA, 560 bp, Zea Mays
cccgaggactcaggactgcgatgaccacgacagggtaatggagcagattcccttatctattgtgtgtgtatctattttcacaatattagagtaaaaaccaatccttgtttcttgtgtagattcagtcacgctagagagtgtatttggtctgttagttattctgttgcattgctgtgaattagatcctccagaacgttgttgtcgtgtttctattttccttaggaagtaatgttgtgtttttatttttggttaattctatacgatcattctacgattgatagggtaatcctgtactcctgtctccactctactcaatgcctgtagttcttctgacctgaggcagaatttgggacatgcgtgacattacggtttccatcttcgaattgtgatacttttgacacacataatctggtgttcttaagtgcccttttaattttgatgccttcctttatccagtgactatagtctataacatatacccatcctataatgttttatgcacttacagttagacctcatcttagcatcgtatgcatagatgctcacctaggccttacgca

SEQ ID NO: 96568 - DNA, 302 bp, Zea Mays
cgcaaggcagcctcaccctccaccaccatggagaaaaagattcccgacttcctggaccggtgatccggaagcaattgcgccaacaaggacaacgtaaacttaggggaacttcccaagaataccacctccctacctgacggcgcctgcaataacactgtcttccaaaaacaggatataactgtgcgatactgggataaccaatccatacccaagataacatcgaatgcccccaaggaaatcacaaccagattggccgaaaagacctcatcagcaagaatgacggaacacccctgacaaactga

SEQ ID NO: 96569 - DNA, 641 bp, Zea Mays
gagtcgcccaacttcgagactctcaccgtggacaagctcttcagcaagctcaagtccacaaagattgaccaccagactcgggccaagattgacaaccctggtgcacccaccatggccctggtctctggaggtggttctacttctaactcctcacctgctatgtttgctctatcttctttgttgtctattatagaggagcaggtggagagccttggcgatgaggagttggcaattgtggccagccggttcacgtggttccacaacaactgtatgagtcggtggcgtggtaggtccaaggacgaatgctacaattgtggcaatcccgaccacttcgttgccagctgccccaagaagggcaaataagagtctggcccgcgctaccatcactctggtcggtgcaagggcaagtactcctccggcaagtacaagtccaagggaggattcgacaaggaggcgctcaagaataagtacctttagaaggtaaatgtcaaggagtgtgccttcctcgcctccctcagcgacctcgaccatgaccccgacgatgttgtatcttacttgagcgacgaggagactgagagacgggtcgaggacaagctgaacaagctgtgcttcatcgccgacaccgcaggaggcttctgcac

SEQ ID NO: 96570 - DNA, 860 bp, Zea Mays
ggcaactggattagcaacttagaattgccatcaggcgaatccaattgcactgttcgttgcaacgtatcaataagagctctatgttgacgtaaccaattcataccaaggatgacatcaatgtcctgattcttaaggacgattaagttagtagggaaaatatatccctccaaacttatgggtattctctccaccatttccttactatagatacgacctccaggggattgtatgcaaaaagtatcttttccaatttccaatggtagctgatgtttgataacaaaagctctgttgatgaaggtatgggatgcgcctgaatcgaatagagtcaccgcaggatggttggcaacaggaaatacactcatcataactggagcaccctccggaatagcatgggcatgagtaagattaacctgtccccacctaggtgcagctttgctcctctttctagtatcttgtcggttacacggaggtaacctgatcagcgactgtggcttagccactgatttagggaaacgacagttttgaggagtgtcctgactttccacaattctcgcatgagttggtgttgtctaatatagatttagaacgaatgactgggacatccagctcaggtggaatgaaaggaatgacaatctgtttttcacatgactgaggtgagctaggcagctagggtggagaaaaacgaggataataaacttgttgataaacaaccctccgacactgtttgattttaccagatgattcctctgcaaacttctttcttttagactcctgatgaagccgaatcttgttatcacccaaaacagcctgactgaccacctcattatatctttcagccgaactagttgccatcaagccct

SEQ ID NO: 96571 - DNA, 436 bp, Zea Mays
cagaaacccaaggagactccgcagtccaacagaacatgtattaggcctttgcaactagactcagctcagcaagaccatgcccaatcacaaatacacaatatcgcaaattagcaacaaacatgacataacccccctcgtcatcaagattacccctcgcaagaaggccgcggtggaaacgcgaccaggggtagaggcagggactgaggacctcaacaacaacgaagattctactatcttttccacagtgaaaactcaacacacccaaccagggactgcctagagactaaagcaacgaaggattgaatggccagaaccctgccagccaataaccaaagagtcatcgctcacacctaccaaccccaacaatataaccagcatcaatttcaaaacgaacaccactattacccccaacagtagaaccacaacccatttccac

SEQ ID NO: 96572 - DNA, 602 bp, Zea Mays
cgctagctttacaagtatgtgaattgggtgagaatgataatgaaaacttaaaacacaagaactgaatgcaacaaggtcaaaagaaacactatgcaaagacgctactatttctctagctcaactttgatgaatttgatgcttggtaggagttgggatgcttagagttgttgcaagtattgaatgtgagttttgtgtagctcttgtgtcttcagtgtactggttggggtgtatttatagctccaacaactcatatatgcgttggagtaaatgggcatttactacacagtcgggtggcacactggacccttgtcaaattgttgtagcaggtaaccatttcaacgggtagttcccacagtgactgctccgctgacgcaccagaccctatcacgtcagtgccacgtcggagatagtcgttggagtctgaaactgtcgttggataatgctcggtcccgtgcgctccccatcggtccgtgtagccatcttccaaagtgtccattctacagcctacaccctctccacgtacacgatacgatgctcaccagaccgatccgacgcatcaactgataaagtgcaagtctcggtcttgtcttcatacaccggtg

SEQ ID NO: 96573 - DNA, 433 bp, Zea Mays
tgagtataccctccttgagctttcttgaaaggcccaatcatgtccagcccccagcatgcaaacagttaggtcacaggaatggtcagcagctgctgcacaggtaagtgttgttgttttgacaagaattggcacgcctcgcacttctggactaactcggcggcatccctctttgcagttggccaatagaacccaaatctgaaagcctttcccaccatagtccttgatgcagcatgcacaccacacttcccagcatgaatatcatctaatagctgtctcccggtagccgaatggatgcacttcatgaggactcctcctgtgcctcttctgtacagcaggccccctatgatggtatagtgggccgactatcttgcaatgcgctctgctatggactcgtcatccggttcctctttgttctttatgtacctgatgatcg

SEQ ID NO: 96574 - DNA, 401 bp, Zea Mays
atcaagaagtcggcatggaatcaaaaagcactaacatttccaacccaatcaaagaggatagatgataactgtggcgtaaggatcacagcatcaaacccatattttttgaagtgattctatctttggcaaatcatttgatccttgtactaacaatacaaaccattaccagattgtagggctaactagctcatcgattcagcaaaccataccgcgccaaaacctgaactaaactaccaatggagaccgactatgtactaagcaatgtgttctcacttttttattctaccaaagcaccaagaacaattgaatattggccatgtgcatgcaggccgccaaccatgtgtggcacttgttttcaccggagctgggcagcccatgcctgctccttgccctgcagctgt

SEQ ID NO: 96575 - DNA, 281 bp, Zea Mays
caaacttgacatattcagaacatcctattgaagtcttggatcaaaaggacaggattacccgaagaaaaactctcaagttttacaagatacagtggaaccaacattcagaagatgaggctacatgggaaactcgagactttttagaaaaaatttcctaggctttttagcctcatgtaatttgtaaagtatgtgcaattgttgtaataaaggaatgagccccaaaccacccctgccttgtaccaaaaataaggaaataaagatatgtcgtgtttccttttcca

SEQ ID NO: 96576 - DNA, 325 bp, Zea Mays
gcacgagcacgacgaagagagagagatggacatttttttgtatagatgctcgatcgaattttcctccgttctgtatatatttctgcttgcttgcttgctgttgtgtatcatcttgatatgtcaattgagcttgcgcacgcgtgtttcacgatttcgttacgggcacgtggtcgagcgagcaacaacatttgagttgagaagaatacaggatatctgtgtcaactaaccacaccatttttgagctaatggtacattctccctgaacattttttgggtcacacaccgtttacctactctactgttgttcgtccgtacctatttgttc

SEQ ID NO: 96577 - DNA, 384 bp, Zea Mays
gtagttttagtcttttttttcttgaacaaggaaactaattttggtatagaaaatttagacttctttggctatggagaaggtggagcccttgatggcgatgctagtggcagagacaatgggtcatggagaggatgagtataggggtggagaaggtggtggagcccttaatggcgatgcttgccaccacctcataaaaagataatgcacacaaaatcaagccaaacagagcttaagtgaacacataataactcattagctcagactgcatccaaaaagctaccatatgatatgactgacgaggagagagatgtcgttctcatatagtgacggaaaacttctagaagattgtactagaaaaggaagcaccaatagatccatccacaa

SEQ ID NO: 96578 - DNA, 401 bp, Zea Mays
gaagatctctttggcgtggatgatactcttgatgttcagtatcatgcgcaatgtgtcgcatctcttcagctgcttcgttgatcttcttttgcaactcagacaactgaagcaattttctcttctcttttccacctattagtgtgtggcttcaaggttgctgatttcttggtctagctcctcatcttgtggggttgggctagaagccttcctttttggcttcgagcttctcttaaaagaattccatcttggttggtgtgcagaggagcaagaacagcccctggcgcctttgttttctttgcggcatgatgaaggtggttgttaatgagttcaccggaggtggacaccaatgttggtcacttcttctcaattgctatacacggttgaaaacaagacaacacatg

SEQ ID NO: 96579 - DNA, 441 bp, Zea Mays
aaatttgtccctgtattcgcttacagacatgcctcactgtttaaggataggaactcctttttaatcttcataaggccagcaggaatatggtaattcctgaattgagtggagaattctgcctaggtgatggtgttggcagcagcgtgagcagcacaatatgcatcccaccaatccacaacggggctggtaaggcgacgcgatgcatagagtactttctctctgttagtacattgggctatgttgagcatcttgtccacgtacttcaaccagacatcagcttgtagtggatccagagagttagagaatgtagatggcttgtaactcataaactcccagtgcttatccctgggtggagctggtggtggtggaggtgctagttattgttgttcctgccatacttggcagatttcttggcattcttgcatcatttcctgtcgtatt

SEQ ID NO: 96580 - DNA, 1090 bp, Zea Mays
atcatttccatatgaggacttgagttttctttgtataaaatgttcattagtgtttgtaacttatttgccatttttgagtgaaactataatattttatgaatttttaatattgtggtgttggttctacaatgtccttgtgattagtaaccttgaactgcatgatgtgaattttatctgtttcctttcttacatttgatctatcatatatatgattatgtattgcttaatttatgtgtttgttggatggttgggaaattaatatcatcggtacaaactacccgacaactatccgatacctacccgagtagtatctgttattcatttcttacccgcctggattactacccggtcccgtcctgtatccgttccaaatcttaacaacccgtatctaatcccgtatccgagacatacattaggataggatacaggatgaccatgtatccgtcccgttttcatccctagaggtgcttgtgatcggtaaatgaagtgcccctagaggcctaaacagatgcctcgggagcttaaatagatgtcccaaggtctgaggcaccagggccaacacaagaagtgtcctagggggtaaaagaggtgccccagtgagtgaacgctacccatagaggaactgctcgcaatagttaagctagttcaaatgatcctcctttgtcatcataggtggagaataaaaggaatgacgttgtcccataccccatcatcccgtaggtaaaatcctaaggtatggatctcacataatgaggatgtctggtggctccccacagtgggtagtcatgagagaacggtgacctactgcaccttgaggtcgatcaacttctagatgacctcgaagaaggcatttatttatatcatcaagggtggatggtggcactccctatggtgtcgatggcataagctactatgccaacgaagaagacgtcttaccaaccatcacagtagtagcttccaaaccaaagatctttgatacaagatattatggcggtgactagtgttgagggagcacaagggagctggaggattatggggaggctatactagcgcaaaacaaaattttgaccacataaaccaagatctattg

SEQ ID NO: 96581 - DNA, 379 bp, Zea Mays
aaagtctcaagacgtctgatggcccctgagtagtgtaaatgtccaagaaacaaacattctctttcgagtcatattctttccgcggaaagcaaaggggtgacagtgaggggatggcgaggcgcaaggatggctggggcgacggcgacaagatcaagattggtgtctgcgtcatggaaaaaaaggtgagcggttggacgttggagaaactaatgattcgatgcttgtgtttcttcttgctaatttgattggttttccctgtggaaacttcgtaggtgtcgtgttctcccatggaacagattcttgagaggctgcgtgcgttcggcgagttcgaggtatggctcagaaatgtgttttcccggcggattatcctttgcgtccg

SEQ ID NO: 96582 - DNA, 481 bp, Zea Mays
caaagacaaggcgtgaggcctcaagtgtgccctggaactgtggaggccgaatcagctgagcaaaaatgtggcacaagtagagagcatatggtagctgacgacgagcacgcataccatccaatacggtgtccttgatctcacaaataaggaaatcaacaacgtcaaactcagagtgagagaccagggcaccaaggagccatagctggatatatgtggtagcctccatgtatcccatccgcggcagaagtgtccgtcgcataagctgaaataggaacttggctgctgtagtgaaatttgccggtgagcgtcgtgacccatctgagaagggcgggcgaaatagagccgcgatgtgagctgtacccggagccacacagccatgagggcgacgaggagggtcagaggtgccgtagcataagctgtgaagtcgagtcgacgactcgtgaaaaccaaagagctagcgaatctggctggcagtaatagt

SEQ ID NO: 96583 - DNA, 932 bp, Zea Mays
tctagtcgaagcctgtcactacataagccttgttctagtgcacacaagactcggacgaatacctacagtcatttgttcgaaggtttctctgccttcgggctcaagcacctgcaacctaggatgacgtcgttattgaagctatggtcaaggggctcaggccagatccagtagctcagtactttgccaagaagcctccccactccctagagaagttgttgcagagatggatgaatatataagagctgacaatgatttctgccagagaaaggaggagatctacagataaatcaaagccgccaggggcttcggaggaaggttccacccaagacatgtttgaagtatccataacccaacacaatgtgaagagaagacaatccaatctcaggggcactcaggccaacaacaatagggaaacaatcagtagcattcctcttagggtattgcccaccagcttcgagaggatgaagaggaaaccgaaacttcggtggtagattcaatgcacccctaagaaaaccattctacctattttatggtgaggacaaggaccacacatttaggacttgccaccacactatccacaagcaaaaggagatcgcttcggcaactacttagtcctctcagccgaaggaggtgttcagtatatcttctactgttcaccttatgttccacaatatgtccaccctcaactcctaaaacctaggctacatcagcctttagcctcaaatgcttcaagcaaccctatgatgagtgcatggtttccccttgcctccttcatcccacggcaactctgtatgaccaggtcccagttggtcatcccaagctcctagtgcaagatatgcaccaaaatgacagaagggagggctttgaagctcgtaccattagcagtatagtaccagaaacgaagcatatatactaagaccccaagggctggg

SEQ ID NO: 96584 - DNA, 372 bp, Zea Mays
ctatttttgctaaaatgctagtctatacatgctaaacaggccttttccagtgatatcatcatcgctactatgtgcccccaccctttcacagcccatcagatgttctccctactacgcatggatgatagcatttctggctccctacaaccatggctccctgcccaggcaccagacacctctggtggtctgttgttagataactcttgctagtcccaatagtcccttgttatttgtgttttcagtcattgtcaggttattcagttagtttcagttattgttcagttaggtgttagagtagtcagttagctcatgccagaatttacctgtgctgagcgagtctcacggagaactgggtgtcatgtggaccgtggg

SEQ ID NO: 96585 - DNA, 444 bp, Zea Mays
tcttcaaaagaaagatgttatgaaaaatccatagaatgtgtgggaaaaataaaaactagcttcgccaatgttggcgcatattcaagtgaagacaacttcgtacggggcgatcccaaggggccaattgagtggatcagcagcgaggtcaaagcctttgaggagactttaaatgaccgtggggacgtctgcgccttctcaggtgcgaggggaattgcgactattttggagaagtcaagttgcgatcatgtgaaagctttggcccaagccgaagctactttatctattgatgacacgaaggacccctcggccgaagcgagcttagttggtggaaaattctttactgacatctgggaaaatggcgaccgagggatggcccatgaaataataaaaaaagagcgaaaaagatactcacgatgcaaaggaagcaacgaaggcaactgaaaa

SEQ ID NO: 96586 - DNA, 564 bp, Zea Mays
cacctctgaccctcctcgtcgccctcacggcggagttgctcctagtatagctcacatcgtagctttgttccgactgcccttctcagatgggtcgcgatgttctccgacagacttcaccacagcggccaggtttctatatcagctcatgagacggacgcttctgccatggatgggttacagggaggctgccactcatattcagctttggctccttggtgccctagtttctcactcagagtttgatgtcgtggattttctcatttgtgagatcgaggacactgttctagatggtctccatgctcgtcgacaactgccttatgctcactatctgtgtcacatctttgctcagctgattcggcccccatagttctagggtactcttgaggcctctcgcctcctctttgggtcctaccgtccagctccagaggatcctgtgccggcacctgccccagtgattgatactcaggccgaggataccacctttcaccagttcgagactcaagtcgtagcagtccctgacgatgatgatgatgactttggggttccacctccgcctccgcctcc

SEQ ID NO: 96587 - DNA, 398 bp, Zea Mays
aatggtatggattcagtcattaccttcagaatttccgacatttcagcagcagggggtgaaggaggactcatagtcttctatggcacatcatgtaccttcgtatcagcagaagatatcctatcgagttttcgtttctcgagagtcgaatccttcggctccggaagagtcttctgtttcttcgaagctttctggtcctccttgacagattaggtagcttgcctacctagaatacttacaacactttttcttttaccccctctggccccttcgtcaagcctttcatagtcaggatactcaaagttgagagcatccataacacggttcaacctccgttttggctgggagccgaaggcagcagtcatcaactggtcttccttcttagtatagttccgtagaat

SEQ ID NO: 96588 - DNA, 503 bp, Zea Mays
cttgcttactctggtatatgtgagtcattttatggaggcacccagagaagaacacttagttgcagtgaaacacatcttgcggcatgtggctggaactgtgaactggacgtcaggtatggcgcagggagaggaaaacagaggccggagcttattggatacattgacagcgatatagctggagatgttgaagaccacaagagcaccagcagcatggtttactagtcaaccaagctaagggtagtggctctgtcttcatgtgtagcagagtacattgctgcttccatggcagcaactcaaggtgtttggctagcaaggctgatggaggagctgcttgggaaagagggtgttccacctctgctgttggtagataataaaactacgatctgatcaagaatccagttttacatgacaggagtaagcacattgagattagattccattacatccaggagtgtgcagaccatggtttgatcagagtcgactacatccgaacagaggagcag

SEQ ID NO: 96589 - DNA, 546 bp, Zea Mays
tcggcaccagtcatcattgcaggtgggcggtctatcactgcgacacctttcgtaaagttcttgatgtctaggcagaatggatggtcaggagggagaaattgtcgatgtttatcgaaggacgaatatttgccaccctttttcaaccaaatgaacctgagagcttccttgcaaactaggcatgggaacttaccgtgaacacaccaggcgcagaatagcccatacgccggtaagtcatgcatttagtattggtaccaaacatgcattctgaagtttgtcttcgtagctcggtcatacgtccataccccttcctcccaggcacataccaattcatcgatcaaaggctccatgtacacgcccattttattccccgggtgtccgggaattatcaacgacacgaatatattctgcctttgaaagcacacaccagggggaagattgattgggataacaaacatgggcagacatgtgtacggggcagcgctcattccatagggattgaacccatatgtggccaacgcaacacgtacattacgagcctcttcggtt

SEQ ID NO: 96590 - DNA, 303 bp, Zea Mays
ctagttttggcacttggatggatgatggtggttgaagtggaaccctagtggtcatgcctcatgcatgcattgtgtagtgcgtccctgcttgccagctatatacatactcctatgcctgcgtttgcgacgactggctttgttgctaaacatggtgtccacattttgtctggaaactgaaatgtgcattccacccagtgcatgaacacgatgacagattccctgattattggtgtaagtcatgatccaatatgctcgttattaattcagaaagactgtcctggcaccaacctccaaccattccgc

SEQ ID NO: 96591 - DNA, 425 bp, Zea Mays
atgatagactccagcgcaaaatggctatgtgtctggacctcacatatagcagggtagcagggctgtcagcacaacactgtcagttgaagctaaaatgcgggacaaggaaagtcaaaaggatatgcgggtgaaagatcaactcagggatctaaaaagaaaacaaggttggtaatccgacttttcaatccaaaccgttcttctcctcgcccacccacatatcccttcagatagcccgtgttcaatcgtcctactcctgcccccacctagaacaatcagctgagtgcccctggtgctcgtttctctgcatttctcggttcctcgagtggcagcttcaattgtggcaagtctggacatttcatcaaagactacccctacccgaagcagaacaaaacaaactttcaatagacttccgggaacacaaatca

SEQ ID NO: 96592 - DNA, 419 bp, Zea Mays
aatagacttatatgtgtaaaatgattaagctagtaatacaaaatgacacggataaaaattagtaagtctacttgttagtccttatttgattaatttaactctaacaaaaggtaaagcgttagaataattcaagtctctagaacgcggcaatttttgaagtaaatagaagctgaattttattaattactgttttgggctgcacgcgctgtttttgtcgtgctgtatgtttgatgaactaaattgtattttctgtagatatgtgctatagaaaagtggtagataactttattatcttgctggtgttaaaatttgacagacataagtctgatcgtttagcagttatgctttttacaaattcagtaactgaatctgtccaaattctgtacagatttcagaaactgcattgtttgcttaagtta

SEQ ID NO: 96593 - DNA, 399 bp, Zea Mays
gcctctccctcgctcggtaagcagctctctccctctgtctattcaatccattcctctagctgtgagaggctgtgccaccccttttgtgaaattttccaattcctgtcaaatccagtaaatccaaatggtgaaatgtgttcaattgtccccattgagtatacctgcaggtttctagctccttcgggagggttttcatacctccaatggccatttccctataaccctaattcctcgccctccacgtgctcggtgaaatgcccaaaccagccaaaaatgctccaattgaacccaaatttttcaggcaccttcgcaacacttccagtaacatatttgccaaatttcacgccaatccgagattcctggcttcaatttcactcaattccccgttttgagcgatcg

SEQ ID NO: 96594 - DNA, 342 bp, Zea Mays
gtttgtgtatgtgccatgtccccatactggtgaggctatttgtgatgctctctacaagtgtctccagagttggaatcttgattgcagggtatcaactgtgacccttgataattgcagcagtaatgacaccatgattggtcttatggaaagcagattgggccaggcaatttgttattagatggcaacgtgttgcatatgcgatgttgtgcacatatcctgaatcttattgtcaaagatggattggaaataattggtccttctgttgtgaaaatcagggacagtgttgcttattggattgctacacctaaaaggtatgaaaaatttatgaaaacagcccaacta

SEQ ID NO: 96595 - DNA, 624 bp, Zea Mays
ctcgaaggcagaagatgaagctatgatgattgccttcggtgctcgcggcaagaagatattaagtagagtgtttgatgtcattgggttcgtttacccagactactgctattccatccagaaataagggagaaaaggaaagtcgctacctcagcatctactggtgtgtcaaagtcaaagaaaatcaaggttttgacatgtaacccaggtgcatcgagacggacgatgtgccgaagttaattgaaagggtgaaaacaaccgccctggccatagagactgtttcagttgtgcctattgaaactattgtggacccaaccacagagctagagctgaaaaaggtagcagaaagagtaccagagtagccgaagatgaaggggacaacactagcgaagccgccagctaccacaggaactccgtggaagaggaggatggctactgtattggaagctgttctagaatctgtgaaaacgccgcctccttcttctgccgaagcttctggcagtcaaactgaaaatgtcccagagatgattactgccagtacctctgctcatgccgaggcgggaccttcggaagttgcaccaggaaatcttacggaagagagccttccagagaaaccctcggcgcctg

SEQ ID NO: 96596 - DNA, 842 bp, Zea Mays
gtcgtctgcttccttttgagcccttaaagctttacttagaattaagccctaataacaaaaaatatatgtgagaacataacaatagcaagaaaacctacaaacataggttactttacaacaaaagtatatatacctttaagcttttataagcaaggctatctgcaagatcatcctttgacattgcagatagaccgagctcaagcttcgggaatcccaagttcctcatcatttcccgacaaacggatatctctttattgtccgataggcaatagaggaaatcatattcatcagtgccgctgtataccaaggatccttgtgggtactttagatccctggcatattgtctagcttcggcaatctgctcttctgacaattgcttccctgaagcatgtcgcacgataaactccatcccctcggcaggtgctttggtagcaggagacactttctcacgtacactttctttttccaaggttagaggagcagcccccaaaggatgtgcttcggcaggaacggagagtccagcctcagaggtagcctgcgccatgtcagcttcgtcagatttttctaaggctttgccctctatgttaggcgctgaagcaggagttggtacttttacaaattccatgacagcatctaatacgctggccattctcctcttcctcagagttgctataggaatctttgatgtcttcggcagctccatctctcctaacggactcagaacctttggttgctctgtcgctttctttagttctggcccttcggctggtactgtcttagcttcaacaaaagcgaagcgacttggctcagatacggaagaagacccctcaataggcctcggc

SEQ ID NO: 96597 - DNA, 1089 bp, Zea Mays
tattataggagaataactttgatgcagacatcctctttagttgttatacaaaaattaaagaaacggcagcccaaagtcactctgtcagagtggtgttgaataactgaaactgaatttgaaatcagaaatggtcacagtggaatggagccaatttggacgcgccatatctttggattcactcgattttgacccaaatatcctatagtaagtttgaagacggttgataggtgaacaaactttattaatgaagtttgctctgtccttaacaagaatcaagagattgagtggatggaagggggtcggttcagacaaactctaaagatccagtgcactgaaatatttgaagaacacagggaaaagatctacgacactgtttaatcagatgagctcgagtgatccagtggggagggatcgatccgggggaggataactttggacgtggcatcatcccgcgagctcagtcgtgcgtggctggagatattcaccggcggtcgccgtgactcagtgctttccgccgcggtgtcacccatgccttgctcctcccttactgtacctcttctatacgtggttaccatgcgtaagcaaagccttctgcggtcgctgatcgttagccggaccgccgtggctataaatagcgctatgaaccacggcgaggtattcacatctccaccagtgagttgattgatgcccaaaatttgcacagcctctgccacctcttcccaaattgagtgtgcacggtgaaactatagttccttacagccgtgtagccctaatctcacctcccaattccacctagagccgtcgcgacgccattttcccctttctcggtcaccggcgagcacaagttctctgtgctccgtggccggaccactctggtacggctctacacctctcgagtgttgttttagcagctctgtatacccgtgaagctcatcgtagcagccatttgaccaattcgggcatgagtgaatgggaacgcgggctcaacgtcacggtttccgtcgtgcgcatgggtagaacgttctattagtgtacaaaccaaaattaaaggttgttctcgaatcgcctggggtcggaaatactcacccc

SEQ ID NO: 96598 - DNA, 1137 bp, Zea Mays
cggggtggttgtcgagttgttgttggtcgactacctgatcaagtgagagctcgagtttgatatccagatgtagcaatcggttggaggtatttgcctgcgcgctgatgtatatatgtgtgcgtgtgtatgttgatgttttgctgatgggtgttggcatagggtgtgtagatggaccatcttgtgatgacccatgctgggcctatcgcggggattgctaaagcggtggccgacctatgggcaaaattctgtgccattgatgggggtggtggggagactgccgatgtggttgcctctggctaggttgccagtgaaggccttaacaagtgtcactaaggcggtgaagtatgttgttgagcaaatgtgttatgtaagtttgctgacttcgtcattttggttctattttggacatggataatcttggtttttctagtaggttggtgccttcgctaaccaagtggcgtcgatcgccttcgtcgactccgtcacctcgcaattgcggaccgagaagggggaactggaggctagggtggagtgcttgttggttgaggtgaagagttgagggcttgcgaagaaggctgtccagcttgagggggggagaacatagacctcagccatcaacttggagatctgaaggcgatggaggctatgaggcggttggaggcgctggcttctcaggggcgtgtagccatgatggaggccgaggtgcactgaaggcagggtgagaagaggtggaggttgagactcgggttggggtgggctcgagctttattttgcaaggcctactacgatctaggtgttgagttggtgcccttcgatgaagcggaggaggggctcaacacccatttccttggttgtcgacgggagttgagtaacctacccacgatcgttgccgagttgatggcttactcatctcttgttacctgcgagggcgtcgtcaacactctctcgtgtgaagggtgcaaccattttgagagcttctagcgcagttactcggatttttaccgtgaggtgttctgagtcgaggacctatctctgaagatgtctgctggtgcgttgtttgatcggatgtggggttcgcatggatgctctgttgttcaggagagggccaagcgggcgatggagcaggttgttttgcga

SEQ ID NO: 96599 - DNA, 1011 bp, Zea Mays
actgcactctgtgctcactagtagatttttgttggatatttctcagctttgtcgtatttccattatacaataaaagaaatgagggtactttagacttggtatcatggtacatagatgatactaatctttagagttttgaacatttgcaaaaactaaagatgaatagaccaaataaaatttaaaacttcatttggaaacctctctttgcatttcaggcgttgtgtgattaacatggtatatgaaaatcgaggtaacaagcatctgtagattaaagtacaccaaatctagcacttagggaatagggatggtgaggagactttttttatgacctgaacaaacttctatgtgggtctgattcacaataaggaaggcaaaaggctccatttggtataacagcaaaaagagtaatgtttgacatgtggtgtgggttagctgagatttttgtgctgttttttgcatcacaagcaaaaggaaaactgggatttgaaatgtaaacagcctctagagagaaaagggagcctcactgttctggaattggcttctgtatctgtcctggttcctaacagagacttagaatatgactctttgagtactgaagatagataaatatttatatatggatgcttactagaaaacatataagcctgttaaactttagtttctggtatatgatatcttgatcaaggatcagcttttgccatttcttacgtcatgccataattattaaaaaaaagtcttattgttcttctaagaaagaagtggcttcttattcagtttaaacaattaggcagttgatgctgttgtatgttgaacttgcgatattggagtatctgaaattagttgatataaaccacgctcctacaaaaccctacttttgctaggagaatttgaaatacttatctgcttcaatgttgcctccttacatgtgcttagagaaaagcaatgtgtgattatagtagtgcactagaaaagcagacgctaggttttgccacgccctaataggtccagaag

SEQ ID NO: 96600 - DNA, 411 bp, Zea Mays
gccaatactagcttgctcgatgatcttccctttatctcaccttgatgcgtaggtaataattagggtgccaaggtcgttaatcctgaatcagctctacatctcctccttgaatgtgtcgagcatcttcttgtcaccaccgattatgatcaagtcatcaacgtatgtgcccatgatcaactatgtcacgttatcaccataggtgtaccatgtacacttcatgttttgggactcgtcgcttgaagccgagtgtgtctagtatctgatccaacttggtcttccaagcacatgaggcttgtcatagtccgtatagcacctttatggaggcgcaacactttgctagggtgccatttgttgatgaagccagatggttactacgtgtagacgaccttatgtatctcttcgtcaaggaac

SEQ ID NO: 96601 - DNA, 868 bp, Zea Mays
ggcgagctcgtaccgaccagataactcaactaccggtgctccggtgcggttgacacataatttgacctctaacgatcctttcccctcaattaattgcaagattctagctccgaaacactctgtccacggtgacagcgtgatcaacggacaacccgaggcattcccggtgatctagcacggtctagttcaattggccgggtcgagaagcattaagggcatacaagagtgctaaaacaagagctaggaaggcgtgatcggacctatgaagggctgaccgcggtgagctcacacacgcggtattcttgaccgatttgggggaaatctcaaattgaagcgctctggtggaggatctgaggcacgggctggtgtattgggtgcgtgactacctagcggagccgatggaacgctcaatttataggaaccgagggcggtggctcttgaatatggcatggcgcggtggcggccggagagagggactgagtcactggagcgatgaccgtggcaaggccttaggtaatagaagggatgtgtattatgatcaattgtgatgtggtaagattgctgatggcgtggcataaccgcgaggaacagcggcacgaaggtgatggtcccgtggccacgtcgccggcaagtggatgagcgacagagcggctactgtgctccaagttcatccacggcgggatcttttcacccggggattgttatctgcgtttaactgggcgtgaatcacggcgccagcgtgaatccgagcgcaagatcactggcggcgagggggctgaaactgagatatttctgcagacattgtaccatcaggatcttattcatctatctgactgatcgttttgtaagacctagatctctgatttct

SEQ ID NO: 96602 - DNA, 681 bp, Zea Mays
cgattcgtgctctctggtgaggggataatcacggtagagtaaagatcttggcaccagatcgactcgggctcggtcacggctaagctcaccgtacccacttgctcgtcgatctgtcgggatagacctcgccaccgttggccacttaccactgtgcgccacgtgctcaagcgttgtaccacgtcgctgtgaatcacgtcttgcatgcccggtgatcaccggagagccgccacggtgaaagccactaagcttgcgcgacagtaaccttcttcctctccgcccgccagcgcatcttcacgaaattggacgccaccactgtgggagcctataaattgccgaccccgcctgttccgctaagtaattgtgcaaccagtaaagcaacatgtgcctcaaatcatccactagagctccctaatttgggatttcccccaaatcaatcaagaacaccgagcggtgtgacctcgccgtggccaacgagtttcaggtccattcatgtccgctgtcctcttgtttcagcaccattacttgctgctgatactcgctgacccatcctattaagctaggaagccctagatcaccaggaacgcgttcactcatccgattgttcacgctgcctccgtgaaccagttgatgtagagcctcattggtgaaattgagtaaggggaaatgattaagagggatcca

SEQ ID NO: 96603 - DNA, 281 bp, Zea Mays
cttctctggtgagacttccctatccctctctctctgttcttccctgactagagctctcactcaaacctttccactatttgattcaaattccaatttctatcaaatcccatgaatccaagtgcatgattgagtccctttatgttccttgagtactcctgcaggtttctagctccttagggagggtttcacagcctcaaatagccatttctccaaaaccctaaatcctcgcacaccacatgctcggtgaaatgcccaaaccagccaaaaatgctccaattgaa

SEQ ID NO: 96604 - DNA, 501 bp, Zea Mays
aacccagcccccgagggtgtttaggtgggctctctttcccatgcctccatggatgtccacgttgggtcgtcccctcctcggtccgatggggcgatgactgtatatgcttctacaattttaaatggacaagtcaccttagaggtcggcgagcttgatgcgaggagcctgctacctactggaggggctaagatcacccctgataatgcccttcagattgttcctgctgatcttctctcgtcgagccatgacatggctcctcctgccttgggtctgccactgttcctctccaatcttcaggtgagtcgacctctggctctatgttgttcatattagcaaattatctttcttctgctcatctgtctttgatcacaggcttttgtcgatggaatgtctgctcagctgagatcctgtggtgccactgttctagagtaagctctatctctgatgcagtggaacccattattgttccagaaatagatcgatgacttgaaggcatcgaac

SEQ ID NO: 96605 - DNA, 622 bp, Zea Mays
tgaggctctgtcactactgaagggctcaacacctttggttgttcttctgctttttctctatttccggctcttttaccgcatcagcactagcttcggctggcatggcagggacagttttggcactctcaataaactccacttcctttatcataggcaccacagctgtctgctctgaagattgtagcttcagcctacgggtcaggaccttggatctcttaggcttcggcgcaccaaaagaagtcgaagtggaaattttttcctccttactttcgagcaggaaaacaataatcaggataaacaaacccaattacatcaaaactctatttagtcttcttttttctcgagcaccgaaggcaacggtcattgcttcgtcctttgccttcgtgtaggctcccaccagctcatcattggttgcctcaatagcatctagccaatcgtcatttggctcgtcaaactggcttctataccgaaaggtgtatctaagataaaccaaaccaccttggctggagacagcagcagtttccttcggcatctcccactcattcacaagaggccataccttgaaagcaatgtgttcttgtaccaaatccctggtaccgatgtaagtacacacggtgttgaa

SEQ ID NO: 96606 - DNA, 474 bp, Zea Mays
gcaagtgttacccttcttgcattttggtcccacattagaagcaacaactctatcattcttgcaatataccacatatgaagcatcaaatgtgcaaaataacatagaaggaccatgagatgaattcctatacttaggcgcatgagaaacaacatgaatacggtgctcgggtctaccatgaacatgtgaagaactagacgaagcaatcatggcatgagaggaataaatgacatcatgatgcatagcagtcataacatgatcaacacaagcatcttgatgaacattacgagcattcttcacattagcataaataaaagcatagttctttctattatatgaagaatgagagccactagccataggtgtcttccccttctccttaatcaagctggggaccttatggctctttgtgtccttggctcccctatggaagccaagtgcatcctttatggagggatatctaccaattatgtaggc

SEQ ID NO: 96607 - DNA, 648 bp, Zea Mays
gggatggtggtggaggacttaccagtgtgtggaggggaatgaggaccgaccgatttccggtccctctgtggtggagaagaccaaggcggtggcggctcggtctatgcggtgcagaagctgaagtcgacggcgggttggtctctgcgttggagacgctgaaggagaatgcggatagaatctctagggttcggtcgccgcggtggagctaagatggctcggtctctacggtggagaagaacaaggcgacgatggctcgatctccgcgttggagacgatgaaggcgacgacggctagaatctctagggtgtggctgctgcagtggagcgaaggcgactcggtctctacggtggagaagaacaaggagacgacgacgataatggctagggttcggccgtagcgtgcgttgcgggtgaggtgagctgaataattgcgtgctcgtgggtggaatcatgggcccgatacacatactctgctggacgaaatctacgtgaaggcccatggaccgacacgtggattactgtttcgtaaacggaaacataagacatcgtaataccaatatttgtgtggggactaatatggctgcccagattgcgggaacacaatcttctcgtgggctcggatacccaaaacatgcacataccataattg

SEQ ID NO: 96608 - DNA, 428 bp, Zea Mays
aaaggggatccccctgccgcacaccacgcctgtggtaaatcttgtctgattgttgaccattgatgatgactctggaggtagaagaaccaagaattgcggcgatccaattacgccacctttgggggaatccccgggcttttagcacatctagaaggtaagcccaatttagggaatcgaaagctttggatacatcaagcttaacaaatagagcaggctggctgtttttatgaagcttcctgatcaccctttgaacatataggaagttatcgtgaattgatgttttctgaatgaaggcgttctgagcagttgatacgatctcgttcattcgcagtgctagcctgtttgccagaatttttgttatgattttcatgaagctattgataagactgataggtctaaatttgtctattgtgtcagagacctctctt

SEQ ID NO: 96609 - DNA, 280 bp, Zea Mays
cgattggggagtttccgtcctcgcgcatatgtgcgggacgcgcttgctctttttcgggtcacgtataaatgtggttcatgaacaggtgtctgttggagcacgaacaaacaggttttgccccccaaactggttttggggagttttagcttggccttttagagatgctctaattcttgacgcagctagcgacaatccctgactctataactctgttattagttggccgacatcgatctcaagtgaaaacacaccaagatttcccatgcatttgccctgtgta

SEQ ID NO: 96610 - DNA, 277 bp, Zea Mays
aatcacatgcaccgaacatgtcttgcaatgttatatgttgcctgttatgcattgtgccctgcttttttgcaacagcatggttcattatatatgagtgctgctttctttctagatagcatgcctgaatgaacacactgctagcatagtaggccaattcttcaggtggtgatagctattggtggcattcatggggcctgcattgtacagtttgggtaaatggtagggtgggtgatgtcgaagccacaagggggatgagagatgggttgttggtaacatg

SEQ ID NO: 96611 - DNA, 336 bp, Zea Mays
tacaagaagaagggtgaagcacacattggaatggaatgggattgagtttgctcatcatccgactccaaagatggactcgctgcttctgccttcgtcaagtatcacctcttccccaaggagcgtcatgtctgcctcatggccaaggagaagaagtaatactctagacaaactcctaaatacacttcttctagcgatgatcagtctagtgatgacgaggtggattattgtgatttgtttaaaggtttagacagatctaaaatcgctaaaactaatgagttgattgatgctttaaatgagaaagatagattaatagaaaagaaagaggacttaattttt

SEQ ID NO: 96612 - DNA, 1554 bp, Zea Mays
gaaagatcaccaacatcttcctgaggatacaactcttgctgatcggaatcagaagccatcatccatggagggagatggtaggggcttggtttcttaggagttcggtggtattcaatcaaaaagacagtgggtttgcaagagacgacatagagccaagtcagtttctgctttggctaagcggcctgcacgatcggtgtcacctgtagtgggtgataaaccttgtatcatgcgatggactcagcagatgaccagagcagaggatgatctttagaaggcagtggtgattactgttatcagcgatcatgagaaggtcccggttgaagagattgctgagttgattgctcctaggctagagttggaagatagctccttgataattcgacagtcttcagagtcaagctacatcatgtttctacccaactgtggcatggtggatttgtgggtgggcagttgggccttttctcagggcagccactttcactatcacctgtaagaaaaggtctcgttttttgaattccaaaggtgttgtgttacctaccttattggacgtagagcttcagggaatccccatccttgcttgggaagccaagaccgtggaacaattgcttagtccttttgctagtgttcatcatgttcatccagacaccttggagctaaaggatgtggttgtttatcattgttcttcttggtgtttgaacgtgtcactggtaccagattcgagagagctttggattgttgagcctccctttgccgttgatggtgaatcctatgacaggagaatgtttatgtatccaatctgcataacattgtcgtctgcccctcggtaggatggatctgatcctaaccctcaggttattgaagtggacggtgatgatatagggcgtgtgcagcagtgatatccacgttcaagacctccccagtcacgtcgcgacagtgaggaagatggttagtcgggacgtcattcatttcatgattgtttgggtccaagagatgatgacatgaagcatcgaaacctgatttatgagaaggcagaggcagatttaatgtggacagtggaatccggtggggggatcctgtctcctgggctgaaagagatggctgaagataggcaagacaaccctgatgtccttaatcctgcacttgagaaggtgaagaagctgaaggtttactctcgtcaaaggctcaagaacatcctgacactagagggggctggagctcccactcctgccactgcgcttcctccctccccctcaggtgtggcagctgccgacacaattccgtctgaggctcctgtcttagatgttgacgttgtgctggcaactccatctgaagatggcctcccattgtcactttctctacttgagcctggaacgctacctccctccctgtcagatgtggcagcagccttagatgttgatgctgagttggctgctccatctgaggagggcctcccagcgacacaagcttctttggagattagtgcacgagaacaattcatcaacagattgtcacacaagatcacaagcgtcctaccagtcccaaaatctgtcagac

SEQ ID NO: 96613 - DNA, 273 bp, Zea Mays
ctgagtttgagcttcagaatgaccaggcatttatgcaatatgcaactggggtcaccctatcagctggccgaagtagaatttagagtggtagctgagcaaatcagtaccagggacttggtgcaagaatacttgtcgaatagaacatatccgacgtcaagtggctggggaatgccgaagaagaaagaagtgggggaaagcatgaacttgttcgtcttgcttaccgtttcaaatttgaaaagcaattcaagaaaccttgcaaagaatggctggaca

SEQ ID NO: 96614 - DNA, 452 bp, Zea Mays
aggggacctgcactacggcgaagcatgcatagcggcgatgacggctaaaccataacgagacaggtcagggtgaggcagtgcgtcgcacctggcaatggcgacatcgcttccttcctgtcctcccccaagcagttcacggtacgcctccttcctgcattaaacacatgattctaggcctccatccttggatctatgttaatctggtatctatgtttactttttcactcgtggagctgtgtcaaattgactaacaaattgaccttaagtggtatgagtttacatcatatactccatcatttataaaataaaacccatccatgagatcacacagattctgtcagcatcccaaaaaaattttcaactgaacattagcatctaacacatgacattactttgtatcagcttcaaattttgtttactaacacaaaagagaagggaccactaccttgatc

SEQ ID NO: 96615 - DNA, 310 bp, Zea Mays
taaaaaagggacttatcggcattacgataaattttgatggctgagtattctttgccttcatctgttgctatctttggactctagtcacatcatatcaactatattttgttgactaattttggattccgaagaaaacaacaattttatcttgaatcagtcaccaccacacgtataagtggatggtgagggcctgctcattattgctcttccttttgcatcctcgaattcatagcttggtgcctggacggtacgaagcgttggtataggtagtaggtggaagcttttgccttctatgttacccctctcccct

SEQ ID NO: 96616 - DNA, 446 bp, Zea Mays
aagaagactagggttttttccgcacgaagatgggtaaaaacctcgcagcgccgcatgcggctttttatagacaagggaaaacgcctcgggaactcaacaatcccacagtaaaatgtcaactttcaacggttatgtttcaaaaacccccgcggggccacttcaaccgagcgagggcagtgtttcggccatctctcgacaaagacttcggtaccagctcacttagtcaaactggccccttagagggcaagtgttggagcgaaggcgtaccgccccctcgctcgactattttgggacatggataaatcatgatggaggaaaagcgaaggcagacgaagactaatggagcgaaggccctgagacggagggagtgtacgaagcaggcgacggccttgtcggtccccattagagccaggaacggtgaaggcctcaccgactaccgaagacct
